United States Patent Application Publication US 2014/0057251 A1 - sequence listing, part 69

SEQ ID NO: 111028 - DNA, 11680 bp, Cannabis sativa
aaattagactaaatttttttttaaatgctgaaataagtaaagggtgcatcaatacatcccttttatggggtgcattgtagaatcaccctttatttcattatttattattactattattttgtcatttaagatgcatataaatacaatgcaactccaatacctagttttttatattctctctttattttgtttggatgtttgtagatttccttatgcaacaactatgtttgttctaatttagtttgtcatttaattttaaacgcgaaatgatatttccctttcaaaagaataaaaatgaaaaaaagaaataaaaaaaagagtgtgtacatatcactaatctaggaaaatatatgtctaaaactgtaatgctaaagataagattgataatagacataccttattgattttggttctaaattcaaagtttaggaaaacaaccaataaataactaaaatattatattaaaataaaaataatgattgtaattatatttaaattatacacactttttatgttattccgtttaaaattatattttattattgaatgtcattgactcctaacactattaatatttaatctgatatagattcaatttgtattaggataaattttattgtatgtaatcactttttttttaggtaaaactttaattttttagaaaacaatcatctatttataaaattagaccatgtatgaggtgtaaaaaattatgctatattaataaaaaaaataatatcattaattcttaatattgtactttaatatataattacaaaatttgatgtcaaatttaatatttttattaaaattataaaaatataattactttacacaaattttaatcataacaaatattatgctaaatttaatacaatatttattatgcgctaaatttacataatattttgaaatactattggaacacatattttttaaataaactataatttaaactttgcatgacttatttacatctcatcctcttataaacacaaaagtttccaccaagaaagtagattttatcaaattatttattctaagaacgaaaagggcatccaaaggcagctatgatgaacagattgaaacagagaagccaaaaaaaaaaaaaaaattgctagctacaaagaattatacaaatttattaataattactatacatgtttgtctgctacaagacgaaccttattcaaagactccttaaatgcttgccaagcaaccatatagtgatcttgagaattcataccttcctcaaccacttgcattgctcgtttgtacaaatgatcaaaccactgaactgggtttgttatatcaacattattagacccgaaatccggtacatacaaccgcttaaaatccttcctccatcgcggtaacaaatactgaaatgggatttcttcaacgccattataattgagtacgcacaaggcatgtcgacataagaagcctttgaaattgaaacagctgcaaatgcagcgaatttctgcgcctgttttgtcatatactacttcgaagttcctgacatccctcataatttctcccccctcgctttctttgacagtgtatgtcgcaattgtaccatttgtaagaatttgggttatgttgaaacaagaagacatcatcacaacctcatcttggaactttctgaatacctcttttgtatacaattgagaaagttgcaactcataatagcaccttgttttcaatatgggactcaaatctcttgactcaaaatcatcaagagcttctttctgacgcttcttttccaagaatatatcataaatatcgaaaaagtccttcaaagaagttttgtcgtgcacatagccatcaaaaatcgagctcacagactcatccttctgaaaataggacaatccagcaaaaaagatgtcttttgagtaaacaggaacccatcgctctcgatcatcatagaaaatccgaagccactcttgatccctaagtccaaaacgctggatcatatcttcccaagccaattcaaattcctctacttttagagaatcgtagacaatcctaataaaaaacatctgaaatgcctcataatcttgcaatgctcccaagctctcaagaatactttgcactacatttgccaaacataaccgatggtgagccctaggaaacacctctgcaattgcagattgcatggccttggactgatttgttatgatagtctgaggagggcgaccagacaagcatgtaagccaagctctaaataaccatatgtatgtctccaatgtctcatctgcaagcaaaccacaacccagcagaatgttctgcccatggtgattcacaccaacaaacgcaatgagtggaatttcatagttaaatgacaagcatgttgtgtcaaatgaaactacatcattaaagtgagcataggccgccctagacctggaatcaatccaaaatacattccttaaaagcccttcgtcattgaaatccataacatagaaaaagtttggatcaactagctgagctcgacaaaagaaattctgaatgagtagaacatctccatttctaagcttcaagttcaaggacctagaccgatcacattggctgttaatttctcctttatttgagttcgagctaccatagctaactgtatcaatggcaggtgcacggtataacttgatagttcgtacttcaacatcaagtgttggctccaccttcctttttgctccagaatcaatcctcttatgtgacttggagttttgagctctttcaggatcaaacaaatggttgtgctcaagcttaacttcatccaccctccatctgttagattccactaatctcaatcttatcatagctagacagcctgttcttgtttctttcctacgactgttagcatctttaactgttttgaaaccctcacagttgcaacagagtactgcaccccgcttctctttactgttacgttttgtccatgacgacttaacccgtatagcaaatccaatatccttagcatagcagttataaaagttgtaagcatcatcataagattcaaactccattcctacaacaggtggggggtaaaccttcctttgagatgtaccacttccgtcatcaactaagctagcatcatccttattgtcttcatgtccgctgccttcaatgtcgaatagttgttcatctacattattttcatggccatttccatcaatgtcaaacaagtgttcatttgtatcatctccatcgtcttcatggccattactttcaatgtcaaaataatggtcgtttttaacatccattccattttcatggtcatcaccatcaatctcaaataactgctcacaatcattctcaaggtcatttccttcctcctcaaggagattctcactattctgggaaccttcatcaatcttaaaaaaggaaaagaaaaacacgatcacaaatcctattttcctacacagaatgtatgcatattggaatttgtgcccataatcatatcataaaggttgttttaagctaataaagtttgactataataatatatgatcacaaaagctttagcttttacaaaaaacaaggaggaacaagacatgaagagcattaattagaaatacaaggaattctttagtgacatcccaagattacgttattatcattaatttagttcaaccatttgtcagtaactaccaattagaacaaggaaaacgccaattaacttcttacgccgtcataaacgaaattaaggctaaatcaatgtgcaattacaacagctcgatttccaaatccttcataaaataattgtacatcaaagattccctaatttatatatttttcctcacgaattgaacagcaagaactaagaaaacgttcatttttttccctcgaaattttccgagcaaccaaaaagaaattttacataaatgaaattagagtagttcagagagatagagactcactgtgatatgaagattagcgttggatgagagtgagggatcgttcggcgaaaaggcggtgtcgccggtcatgctttaggcggagaacttcgcacaagcgccttctgtcaaagtctgtgattctagttttgccctaacactaagcttgctgactgggcttttttcttatatttatttattggtccttcaatttgattatattgtcgtattaggtcatcaatatttcgcttattaactttttttaaaaagatttcgcttatttgatattaaaaagaaaaagaaaatagtttccttaaaaaacaattatatatgttttttttttcaaaaataaaaatatatgttattttatcgcaaagaattgtcttggtagtcaattaaagattcattttttgttagaaatgatttaaaatttattgtttgtaataattgaactaattagaatttttacacttaaattttttataagtaactaattatattcttgaattttttaggttagaaattttcttattaaaattgttaaatttaagaacttatgtctaattacaattaattatactaacgaggttattgttaatgtactaaatcgtgcccctaaatattaaatctatcaaatcgtacccctgaatttcctgaattttaacatttttaaattttatctttttgaacattcatctatgtcaaatttaattttaaccacctaaaaaatttataaaacataatctagtacatattaaattcaagaataaaagtactaaataattaagttgctaacttaatcatttgtacactttatccatttttagttggaagtatgttttttttttagaatataaataaatttattaaatcaaactattcatgaaattgttaaaaaaatttaatcaataaagcctattttatgtcgactaatttttcatgaatttatcaataagcatcataatcaactaaatttaaatataattaaaataaatgttgatggatcaatctttgagttagaaggtctttttagagcaagtgggatagctcatagtcgtgatagtaatggtcgtttagtggaagcttttcttattagtttagttgatcgtgtttaacttattatagcaaaagtagttgaaattaaagaggctttgaattaaattaagcgtaaaaaattggtaacatattattattgaatatgattgtttagttgttattcaatcaatttataataagatacataagtcatcttatattagtttcttagtttatgattgttgactcttttagcttctttaaattttattaaacatcctacaaataaggtttctcaaatcatttttttagtaagactggtgctactgaacttttatccattatattaaaaaaaatatatttattttgtaaacctaataataataataataattaaaaaataggtttaaatattagtttcttatttaattatcataataaaataatcattattataaaatgaaaaagtttatagttaaagccgttggctctttcacttcccacctcggaatctctaaagctcttacagccacaacaaccagagaaacaatggctgtggcttggcctcttcttcctcctcctctcaattcttcctccagttctccaattacgatccgacccacctccacaacttcaaaaccccaactgctattcacgaatcgcacacaaagtagtaaaagtaaacgaggaaccgtgctcataaccaacgccacgcccaacaaaaacgacaatgataacgataaagactccgattcaccggctttcaacccttttggattcgttaccgataatccctcgagccggagtgccattcagatcgaggagagcccagcagaggctggcaatgtcggccaaatgctctatgtaagctcaatttttgttcataagctttatatttggtatagacccagaaattttttcattgagtttcgtaattttgagtattaaattgggtgttttgattgtgtttagtaattatttttgcttactgctttatgggtttgaattctagaggacagaatataaagggaaggaatatggttccacaatcaaatctggaaaattgagatggtttgtcagagaaacaggtatgaaataaaatattgttttgagtcttaaaaaaactcttaaaagaaacaaactgtcatttcaatggagaaatttgccaaactaacaacgtgaaaatgttaaattagcaaaataaccatattgaatttatactgatggccgcacagtaccatattgctaggaagttattttgaatgtgaagttttttatatttttgttgtgaattttgatcagggtcggttgatagccgaagaggaactattgtcttccttcatggggctccaacacagtcctttagctacagaaatgttatgtctcaggtctgactcagtttcattttgaagccgctatgattcttatcctcactcagtgatgatttcattggtttaatggattatgaaattcttttcttgactagttgtcagatcttggatttcattgctttgcacctgattggataggatttggtttcagtgataagccacagccgggttatggatttgattacacaggttatattaacgttagtggaggcattactagtttacttatattcttggtgaattgttttaatattgtttacttcataacagtttaatcttatgtactttcacagagaaagagttccatgatggacttgacaatttgcttgatgtacttggtgtcaaatctcctttctatctagttgttcaggttggtctactcccctaatagaacaaactatagcaatatgtcgaagttgtttccatattaagttttgaatgttggttggatttaagttttttaaagattaccagtcagttagttccatattaattagttgtcatgcttcgtttgaaggggtttcttgttggttcatatggattgacatgggccttgaaaaatccaagcagaatatcaaagctggcgattttgaatagtccattgactgcttcatctcccgttccaggattgttccagcaactaaggttaataaacaagaaaatatcatctttttcaatcatacaaataaagggtgcatttttttcctcaattctagtctgtcatttctatttttattgttataacttaatcataatcaaatattagttttttcattttcttgtctccttacagaatccccttctttggtgagtttacttgccagaatgctattatggcggagcgctttattgaagcaggtagcgcgtatgtatccaaaagcatatccgaatcttaccataagacctttggtgtcctctctcattttcattcatcgaagtcttgagaaataacctgttattaacttttaacaatgtgctttcttaatttttaccagatatgtcttaaagctggaaaaggctgatgtctatcggttaccatacttgtcaagtggtggacctggttttggtttgtgatccatttttactctgtaaaactcttagattcacttgacaaggtctttaatacatttcgttgctgctaatctgtttttcccattttgtatcaaatgaaaatgctttcattgtcttttctctacacatgtttcccaagaattttttaaactttggttagtcaattcccaaaagacaagcattttatgactaccaagaagcatctcttaacattctggtttgatgttattgtgttgatttttcagctttgcttgaagctgcaaggaaagttaatttcaaaagtatcttaacccaaatagaagacggtttcgcatctgaaaggtataagtttaaaagctacaattatcatttacatcggttctggtttacatgttaaaccaaaaagattgaatatttattaaaaaaataatgtttacattgtgtcactttctgctaactatttctgaattgggcttttcagatgggatgcaccaatattagttgcatggggattatcagacaagtatctgcctcaatctattgcagaagaatttcagaaaagaaacccttctgtcaaacttaagttgatagaaggtgcagggcacatgcctcaggaggactggtaaataagtctgctcgctctggtttctcaagttttcatgtaaaaccttttctttttttcatcaaaattttacatttcataacaggcccgagaaaattgttgatgctctaagagcatttttctgaaggtcaacacataagaaggtataaaagactttctatagaaattgttcccaaataaactctgtatacaaagattctttacacaatttctagacttattttttataatctttttttgctcatattgtagtttgcttcttctgaaaaggcatgggacaacaattgaaagttggatcactctgctaacttgaatctattatgctttgtcttcttgtaattagtacgtgtatataatgccttttaatatacattcagaaaatgcagtgaaagacaaaagtttaccgtatttgtctttatattattcaagcaacaagtgttcatacagttaagttgtggttggtttatctttgatgatagattcaatctctccattgaaagaaaaaaataatcactgaccagaaaataggatttcattcccctacttttcgatttcaatcgagtacaaaatacaccagagtaccagtttcatggcaaagagctacgaaactaaatacgaaggggaagaaaaacatccgtacacccatttctcctcatcatattctccaaaaaacgactggcatggctgttaagtgggctacctacttagatttcttcttgctcttttgattggatagaacctttttctttcttgactttcctgccttggatggcttaccatctgtttctttcttagatctcttgtttttagcattatcctcctcctcctcctccacctcctcctccttgacatcatcaccattatcattctcttcatcatcactttcttcagattttacttttgctggactcttcttcacttgaccctggggcttcctccccttctttccttttgtagcttcagcattgttatcttcatcagcttctggttcatctacatttttgtcggcattgccatctcggtttcctttgccccgagtactttgttttctttgtttactaactttctttgcagcatgatttccgacttccttttgtaactcaggtacaaaagcagttgtctaaacaattgtacagaccagttaatagaaaaaatacgttcaaacaaaccacaagtgtgaaattctgtttggaaaatgacttaccctgccacgagaagtgataaactcgatttgattccctgcattgcaatgaacatcaagttaatccagtaggccaatcgaaacacctgcgttcgtagaaaatttacgcagtagcaatgcatacaaagtgatcaatcaatacaaatatctaattagccgcttgccattggatataattatgttaaagatcagaagccaaaccatcaataaaagcctcgccaggcttcttttcacgggagtgaaaaatccaattacttggaaattgactactatctgctccaacttccactgctttttcaatagcctgtaaaatgaattattggtcaaaatgacctcaaacatcaacaattccttaccattaacttttccgggctttttgccccatcgataatgaaacaaccattcaagtggaaagcggctagactcagcatcaacttgaaccgcataacgaacaacctacagtcatcattctctatattcacaatggacagtgtatttctagagaagaaatttaatagttcaagaacattcaggaataaatttaatctccacctccttgatgcatttgttcaacgtcgcacaacattccctggacagtgtagcagcaggttgttctggatgaattctcgcctgcatgtataaacagaaaaactcaaattaaaaggtaacaagggagctggaaaacggcacttaaccgccaaatgagaagctaaattatgtaaaaatgaaaatgtataaacaataccaacaagaatttcggatgatgaaaattgtacttacttggtatagcacctcatctgcaatccaattcccaatacctgaaataaaactctgaaaaaatgaacaaataataacataggattagaaaagatataataaactcagtacaaaaatcatgaaataaaagaaagaagaaatttttttccaatgaactgaaatttaaccaatctagatagtacaaaaagatagcataacttttgattttgaacgcagaaacaaaaaaactggattataaacagaaatgaagaactaaactaacctgattgagcaacaaagccttgattgcaactttcttcttcttactcaatgatgcaactaactcatcatccgtcatcggctccaggagagcatcaggaccaagttcagatatcggaggcacagacgcaggctgtaaacaaagacaaaattaaacatgttgtcttcccactcaaaagtaagaaaactttaaatcttcattcatcatacatacatctttcagcaatcggactttagcgaatcgcctcttgtcagtgaaagagaactccattccaccatctagctgcaaataaagtgatagtttcagaatagaaactacaaaatccttcaaaagtagatgttataataaaatacgaaatcaaaagccttttcagttagctctaatttctgatgaaaaaagttaatttgttttctcttatgtgtaaatgcaaataataaaactattttgatcccattatatgccaaatgcaacatggaaaatccccatttgtagagcagaaaaattcttacttctacgaaaaccttggaatatttggaaggccactcatcatcttccttcacagcagacctgtaagtaaccaatagaaccatcaaatgtgaactagttcatcccaataccattgttaaactcatcataacaaaaatacattatacacaatcataaatactaaatatacttccattgccataaacattccttgattacgagtagaacccacaacccaccaatgcttacctcttatatttagtaacagcgactccctttatgtatatagcacccgccattcctaaaatcaaataaccataaagctcaatcttcaaactttcaaagaaggaaacaaaaaaagaacaatgacgctattagaagttagaacaactctgcattgttttattagggtttttaaaacaaaatataccgaattggaaggaagggaaaggaggcgaatcaagctggagccagaggttcttgcccttacggtgagcggcgacgatagtctttcccaaaagcgcagcctcgaagtctgaggcggagacgccatcgatgacattagagtcgtcggctacgaccgacttcttgatcttctttccaaggcagttttcctgtatggccctccgagccgcctccacctccggtagctccggcattttggatgttgttctggggttgtggtggtgcccgttggttctggttcccaactgttccgtacaattgatactcggaagtacacgcaacgcaattctctctctcgcttggcgcgctttttcttctctagctcgttgggaagtaaatgggccaatattgggcctggaacattatgggcctataagtgtgtgattcaaaatgatgggcctaaataattctcaagttattttcttgggactatttcaaaaatacacaaaaaaaaaggaaacttacaaaaatactggaattttggttaacttttacaaaaat

SEQ ID NO: 111029 - DNA, 691 bp, Cannabis sativa
tgtaatttttggtgttgtggttggagtagaaataatttttgacaccaaatttggtgatagtgtaacaccaaatttggtgtctctttggagatgctctaaagcgttctttgctgaaacagattaaggtatcgattttaatcttgtgttttcaagaaagggattctaaaactgctgcaataagttcatacaatgggagattgttcacatttctcgaaaatacaatttcatagctcataacactgctaagtgggtgggggagacgaatgttattggtttcttacactcaaccgacatgaaccagaaaattttggatgactacatagaatggaagagagacccaaggtgatccaatcttaagttgattggaagatgttctattttcttagttatgcgcttcttgttattttgtatttttcttgtttgttgtttgtttttgtttttgttcttgaacttcgacttatattatgtttgatattaattaaatttggtgtttagacacctctttttccatagaaaaaattccaacctcaaaagtcatatcttaaaagagaaaatctaaaattcataatttttgtatgaagactttctttatataaaacgaaacagaaacaaaacaaaacgacaagaattggttatagcatctgttgaacgataaaaaaaaaataaataaataaataaatttattattatt

SEQ ID NO: 111030 - DNA, 1041 bp, Cannabis sativa
  modified_base (27)..(38): a, c, t, g, unknown or other
  modified_base (93)..(93): a, c, t, g, unknown or other
  modified_base (994)..(1005): a, c, t, g, unknown or other
agtatttagttacaagttgtcactaannnnnnnnnnnncacaataaatattgtgactaaaacacatttagttacaacaaattgtaatttttgngactaatacttttagctacggattatttagttacaacacaataatgataatttataattagccacaacttttttatcttcagtcataaattttattgtgactaaaattgagattttttatagtgtaattaagcactgcattgcattgcattagtaaagttggttagtttattataaatttgttagaatgaactactatgttaatatgtagtgtttagcttctacataaacacttgatgtacatatttcattaatcaatataagagaatattccttttttattttgcactctaaaattaatatagtatcacagtcacgttacttgtgagctcattttcttattttttcttcttcttcttcttctctcttattttttttatctatgcctatggctcatgttggaggtgttcaaatgcatataactcaactcaaggaaacaattttggtaattccaatcatttctcagtttttaaacaaaatacttgtttgtatttggataaagcaatccatggcaacaatccttgtgcaaacctagttcctaaaattctcacaggaagaagtgagaattataactcttggaggagatctatgatggttgcattgcttgcccaaaagaaggtgaatttcgtttatggcaagttgcttatgccaagaagaagattatgatctatggtgtcgctgcaatagtgtacggtaatatcttagatcctacatattgttccaagtaatattgttgatagtatttgttagaacttattttattaggatctagatctactaacatgtatattgattaacaccttaaagatgaattctctaaaataataaaataaacacatatcaagtttaaaaaatctcacattaatggcagcagaataatatgtctccttccgctcagatcnnnnnnnnnnnntcctttctgtcgtagagtaataacaagatttgagcc

SEQ ID NO: 111031 - DNA, 1382 bp, Cannabis sativa
taactataacgtacatgaccatgaaaaaaaatttgactaaaaaattatttcgagtgctaaaacaaataagagtgcatcaatgtatccattttaagagtgtgctggtagaatttccaatatatttttatttcctttaaaactgaatatctgaagttgctgtgtgtgtaccaaacgcaataattaattttgattgagaggtaatcagattaaaaaaaaaattaatgtgtgtaatcataacttaaaacttatcccatagttagactaaactaaaccttttgtaataatttttgacttggaagaaagaaaacaagtgtaaattgtcggtgattactttctcaaagagccactgatttagtgactcatggagaattaggattgaccgaccctaatccgttgcgtccgttgattaatagttaatgtttgttttttgttttctcttttctaataattattcattccactacaagagagttctgtactgaaagaagagaatgtattatttgactagaaacatctaattaattattttcattattattggattatatatatagtatcttattaattctggtgaatactgaatagtgttataagaatctttcatcgctttatttggagttagctagaaattagttatacaaaattatataatatatatgtgggtggatataaaataatattattaataccgagagaatacgcctattatatataattgagttgattattcatggatttttctcccatgctgtttattaatttagaatagagaaatcgacacagtcgcctagattgacatatatacaagtgaaaattacacacgaacagactaaaaatgtataccaatattgtgtgggaaaaagtttatcaattagatttgtttaaaattaattttaaattatcaacatataatttattttttatataaattgaaaattactaataaatataaattttctatatgaattatctaaaattaattttaaaacaatgaatatatatttaataaattatgacattaaaaagatgatgtaaattaaaagtaagaaaaataaagattttagacaattaaagagagagaaagatgtagtaggcaaatggaccccaataatcaaaatgggaccaacaacaccttttcaagaatttacttagcatgttattggtgtttttgtctttcttccaacaaccttcaattaatttgttatagtcatcttttttgtcaggcctttactacttagtgatctctactctacaccttctagtttctacttagacttggttgccaattgccatgatcatatgttgtcacccatgatgtaaaaactatagggaaatttgatttttttatggttacatttgattaatttttttttttttctaaa

SEQ ID NO: 111032 - DNA, 1243 bp, Cannabis sativa
agaatataatttacttggtcccaagtgtattcttggatagagattctactgcattttgatattagagactttaagaactattggaggatcattgaatcttacagataattttttcttattattttaattgttgtatttaaattttactttttttgatttaatttattttgtaaaagttaaatccttacaccatttatctttttttggtgtgtttttgtaagttgttcatctagtcttcaaaagagaaaagttcacattcatgcataagatctaaacttaatagtaacttttcagtcgttcaagtagaaacattagcattaatggtaatgctgaattagtctcacaggcttggtcttcctctttattttgtggagtctgattctttagttttagtttttgctttttcaaagcattcatacttttgtaatgagttgggttctttgttagatgattttgttagtttgctttctaattttcttgaggcatctctagttcatattcatcgtatgactaataaggcagctcatgaattagttgtgcatgcacttaggtggatagtgaaagaaagtttgagttaccatacttaaatgtgaagcatggtccctaaatatgccactacacaaaacatcaaagaaaatatggtggtgtgtttatttagttccgattatacactttaaataataaaacaaaactcatcttaacaattttttttctccctctctctagaaagtcacacacacgccagaccaaaaaatatgctattatgtgtatagtttgtttttaatagatttacacatttgtgtttgtgttttgttgattttttttgccaaaaatagaattttgaatttttttgtatttttttgtgtttttgtctctagttctcaagttttttgcgataatttgcgatatgtagcgatgtatttataatgatagactcaaattgatgttaagaatgaagtttagcgatgattaataatattttgcgatatttgactaaaataaatgtttgcgtatttagtgatgttcagcaatagcttttgtgatgtatttacgatatgagactaaaaactgcaaaacacatgctaaatgtcgctacattacactcaagttttcacgatgattaatgatgattagcgacatactttatatttttttagtctcatatcacaaatactagggctgtacaaaaaagtttgtaaaccgcctaaaccgaataactagcccaaaccgaaccgaaaaaacc

SEQ ID NO: 111033 - DNA, 4283 bp, Cannabis sativa
agagagagagagagagaaggaatgtaaatagatgagatagaaagattaatctcatgtgtattgatgttggtattctcttacaatatatagtgcttatacaatcaagaaacagttacaaactaataactaagtgtactaagatagtggcagtacattaactgtcataacacaaaaccaacacacttaaggtccctaatacaccccctcaaatatacaatgtgagctaggcacaattgtaagtttcgacctgaaagttgtaaatcgaggattggagacagctttggtgaacccattagcaacttgatttagtgcaggaacattaacttgaatcaagtactgcaaaattttctctcgaacaaagtaaagattgagctcaatttatttcgtatgagcgtgtaacaatagattggtaatgagaactacagtgctaaggttatcacaccagataacagggggcaaggaaaattagtttgagctcagtgaacaaagagtatagccaggtgatctcaaataaaacttgagatagactccgatactcagctttagtactcgatcatgagactgtgtattgtttcttagactgccaagctacgaaattttgaacaaaatagatggtgaagcctgatgtactttgacgatcatcaacatttgtggctcaatctgcatcgtaaaaaaatactacatcataaggctctggtttttgaaggagtaagtcatagtcaatggaacctactaagtacttgagtatccttttaacaatattccagtgagtttgcaatgggtcagccatgaattggcaaactttgttgacactgaaagagattttaggtctagtaatgactaaatattgaagttcaccattaatggatctatattattagggataaagggtctccttcataggcagataatcgaagaccattagtcattgttgttggagatggtttggcatcctgcattttggccagacaagtgtagtccttgttcatattgtgttgcctttatcccaagaaagtaggaaagagaacctacatattttaatgaaaactaagtattcaaggcttgaattaagtgagatactagcttggaacactccttgtgatgattatatcatccgcatataccaaagttatggtaataaaagtggatgtatgctagacaaacaaactgtgatctgatttggaggagatgaaaccaagggaaagaagagatgtatgaagtttctcaaactaagctcaaggggtttgtttgagtacataaagggccttgtttagtttgcaaactaaatgaggagtctgtggatcttctaacctggtggttgaatgataaacacatcttcttgaatatcactattcaagaatgcattattgacttaattgcttgatcaaccagcctctggacaatgctagagatagtacaactcgaatggtaatagacttgactattggactaaaggtttcagtaaagtcaaaacatggttgttgatgaaactccttggcaatgaatcgagctttgtacttgttaatggtaccatatgggttttctttaatcttgtatacccatttgtagcctattgtagttctaccttggggcagaggaacaagcttttgaaggccaaaacttcaatatcaatagtctaggaccaaactgcttcttgcaatgcttgtttgaatgaggttggaaccctagaaacaagaaatgatcttggtttatgtatgccaaacttggacttggtctgcatgatgtgagtattgagtatgggagccactgaagtaggagctttctaagaagttgagttgggaacagtagtatgatcaacttgtaaaatagaattagagatagttttgggaataacagacgactgagagaccatggattcaacagaagtggacactagacatctgtagactacagactgtggatgtatagtaggagatgcagtgtgagggatctgtattggacacaactctagatgtagacacaggagtaacatgagatgtttgacatgtgggagggggtttgggaccataagaggtagacgacatgtcagtagataatagaggaatcacgtgttgagaatgagaggaaccaaatctggggaataagggacacacctggagagaccgtgcaactttaggaatctgacctaagagtaaagtgtataaagcggtacggaaagggtgaggcacctatgttttggaagcatacgtaaaggtagtttcatcaaatattatatctctagagatgtacaacctacccaagggatctacgcacttttaattcttatgattaaggctatatccatgaaatgtacatgttgtaaacctaaattggagcttatgcttgctgtagggcctgatgtttggaaaactagggcaaccaaaggtcttgaaagttctgtaatctggtttgatattgaaaataagttcaatgggggattttttattgagaataaaggttggtagtctattatgaagatatatagcagctctagaggctcatcttaaaattttaaaagcatagaggagtgagctggtaaagtaagaccatgttcataatatgcctatgtattcttttagcaagcagtccttctattggaaatcattacaaaggtgttcaagtgatcaaaccgggtggaatttgttgaggtttgacttcttgaacttggttttactgctggttttgacagttagcattctcctctaactaacttaactgtcttgacagttaagttagttatatgctaaccatgcacctataaatagaaagcctctcacttgtgtatagaagcagacataattcagagggtttagagagaaattgagagagtgtttgagagtggtaaatggcctctcttttgctagtttgagagagtcactagtaagactccattgtaacaagggtttcattcctgttctgtaacctctgttcagatcaataaaagctcatcaccacagccaagttaaggctgctttctctcgtggattaagctcgtgatcaccttgattgtgtagcccaaccacgtaagctcttgttgttgttttatgcttccattaagttgctgatatttctggtttatgttttagttttatgttgctggttttatgtccaaatttgtgttcttgatcattgtgcattgttcttggtgttgtgtttgttcttgtttggagtttaagactccaaaaaaatagtaacaaattattaactaactgtaactaacatagtgacagcacactaactgtcataacagaaaaccaccacacttaaggtccctaataatattggaccaatttgaagaggttaagaaagctaaataagtgtctttgtatatataaaatatgttaaaaaatggtatctcaattgcataaaactaaatgatgctcatagactatactaattaaagtatagaaactgataaatagcttccaaagaacagttaattattcaactacaacatttataagaggttatggcggtattacttactggtgtgcccttcacaactgtggacacatgaccccttgtttcccctttgccatcgggaaccggtgcaagctttgagattccaaagtcagaaacttttgcagtaaattttgaatccaacaatatgttgtttgattttatgtcacggtggattataggtggatctgcttcagtatgaagataaagaattccctttgcagagtctaatgcaatttgcattctcctagcaaaagtaagagagcttcgaaacctagctattgtgacaaaataagcataacagaaagtataataaggtataaacataatttgaatagattaattggggtcatctgttacatattcaccattgaagatttcaatcaattgacaacaatcaagtgtactaatggaggcgcacaagtggagagattttagggatagggtgatagtaaaaatggtattatatatatgtaaggttaaggttggatatttacagcaaaactggtaatatttgtagttgttacacataagagtgttgataaaataatcaattcaatctaatctgtaaaatacaaatatttacatttgtgcagattggattggattgaaaaatctaaaatccgtacttctacagattagattttgattaacatgtaaaagtaaccgatctaatccaatccacacattgaagattcattacatgttatcattttttttttgagtcaaagtgaaaaagttttatttaaacactttcaaccattacaatagacttaaaatcagcagagacattatgctgattaaaaacacaatctgacgaaaaa

SEQ ID NO: 111034 - DNA, 17003 bp, Cannabis sativa
attaagcaaaaaaaaaaatgatggcaataataaaagcccatgcacgtaggatcgaatgtcgataccgtcgatctccgtccatttctgaatccgacggtcatggttcagtttccatcctccctgtaaaaatataataataataataaaaaaaaaagcaaccgtttatgaagaatcccaggcacacgcgatctcatcgttctcctccatttcgattttcttcgcatcgcactcttctcgttctgtatctgtaaatttcattgtcaattttctttctaaccaaacatatcacttcaatcgaatactaattatcatatcaataagcttcatataacccaccaaatcccattttctttctcactgtgttacttttttggatcaaagaatttctcgtttttacacccaatcaaaatagaaagtttcagcttcgattccacgccgtaagtggttctacatacgacattcctttgcttgcttaacgtttctctttctctgtctctattctacaacaacatttgctgtatttgattcaaattcctcaatttctggagtatgacaatgatcggcttagggaattccttcttttaaagtttagggttttgctcaaaggtctggaatttgttctatttgtttgggtgattaattgttattatctgtttggtagctcagaaaataataagaagtttgaaaataattcgcatatttatttcgaatcattccattataaagttttcaatttattattattttctaaagcgattttctttttacaggaaatttattactcttttaactgttgtgaatacttgtgatatttgtttgattgagagattaaaaaaattgagacttaccttatcggtttgcttttgttacgattagggttcgatctagaattttttatattattataaatataaaatattccattatttgacattctttatagtttctctctctgttgtaggaaaattttagctttgacatggctactggaagcgacatgggtatgttatctaacctagatattggtatgcaaggacccagtgggagtttagaggatagtattcagactgagcttgaattaattcttcaagagcagcgaaatcggaagatcatggatcgggaaagagatctgaatatgtacagaagtggcagtgctccacctacagtagagggttccttaagtgctgttggtagtctttttgggaactctgatataagagaaattagcggtagaatcttcactaatgacggggttttatcagaggatgaaattcgttcacaccctgcttatctttcttactattattctcatgataacattaacccaagattgccccctcccttgctatcaagggaggattggcgtgttgcacagagatttcaagctggtgggtctttttttgggggttctggggaccggaggacgaagcagatggctgaggatgttgagagttcgtcactcttttcgatgcagccagggctttctgtacaaaaggcggagcatgaactaatggaattgagaaatggaaatggaaggaatctttctaggcagacatcttttgggtggcttgatagagctccaaacagttcaactggaatgacaaccagtggacttggtgcaaggaggaagagttttgctgacattttgcaggtaattactgccgtttgtacttcattttcctttagttttgcggcttgggtgaaattccattttagaaattttatcttgtatttcctttttcctttttatcttcttcatgatttttatttagaggttatattccgtggagttcactactactcttctatagattattgtaggtacaaactagaaactgaaacccgatgaaaatagaactttgttgttctgagtacaatagtgcatattcaagatttagttcactgggctctttttatacctaatttgggttgaaacactttggtgtttacgtactactgttgaaaggatagatttgttgcacttgcatcacaagatgaagtgttaactattacggtcttttatttttgtaagtatttccattaactttaactatcctacatgatgtgcaggaaggagttgatcgaccagcatccttgtctggcttcctgtcacgcccttcaagccgtaattcttttggcgacagtgctgaactttttgacagtctccaaaatggagtttctcctcatggcatggctggagttcaaagtcgcagtactgcaggttcttattccttggcatcacctatgggttcctctatgtcaaggagcacaactcccgaaccgaaggtagttggaagatctcctagttgtggcctccctcctgtgggaagcagaatttcctcaattgagcataagaatgttcgtggtttaaacatccaaaatggtcattcttctggaatgaatgatcttgctgatattgcagctaacctatctggcttaagtctgtcaaatgttagaagtagagatatgaatagtcaggctcagtcccagcatcacctgggccttgataataattctgattttctgttcaaaaccggacataaccaaaatctgcagcaagagctcatggaccaggccaaggctgaaaagctctctcttgcagccaattatgttgatctagctaggcaaaatgggatgttggcaaaccttaatgcatctaagtcaaactccaatatgcaagccaactttccaaaaaggacttcttcctctgccaatctttattcacaagttggttcttcaggttttgggggttttgaaggatcaaatttttatcatcagaatccatctactcccggaattgacttcagagctggtgctttccctgttaatcagcacaatacatctatggaaggtcatcttgatacaggtgtgtttgatgtttcttcatgtttatcagcaactctatatttgaatttatatgcgtaaatttacattttgtttttcctctctctttctctctctcttcccttttcctaattgattttggttgtgattcagcttttacttctagtcaaaatggacaaaacatgaatatcctgggaaacaaagttggccacgatctgcattccccagttattgatccacgatatgtccaatttttgcaaagaacctctgattatccaacacgggctgcaactagtctgggtgatccttctttgataaaaaaccaattttctacttctcattctgatttggaagagcttcagaaagcataccttgagactttgttggttcaacaaaaagaacagttagaattgtcactactaggtaattctggtggtttcggtcaggataattatggaagtgcatcttatagacttggcacaccataccttggaaaccctatggcaaactcggttcttccatctgttggatctggaagtccaatgcttcagaatgaaagatttgcacgtttcaattcaatgaaaaattcaatggcaggatcagttggctcatggaactcagatattggcaataatgtagaaggtcgattcatctcatccttgttagacgagttcaagaacaataaaaccaagtcttttgaactttcagacattattgatcatgtagttgaattcaggtatgttgtcattatttttttccccacttacatcattattcctctcagatttatagtttattcccttccccttatttgttgcagcacggatcagtatggtagtcgctttatccaacagaaattagaaaccgccacccctgaagaaaagatcatgatattccctgagattactccacatgcccgtacattgatgactgatgtctttggaaattacgtcatacagaaagtacggcatttgtcatcttaaatactctaaaaccctatcttttcttccatttagagcccacattaaattttatctttgtatttgcagttttttgagcatggtacagcaagccaaagaagggaattggctagccaactgactggccatgttttgcctttgagtcttcagatgtatggttgcagagtgattcagaaggtgaatttttagtcataatctgtaatcctttcatattgatatgatttcacttcatggacaaaatgttgtatgttggtaagatctaaaaggggatgtatggaggtaaagaagaaggtacgatcatacacaaatgtatatatgtagtctgaaaatctgttagtggatgggatccggcaccatttttttgtaactgttgtgatccttccgactcaatcaaggtgatgtaatagttagaaattttttggacgggataaaaagagagaagaagtacaaagattcttggaggatatagaaatattggagttggagactataggtacatgcagatggggggaaacaactttactaagtagtacatactttttttaatgctccgaagttaatatccaattttaaaaagatatggttgttgtaacagaacagtatattatgatcaggtcttttttaacttcaacgagtcagttgattaatgaagttgtcttcttcttgataagaaaaatgtcctggtattacattttacatttctaccccctcttcatttgtatagaggagatatatttcgcagcatccttcttactcatattttatatgattctaaggtaatcattcttgccatcaaatcagctatcttgacttgatgatgattgcatatttctctttattcctttgttttacaagggaaagctcaattattcttgttttatgaattgtttgaacatggtgtatatgagaagctaatgtttagatttatattacatctatgaagaggatgatgtatctttcttgcagagatgtatatgcataagaaagattttcttggctctcttatgctttaaattttgtcacttgcaggccttggaggtggttgatgtggatcagcagacccaaatggtggcggagctggatggtgcaattatgaaatgtgtacgtgatcagaatgggaatcatgtaattcaaaagtgcattgagtgtgtccctcaagatcgtattcagtttattatctcatccttttatggtcaagttattacactttctacccatccttacggctgccgagttattcaggtaagttgcttggttttctatttatttatttggaggcaatttgaggatattgtattggtttttctgatttgataatttgctactacagagggtcctggaacattgtgatgatttaaatacacagcaaattatcatggatgaaatcatgcaatctgtatgcaatcttgcacaagatcaatacggaaattatgtaattcaggtaagtgaatggtgatcaagtattctattattgaagggtcctgtcctttctggttatatgggtttgaatcccatagcccctttgtggtgaactagacatttcttttcatcttagggcttttcaagacttaaggatattatattgtagaaagacatttcactcttatatatatttttgaaagctatgatccaatatgatcagctattactgcaatagctgtccatagttatttttccttccctgatttcaccttgcagtaagcactctactatgtaccttctctgtgagttcggcactgctagtttccactaggcttccttatcgcaaagcttatactaatgtgatttctagccaactttagccccccttaaaacttaatacttcatttgcttaccttttctggtttgtcgtcttaccgttcacacaaactgctttctctttctacctttatgcggaagatttctttgtttttgttttccccttttacagaactagtactttagttttaaagtttgttcttgattactttgtatcattcttttttcttttgttaatttatgttttgtttgtagcatgtccttgaacatggtaaaccactggagaggacagcaattatacgccaactcgcaggccaaattgtacggatgagtcagcagaaatttgcttctaatgttgttgagaagtgcttatctttcggcagtgctgaggagcgtcaacttttggtgaatgagatgcttggttacaccgaggaaaatgagcccttacaggtatacctgattcttactataaattatattaatctatcatataagcctgaattgataccttttttatagatcaacattattaatatatttttattttttacttatatgcggctatcttttaaaacgaacaactacaacgataggcaattttaatagggtttacaactattctatatttggtattaagctgactggatataaaccaactggattttctggtagttccttgggtttttttttgaataatttaaatcagttatctacatgtgagtatgttgtgttgtttgctcaagcctcaggccttaaaatagattgttgagtattggataacatgaaattttacaggccatgatgaaagatccatttggaaactacgttgttcagaaagttctagagacctgcagtgacgagagtcttgagttgattctgtctcgcattaaggttcatttgaatggtctgaagaggtatacttatggaaaacacattgtttctcgtgttgagaagctcattgcaactggaggtactgacattaatttctatttccaaatatttacgaactgattctttacgagttttcctatgttttattcttactcatgagttttgctcttgtatctcttacagaaaggcgcataagtatgtcgtcatctgcaatttgttcttcttgaactatatcccaatttggagcaaggcattttaatcttgccaccaccaaagagcatgcaccgttttgtacagctaacatggatggtgacttttttaagctcatttacagagatcatttgctgtaaataaacacctacctatagatccacatgaataagatccctgtctacctatttattgtatattaggcttagtcgttatctgactatgagaattccacagaaaagggttgtttttaggctttccggcgagttctcattaactgcccttttgagagtaccaaagttaaatagtttgtaaagcaaatgtcaagtgtaaatggttaaactatatttccaagtgagagaaagggtagagtaaataattctgtggagttctctactttaagagtatatatttacttacgtgtacatatactgcaatcttcgtatggagatttgtaaatttttgccctctttccattatattttgtctcttggtttgttttgtagtcttttacaaacaacctccatttgcaatcccaagaagggttctctgtctatgttgcaacacataatgaaggttagacagatagtttaattgttgctaatcaatctgtcaccaccaaagacaatctactttataactcctttgttttcttaaccaatcctaaaactaaccctacagcttcaaatgctattgtaatctgtattcctacaacttcattacctatgtcttttattccttcaaatgttgtggcaagtcttgtttgcagagtctcttaaccacactatttttatggggattataaatttgttcatttggtaacaaatttaatcatctcaacctccaattcaagtcttaccttcatagaggcacctcattctacatgtctcacttcttcatctaccacttttgtgctacttttaccataatttgtgttcatgttatgttaagaagtaagtattacaagcaaaatattatccaaactctccaaatttattaattgagtcgaaaattaaaatttaaacccaacttgtttataggctaaaatccaaactcaacatgtttatcaacctgtttatgataagtttatcatgttacaacatttttaagacacaattatgaattattaaacatgttatcatgaatttatttaggggtgttcataaaatactcaatccaatctgtacgatctagtccagttaaatttgcatagtgtggatatgaaattagattagatttggaaaatttaaaatctgcacgtgtgtagattagattttgattgacatgtaaaagtaattaatgcaatccaattcatacatatttatatatattttaatgtgaaaaatagtaatttaaaaatctaatagttttgatataaatatatttcaaaacttagatcaaatgaatatttcattcttataaaatatagtctaaaacacaattatacatttcttatacatacaattatttttccttattcctttgaatttattattatttttttatatttattgttagagacataaaacaacaataatttgttttattttattgttaattatgtgaaaaaaatatttttttagtaaatatgaaataatttaatattaaaagtaacaaatctaaaataactgatataagttgtacttttgtggatgagattgaatttgagttattatgcagattggattagatttgagttattatgcgaatcaggtttgttgcggtttgaaattctttgcagtgcggtcgctgtttgaattttttctaaatcgcgcggtgcactgcgatttgcggttttgaattgttaatatgcggtttaaaccgcaccgcacattataaaaatactaatttttatatttatttaggtttaatatatgaatgttcaactcaaaaactcactaattgttatattgttgaaatttattttttcatatttatttttaagtcttatggtatttttgacaagtgttgctcaaactttgttatatttgtgatagtttaattattggtgatagtctaaaccgcaaaaatcgcaccgcactgtactattttttgcggtgtgggtgcgatttgggaaattgaaaaaattgaatgtataggttgatttgaaaaaatagtcaaaatcacattacccgtactgcaaacacccttaataatgagtataaatataatgcagaaaaaagaaaggaaaaaaatgagaatgagagaatgatgcagagagtgcaaaattggaagaaaaacgtgtatattaattgattgatgacatgaaaaggaaatgtacaaccagtttttttaaagagattataaactgtataaaatctaattaagttaaagaataatagtatgtcagttttaaaaaaaaattgtataaatgaaaatttaaaaaaaacaaccgtataaaaatttaaattgtaaaaaaaaaataacactttgtttaaaaattccgtaattaattaattaattttgtagaagttgtagctaatccaaaatggtaaggcaataacctcgtaccgaattaacacacgtggaagaaaacccgatatagaattcccatttaaccaccaaagtaatgccacgtaagcacattggcggtttcagtttctgtcgatccgaaacgaagcgcgcccttatattaaggagaaaaacgacattttatttttatttttcaaaatattcaacaaaatacgccttaaattaaatgaacagcaactttcaggcttctactttttctgtatttatactttccgtatctaacttgttcgacctttaaccatctcagcctaagcgtggccttcaaaccctctcttttttcctcttctctatttgtctccatttcctttttcttatcacagatattttccctcctcttaaggtccgtataatttctcatttgatttattttttaatggttgatgatcgagtaatctgagttttgttctttctttttatggattcatttcatctcggtgcatgctttgaaacttctattttatatggttttgtttttggtttgatggatggaagcaattaatctgtggattagggttctatgcgcgtttttttttttttttttctgaatatgtttgtagtttgatctatggataaggtttataatgtttgattaagctttaatgttgttatatacttgtattttaggtatttattgtctggtttagaaccgatggatttatgggtatgtggattagtgattttagatgtgtaatgattgaagtttattgattgaaaggtgtgttttttgtttctttattcagaaagtgggtttcacaagttagatagcttttggaagcaaatggttttatgcttataattattaagctttgtgtttttttttttcaggagctatcaaagtttagtgagattatagaataaagcaaggatagttatttgaaattacacatattctaaaactactatccaacccaatgacaatggataattgggacccggatgttaagagatggaatcttcatctgttagatgtttgcactctttcaaatgacacctctcatagtactgttactagatatgaccctgattttagtaaagtggaatatgttcaagaatgctatgttgagcccaataatgttgaaaatgatgaagttatagctcatgcttatcaagaggagttatcaagacttgcttcagcagaaaactcaggacgtcctgtttttgaagaagatcacttgcaacaatcaattcttgcgcaagattggcttggaccttcaaagaggcatgatagctctgattatgggaaaatggaaggttagatattttttaacaattgtttattctttccgtgtttctttcatccttattggaacttgacttataatgatgtataggacatgagaacgtttggaatatggaaaatggtcatggtagtaatgggaacacagaaggtcaccacaacaatggaactttagtagatggttatacagaagataaagcaggggtggaaattgattctggcataaggataaatggagatgtggaagatgggatgggatctatctttacatattctgtcccagccgaaagcaaaggagaaaacttaagcaatggggaagactggtcatatgcattggacataacagacgagtcttcgcttgatagtgaagttggcagaagactgaatcagatggttcccgttcctgtgagtgattgctgtgagatgttattatacctttaattgggttgatgtcatttcatggggataacgcatgatatatgtagtttgtttagtcatttaaatttggtttgcatttttagaatatacttatattggcgatttattttatttggcagcatgttcctaggacaattgaaaaaattccttcaattgatgaggagatatcagatcacgagaggcttctagaaaggtctagtgttaaattctctattgtattaaagacttttgtctcttatccatatgtgtatattattaacttcttcgacactactaagttcttatggaattttgataacagacataactggtatagaatttcattgagtaatgtgctttgtgaagtgctgacaaacattataagagattttatttttttctcttgcaattaatatttgttatgttcatgggttaaatttattcttagcactagctacactacaaaaccctgagaagtctacaatcatttgtgcatttgctttataagatcataatgacttagttgagtaggttggatggaggtcgatatgaaagagaacactctgaactatggataagaaaccctacggagggaatttattggtccagaattttctgtaggggtataatatatggggacttgagaatgttacaattatctaagcagttgtttttttttttttatttaggttgacctttattatgttagtaattaatgacacgtttaacatttatattggagttctttttcattattttagctctttatgttttgtaaattgtattacacatgttaccttcagtcatccaactgtttaatggttatgaaaataacaattttcttaatgttgtggtgaatacgtgtatgcaaaatatttcaaaaaattcaatgtgtgatagctgtaagcagaaaatattcaatatgtgatagtagatgtactcgctgttttagtcaccttattaactgatgtattgcttagtaaaacctcattttcttatagattgcagatatatgatttggttgaacgtaaggtccagggagatggtaattgtcaggtattatcttttttcagtttgctgcctaaactttttatgtgaatgtgtattttttaatgcatcttgacgtttactaaaattgagtgtgtatcatttgttttctatttgttctcagtttcgtgctttatcagatcagctttatcgctcttctgaccaccatggttttgttcgagagcaaatcattcaacaggtctgatgtgcactagttcatgtttttagtttgaacttgcattcattttaattattgtgcatatttgttcagcatttgaccatgctcccatttctgatgttattagctgaagggtcaaccccagacgtacgagggctatgttcctatgggttatgttgactatctgaagaaaatgagcaagtaaaatcctaggctttattgttgtgattttcatccaaatactgtaatttgttttcttttttgatattttttatgtgaatgaaataggaatggtgaatggggtgatcacgttaccttgcaggctgctgcagattgggtatgagataaaagttgactgttcaagctttccattgtttctgtgaagttgtttaatgagttttaaacatggtgttaatatgttcttatattgcagtatggtgtcaagatatttgtgctaacctcttttaaagatacatgttacattgagattcttccacaatcacagaagtccaacagaggcaagttttgaacaaataattttttcaataacgttttgcattgtcattatgttctaaattgtgattttatatcgtataactgttggactttgtcaaacagtttgtttaggaactgttggtatcatcatgtttaccatattctatctaattctatttgatttaccttttaattaaaagcttcatgttactagtaagtgttcattctaaacaacatattatattgttttttgctcatgcagttattttcttgagcttttgggcagaggttcattacaattcaatctatcctgaaggaggtagtgctttcttttcttttcttggcttttttttcctgccgaatcattttaaaaattaagggcccaaatttacttgaaaaactatacattaaatgagcaattgctcgtaatcggtatggtttcaagtgatatcattttgccaaggagaaaaaattgagtttcaagtttcatttcatgatatatattatgtataaatgttttgatcatttttgttttgcatttggttccccattgatagaggttcctgaaccttgcacaaggaaaaagaagaaatggtggaatattataacttcataagctatgatggatgtcatgaaggaaatgagaatcttgtgattgctactgctactgctgagtcaaatcaaccattagtcttttcgtcagtaactggtcttgcagatagaaaagcaatgatgaaagacaagattttgcatttgttgtaaatattttattcttttagagtaatctttatatgcttgtgtatatatacgtatcatcattcttttttttaatatatatgcttgtagttgttgaactcaacatttcatggcagtttgcaactaaacttttttattaaatgggcctctgaatgaagaagaaggtaaaaacaaaaatgctaagtgaaatgtttggagtacctaattgccttaatcattggtggggtagagtagttgctagtcagtaaaaccacaaaaatgtatacccacttggtctgtattaattgaatttttgtaaacagagaaaagtgtaatgtacacaatcaacagactaagaaaccagcttttggtacaccaaaaaaaaaaaatgaaggaattagggtcaattttgtgacagaccatattcaatcaacatgatcatgtttttacaatcttaggcctccatgcttgccacattaaacaacctctttctccaaatattggatccaccacatgctttttcaacatctctcttttggattttcttgtttcatcatccaaaggcaagcttttgagaggagtttgtggtgggcttcccatatctgttgtctgcataattctgtttaaaatatccaatacttcactcattttaggacgcgatttaggctgtcgaaccaggcaacggttagctacagatgctagccttttggcagccttgagtgaatacttcccttcaagccttggatccaaaatcagctcgaatttttttgagtcggagagatgtggcctgatccattctaagagcttttgctcatttctaggcttgtttcgatccaaaggccgcctcccagtaatgagttcatataggaatactccatagctccaaacatcgctctttgaggtgagacgcccagtttgaatgtactcgggagctgcatagccaatggttccaacaacctacatcaacataagaagagtatcattttttttgtttgttaatatacaacatacatagaaaacatatatttatatatgaaaatacattatgtaaacatactgcagtagagacatgactcaatccatctgaaggccccagcctggccaatccaaaatccgacaactttgcattccattcttgatctagaagtatgtttgaagacttgaaatccctaaagatgatctgttacaatgacaatatttcagatcttaagtatgagaatcatgacacaaaagacttaccaaagaaattaatttaacctcatctatactcaatatatgagcctacatctcaatctctgtagtgctgatctcatttatcattaccaacttctccaaccaagtcatcacacacatcacagtagtaagatttaacaagtacctgaaattccattccttcatgaaggtaagctaagccgcgggcagcatcctgggctattttcattctcgtggcccaaggaagtggcgcctgagaccggcttgacaaatggtcttgaacacttctattaggcatgtactcataaatcagcaatctctgaatccctctttcatcatcctcagcacagtatcccaacaatttgacaagattaggatgttccacaatccctaaaacatttacttctgtcacccattctttgtgaccctgcaaaacaagaaaacaacaaggatcattagaaaatggtaattgaattatgggattgatgattgaatgaaagataggatgagaagaaaacttgcctgcaagccccttttacttagttgcttaacagcaacttcaatttttttggttgaatcaactgtgctccttgtgatgcccttataaacaccaccaaatccaccctctccaatcatgagagagcggctgaaattcttagttgcggttttcaactccgcgaatgtgaattctttgagattactttgtttctgagacaaaactgcaaatgccttggctgatgaagattgtgtgctaaactctgaaacattctgagaatgactttcagaaccggatcttctcatgtcaggatcggttgacaaagaagtagaaagagagccaatagaaatggattttgaactctttggctccaactctttcttattcttgttatggaaataaaaacacttcattgcacttctcaaacccttgtacaaatctttcaagagccttcagctaatcagtagctaaacttggctgaagattaaaacatttgaccaaactttagatgttcataaaactcaaagtcaaacttgcacaaagttttcctttttaagttaagttaataaagaacaataataataatgtggccaagctcagaggaaactagcatacactttcacagaaattacaaccacctaatgtaatactcaaaataaactttgaccacttccaattcctatttgctatattatatatatacactcaaaaagtcttcttctccaggcatccatatccaaaataaggttaatatattgctgaattgcactactttctctcccaccataagaaatttcccaaataaaaacattaaggttcaactgagataaaatatatcatcatgattttcataatcaaaattttaaatttgaccctattcggatacccagaaacatattagtttaactacactaaatatagaaagaaagaaagaaaagatgcagaaagaaaaagaagaagaagagagactaacctgtcatacgtgggtgtagtagattgagtttgctaaactttcaaaaccttaatttttttgggagtcctaaataaaaacacagaatcccacaaaggtgatttcatagtatccaagggtaagaatgagctctccatgatccaagggacgaggtcaatacaaggcaaggcagctggaatttagctcaccaaccaataaattcgaatacatatatgatatacagagagagatatagaatatatattaaatagcaaaaatggaggatacgtgataatgtgaatagggtacgtgataatgtgaaaagggtttttgttaaaacaaataataatgagttaagaattaagaaagttggtagctttgtccaaaagaaaagctcatgaatgaagctttgatatcataaataaataaataccaagtcactactcatctcgccgtagagtattgtgtgcttattttattcattcattttattaaaaaaagaatattaagaatatttctttaaaatggtagttggcagttggaaaccactcgttaaattgtctcattctggacttgtttttcctttaatgagttgcattgtgtccatggtttgtaacaaaaataaaaggttacctttttcaaaagaaaaagaaaaggaaaagaaaagaaagagttttttttttttcttttgaaattttttacaatgttactttttagatttttctttaacgtttctccttctttctcttattcacagagatctatttcaatcgacaaccatctccaccctttcatctcgcatccagctcctctcatctccaacccctcgttgtcatgtagaacctcttctcaaccttctatgtcacggtctagaaaaaaaagacacacttcgagtttatttcccttttggtcaagctatccccctctctttcaaatttctttttgctgctattgtaagttgttcttttcttttttttttttcttcttcttcttctttttcttttcaaattacattaataaaa

SEQ ID NO: 111035 - DNA, 4725 bp, Cannabis sativa
gaatatttttctttccattacttttgctgaagatatgattacttttgtatgtttattttttttttacatagaggatgagccctgaagattttaagtagtgtatggttccaggattctctttttcactgattttctatccatttaggttggctgcatctttatatatctatatgtattatgatatataaaatatattcatgtgtataaacattactactgtacgaatgcttcaatggagaggtcttggtgattatagtatctttttaaatgtcacagcttcccttttcttattgattgacttgactgattgttagcttctttaaataatctttttattgtaattattctcgtatggcatttgcttattttatttacttcttattctgtttttgattttttttagacaattttttgtatgtgcagttatttgagtttctgctgaccattgtgggtagcaaaaaatttgtaaaggtagggcaatatgaatggtatttcttcttacttctttcttgatccactagtttttcactgtattaaaatttcgcccttgtaggttgttatgaaccacattaaagaattggtgtactatactattgcttttctgcaaatgacagaacaacaggtagttttgtcgtttgtttttcttatggatcgttgtatcttacatgtaaatatatgaagtggctatctcatctgcagttgattagatttagattttggattccgattaaacttcaattccatttgtttcccctaccaactaatagagtcccattaccttagtcttggtaaaaacatttaatacctagttttaaacttactacttcacattgttttaagctttagaagtctaggatattatctttgtttcaattcttgttgaattcttgttgcacttttgttttgtcccatttggccattttccatggtgggattcttttatgtccatccatcttttttgtagctttatctttatttttttccatcttaaattttggttgtatttgaaagaaacaagaatgcttatttatatcctatttatgtttaccaattgtgactattttcatttagttgtaatgatttccatttatgcaacaaacacactgggattgcatgattgtatatgcatcagtatatgtttcagtttatcttttattatctggcacatgagttttatggtaaatacctgcagtttcacagtgaaatagaatagacatctgtactaatgatagttttttgtttacctttcaccaattaattaatttgaatgtgcctatgctgtttcggggaagttctgtaaaatttagggactgaactcatggccaagccttctttggacccaaaccagtgagacgctcaccagagcaatagaaggaggcaacagtcccaagccgtttttctttttataacattcgcctccctttttgcattccatggactaggttcttaacaaggagtagggaataacactaggcaaaacaaaatagtttttgcaagcctataataagacaatataagctaattgaacataaaactgagtagttcttaatcttgatgtaaaagaaataacaatgacaagttcaattcaaccactgtgtcagtttttatgtcattctagctcttgtcattttcttgtggtttgcttcttaattttcactgttctctaggtccacacatggttaatggatgccaatcagtttgttgctgatgaggatgaggccacttacagctctcgtgtttctggtgagtctatcaattccctcgggcacccgaaccatatttttctcattttctatgattagtgcatatgttcatttgtcactactgcaacttctttaaactactttttaagaaaagaaagcaaattaaagagctgaaatgtccatatatgtcacttagccatttttatgacttcgttccaaaggaattttacaaaaaattgtcttttcagttgtattttgttgatctacaccatatcattgtgccggaactttttgggtctgttctaacttcctgtcacgcaatctcatctagatcatgaaactttgggactttaatgaagattttgattacttatattcgaggatttatctacagttaagctccattctcactgaaaaattatattgaaaggtgcacttttacttgaagaagtggcaaatgtagctggaatggaaggggttaatgccatcatagaagctgctaaagaacgatttagtgattctcaaaaggaaaaagcagcaggttctgcagtctggtggagagtaagtggagaatattatttttatttggtgtaggcatcattgaaggcttgttccacccaccatgttacattgcattttttggcagctaaaggaggctactttatttgcactggcgtctgtgtcagaacaattgcttgaagcagaggttttatgactttcatctttctaatttggtttcctatttttattttagctttatttttgtgaggtgtttctttaaataaattgagatgaatcttatgatgtttgctatatttcctagctctctccaattgatcatttaataaatttacccttatatatataacaggattcagcactagtgagagttggtttgagggatcttctggaacaaataattgttgaagattctgaatctggtgggtaattgcctctatctcatgtccaaaaaatatgaaaacaattagaagaggaaggaaaaaccaaaattcggtgttctatttaaatttgttcagcagtgaacttcttgctgctgttgtgcaggagtacacgaacatccctttctatatgctcgaattttcacatccattgctaagttctcctctttggtaagtgatgtcctagcttctcatcccttttaatttcatttcctattaagtgtcttaggtgtattttcctgcttccagatcagccgtgaagttcttgagcattttattcatgctgctacaaaagcaattggcatggacgtgtaagttcctctttattttgacattccaataaatccttctggcccctctctcttacacagaagtttggtgaagttaaactgtcattgacattttgttttcaggcctcctcctgtgaaagtaggtgcgtgcagggcactgtctcagctcttacctgaagcaaacaaaggaatcattcaatcccaaatgatgaatttattttcatctcttattaatcttcttaatcaggtaatttaaagctaatgaatttgtagttttaattgcatttgctgggttaaattcctaatgttttgctgcacaggcatcagatgaaaccttggacttggtacttgaaacactgcaagcagtcattaagtcaggtaatgttaatcttttacacacgtaaatacatgcttccttgcaataagtgcacacaccgtctttatctgctcatcaaaataaaaacttaccagtcttcttcgagaacaaaatgaaacctcacaagattgctatagattgtcacttagatttaagatggtccagattcttttgatttttcgtagtaacatcttctatggtctgtattgtgctaatttgcaggtcatgaattatcagcttcagtagagcctctaatctctcctgtgatccttaatatgtgggtatcacatgtttcagatccctttatcagtattggggcaattgaggttctggaggtaataatgtgtttcttggttgccattttaatattgctatattgttttttttaatgctttgtttgtttcagtacatggattgatgttttaattttataaagtcattgtttttctttttgttttcttccccttctactacattgcgaggcctgcggaaagcacttaaatattattacaattttggatatttatatagacagggtttattttaactagaataattgaaaagttagtttactagtctattatttgctgaatattgacaaggtaacacattcaagaaaaaacttgtataaacaatttttttttctctttccaaaacataaagggtattagttttattaatatcggttacccttaaggattacaggcaatgtttttgaacatcaatttttgttttgggtttaaaagacaacaacgaaaaagaggataaacatccttaattttgttcataggggacttaaatgttaaatctatgccttctacaaatcaattactttcttttgtttaatatatatgctctgatgaactgtccaatatatattgaaaaaagatttatagtaatatatctctcgggccttgatgtctaagcaacggtaagggttaaagtttagctttgttgttggcatgaaaatgaccattgttctaaatagccgcacacgatacaacaattatgagttttcaagttcatgtcgagaagaatgactgtcaaatttaactgaatgtcatattgcttgaaacctcaagcttcattagtcatttttcatatacattttgacagtctattgctttaacatacttgattttgatagtaggatttaatctgtacatattttggccaacactaaagtaaccttgttcctatttttatttatttattttttatttatatatctggtgattttaggagtatatctttttacaacataatgacttattattattattgatattgcatattggtttacgtatgttcttttttttttcttgtattattttcccaggcactgaaaaatgcatattggtttacgtatgttcttttttttttcttgtattattttc

SEQ ID NO: 111036 - DNA, 2791 bp, Cannabis sativa
  modified_base (2758)..(2766): a, c, t, g, unknown or other
ctgaaggcagcttccgttaaagaaacgaattgtctccgatgacgaagcggagaaggaagagatggttattacccagcttcccttggtttatctaccaggtattggagaagttgccccctttggaaacaatacgaaagccatatcaatactggaactgcaacttgtcgcatgtcctgatgctagctcagaggcaagcgagaatggtaccgcgggggtcaggccaacgcttgaggcacacgggcggccgatagagacagaagctacccagcctcatttggcggggacagaaggtgattgtgggaattgtgagttggaacctagccatttaaagaaggatgtttgaatttaagagaaacccaactacctgaggaaggagattctaataatcccttgaccaatgggtccgcccctctgagcccacctaaactgtactataatccccttcttggcactcaagcccaataggtggattggcccacttctaattgttgggctgacccaatggctagagagttattgatgggctcactcactgttgacaagtacttcagagaaccaaccctcctcaacccaatacttgacatagaagatttcacggtccaggagcatcttcatggcccaaggaaaaggaaagcttcagatggtttgatatttactcctcctaagattcctaccacctcgaagcagtattcgatgcaatctaagttggttggcagtgcccatgcggtcaaggtttatggaattgatggtgaggcctgttcgtcccagctggagtaggaagatcatagtgccccccctgaaacgactcggttttctattggatctacggaggaacagggttccgctagtcgaaggggaagacgtggtagaaaaactccggcaagcatggtggagtatcacaccccaaatagaatgggcagatcgcctaagaatcaagtgaaccttgcagcaatgccaaaatcctttaaaggaagacaacacacgaagtcaagggtgggacggcgatcaacactactaagccattgggaaggtagttcatttgacttaactatgaatttggataatcactttgtcgtaattgagaagaacgaatgacctagcactagttgcataatcactgaaatcccagatgttttaactatccaaggtgaacaagttaacagacaggaggattttcgatttggggctatggagacttgcccagaaaagtctccacagtcgccatgaaaattctatcctggaactgccgtggactcgggaattccacgacagttcagcaattgacggcgcttgtccgtcaacataaccccgagatggtaattctgtctgaagttcggttactcaacaacaaattttctagaacttgcaataaattgaagtttgtaggatggcactatgtccctcctattggcagtgtggggggcctaggattgtgttggaagaaaggagttagttgtaacatacaattcgctagccgtttcttaatcattggtgaaatttcttttgatcctcctggctgcctctggaagttttttggtacatatgggctgccccatagtggtgataaataagaatttttgaatcatatgggggacttagccctcaatgcggggcaccgattttactttgtggggatgtgaatgggacgctaaaggattcttaatgtatcaactatgttagatgaagtaattcttccagatatgcgtttgacttccgtcgcatggtccagagggttggattagttgaccttggcttcctgggaccagggttcacttgaatgaaaggagggaatggcagccaaatgggaggagccgttaaaagggcaaggcttgatcatgggctggcttctctggattggtgcatactcttccccaacgccatcattactcatctttcagcctccggctctgatcacagaccgtttcttcttgatgccacagctagcgctaattgtaagagacgttctttcaagtatgagaacatgtcggctaggatccaagattttcttgggtggttaaagaagcctgggcaggtcaacgccatcacaaccctatggtgaatttcaacaggcaactaaaaactacctatgacaaactcaaatccaggtacaaactccaattccaggaagtcaaacagcaagtacacgctgcaaacgatctcttgtagaatgtagaaatggaagacccgaataatggaacagcaatcgaccaagcaaaattactgctcaacgaagccctccttagggaagaaatacactggaaacaaaagtcaagggtgcagtggcgtcaagagggggatatgtgctcaaaattctttatggcctcaaccatagtccgtcgacggagaaactatatacagtgcatcaaagacaccccggatggggatttaattacagacgaacaagaaattgccaattgctttctcaggaagttcagggatggctttaggcaattcttgaagagctattacaaaaggtgattactccggaggaggggaatatgcttagttcaatgccatctgtgactgagatggaagaggcattctctgaaatggggaaagacaaggccccgggcccagatggattccccatgagcttttacaaccaccattggacaacggtacattctgacctcttccaagtgatctcccattttttccaacataaggaactgttgggttttatgccctaaaaaaaccaattacaatctgattagttatcaatttagaatttacaagtgatttatgattacatgtatgnnnnnnnnntatggtttaatatatatacttgata

SEQ ID NO: 111037 - DNA, 2694 bp, Cannabis sativa
  modified_base (2666)..(2668): a, c, t, g, unknown or other
tcaattagaatataatttgcttagtcccaagtgtattcttgaatagaggttctactgtatatacatgaaaacatttatcgtaaaccatgtagttcttacaatccagaatttcttcacctctgatataattaaatatttctaatgtctaatgttattttaaaaattatttcgaaggttctcgcgaatagaatgaagtatctacttgatcaagtggtggcccaaaatcaaagtacttttatagctgggcaacttattactgataatgttatgatatcctttaaggttttgcactatttacaaagaaagaaagtagggaaagatagttacaaggctttaaagcttgatttgagtaaagcttatgaccgagtggagtgcccttacctttgtgatatgctttctaagttgggtttcgctaataaatgggtgtgctttatttaccaatgtttggctttagttcggtataccattgttagtgggggctttgaggtgggtcctattatgccttctcgggggattagacaaggtgattctatttcaccttatcttttctaatttgtactgaaggtttctcggcattgattggtaagtttaaagagagaagatagttacatggttgtcgagttgctaatggggccccaatgatctctcatatgccttttgtggatgatagctatctcttttgtaaggctactgatggggagtcctcttttgtgctttagcttctagaaatctttgagaaagcctcgaggcagcaagtgaactttgctaagtcgtcagttttctattctactgatacctcctcaactatgcactctcttatatgttctaagatgggaatttgggaagttgatgctcatagtaagtacttaggtcttcctagtttgcttggtagaaataagaatgtggtgcttggttatttcaaggacaaggtcaggcaaataatttaaagttgggataacaagtttttgtctcttgcacacaaataggtgttgcttaaatctgttgcccaatctctctcttcttatattatgaatgtgtgtttcctgactgttgagattattaaggatattgagcgcatgatgagtcatttttggtggcgttcaaagtcctttcaagataaggaaattaattggatgagttggaaaaagcttagtaagtctaaggataatggtgggatgggattctgaaatctcagagatttcaatctctcactgttagctaagcaaggatggcgtttgttgctctttgataaaagtttagttggtcaagttttcaaggctagttatttcccttggggatcttttcttactgctgaacttggtaataatcttaattatatttggagaaacgttctggaagcccaatctgaggtcaaattaggggtgagacgttgtgtgggttctggtcaaactattagtatcgcaaatgacccatggcttaatgatgtagatcatccttatatagattcttcgcatatggcgttacttgatcaaaaggtgtgtgctttgatgaaatcagagagtagagaatgggatgatgagatcctctctaacgtgtgcttttggttagagactacaaattggtgaaagagatccctattagtcaaaatgtggatgttgattcttggtattggattaaggaaggttcgtgtttgttttcggtgagtagtgcatatcaattgttgcaagatctaaagtcttctatttctcgtttcggcaattctggtttttggaggaatcttttgcaactaaaacttctgccaaaagtaaaaaaaattatgtggcatgcttgctcaaactgccttcctacctggtttaatttatcaataaaacgtgtccctctagatgttatttgcccaattttacatggggacgttgaaacactttttatatccttgttggttgtcctttctcttagaactgttggcaagcttcccttgttctgagtgttatctctgctacaactgtttttagcacctgatttgatgatagtctgtgtgtgtggaagaatgaagaccaattagttgctgccatgttatgtcagtctctttggaaacacatgaataatctagtttggaactctaaacttccctccattgatggtgtagtgtagttggcttctctcagctttgaaaattaaaataatgctcaaactcagtccctaaattctccataggtcctgaatcaaggtgagagagtagatgagcgttggactaaatcggctttccccacaatcaaagttaatgttgatggtgctatttttgtttatgaaggttgctttggttttggtagggtggctagaaattattttgggatggtgattgaagctaaacaatgttttcgtgaggggagttggctcctttgatggttgaaattatggggctcaaagaagttttaagttggatcaagaaaaagaattaatcttaggtggtggtggagcttgattgtcttactcttgtgaatgatctaattaagaagaggttgatcgtgttcttagtggggactctttacctactttttattcatttattgttgtgggtgatttaatttaatgaagataaatttcattaaaatatatatatacaatattaatatttttatttttttttaacaatattaatatttattattatttcaataataatatctatatctttatatattaannntgcctatctaacggcaattcttggtt

SEQ ID NO: 111038 - DNA, 802 bp, Cannabis sativa
aattaaaaaaatgtaaagataagataaatttggttaattcattaaaacaaaagaggcatttttcaacttacccttttttaaacttcaattagtatttggtgttaatttcttttttttttattctttatctgggccaatttgatgtgagcttttcttcccaaaggcccattattaaatccaatgtaaaatatgagcccaatctaattaacccagataattaacgtagctccgtgtcgtttatctggcactggagagtggagagctagagcttgaatagtttgttttggatttttttatttttttttataaagtttgttttggaaatttgactggccttctttggtaacaactactggacttataaaataataaataatgaaaaagatttgaaagatttgttcataactgaatttgcattactttctgttggtttctcacaattcacaaacaccaatctcgattgtccctgcacacacaaacacaaatcaatgcagaaaaccacaggaacaacaattacaagaaaaatataaaacagaataaagaacacaacaccaagttttggaggttcaactatgatagatgaaacgcactagtcaaaacaattactataaaactatgagcaaatttctaataaatccatacagcatttgcatgtaacactctctaactcttcaaaataccttatcttcaaagtggtataaataaaaataaaactcagaatcaaagaaattacactacatacctatttctctaatcaaaattttacctaattttcccacaaacttacatatctatctccaaa

SEQ ID NO: 111039 - DNA, 11074 bp, Cannabis sativa
  modified_base (4785)..(4791): a, c, t, g, unknown or other
ttattaattaaaaaaaaaaaggttagattttttgttaaattattaattaaaaaaaaaaaggtttgatttttggtgttacgaagaaagaaatgactcatcatcgttatcctacaatactctctctctctctctctctctctctctctagctctgcctctctaaaccacggaatcatctaacctcaattcctaaatcaaaggttgtttttttcttcttcttcattcccctttctctctcactgctttgtttgttctaagagtttaggttacctttgggggctttttatccatggaaagctcattgatttatgttaattttcagtttcgaagattcctttggacgctggaaacaaccggtttccccgactgcctaattcttttcatcgatttgtgagtttttcttttttagttgaattgaattcaattgatttcagttgggatatttttatattagaaaattgcatttaaattcaaatttgtattaccattattttaattatatgataattatcaaaatttgctgagttcaacctaattaaggggttattattagtaggagagaatttgagaattaagaacttctttgttgtgacattgtccaatgggtggtggtaaggatagtattagaatttatatacatatatttatatgataattctttggtgagaacatcaattttgcttagagaaattataaatcaatttttttatatgatggtgtacgttatgatttccaatttgtttttggaaaattctgaataatttagagtgtcgaaaatagggttcaaacattcagttgcttgtatgcttatttggttttatgtgtgtgtcatagactattttaaattttattttcaacactgtaaagtattagaatttctcgaaaacagagagaattagcattacaactacaatatacaacgtcatgtaaaaaaattgggatataaagtatgaaaaaatagaaaacgcacctacaataggagcaaaagtgatgtactcacctgaaaagctccctatatatgtatgaatatttggagacgattcctacctcatggacctctttgttatttagtgtctaaattgcattgtatctagatgcaatttgatttcattgactttgatgtaggattgagccctattgtaatggtatggtatataatttatgtcatcaacttgattgaggtggaaggaagttgttgagattatggaaaattcacatgaaagttcagatggacacagaccatctgataatggattcttgcctgatagtcatcacccttataaacacaaggtatcattaccgtggctcgacttaaaagttttttatgttagaatcagcagatgtgtactcgatgattctactcccgagcacctcactttaaatcatgttcctttggatcctgatactctgcttgaagttaatggtgttaggactggtatctattcagatggggaaacgacccttcttcgaagggatcggttagataagaaatctgaagaagtgacatttgtaagtaccgataatataaggatcactggaagtgtgaaatttgaggtcattgataaggatgtccttttgttgtccggagttttagacttgtgtaatagtaatggtttcactaaggaatcaaatcatcacggccaaagatggataatggattgtgaatcaaatataattgttgggactagctttctcaaagggaagcaattgatggctgcagacactgcttcaccgacaattgaggtatatatcgctgggtcattttttcgaactccacttatcttaacaaagactttgcaactttgttctaagaagaagcacacaagaatggcattgttagattcaatacccgagtacgaggcaacacaagaccagaaagaagctccttccaggctagcattgcaggttttattctcacttgaacattatttttcacatatttactttgctttggagtataatatttgttaatccactcaattttgaaacataaatcttgcaaataatttttgatgattagctacgcttcatggggtcgatgacataaaaataaagtttagctctcgcggtggaactaagatggtacctctttataataattgtcctatcaattctaagagaaccttgatctgtttgtgtgttattattatttcatgtaaattgaaggtataaatcatctgtttcttttgggcaaagatttgtaaggaacttgaacccgataatataattgtccaatagggatgtttttagcttagtttttgccaaaacacttaactgttctgtaattagttagtagtgtcaattaaaatgatcaaaccagcaattgtgttgtagattgagttgattgatccatacaattagagaggaagtgataaaatgagtgtgtgagatggttagaagatagaagtttcggaggcttaccatttcggtttcaaattgttgctttactgtaattaaactgaccaaaaatcccgagccaccttaccgttgtcatgactgaagttccatctttattccaaaatcttgtgtcttgatgaaaatgtttttgagatactgatcttccatacataaaagtttggttattcagcttagtaatattatgtactgattaagattagaagatctaagtagctcttagttaaggtctttcatatatgaatggtgtattaggattagaagacaaattgatattcttattttcatgtgtcaaaatactcaggtggcagaatatccatacgaaaagccaaagactgaagactatagcatgtactcggggggagcatacttggaaggtgaagatggagaactttcatggttcaatgccggtgtgagagtaggcgtcggcattggcctcagtgtatgtctaggaattggaattggagttggcttattggttcgtacgtaccaaggaaccaccagaaactttagaagacgtctatagtaacccgcaaattttcttgtttgtcattgtagcagcgaatgtctcttaatgatccgaatttcgacatcaaaaatcgtttttgtgatatagcatttactattcagagctcatatttgctggtagctgcaagcagttgatgcttccaacttacttttattcttttctttttttacctttttgatggggtttggttatataataagtagcttgtgtttaaagtgtatagtgatgaaagcagaaacatttgctggacttgattttcaaagggaatatgagttttttaagttacaagttactggttacatgttgctactactaatttatactagtttatgtatggtaattgttagggatatttgtggcgaaatcccgttaacatttacaattgttatacatatgactctaattaaaaaaattggcggtgaaagtactttatttttcgattttgttgcagtcttattcttttttagttgttaacatattcttttttagttgttaaatgttaattaagctcgttaagtgccagctcaaaaatacatggcaacatttctttcgcttatttaatatatagtccaataatatgttcccacgtgtttttgagttgacacttaatggctaaaaaatagtacgattgtaacaaaattgtaaaataaaatacttttgacgccactttttttattaagttcatatgtgtaataattgtaaatattaagaaattttcgctcctaatatccctaattgttaaggctcctaatgcaattttacttttcattcaaaatattaattgtaactttctattataatttttgtgtgcaaaaatacttattagaatatttctgtaaatttttaaaaaatttcaaagtttattaaaactaagttagaataaaaagaattatgttatcgatactataaattgtctaaaattatttgaaaatttacgaacttaataatgtaattataataaatattaccattaaacaaatattttaacaatgtgttttcaaatataaaaattgaaaagaaaattaaaataagagattaacggtaacatctcttttctttctttcctttcactaaaattttacatacaaaaaatgaaagaaagatagaaaaatgcatcatttttatttatatttctatcaataaaaaaatcttctccaaaacaagaagatcaaataattataacaataagaatagaatttcttttttttttcttctttataaatggagaaagaagcaacattgctttttgactatatatatgtgtatacatttataaaataaaacaatgttacaaagagtggaaataataggtaataataatggtagtgaagtggtgtgagtgagtccatacttcaaattccaaactaatcttttagtgacgcttcatttccctgaataagtttgaaactttgggagataatcttggaaggaacttaaacaactgtatacaaaaacaacaacaacaataatcacaaatcatttcattattacaaggccaattttattttttatactgaattttaaaatataagttcgtaaaaatatggttttttcgaaaaaaattattaggtgtttctgcaacgcaccttcataaaaggagtgtccgttatctatttcggtatttgaaagaattttttagttcattgtcagttacgttataattatttaagatatcatgtaaaatttcaaaaaaatcagaataatttatagaatagaaattaatgttcaaacagtgtatttcacacgcatataaaataaaaaaatcacttgtgcaacaaagagtttgaaccctattttagcgtatgaaatttttaaatattttgcaagatatcttaaataacnnnnnnntacacgactataaaaaaaattagactaaaaaattcttttaaataccgaaatagataacggtgtattagtgcaccccttttccaatgggtgcattgtagaattttctaaaattattttatgggaaattttttggaaaaaattaagaaatatgtgaaaaacagtataaggtaacgaattacccgtttggttaccctaaagatacttagttatccatgtggtaactagtttttcatatttttcaactttttattcaatttttcccacaaaataacttatttgaaaaaaagaaaactatattattgtaccgaaaatccataaaatttataatatgaagaacaaggccttgcttagctgggttatgcttcgtctaaaatttactggttacccaacgcaacaaaagtgcttttagagcttcagaagcccgaaaacagcttttaaaaacccaaccaaccaagaccgaataataatgaagatgaagatgaaaatggtacccatagtttgacacaggcatcaatgacaacaggaaccaagcagataaaaatggttatggtagcctgatccacctccactccataatgttctactataatctctaccaatgtttgccaaccagactctgaatgatacctaaatcaaaccatataataattatattaatctttacttctaatcttacttataaaaacataaagttttatatgtacaatgttatttaccccaaaaaaatatctgtgataagtataattagaaatgccttgccagtatctgatatattgtttattatcttataacctgtaaatttgagcaaagctacctgcaattgcagaattaatatgtttgattagaacgaataaaaatataggaatagaagaaaatcaaatttaaatttgtactggaatgattcttccttctatttcaaaatggaatactcattctaccgaaatgatggaaaagttgttctattagaatgacattccaatactttaaaatgcaactaaacaaaagaacgaaataaaaatgatttcttttccattccgtattatagcctccaaccaaacgcaacctaaagaatgtaaataaagaaagagagctaactaacttacctgactttgattgaagtacaaaagaatgaacactgatatcccaaaagccatgtctgaccatatgttggcaaatgctccacggttttctaatctcctctcttcccttaactctaatctatacatacatacattcatgcataaatatatatatgtatatatacttgaaattgaaaacagaaacaagagagtaagaagggttattatgcttacgctttgtcccttaattcccaccaaagttgatcatcattgagaggaggagctttcccaatctcaacctcaagctgcagcctggctttctccattttgagttcttccactatttcaagcttttgggttcttctcacatcaagtatttgtgctgccaatggcactttttccacatatctgtcctccattccaaattcccaaatcaaacacatacatacattacatactaataatcaccattatcagataggaaacttctataatgcatcccaaaatgaatgtatctatgcattcatttcatgttttcgatatccaaaaaaattgtacatggcagttttaaagtatcgaaaacaagctttaaacagtctagttcacatgtgactctttcattttatacgcatgggaactagatcatttgacactactttctgtattgtaaattattccgaatttctcaaaactctacaaaatgtcttaaataaactagactacaatccacaccatcatataaaaaattgaaagaataactattagaatatcaaaaacacgacaagagtgcatcaatacactaacaccctatgagatattagcttcataaaatcatacatacatacctctttaaaaatggcataagaacatagtcatgcaacacaaaatccaatgcccaaggcacaatgatcaacactgccaaaaacttagcctataaacatatacataacaaaaacaatatatcaacaatcaaatcatcatacatagcaattcataataataataacaacaacaatagaagaaagattagtgtgagttactgaattaattgaagcataacgaaagactctatcttcatacaacaaatcctcatcatcaccagcaagaaaattcctaacagacttaaccaatcccatttcaggaaacaactcttcctcactaccaccaccattagaaggtggaattgaagaaccccctgatccagttccaccattgttgtaatcccaatccaaatctctatcactatcacccctttgctcccccaaatcagtagctaaccaatcctcccaactcctagaatcttcattcctcctatcttcttgggcttcacgcaattcaactatggcttcagctcttctcttccaagcctcaaatttagtatcatcatcaacatcatcttcttcttcttcagcttcttcttcaacttcttcttcgagttcaagcatatcgttttcctttaaaccaagccaatttccatcatcggccaagaaaaatctgtaccaccaactcttcttccttctggcttttgcatttgcagcaaacccaccaccaagattcctcttccttcttctccacttgtctgaactaataaagttcaaaccttttgagaaagacaaggaagaagaagaagaagaagtgggtttggagttggaagtgaaaagattaaagctttggcataagaccatggaagaggtcattccacatcttaaaatctcagctctaccactgcaatttcgaaagctttggcatttaccagataaactctaatccttactgggtttatctgtttctttctctttctctctcttcaaattttgatattttattatattttaagagaaaaataaaaacattcttttcttttttaattattaaaaattcatgttgattttttcgtaaattacaaaaatatcccatttttctttttttatgaacaaattcatccctaagtataaatatgcttcaatgttaacaaaaaagggttagttaaaatttttgtctatcgaattttgacatgtactaaattatgtcttttaaattttaaaaatcgttaaaaatttctcatgaactattaaaatttttagatttaagaactttttaacggttaaaaaaattcaatagatataatttgatacatattaaaggaaagtaaaaattttaattagttaaaatatatataatgtttacatatatagtattgaaaaaagaaactcttcttttttcttttaataaatttattaaaataatttttaaattacaaaaatatcccattttttttttatgatcaaattcacccctaaataaaaatatgcttattaaatcaaaaaaaaaaaaaaacctatatgaagtctacatagagttaggtaatgatgaagaaaaatctcctttttctttttaaatttattaaaatatttttggtgtgtttttatatatttattttaattttatatgtttcaaaaaaaaaaaaaaaagtctagttacttcaaaaaaaaaaaaaagtctaactttgacattttgttacaaattatggctatataaaatctacatatatttattagataaggatgaaataacaaaatttattatcctttttaaattgactttattatattactgactatttaatcaatctgccactttttttttctcttgaaatttttcacattactctcgagattttaatgagatcattttacaaaaaataaaataaaaaaaatctcattttgctttctaaagttattaaaatattttagatgtgtaaatatatatttatttctttagataagaatagatattttccataaaagaaaaatccaatcatttttattggtcatttctaacaagagtttgtactttgtatgtagttagtattttgggattttgtaagtgatgtggttacacattattggtcaaactaattatctctaaagatctttcctttgttgtttgctgacccagaaacaacatcaagacaaagcagtacacattgtcacactaaaaagtttatatttttaaacctgaatttgactcaagccttgacatttctttagtcttttcacaaccatggcttttctcacctcttctacaccacaccaattgccactttcagcataaaccatactcaacaaggtgtggttagcagcaccatcttcagcctctgattcaaccatctgatgtgctaacatctcagctacttccattcttccatggagtttacagtttgatatcaaagaagtccaaattctagtacttgctttcattggtattgctttcaatacctcacaagcatcttcaatcttccctgatcgtccaagaagatcaatgtagcacgcgtagtgctccattgtcaatcttatttcgtcgctgtttttcatcaaacggtggaagatttcccgtccctcttcgacaaggcctgagtggttgcaagcagataaaaccgaaaggaatgttatttcgtctgttttcactcctgtttcttccatctcatgaaacaattcgagagctcgttcgccacccccgtgtagtccatatccatctattagtgtgctccatgaaattgagtctttcgttggcatctccacgaaaactcgatgagcagcctcaacgcgaccgcactttgcatacatgtttgtaagagcattccctatcaaaatgtcaagtgttactccggattttaaggcatagccatggattaaactagctaagtctagtgaagacagagaagtgcaggcagaaatcactgccaatagagttactgagtttggttcaatcccatgttcctgcatttggttgaagagctttatagctttagcttcatgaccatgctgcttagcatagctaccaatgattaaactccacattacaacatctctaacagttgatctctcaaaaatgagttgagcagcaggggatgatgcttctctgctcatacaatacatgtgcataagagctgctgagcagtgaggatctgaatcaaatccatggcgaaaggcatgcccatgaatctctttcccatattttaagcagcctaagtgagcacaaacaggtagaatggctatcaacgttactcggttcggtttcatctcttcaacctgcattgccctgagacaacacattgctaaatcatagtcaccattagcaacacaacccgaaatcatagaagtccaagtaacttcattcttcatagccattcgattaaaaacatgtaaagccatagtagaacaatgacacttgaaatacaaatcaagcaaagctgttgacaagaacacagactcctcattaatccttccatcagtaacaacaacagcatgaatttcccttcctaatctcaaccgttgcaaccgagcacaaaccgataaaacgccggcaagtaactccggcttaggtacaaaaccacacaaatacattctcttgagcatttgcaaggcattagaggaatgcccattttgtataaaacagttaataattgaattccaagagatggtatctctataaggcattgaatcaaacacttggcgagctgcacaaagattagaagattttgcatacattgaaatgagtgaattagaaaccactgagtctgaaactgaacctgatttgatagcaatgcaatgaagctgaagaggatcataatgtgaggccttaatgagggaaggtagaagaaagacataatcaaagtaaagacaacatttttgtaagttaaaatggttattagagtgatataaaaagtgggtcatgatttatttatttagtctgagaagccaagatgacaagtgggaagaaaggaacgaaacccagaaaaaggcttaggaattggagttggaattggtggtaatggtggccatagataagctcttcttccagttttatgcagagctttgagaatgtgtttgggattattatggaaataacccaaaactgtgatcttgttcaatcttacatttatgtccacacaccttactcctgtccattcaaaatttctcattctaattcaactcacaatgatatcatatagtatgtatatataaatatcaccgtattaaacaattagattttgagtactaaaaaatttaaatttatcttttattacacaaaataaaaaaataggctaattaggatttttaccccctaaactttgacataccaaatcatgccccttgaacttttaaggtcattgaaaataccctgaactattgagattgttg

SEQ ID NO: 111040 - DNA, 4413 bp, Cannabis sativa
  modified_base (32)..(74): a, c, t, g, unknown or other
gtttatttcatcgttttataaagttcatattnnnnnnnnnnnnnnnnnnnnnnnnnnnnnnnnnnnnnnnnnnngtaaaataatttccaacaactacctttggcttaaatattcctgctcttgcacgggagatcataggatggagtcgtgtagcaggtgttgtttcggaagatgcagcagcagtaggtgaattttctgatataggctgcattgactcattagtagtactgggaacatcgacatgtgtagacattacaggtgagccgtaaggtagattagaatcatttacctgaggtgaagttccaggtgttgttggagatgatggttctggtgtgagtgctgcaggcatttgattcgatggactgttaggagatgaaactggtggagccgtgggaagtaaagaccatgaatgaggagtgttgacaacaacaatattttccctttggtagttgttcaaaaaaccaactttaaaaagaaaatctttttcattaaacactacatgtctagatatgtatattctcccatgaggactaagacacttgtaacccttatatgtttcacaatatcctagattaacacatttgacagagtggaattgaaacttatgtgtttggtaggttctaagacaagggaaacaggcagttccaaatatttttaagaagttatagtcaggttgttttgagtacaagatctcatgaggtgacttacccgaaagaactgctgttggtagcctattaattaggtacacagcagtggtgaaggcatctgtccaatatttcaagggcatttgtgcttgagctaagagtgtcagacccatctcaactatatgtctatgtttcctttcggctctacgattttgtgctgaagtgtgagggcatgagtgttggaaagtgattccattttctgtgactaaatctgaaaaagcttcatactcaccaccccagtcggttctaatggtttttattttcttttcaaattgattttcagctagggccttcaaatgtttgaatgcttcaagatcatctgacttgtgtttcaatggatataaccaggtatatcgactgaaatcatcaaggaaatgaatgtaaaaaatgcaattagtatgtgaggtgactggtgcaggtccccaaaggtccgggtgtagtagttcaagaatttgtgaggctctagaactagagtatttgaagggtaaagcatgagatttgccgaattgacatgcatcacaaaacacaacttttttattcaaactaggccgtacattagctatttttagaacttgactcaatacaacattagaagggtgcccaagcctcatattacatagatctgacatggaggtgctagttttattacatttagacttagtagccacaccagaaaaacaggttgcaccagcagtagtgttacttttcgacacggtagaggtttttagctgatacagaccatccttaagcactccttccagaaccaccttctttgtcacttgatccttcacacaacagatagtaggaaagaattaaatagatacattattgtcagctgtaagtctagacacactgatcaaatttttcaaaatctgaggaacatgtaaaagatcttttaagagtagaggctgagaataatttgcttttaatagaccaataccaatatttgaaatgttcagttgtttaccatcgccaatggttatcttttccttaccaccataggttgatttcgagttcagttgtccctcatcggcagtgagatggttgcttgcaccgctgtccgcataccaactctcatcattgagagtttgtggagttgctattaaggcattgaactgcttgtcttgggtttgttcagtagtagtagcaggctgctgtccagtgtaactctcatcatagcgattataacaaatcgcagccgaatgcccgtatttgccacacacttggcaagtgggttttggccctcctccaaatcgaccacctctgcctcttccacgatagccaccccttcctcttgacctaggatgagtcgaattttttctgccaccactttgattattaccctggaatcgggagttactgctgttgggaggcttttgagcatagttggcacagggtcctccagatgagtgattaaacttgctggagtttgagagcccagttagtctttcaagcctgctgtcaaaaccaagcaaggtgttttgtagctcctgccatgatatctgtggttttgcttcaatctgaactacaatagagagatattcgacatctaaaccactcaaaatgttagataccaaaagcttttcagggtatggctctcctacaagagcaagagagtcagcccacatacgtttctgttttaagtagtcagtcatggtggctgacccttttctcacggtttggagtttggttctgagttcatccatatgagctctagaatgagctccatacaactcctcaagggctgtccaaaggcttaaagccgattggcaaccaatgacctcggaggctataccctcggtcatagaaccatagagccaccccattaatagttggtcataaaccaaccaattttcatattcaggattaactgagatttgagactctgttgagttacgaatacctgtagtgatgaactgctcaggactcggtctctgaccgttgatgaacccttcgagtcgatgtcctctaatgattgtgaagaccatcgttttccatagagggaagttattcctgtccaaccttagtgaaaagggttggctgagcgtgttactgaagggtgaagtagcaggaatggagaaagtcgtttgtgtcgtagcacctgaaacaactgatgttgctggattttgttgcgaggcttctgaggttgcagtgtttgcaccattgcctggagctagagtggtatttggatcttccatggcgtgagcctacgattgctctgatacgaagagagaaattttagggaagtaataaattgaaatctcagctcaattagccgagtactctgtattttccatttatagagcaaagccaatcattacagaatcaagatgagccaatagatggctgccacatacaggtttgttacaaaaggaataagaagagaatccctatgctagcggaattatgcagagaaaataaacgtggtaattaggttggtacagctaagatgatattagaatggaaagaacacaaagacagatttgccctccaggattttcatggtttcttcacaatgctaaggacactctatattgcactctcttttatactttctttataaatgagtgacatgcgcaactttttaaagtatattaagtatgattacaattatactctttttacttttcattaataattaaaatgtattatctcatttacttgtctatttctttttagattattttatttattttttattttttttcctataatatgcagcatatttcttttaatttttttttttataataaatatgtattattttatgttataaaaaataaaaaataatctctttttttaacgaattttgcatcagattttttttttccatattgtattattctttaaattattttttatttcatgtttgttataatatatatgtaaagaaacaacaaaagacaaaaaataaactaaatgtgattatgcttagttaataatatgtgttagatcaatttatttttattttttttaagtaaaaaaaaattcctttcatgaataggcaaaaaactaattgatttaacatatatatatacatatttgattagagagaaatttgagaacaatttaagagaatgtaaaaaaataaaaaaaataaaaacacacgaattttattttttaaaagaatgatacgaagcaaaaaaaacataataataaaaaaaattggtaaaaaactatgaaaagaaacattttccatttcttataaagtaaatagccaatatttactataaaagaaattaaaacaattattcattatggtacatattatctattaaaaacgaaattttaataaataaaaatatatagtttaattaagtttttttattgtctgaaaaataaataagcaagtaaatagaatcacatattttaattattagtaaaaataaataaattaatcattagttttaaaaaattaaaaaaaaaaaactagtaaatgagatgaccattttaattatgattaataaaaagtaaataaggacataattgtaactatatttaaacataatttataaggttacacatgtcacttaattaagaagagagtgtaaaagagagtgtaaaagagaatttccttagcactcctctatactataactagtgaacaaagccgcacttcgtgtggcatgtataataatttcaaaatttttattcacactaaaaatactttttttgttaggacaacaaaatacaacttttttttattaca

SEQ ID NO: 111041 - DNA, 8084 bp, Cannabis sativa
  modified_base (2202)..(2203): a, c, t, g, unknown or other
acaccactgatcagtcaacatatggtatttctgaacattgttgaaacaattttttaaaatggatgcttaatatgcatccattatctcatttttgtaatctaatcaaacatagctagtcaaatcccattattacttaagattatttcacaaatacaacaaaaaaaattataaaaatacaacttcacggaattttaaattttttacgatttttttttttattttatttacaaaaaatatagtcattttatgttgtactcttatttatttgttgttgatttcttattatttgtatgttattttttgttgttgttttgataatttttagatgttatttttatgtagttttcttgttattttcatgttgtttctatgaaaaaactgtaaaaatgtaaataaaaaaaaattaaacgtacaaatgtaatttttttataaaaaataataccttatataattatcccttattagtttagtttacggttgagatatagtaaaacatctgctataacaaaagaaagggtgaaaacataaaacagtcatgttgggacactaattttattttattattattgtttttaaaagtaaaatatcatatcttataaataattaatagaacttaacttgttatcttttaagtgtatgcttagtcgaggtggcaatttgtgttcgtattaggtattaattaaaagtaaatgcttaatttaaatttgatcaatttattaatcgtgtcaaaaactaaaactcaaacccaactaatttataaacgggttgacctgacctgacccaacacgtttatataaaaaagaataattaacaattttatcccataatttttttataagaataattagtatttttggcctctgaactttcggcactacctaattttatttcctaaaatgcacgacttgataaaaattctccctaaaatataacagttacataattatgtcccttctctgttagattctattatctttatcgttaagaattaacatttttatcccataaactttgactaatataaaaaatttccccctttactaaaaaaataattttaaaaattataatattctattttttaagcaattgtaatattctattaattttaaaaaaataataaaaattattaaaaaagtcacaaaaatattaattttacttaaaaaaaaattaaattattcctaaaacatattttcaaaatttattttatgtataaacacgtatcttaaaaaataaaactaaaattattgagaatttaataaataatttaaattaattaagattttttgaagaaaaaatcactcatttatatttataaactcatatcttaataaataaagaaaaataattaaaaatttaataaaaatataaaattatttgaaaaaaagttataaattaaactaaaaaaatttatgtttacttaaacaaatttacattttttgggaaaaataaaatatactcaagtttattgccgtaaaatttagtttttataaaaattgaattttaatattttttaaatatctaaatgaatttttcattaaaaattaataattttttaaatcgctgaattaattttaaaatttaatttaatttttaattttcttaatcatttaaaataatgttttcttaagatctacattaattttatgagatttactaaaaaaatattgaatatttctcttatttacttgagggggtacgatttgataattgtcaaaatttagggagaaaagttgctaatttataaagacacgtcagcatttaaatggaatatgggacggaatctaagagaatgactaaattgtatatgtaaaagttcaagggggaattcttaacaagtcgtatattttaagggccaaaatcaatattaccaaaagtttagggggtaaaattgcaaattattcttttgactatactgattattcccctaaattatacgacttgttaagaatcgctcctggacttttacatttacaaaaatttagccttttgttaggtttcgtcccatcatgtcgtttaaaatatggcatgtctttgtaaattagcaactttgccccctaaactttgacagctattaaaccctaccccctctaaataaagatgcaaaaaatttaatattttttttagtaaatcttaaaaaattaatttaaatctcaaaaaaatcattttaaatgattaaaaaattaaaaaagaaattaaaatttnnaaactaattaagcaatttaaaaaattatttattttcttatcaaaaaatctattttgatataaaaaaataaattaaaaatttaatctttgtgaaaactaaatttaacgggaacaagtttgaatctatttttttctccaaaaatctagatttgtttaagtaaaacataatattcttttagtttaatttttaactttttttccgaataagaaattttatatttttattgaatttttaattatttatttattaagatatgagtttataacgataaataagtttgggtttttcatcaaaaaatattagtttgtttaaattatttattagattctcaataattttggtgtgatttgtagaatacatgtttataaataaaataaaatttaaaaatattttttaagaataataagttttttaagtaaacttaataaatttttaaattaatttagtatttttatcaactttttaaataattttaattaattttttcagaattaatagaacattatagtttttaaaattatttttttaataaaaggggtaaaaaaattaatttttaacggtaaaagaaataaaacctaacaggagaagcataattatgcaactgttatatttttggagaaatttgtaaaagcaatatattttagggggcaagagatcaggtagtgtcaaaaattcaaagggcaaaaatactagttattctataaaatcatgcttaattttgatttacttatcaactcattaatatgtttataacaagcttgacatgtttacaatcttattatgacatatttatgagcaatttaagatttttatgtcctctttaactaaaaaaaataatttacatgtaataaatataataaaaatatattattgtcatgcccctggtcctgatggcatgggtcccgatttttaccaacaccattgggatgttgttggccctattattgtgcagcttgttacaaagttctttgaaattgaagaattacctcctgatattaatgacacatatcttgtgttgattctgaagaaaaaaactttgcaactatatgtgatttgcgtcctatagccttatgcaatatatcctataagattgtggtaaaagttcttgcgaatagggtgagaagcatgattgatcatattatctctccaactcaaagtgccttcattcctggtaggctcatctctgataacattatggttgcttttgaaatcatgcactatctcaagcggaaaagaagaggtaaaaaaggatttatggccttgaagcttgatatgagtaaggcttttgtcagagttgaatgggagtatctaaaagttgttatgtgtcgtataggttttgctagtaaatggatcaatcttattttgaagtgtgtcacctcggttagatattctgttattcatagtggtcatattatgggtcctattactccatcttgaggtattcgtcagggtgatctgttgtcaacatatctatttatcatctgtgcagaagggttttcagttttaatcaagaaatatgaagcatacagaatcattgaaggatgtcgtgtggctaacggggcaccatctattactcgtgctttttttcgatgacagctatctattttgtcaagaaactgcaagtgctgctgatagtatgaacatacatcttcactcttccgagcttgcttctggacagagagttaatgctaccaagtcttctgtgtttttcagtcctaataccgacaatgtggtcaaagatcaaatttgctcaatccttgagatgcctgaagctactgatggctcattctatctggggctgccaaatataattggtaggaaaaagcctgttatccttggcttcctcaagaacaagatcatcaatcagataaatagctaggatggtaattttttctctcgtgctagtaaagaaattctgttaaaaactgtcattcaatctctcccaacttatgatatgagtgtgttcttgatacccttgggaattttccatgatattgagaagcttatggcaaacttttggtggaaaacaaaaagtgctgaaggcaaaggaattatatggatgtcttgggatcggttggatgtacataaagacttggggggcatgggtttctgtcatctccatgaattaaatcttgcgatgctagctaagcaagggtggcggctgctatgctcaggttcttctcttgttagccaggtctataaagctaagtactaccctcgttcagattttcttaatgttgaacttggaagtaatcctagctttgtttggcgtagcatttggagtgcccaacacctggttcgtcttggtgccaagggaactattggcacaggtacttctacgagtattcttactcatccttggcttcctgatgctctcaatccttatgtgtccaccactggctcgggccttatcaatcatatggtcagctcactcttccatgtccatgatagaagctgggatgattctcttattagagacatgtttaatacaagggatgtgtcgttaacactgggaattcctcttagtcttagggctaccaatgaccattgggcttggattggtgaaaaaacaggccattactctgttaaatcggcctacaacctgctgcaacttcagaaaaacaatcggcctggggaaaacaattctggattctggcgtaagctttggcatctcaaaataccacctaaagtgaagaattttatgtagcgtccagtgtctaatgtgcttccaacttgccttcagcttgtttctaaatgtgtaagtatctctcccatgtgccctgtttgccactagattgttgaaactgttactcacatactacttagctgtccattagcaattagttgttagcaaaaagctgaattgtttccctatgccaattctgctggaactattggacaatggcttcaccatgtgttcactagttttgatgatgatatctcttgtcgtgccgtgatgttgtgctgggcactgtggaaagcaagaaatacattagtttggaacaaaaaagcttcttctccttctcaggttctctgttcagcttggactactcttgatcactggtgtaaagctcaagataaaatgtgtttgttatcttcttctctgttgggagatagtaacagccttgagcaatggatgaaacttgctactaatacgatcaagatcaacgttgatggtgccacctttgagaaagacaatgcatacgggtttggtgttgttgcttgtgactcggatggcaaggttattgactttgttgccaagtattctcatgggtcctactttgctgaggttgttgaggctttaggggttaagaaggcacttagttggctaaaaggtaaaagttggaatatggtagaggtggaaactgatagcttactcactgttcaggcaatctttagcaatcaacaagtatcttctgtctttggtttgattactaatgattgtaaaattctcttatcctttctacctaatactagtctccgttttattagacgatcagcaaacaaagttgcccactttgtggttaggcgctcttatttttattctgatcgtagcattcaagatgttgatgttctggttgattttcaaaccaatttgtaatttgaatgctttatttcaatgaagttgatatttcatgttttaaaaaaatatattatcgtgatattttttgattaagtttgtcaactcaataacttacttaataaatgagctagccattttaaattatgtcattttaaattgtattatcgtatctgacttaaattgctacctctaattagctagtttatgctacgcaaagaaaagctataccccaagaaagatttataacctatataaaagtgtgaatgtctttggatctttactaattgaattacacaattagtcttcactatatatttaattacaaaaaaaattaaactaaggcaattgaactacttctttcattaagctaagcttgccctccaattaatattgtagtttatgtgaaatatttgtaaaaatgatcattttgtcttatattttttttttctttttgctacaataagcatattttcaaataaataatgtttctttatttttttaagctaatttttcatgtgataatgattatctatataaccatgtctatatccaaattaataatcatacaatataataaagaaaattatgtgtatgtataactaaattcagacaatatatatattatgcgatttatgttattctatattagtattagaaataatataaaattttaaaaataatactattacctcattaattaaaaagtaacactataattaattttttaatatcaataactaataactattattttaaaaaataatatcatttttttaatcctaattttcaatttaagatcatattcaattaatgattaataattcttttttctacaaagtaacttaaactatgtacgtttaaataattatttttaaaagaattaaataatatttttcttgtagcaaagaatcaaataatattttaatctttagaatggtttatttataattttttaaataacaaaaaataaaaaatagttaagaaaaattatttaaaaaattataacttagaatagtcacaaatacgaccttctacgctttgtaataaagtaaattgttagtcgcgacttaagaaaattgtgacaacatcctggtcatgatttacaaattttaaatgtaattataaaggggaattttaaaaaaagatttagtgttattatttttaaaacaacttcaaatatatttttcagagatagaaactgagagtgagaaagataattaatcattaacattcaagttctttcttctttttttttttttaactctattcaaaccatagtattaaaagttaaaaaaatatctatattattatgttattctttaaaatcaaataagtaaattgttcaattttataaacatatcaatatcaataataatatataagagaaacttttatggtgcatcctctacgaaatcgatacactctctactatttcagaatccataataatatacagaaaacttttatggtgcaccctttacaatttgttgcatatatgtctcttttatttaatacgcatgtgaaattatttgaatcccatttttgtattactagaataaacatcattatataaagtgcttcttttaactattatcattttataactagaaccctattaaataactacatcaccaaagttttaaataattaaaataaatataatcatacaaaaaaattataattataattgttaagatattatatatataaaaaaaaaaaaaaaagtccattggtacacctaattttgagtgtggtgcactgtaaaagaacctattaatttatatgtccactgtctaaaacttttgaaaagaaattttttaattcaaaatgaatgatagaacttatatttaggatttatttaaatagaataattagtgtgtttatcattctatatggaagattaaaaatatctccttacataatcagtctttatgtaaaattttacttatttttactgttataatattaaataattagcatttttatcttgaactttaactattatcatattatctttttatataaatttaatttttatgtaatttttattttgttttattaaaaatataataaatcttaagaaaaaaagatttaagattctttctctaattagagaaaattaagttcacttaaacaaatcaaattcaaaattcttaatatttatcaactcatatttatttagttacaaacctaaattgagaaggtgtaaatttttcatctaaatcaacaataatatactttaggttggatttttttaattataaaaaaaaatatttaattaatttctttttttaaaaa

SEQ ID NO: 111042 - DNA, 9659 bp, Cannabis sativa
  modified_base (27)..(32): a, c, t, g, unknown or other
  modified_base (9600)..(9617): a, c, t, g, unknown or other
aaaatagattacattgaaatggagttnnnnnnagggcataaaacctaacagatcctcgtcatctctgtcaaaaaatgttcaccaaacattcaaattcgaacaagccatattaataatcccaccattctctccaacaatattccctttaacttgacaacacgaccttcgcgatctcctccattattctccataatcatagggcattaagaagttaccaaactaggaacatataagtgatgagaactagaacaactaaaaaaacgtgcatccttctgtgtatcgattctcaaccattttgagccaatcaactgactcctatgatgtaattgagctcatataaactcaaaataaggcttcacaatttccttaaaaagagttgtaaataatctagagcaaaatcatttagagttaccaatgaagccacaaatgatgaaaaaggtagaaacatgttcatatttaaacataacccaaaatcattcgctccctatttgataaatcttcatcattctcttgaaaggtttagtgatatcaacaatatctcgtaatcgtagatagtcccactaacccttgaaaattcttaaggtcagtccccacaaactctccaataaaagcacttttgtcttccagaatatagttgaatttgttaatgttgcagttcatgaacttgcacccacgtaagcaaacgcttcaaaactagagaatgataaacccctggtttaacacgttcaaaaataaattgagtacgattaaacgtccaaggactgcttgtcataacacattgaatatttaattcattgtagaaattaaacaaataaatatttggatctagttctttcacaaagactcttttgcccgactgccataaagaaaccatcatatgttgtataatgtttgaatcaatagacccttaaataataaattacccaacaatataccaatgataatcatcagattaatcgttcgattatcatacgataagcctcattcctccttatcttcaatctcaataccaacatgctgctcttcaatctcacatactgatctaatgcttgaagcaatcgaacaaaacacaacaagaaccaaggaaacaagaaagaaactaaactacaaaatagagagagaacttaaagcatgtgaaaagataaaatttattgtttatttaaagttagagtattgttaattaatattttaaagtgaaaatattgtatcatggacgttactttatagtttattagtgtggttcttaataaaatttattaaattaaaaagtatgagacttaatattaaaatacctccgtgtgatacttggcacatttaaattttatatattatgacatattataaatggtcatatcatacctagtgataatgagagtgtgctattatacattaagacaagagagaataactatagctatcaaaaatagagagtgttggagaatggaagaccttctcgagtcttccttcgacttgttttagggctttttcgtgcaccgcctttatggttctgttgtcgtcgtcgtcattggtgctcgacgctcttatccatttgggatctgtaacccgtggtgacaatagctctccatctcgaaccacacgaaacatctcggttcgcaccgttaacggcttcgtcaactcgcagccagacccagaagcaatcatcaccaccaacaccgccgccctgcaactagacccctcccaaataggtatgcatcacttcctccataacttcctgtttaatgtcacttttgccattaatgttcctacccaaatttggtttcccccctcttttagccaaaaccgtatgttccccttcaattttgcccattcattccataaatagaattaaattaccatcacatctctgatccccccgagcttctcattattaccttacgatccttaaagcttaccttgattccaggcgtcctttggaaatctttagggggtacttacagtatatcaccatcgacccctgcttcctctgatatgcagagacttgcattcaattttcaggcctttattctaatatttcttcagaatggcttcagtaatttcttttgtcttcgagcatcacaaccttcacaaaggcttcttcgtataatgcttataactcatacaccgcccactataaatatcacactatccactacatattccctcccaccattttatgactgctcatctaatctaactcctcacttcactataaaccattaatccatctccacaaatatcacacacctttcccatggtattctttatttgttcagtctgattttgtcatggaataactttctcaaactctcagcactactttaaacctcagtgacactgaaacaaaaatccactctctttgaactacctgaagagcctgaagaagatgttggggaagagccctctactttccttgcagttaagctgctcactaattgccattttaacgaagttgctttcaaaaaatgccttcaccaaatgtggcatgagcgttactctatcaatgttctggtgaaagaaccaaatttcttcactgtataatttggatgctttggtgattaacggcgtgttcttattgggcaaccatggcatttcgactataagctcattgttatgacccccttgaaatcggctccacagtcacagtcgaaatgcttactttaactcctttttggattgaagtttttggaatccctttccttgatcgatcctgggctctagcaaggaagcttggtgagattcccgttcgtttcattgatgtggatactgcctctctttaagaaacatgagggttttatcttcgggtgcggatagaaattgacgttactcaaccccttcatcgcggagcctgtttccacttcgccaatatagctacccctgtttggcttgagtttcgatacgaaaacttgcctaatttttgccatttttatggacgcctaagtcatattgtgaatcactgtgccgagttcttggccaaatatgattcgtcttctgtaccccctcgctccgctatgatcacaccctcagagaaaaagtttcttatcacctccaatccattatatattgcaaccactcgcgccacactccgcccacagatatttcatcctcaccttatggatacccatcaactcgtgtgtgtgccaaaaggccagagcatgccaactcatgcttacaatgccccactttcgattatggtattcaacacttcagtcaagctcatatggtttcaataggccctttcgtggcaggatcttccaacacacacgaaaccttgcccttatactcagcttctcacgctccttcctttgcgacaggatggaatcccattctaaacacccccacacgcaacatcatgctccctaacacctcccaccaccctattcacccaatgagccctacaccgacacccatcagttccccaagatttgatgtcgatgtcccattagagaccagtacaccatcactttatccttgtcacaactacggagcaactccatacccctatgccaacattgtccacacaacctactacgccgatcccctctgtcacggatggcacaacttggcacactgttcctgtctctaggccattctccactatacttgctgacttaacggcctctcagccactgcaattttctcctggagcatcctctgtgccaaccaatagcgcttcccccgatcgtagaatcaagccaaagcgaccctcaagaattgatggagctgagtttcgaaagctcctcaagcataattgtaatcaagcaaagtccttagatgaaagcaatcctgatcaggcgggtaacgctcagcgcacctgccaggatccatgagtattataagctggaatgctcgcagattagggagtaaacgagcattctgtcgactctccctcttagtcaagtagtttaaaccaaccattttgtatatcatggagagtaaactccctgttggtgctattaataaacttagagctaagctttcttttgctaatggtcttgaagtccctcgggtcagccttagtggcgacctctttttgttatggactcagggtgttgatgtaactttactttcatataatataagtcattttcattgttatatccggtttcctaatcgttgccctttttctttcattggtttttatggagccccacagcacaataatcgccccattacgtggcaactcctccatcgccttggtaatactgtatataacaacccttggctcttaatgggcgactttaatgcttttctttcccttgttgacaaacttgggggcactctaaataaaagtccttcgccttttttctaaactttcttagatacttacacactccatcccatccgtggtaacaagagcccttacacatggactaataaacactcacatcccacttgcatccaagaacgattagctttgggtatctcaaaactcccgtggacatcatctttgcccaatgctaaccttctcaatggaaatttctttggctctgatcaccgaactttaatcctttcccttagcaatactgaggctacctcttatgtctccaaacaacgattccatttcgatagctgatgtctcaccaaaagcagctttgaggattgtattagctaggcatggaattctcccaataactctcatggtcaggatcatatattattaaagttgctatcatgagctgaagttagttaggagctttgctatattgagttgtaatcagttagttagttagctagtttgttagttgctgctctaactaattttcttctgtatcatcgtgtatataagtgagcttcatttgcttacttctttgtaatcattcaatgtcaataatattctgtttttctctctctatttcatcttcttcttcctaaaatggtatcagagccatgttgatcatggagctctgtttatcgttcagttcatgattactatcattcttcttgaatctcttgttgctgcttgtccatggcacgtggaagaggtaatactcaaagaaaaaccactcaagggaccacctttgaagattcaaatcctttctctgttctcgaacctaattctagatctcataatgatccaaatcgcgatccatactatatgtataacagtgatcatcctagtgccaatcttgtccctaaaatacttactagaagtgataattatcactcatggaagcgtactatgacagtgtccttgcttgcgaggaacaagatgcaattcgtcaatagaaagcttagtcaacctgatgaaaatgatgaagactacgatgcctggaatcgatgcaatagtcttgttgtttcttggctacttcactctatatcacaagaaatttgttgagagtattatgtacatggatgttgcagtagatatctgggatgatcttcaagaaaggttcagacaaaggaatgctccaaggatttttcaagctaagagcccgatgcagttattgaacctaggtgatatgggtgtgactacttacttcactcgaagaaaggccctatgggacttaattcaggaatacaggccactgcctccttgtcaatgtggtgctaagaaaattatacaaggatatcaagaggaagacaagtttcttaaatttttaataggtctgaatgagtcttataacaatgtaagatctcagattctgatgcaagaaccccttcctatgatcaacagagcttatgcttcaatgatactagaagagagacaaagagaggtttgctccactaattctgaaacaagtaaagacactagtgcttctactgctgggacttctaatgatcaatttgctggaagctctaacttcaatagatctaaagtgacttgctctcactgtggaatccctggtcttaccatgtctaagtgctataagattcatgggtatccactagggcataaatactacaataggtttctagctagagattctggtgcatcacaaaatggaaaggttgttgcaaatttctcaggttcacaacaaatccagagtaatcagattgaccagaatggagagaatgatcaagatctgatctctacccttattatgcaatgtaaaaaattaatgagtatgctgtctcagaaaaattcagatcaatctcctccccaatctaatgatgatcaaccaattgtctcccatgaatctggtaagacaaattttattcaaagtaagagatggattattgacacaggtgctacacatcatgtgtgccctgacatttcattgtttgttaatattgttaaaaattcatcttagtcctatgttaagttacctgatggtagaaatgcaactattacttgcacaggttcagtttatttaactgacaaaattgtgctaaaaaatgtgttgtgtgttcctacctttgaaacatatgtcctatctggtagaaatgcaactattacttgcactggttcagttgattgttctttcttttcttatcctaaccattctaccattcaggacattatgaagactctgcagattgggatgggtgaaagaatagggaatctctctactacctaaaatttcctcagaaaactaatttttctgctgattttcctattgttttttcaatttcagattctaaaatttgtgatgcaatagtgtggaactatagatttggccacccctctttcatcaagactcatcctttaaataaaaaattgaaattgagcaattatcctagcaattattttcattgttctattttccattatgccaaacaaaggaaattgccttctatttccaatcataacattgctaagcattgttttgatgtcatacatattgatatatggggaccttttaatgtgttatctgttgagggttttaaatactttattaccattgtggatgatagctctaggtttacacgggtgcatttcatcaaacataaatctgttgctcaaatagtaataccacatttcattaaacttaccaaaaagcagttcaatattactattaaaagtgtcagatcagacaatgaaaaggaactccaattcccaaccttgtttaatgacctaaggcatcattcatcatcactcttgtgaccatagaccaccacaaaattctgttgtggaaagaaaacatcaacatctccttaatgttgctagagccttactcttccaatcttatattcccctaccatattagagtgactgtcttgctactgcaacatatcttataaatagaaccccagctcccaacatgggaaacaagtgtccttatgaaatattgcatcataaacaaccccactaagatcatttaaagccttttgctgtttagcatatggatctactcttgctgtttctacgtctaagttcccaccaagattagccccatttgttttccttggatatccaccaggtatgaaggcttatcaacttcttgatctccatactaataagcttttttgcagtagagatgttcaatttcatgaatgtatttttccttttttaactacttctctaccagctggctatgacagttttttactactgccttctggttttacaccagccactgatcctgatccagtcaccccagaaatcacagccagcaactcttcaccttctcccaattcagagattatttcttccctgcccccacagtcaaaaaatattcctacaacacctttttctccctcttctacaagacctattagacatactcataagccttcatacttgaatcattaccattgttttttgactaattgcactaattctactatttctcaggatcttgatcagggagctatctaccctctctccaaattcattgactactctcagctttctccaacatatcgggctcttgttctgtccatttctaggcttactgaaccagcgtcctatgagcaagctcatggcatatttgaatgggataatgccatggacaatgagataattgctcttaaagctaatgacactggggttattgtcactcttcctgcccattagcatgcaattggatgcaattgggtgtataaaatcaaatttaatgctgatggcatggtagagagatttaaggctcgattagttactaagggttacgaccattaagagggcatcgattattttgagacatttgctccagtcaccaaattggtcactgtcaagcttgtcttggccttagtagctatcaatggttggtttttacaccaacttgatgtcaataatgcattcctacatggggatttgcatgaggatgtttttatgactctacctcctgggtatagtcctaagggggagttgtcacctaatgttgtttgcaagctaaagaagtctttgtatggcttgaaacaagcttctaggcaatggtttgaaaagttttcaggtgctctaattgaagagggttttcatcattcagccatggatcactctcttttcattagacacttgagaagtggttttatgatcctattgatatatgttgatgatgttattctagcctccaatgatctccctcaattggaagcattgaaagtgaggctgaacaacagattcaaactcaaagacttaggtgatttgaagtattttcctagcttggaaattgcaaggtctgcaaaaggcatctttgtttcctaaaggcactatgctctcaaactccttgaagaacttggacaccttggaacaaaaaaaaatcaatactcctatggaggccaacttaaagcttagccaagataccgaagatgaccctttggctaatcccacacggtaaaggaaaatcattggaaaactccaatacgtaactattactagacctgatttgtcctatgtaatgaacaaattaaggcaatttctagtaactcctaaggctagccatatgacagcggcagaaagaatccttcaatatgtcaagggtactcctagacaagggatttttatgtcatcaaagtttaaaattaaattggaggcttacacagactcggattgggctggatgtcctaacactaggagatctactacagggtattgcatctttcttttagattctatagtctcaaggaaaagtaagaagcaacatacggtgtcaagatcttctgcagaagcagagtatcgtgcaatgggaaataccacctgcgaaattgttttgctatgttcaaaattgaaggagctgaaagttgattgtaaagggccagcaattttacattgtgacaacaaggctgcacaacatattgcagccagtccagtctatcatgagaggactaaatatattgaaatagactgtcacattgtaaggaaaaaaattcaggagggaataatcaaaactgtccatgtttcgactaaggagcaggttgttgatttgttaacaaagccattgtttcctactcaattttaggtgctcaagaacaagatgggattgcaaaacaatcattccacatcttgagtgggagtattaaagtagatatcatgagctgaagttagttaggagctttgttatattgagctgaaattagttagttagttagctggtttgttagttgctgctgtaactaatttgcttttgtatcatcgtgtatataagtgagcttcatttgcttacttctttgtagtcatttaatataataatactctgtttttcctctctctctctctctctnnnnnnnnnnnnnnnnnnctctctctctctctctctgtttcatcttcttcttcctaaaat

SEQ ID NO: 111043 - DNA, 8775 bp, Cannabis sativa
aaagtaaaatttttaaaaacaaaaattttactttcattttgtggttaaaaaattaaaaaataaaagtgttactaaacggcaccctaatttataaaagtataacagtcataaaatcaaagaataaaatttgactttgactatttacacatagtataaagacatgatttcttctcttcagtgtccgtctcaaacataaaattcacaacatgtcgtccgagttctccgactcgttcactcagccaggcgatgactcagttcccaccaccggctccactcgtcctttcgacgacgatggttacctagggtacgacccccgcctctcctcccagcgattcgaatccttctctgcccctcaattcgtcgactccgagtcaatcaaggactcgaccactgactcacccatcttccaccacagttcaacggttgacgacgggttcgcggcgcaatcggttcctgaggcccaatctccgccatcggtctttacccaatcgaacgggcaggacttcgatgaagggtttggtggatcgggcggtccgattttgcctcctccgtcagagatggaacgcgaggagggagtggctctcagagaatggaggaggtagggtctcgaatccgcttgcgtttgatatttagtaaaaataatgggtgttgaacctttactgatgtttagttaacaattagtttaatttcattttcaattgtgtctgaaattagaatccgttttggttgataatagaaagaggaaattttttgcagtagattgtcagagtttaatcaaatattctggaatttgtttattttttgtgcttcagttcagttaatttagaagaaataacgtaaagtttagtgaaaagtgataggtgtaaagaattcatgggctattttatgttcacatacagacagaatgcgattcggctagaggagaaggaaaagagggaaaaagagttgttgaaccagattattgatgaagctgatgaatacaaacttgagttttaccagaagagaaagactgtttgtgaaaacaacaaaacttccaacagggaaaaggaaaaggtgagagtggatatctcatatctctattgaagttaaagtttaggatgaaattatttacagtactttttccttttattttttctggaaatgttttgcatcatgctgttagttcttaccttttccattggtagttgagtttttggtggcaaaacatcaaaacctttatcatcgattgtagttttcattgttgaccctcaagttcaatttagacaaaataccatttactttaatgctgctcgtttgttatttattatggctaaattaggttatggataacagtttgacatgcattgaatagaatttatgctcactggaagagtccacagcagaatgggtaaaagttttttttttattatttttaatctaggtgatcttttttttttgctggagtaatctaggtgatcttgcccccttcaagtgatagctggtatggtagtagtgaggattgagatacttagaaattgcatggtatgtgtttgagctgtagcatagcacatctataggcaatatttagctaactagattttagcggatactttgcatcccgagtttaaagtaaacgatcctcttgcaattgtgaatgcagggaacttatctctacaccttgatccctcttgtattacatgtttaacataacaatttctattgaactcccagagtttcacacgaatgaatctatagaatctgaggagactttgattggtttttcatttgtttatatataatagcaaagcttatcataaagtgaagccttaaatggcattttaagatatggaggaattatatattctcacaatatcatatatccttttgaaattatatcttttcttttataggtatttctggccaatcaagagaagtttcatgctgaggctaataagaactactggaaatcaatagctgagcttattcctaaagaagtgccagttttagaaaagaggagagggaagaaagaccaagaaaagaagccatctgttgttgttgtccaaggtccaaagcctggcaaaccaaccgatctttctaggatgagacagatacttgtaaaactgaaacacagtacacctgagcacctaaagcatgctccaccaccaccgccgccagttgcttccccatcaaacgaggctaaaaacaaagctgcttccgtcccagctgctcctgctaaggctgttgctgttgcctaatagaaacgttagtctgtttaggttaaattatgtaagttgtacttgattagaatgtatggtgttcattgaagtttgcctctggtgtaatagtcaacagtatttaaattttaccttttatgtataagaatttggctatttgaagaggattcaccccatgtgtgttatatatgaatatatatcgcgtttgtttcactgtttccagcaatgcaacctgtcaatgaaatcaccgggttccacaataataattgttagtaatgaatgcacttattcaatttatttctctagtttaaatattcttttttctgacaaattcaataagtcaccaaattatctacttatgcaatcatgttgtcccaaattattgtctcttgtattcttctaccctttccttcttttctctgagaaggttaataattgctctcttatcaaattactcttgttcccttcgttttccctttacagctttccttccccaccaagtgagaagtcgtttttttcgtttttagttgaatagtgttctattggaatggataattttaattgtacagagatgagagaccgttggtgctttctacgaattttgctttaacaacggtgggtcgcaatctaggaaggaaacagttaccatgaagctttatttttctggaaatgaagtaaaaatttgtggtcctgctactagatattgtgatcttgatgatatatgtgattaaaaatgtattgctcgacttcatgagtcggagataacgtggtccagatatttcatctgaatagatctttttgatcagttggcttcttacaagtctgtgctattggatgtgacatgtaatgttctttacaggcagttttagaacaaaagtaactattttgaactgggtgacttatcatttgcaccatttctttttctttctttgagaattgaaaatggggatatctcaacaagttgcatggtaaaatgggtaccgttttcacttcaaaatagtgataaacaagaaaaggagcaacttcacatggatttcgatctctcttgaaaacaagaacatgacatgatactactactacaccgtgtagaaaatgagaaatcaggaatgttcagaacataactattctaatattacaaataatatcataaattacattttttaaaaaatttgaacacccatctctctaataaatttcggattaccaatcaaagcccaactctagttaactccctctaatttggtttcttttgaacattaaaatggatgcaactcaaattttaaatataagaatttcatcagtttatatgcaatgtatggcaacagaccaatcacctaccacgcagactagcaggagatcgaccacctcgctcactgccaatgtcatcttctatttcaatcccatctaagcaaatgccattattgttaacactgacttcagaacttgcattactgctcgtggcaagaggagagtctgaaacacttattgttctgcttcgtgcagggcccgatctcacactgtacatagaggatgccggaatattcgtcatcaatggtcgcaaattacctggaatggttctccttatatcctgtaaagtgcaatcagaacatgaattagaaaaggggaaaaaatgatagaattgacaccttttttaacatctttctcatgagttataatacgaggaagaaaaaataattttaagtaaatataaaagataagagggaactacaatcgactgatccaaaaatatagtactgtgtgacatcacttgtttcatataattaatattagaatgagatctaagtaataccatgtgtcgtatagccatatccagagatttctttgaaagtgttctaccaaatcctgaactgtctggggatgaagattttgcagagacgttgccatgaggggaatttttatcatcttgtcttggaggcaccagtttccgcatatttattactctttccaccatttttgttccaattagaacagggctcacattgtcattagctttatagtgagtgcgactcactgcaggaacagagctcccactcaaatgaggaatgccatttggagcacgtcctcttgaaggagagcatgattgtcgtcttggtcttccacttgcagcaggctcaacagacgaagaacgagaacttggtgctccaggcctacctctagtggctgaaagtggccggtctggaagagttgttcttaaatttggtggagcatcaagtgaaaagccaggcatctcagagggcttccatggtctagactttactgtaggagacgtaccccgtgagggtgcaggatttctagttgtcgtggaaactggatttctcattgtcgtggaaactggacttctcattgccgtggaaactggacttcttgttgtcgtgggaactggatttctggttgttgtgggaattggatttctagttgttgtggaggttggctttgtaactgaagaagatgatctagataaaggtgctgatacactggaggcagatgatggcgttgaaggtcgacgagtaggtgttgctgcccttgatgtggacttcggagcagttacagtacttctagttggtgttgaagatctcattgtagaccttgataatggcgttgtggatcgtgagggagctgttggcttagctgtggacattggcttagctgaagcacctgtgggcttagtcacagaagacattggcttacttgaaggcaaagttgctctagaagtaggtgttgatggtctggatggtcttgatgcagtattcaaggagggtcgtccagttggagtcccaggccttgatcctggaccacctgatgatgatggtcttcgagccccagcacccgaggaatttaacccaggggatgaagctgattgttttgatactaaactgcttctaggaggatgatccggctgggagtttgccaactatattacaatgaagagaaaagggaaaatgaccacaatcattgtttatgtaaaaaaggtagcgaattcataaacagaaaatatcaagggacagaacttgcatatcatacaaaagagaacagaatacaataaagtggcatctattttcatgaagccacatgttctcacactccaattaattgagatgagactttttttcaagaatataaatcaaaatgacagaagttttattaattatttcagatatgtaaatgaatgtgcatgaaatgcttcctcaaagatatgcagtgagtgacatatcctttccgtacattcttctccctaagaaaattcaatatttgcatcctaatctataaaattatggcacaatttagcataatctgaccaaagacttcgcaaatacaaaccctgatcaacacaaacagaaatggcggcaaccacatgaatataaaaattctaaaggctaaatatacaatttctgaatttaaaacaggaaagagagctactaaactattaactgtaaaaaaaatgcttactctggatttcagagccgtgggacgaggctttggtgtaccaagttgactcattaaggtcttttgtgattccatctccaaagaaggaaatagaggggtcccagggggtgtgaggagcctgacacaaaagaaaattttaattgataccaacttaggaaacagttatttgccttccaaaaatgttatgaggatatgattacattaaagttgtagtgtgaattcaatacagctgtatggtaaaaaacacaaaggaagaatatttaatcataagttcataactatgaaggaaaatgtatgtaaacatgttttcatctgcaaaaacatatctaatggctttcacattattccccaaaagtgcaaacctccaaaactcatgtgggcggacgactgttaatggataagattataatataaagaagaaataatgcaagatctgacaatggaatccagtgggaagtgttgaaaagaaagaaaatgagtaacttcataattgaagtctcgtgattccggagaatatagaatggcgtgtttctccattccaaacaactacttgatctttacaattttaagtttcttttctccatagtttatttaattagctccgtttgttattgaatacaaaagatagaaagaacattaatctacttccccataacaatggaaaacgaaacttaccagtcatagtcattcttatcactctctgagttcagaaaatcatcagcaacagtcttgcgtggaggtgcagtcgttgaagaagatatgttaaaaattggagaagttcctggtttcgaccctgtaacatgagcacagaaatcagaccaatgcctacaaataataagattttaaaaataaagaaataaataaatctgcccagtagaaaaatgaagaagaaaatctacaatgaaatcataaacataaaagtttggtacctaatggtacatcgaactcttcagcgttgttgagaaaaagatcgtttcgttccttttctcgcttttgcatctctaagaataatgcaagctcttcttctttctctttcatggccgaggctcttaactgctgcctctgcttcatcgtcgttaaaatctgtgactctggagccctaaaactacgattcatcttcgaaaccaaaatagcccccaaaaaaatcagataattttctgaaaaacctcttagacttttttttatatatttttcaagtctccaacaaccacaacaaattctacaccaaacgctttttcgtcaacatcatcacaatcaaaatggcgcttcaaaaccaaaaattggacaaacaattagatctgaaacgaagttcagacggcgcgaaactcacacagcacaaattacaagaattagtatcaccatttctaagaaaaagaagaagaagaactcggtgatgaagctatagtctcaagtggaaggaaaatacagcaaccatcgttgacgcacgaagctcaggtcgtatactgagagagaaagtaggggaaaggagcttcaaagaagcgccatttttgcaaagaggaagctcaaaaagagttaaagatgggaaaatgagagggttgaggggaaaggtgagagtggcagtgaatggtaaatagtgaaggttttggagtccgaaatggggaaaatgaatgaggttgcagacgaactgttctcgttgtttctctcacttaaagactacgttttcaggtttgtgtgctttttggtggttgggataatcacgagattgccctctttttcgtttttattttttatatatttcttctgttttttgaattttgaaaccatggattttgctactccgtccctttatttaactaatattctcatacagtcccgaattgccttggagttttctcatcacggactaaacttcaatcgtaccggaaatcaacggtggagattaacttttgtttatttattttaatatttgtttttgttaaaggggttatacccatactaattaatatttgaatttgaaaaataaataaataaataaaaggtgatacttcattcatagttccgtactttgttttcctcaaacttatgtctaaaataaaaatgttgccatatttctaaggaacatatttttaactaattttgtaaaattgcttttatttcttgttaggaagaataatagccaaacataaatagtaatatttaaaaaaaaataaaataaaaaataaagaacaatgaatgaaatatggtagtatcatagttcaacagcaggttttattttcatttttttataaatataaatatcattattgaagttgttcaatgattataatagtatcttcatcaaacaaagaaaatgattgtaatagtactttttttttaaaataatcagatggatatgtcacagctataaactatgtatatttaattggaaaataactggcttcagaagccatttttaaaagttcactttgtttgccatacatattattattatcatcattattaactaaaaaataaaaacaaggaaacgaggccatcttcaactaggctttaagtcttgttatctttattaatagaactatgatgcaattgagtgtcatgtgatgcaactctatatttttcacattttgtttattaatttttttaaaaatattttataagaacatttttgatgaagtgctaaaaccaagtgtattattatattttaatatattttaagaaaatataatttaatggtacattaattgttgaaaattatttaaccagaattttaagtttggtaacacttttttaattaattttctgtttttaaaattgaaaaagtgaaaatattttcaaaaacatgttctataaaactgttttcacttttcatttttttaattgagaatcaaaaattttaaaaacaaataaaaaaacttactttcaatatttttttaaaacagtttttttcttaatcaatattttagactccgacgagatcccgcgcccccacgaccctatcgctgaacgcagcctctgacctgaacccaaattcgatcccggatatagacccgacttaaataaaatcaaaaaataaaataaaaatgaattctacagaacacacttttattttctatttttcaaattgaaaaacaaaagt

SEQ ID NO: 111044 - DNA, 8169 bp, Cannabis sativa
  modified_base (6444)..(6455): a, c, t, g, unknown or other
ctttaaaaataaaatatattcaaaatcttaaaaatactaaaatcttaaataaaactatcaatacgtggctcggcacgtacattcacctagtattatatatatataccatcaaaattttattttccaaaactccatttattatggttggttgcaacctaactgaatcggtcactctttaattcctttcaataaatatgacttggcctagttagaatgacattcatccaacttttttcatattagtaacattattattataagataatctctcttgattaattacttaattaatatatatatatagatgactttagaaaccaaaataaatacgtagttaaatgtcaaacaccgttatccatccttccacgtggttgtaggagattcaaactctaataatagagagataataaattgtgtctaaaatattttatcaaaaataaaaaaattatgattaaaatacctaatattttttatatcatggtctattattttttggtggtacgtacaaatatttttaaaaatgtatcaaaaatgtgtatataaaaattcactactagctagctataccatttaataatattttagaagtgtaatagtttaaaaataaatatattactgttaaaaaaaaagaagctagtataagaatacaacattttaaaaatatcagtattttaccacacacaatatttatatctgtatttatacttgtataattaaaaggggtaatatagaattaattaaggtcaatgaggtaatgggagggtagtttggtaatttgaggtagggaagtgtgaagcaacgaccactgaaatccaaaacgaaaacgctcccaatggcaaagctgacctacaacaggggccgactcttattatcccaatctcctccttatctatacctgtacgttcccactcatatatttatttatttatttaattttcaccaaaaatattattattacacacaattaattattttcttaaaaaaaaaagaaattaattattacaaggttcatgtatatataattagctttttatttttttatgataaaaccttaggcaatgctggctcttaatttgaaattaaaaagattctttagctctaaatgtaccctaaacatccccttttattattttattttaattattaattaaaaggattgtgcctctacatagtaaatgacagaaaaacccatctctattaaattataaagaaatcacgttcatatattccaaccccttcttaaaacccaaacggaattcactctctcatcaaattctttctcacaaatatttttttatttttatttttattattttttttctttctctctacaatttctcttttttttctccttcagctgtaatttggagatccacatcagatcaaatcatgggagactcaagtaatgatcatcgagctggggtagtagctgtttcagcctccaacgttacgatggaggcagcggtagccaccacccaagatcatgttcttgaacttcgccaccagcagggaggtagtggcgaagacaggaataacaataataatattgttgaaagtaatttatcgaacaattcagctgaagaagagaacaaattattattcgacgagagtggcggcggcggtggtggtggtggtgaccggagcggcggaaaccggtggcctcgtcaagagactttggctttgttgaagataagacaagatatggatgctatttttcgtgattctagtctcaaaggtccattgtgggaagaggtttcaaggtaataattattattatgtatttataattattgattttattttttgttaattcagttctactcttcttctaattacttgatttgatttatttgatgaattcaaatttgtttttgatttttttttcaataaagctataataaattaatgaagttagattaaattaagtgaaaattaataatctggagaaattgaactaaatttcaattctttcttccaagtggggttcgcattcttgaattaattaactaaagaacagttaattctataaataaatattaatttcaaagcattttttttagtttaaaagcaatactaatattgcatgggggcttagttaatatatatatttatttatgtataaaaaaacgaaaatttacagaacgaaagagcacttctgattagctataaaaattaataatgtactgttctccacatgggatataatataagatataagaaaaaaaaaaaggaaaaaactttatgcaatataagtatataacgatatatataacttatattatgtgatcaaagttataataaatgacacattcgtcatcaatattcttgaattcacaaaattattatactacttccaaacttaaaatacaatcttctctcgttacaattaatgttttgccagtagttttaaaattattagattgatcaatatattattttacgtaacatatatataattaaaattaaaaataaaattcatttttgatataaaggaagctagctggtcttgggttcaaaagaagcgcaaagaaatgcaaggagaaatttgagaatgtttacaagtaccacaagagaaccaaagaaggccgtacaggcaagacagagggcaaaacctaccgatttttcgatcaattagcggctttcgaacaaaaccaccacccgccgccacctactccgccaccaccaccgccacaacagccttcaaaaccacaagtcatagtaaacaattcaccaccaccaccaccatggacgacccctcctccaatcactacagtcacttatcatcaaaaccctacaaaaaataatgatagtaataatagtaataatattcctcttctatccccactagtagtaccattgccaccaacaccaacaccaacaaataatactactatgaataatattagtactaataataataataataataattctttattattccctccacaaaccaaatcaataaaccatcttaacactaccaccactgctactactacagctgttccaactgctccaacaacaggtattgatcgccatcaatacctgttctcgagctcgtccacttcctcttctactgcttctgacgaggaatttcaagccagaagcagtagccgagggcagaagagaaaaagaaagtggagagacttctttagaaaattgacaaaggaagtgataagaaagcaagaggaaatgcaaaagacgtttctagaaaccgttgagaaatccgaacaagcgagaattgtccgcgaagacacgtggaggttacaagagatggcaagagtaaaccgcgagcacgaaattcttgtccaagaaaggtccacggcagccgccaaagacgctgctgtcatcgcattcttgcagaaggtctctgccggcggtggaagctcggcggttgttgttccgcagaataattcaagccatttgttcttatccaataactatcaagatcataacaatcaccaccaccatcacattccggcggtgtcattaccaccgctaccgtcacctcagcagcaacaccagcagcagccaacaccgccggcacggcccaaattaggcgataactcgtctaatttaagcccttcacggtggccaaaatcagaagttcaagctttaataaacctgagaagaacactcgagttgaagtaccacgaaaacggaccaaaagggccgctttgggaggaaatctcggccgggatgaggcgactcgggtacaaccgaagctcgaaaaggtgtaaggagaaatgggaaaacatcaacaagtatttcaaaaaagttaaggacagtaacaagaagagaccagaagattcaaagacatgtccttactttcaccagcttgatgcattgtatagagagaaaacgacaataaaaaacaatgtggttgatcaaattcaaaacaacaatgtattaacaatggaaccattgatggtacaacctgaaagacaatggcctgatcaaagtactaataataattcagaagaggaagaagatgatgaagatgatcatgagattttattagatgatgatgaagaaagagatagtagtagcactgagcttgatcaagatcttgatcatcatcataatcatcatgataataagcaaggtggtggcagttataattcggtagttgttgataacaaactacaatcttcttcttctatgaacatagttgttgagtaaggacaaaacatgacgaagcttcatttttttattattttttttactcataattaaagaaattattacaagtttgagaaaggggaattggggggaaaatttgtgtattattatgtactggtgattttaccgaatttgtttactatatatatacatgattattatggtatatgtgaaaggataatgtaatataatatatatataaatatatatatttcagttctatgtaatttttagttacaactatataaagaaggaattttcatttttttatgtttttttttgtgaagtttttacaaaaatatagtttatattttttttttgaaaacattattttattgggaaaattaaataaatagtgtaactaaaggagtaacctgttaccttaatttttagtgttactaatagttactttataatgtttttctttattttttaattttttttctataaattaaataacttttttgaagaaagaactatataaaatgtgtaattttcattatagaataatgtttgaaacacacatctatatattaattactaaggttataattaattataactatatactaaaaaattatacataccactgtaattttttttttgaaatatatataaattaaatttataattatataatttcaagttcgtaactatatatatgtaataattttgtaaataagtgacgaaaatacaagtaccggtttctgataagtctgttacattagtcggtaaatattatttacaaaattattacatatatatagttacgaacttgaaattatataattataaatttaatttatagaccaaagttaaaaaaaaattattattacaaatcatgtatattttgttaatagaaaatgaaatattgtatttattattatatccattctgtatttttgtatatttctagattttgtaattttaatttttaaaatcttaattattttagctacagctaatatttatttaacattaatgtgtaatctcatgtatattaattgtaatttttcatatcattatctatattgacgtcctaaacaatactcatgaaggcatagtgttattttattttagcaaatgacgacataattaacgttattgatattatctataaatgtaatattcttatatatttagagatacatgcagtcaaaataattaaattggtataatagaacagataaatagtaatagttttttaagttttttcattgtacttattggaacttgaacagtttctctgttaataaacctttttaaatatttatcttcccagtattttagctacgtacaaaaatctttttaccatgtatatatatgtaagtgttctaacaatattgatcaaagttgatttaatataaatctaaatatttgcaacataaatatctaacattgtaatcgttaaagactcgtcgattttttaagcagcaaaactatactaacgttagtaaaaaaatatatattagttaattaatgaagcaaatcatcatatatttattatatttagtaggagaatttgaaagtcgattacatatattgataatttgatatttattatatacatgcatatgagtcgtcattgtaattattagtgggatcaaagtgtgttgattaatattaataattcatcttataatattatatatatagttttgtatttatctttctgttatcacaaggtggtgtgttgttgtggggatatatatggaaaaatttataatataaaatttacaatgagtagtttctgttatcttctccatttaaagatggaaaattgcattttttttaatgttaaataaagggttatgtagtcagagttgttcaagaataaactcataaaaaattagctatcataatgagtgaaattaagcattaattaattgttaatatataatgtatattgtcaataacatgagggagccatagctatcttgctttccatacttgattattattattattattatttttaaaagtttaagctaattaattatttggatataacatggctcatattgatgatcaactagctaattaagaaaagtttgcttttttcttttttaatcaaaatgtattttttatattttataattagaaaatcatgtgatgtaatggaataattttatatcatttttttttgtccaatatatttaggatcttttttaattttaaccaaaaaagataacaatattatgaaaatatttttaactggccaaataaataaatatacagcccaaataaaaaaaattacacaannnnnnnnnnnncacaccttcaacccaggatccatgtttcctgaacaagcatagggcaaccacacagcaacccaatgcaatcgaaacgaaaatccaaccagaaatccagtttagtttgcataaaactaatgtcctgacttcaattttcagatttatgaaatgcatatctcaaaaagttgaattggagttcccaaacaatccaactcaagtataattaaaaaaaaaaattatatcaatactatagtaaaatatttattctagtgtatttttgttgtttttcaaattttaatggtgaatttgttcgtattaaatcatgaagagacatgtagatagctagagttacgtaacattattctgatttttaatgtttcataacagttacatacacattttcctaataattatttctccacatattactattaaggtacaagtaattatcgattagtgacaaaaaaaaaatatctgttacatatacacattcacatttttatattttttagttgcaattaaattgcacgttaattggctcgcaacagatatagctgttacattacagtttcaacagcaacccacgattcatgcttcctgggattgaaactttcagtcaaccatgtcccagcaaccttcgtctgatgcaacctttggtcaaccaccgagcaaccttcatccaattgaaatcttcgtctgatgcaaccttcggtcaaccacccagcaaccttcgtctaattgaaaccttcatctgactcaacattcgaccaaccacccagcaagcacgtctggttgtgtaagtgatagtgtaagagatattttgataactaaaaacgcataagaagtataaatgttgtccacaccttatgaaagtatttttataaataaagtattaatttatattttccatataataattccatatatatctacatatatagtgtcaaaaaaacagtaatataacaatctaataatagtactctaaactaatttatatcttcctgaactaatgttccattaaaaaaaaattacttttttctttcatgctttttaatctatattaattaataaacaaattaagaaaaatattccaaactattatttttactatttttttttataataaaacacaaatatctatttattatctcagtaaaatataatatttacaaaaattaagtacaatatatttataactggttattttttttatttaaaaaaatagtataactttttcataaaaagtatatatttcactaaaataaaataaaattaaactaacgtgaaaatcaattgcctaattttttttgtaaatgatcatctattaattagaaattaaattttttggtcattacaaaataaatttttagaagataagattaaggtaagcaaccaaaaagcaattgcctagttataacttataattaatgaatgagaggatcaaagcaaaaaatctctatatacattttccaatcttcaatcgatcttgtttatatttctttagtgacagaaaaaaaaattcgattttttattgtctgagtagcaaaagtgattctttcaattatttattaagtcatcttaatttttacaaatttaaatttttttgtgtttttaattattttattgtaatttacatattttattctttaattaaatatattattatttgggaaaaaaataaaaaaatacaaaaaaggaaaaaaaattacaaaaatactttgggccggcccattaa

SEQ ID NO: 111045 - DNA, 3599 bp, Cannabis sativa
tttgagtataatgtatggtctgatcttgaatctcttttgtactctgaatacttataattcaatgaagtagctatttcattataaaaaaaaaaagtggttagttttgcctccccaatacccaacttcttgaagataaacatagacatcaagttaatgcttattcctaagtcacaaagagctctcccaatatcatgtcctccaatagaaattggaatggtgaactattgggatcttttaaatttggagggatcttgttagtgaaaatggcacttgaatgttaagttaaaccaattgtttcaaactcgccaagtctttttttctttgtcaaattttttttcaaaaatttcacataagtgggcatatattctaaaacttttgccaaaggaatattaatgtggagttgcttcaaaacattcaaaagtctcttgaattgaacatcttgcttttgtttttgaaatcactatgggtatggaggtgagaattgatgtgaggcagatgttgtagcattctggacagaggttagtttcggtaagcttgaaatgtttgcattttctttgactttcttgttgttttggattaaagagggctcaccaaaatttgttttcattatctccaactccttgccgcttctcaaattgataactttacatcttctattcctcaacttagtagcaagctgcctaatttagttctccaaatttcaaaaaaattcatcttggcattgaatgagagcatcaaccttcatcatataatccttcaatatgccttctaaagcattagattgcatagaagagctactaaggtcagccctttgagaattccaagaataattaggaggttgcttccatgtttaattgtaataaggtgagaactgattattcctattttgattaccatgtagcaaatagatgtcggattagaaggacaattattaaacatatggccatcaccgtaataaacacaagtaacctccactagcttacccataggtagacaaaccattgtgttatgacatgtggataataatcctgaacattaaaagaagttattgaatacaacagatatctagccttaggataagcggtaataaacagatacctgtctcgcactatgtcccaaagacagcattgagaaaacacagtactgtgaggtggcgatattttgagatcattacggaagctaactaggatgacagaataatataaagactgaatttgtattgctggaaagggtaaataacgagtttttaagagcttgtaactcattgacccacatacttgtgagtatgttaaaagattaagaaaaataagttgggagcgaccacacttggaattcctaaaagactaatacaacaattgtcgtaaaaggcagtagcaaggataaacatattcaccaacacctcgcggaacgcgatcaactattcctaaataccgttgaaagatgcgagccatagttggaatatgttacctcgacaagaacagactatttcctaataagaacaaaaagcagttatcaataattattttattttatccacatgttataaatataaaatgtgaggattggccaagtttcatgagcggttacctagataagattaaaagagaaataattgtcttccctacaaaacatataaatagggacaaaacctaggggaaaataatcgatcattttgggaaggaatgaactagtgagattgagtgaatattcagagaaatcctcttataatctaaacacattgtaaggaaatactcagaaataatattaactcgtggagtatgtagattttaactacaaaactacgtaaaagttcttagtgtttcatatatatatatatttattaattataaacaattaatttttatttaaaaggcttcatttattgttaatgaaaatctgagttaatagtttggtgctttcattaaaggcatttgtaaaaaaaagactcgaaacacatctccccctatttaaaccaaacaatttcgtcatggaaaataatcaacctaatgaaccagttgtggaagaagagacaacatgttgattgggaaaagaaccccatggagaacaaactcagacagaccaaaccaaggaaggggacctactaagaggaaccccgagagaagtgaccttaggaaagaagttcctgagagaagagaatttgatgcatatgaccccacgagatacgtttctattatggagttagatgattgacaactccgtcggaggcttgcaaagtccaaccgaagaaatgaggagttggaacaggccatggatgcatccagagcaactcaaaacaatgcaccaccattacatgaagagcaacctgtccagcgaccacgaggaagacctcgtggttcactaaccagaagggcacaaggacccaatgtcaaagaacaggagccaaataatcccacttgcccccaggagcaataactatgggagacaagggacattcctattgatttgctagaggatccgttcagaaaatatcaagatggagagtatgggaagctttcagggtatgattcggatgatgacccagaacctttccaccttgatatattgaatttgtaatttctaaaagaatttaaaaaccctcatgttgcgcaatacgacaggaccacatactctgttgcacgtttaaataacttcaacacaataatacgagcaaataatgtgtccaataacttgcattgcatattgttccctacatccctaacaagggcagcaagtagttggtttgatagggaggcattgtctttgacgaatatcaagcaacaacctaaggaatccctaaaggcttttatgagttgctttagcaaaatagcagcaaaggtgaaaaacctgaatgatagtatacaattaacaatgctccatgctagaataactactaacttgtctactatgggaggcgagttatggaatgatttgcaagggcacccagttaaatcaataaatgaatttaatgacatgtcacttatatatattctaaaggaagaagctaggtctaaactaaatgtattaaaagatggcttggggaataaaataaactcaagtaatgtaaaaatgaacgtcgcaaacacgaggaagagccatgagccacatgggaagagaaaggatgaattcaaggaatcatccaaagataaaaagaagaaaaaaatatgaaaagtgttgggattttatgctctaaataaaatccatttcaatataatcaaacttactaattaatagaagatcagaaatcattttatgttgcatggttcagatgatttctttcatgattatattattaatgtataaattctattaaatcaagaccacatagttattcatgattatagtgttgtctacacagtggaatgtaatcatgattatgtatttcacagtttaagtcccatgattaatttgtcagtacactggatttatactgacatgataatcaacaataaagtttacttacaccttggataagtgttatatcctttttagggcattggcaaaatattctagtatcggatgtatggagtatacggactggaccgatattgacattggataagatatcataaatttattgttatatctttataagtcaatat

SEQ ID NO: 111046 - DNA, 1559 bp, Cannabis sativa
  modified_base (1463)..(1463): a, c, t, g, unknown or other
attcttttatttttaagtatattaacataatattcttttatttttaagtatattctgttaaaccaagttatatagatacttttaatatataaagatatatgcacgtttcaactcataattcatcaaatacaatcaaatatattccgagatacaagagtattactatttgatcacatgcattttataagttattaataaaattcaaatattacttattaaataaaaattcaactagttagtagttattaaataaaaaagaatgtgagatttatttgggaactcatgttaaacaatatatacctacaatgtatatccaatagaatttttatttaaaaataaacttaaaattaagcaaattatattttaattaaaaaattataatttaataaaattacactaaaaatatcaatataataatgataacaataaaaaaataataatactatattataataaaattatttttatacatgtattataatttagaataaaattattaattttacataaataaatttataaattataaactatgtatatatattttatttagatataattattatatagaaacatacttttaatatcaaatttaaaaaatatataattaattataatttaaaaattacatatatttataactaatttagacttaattttttttatattgttataaaaaattattttgaataaaatatttttagatctaaatttagcatgattatatatctttcataatttatattttggttttggtggtcaaacatgccaacctcgctaagtgtgcagtcaaaacatatatgaggttctttggggccaagtagaaaactctgccccacacccactacatatttttcattataaaaaaaaatatataacattattttcatattatcatatacacatgagaaaaacaaataaataaaataataactagctcagctaactcattttattgtatataatataaaattgtatagatcctcctctctaaaagcagtttcaatccacatgtaaagaaatgatgaacttgaacgacaaaacccatcagcctgcctatatatcctcaacttggtttgtggaccagttccctctagcacttgatccaataccaatgtcactatgtcagtatataacagcttggaacaatcttgcatgctaaagctaaagtatatttttcgtatatatctacggctcactcttaatatatatgcctctttatgtaatggaaatttgtgtatctcttttaagggatgttttggtaaacttgcatccaaatatatttttaattcctttttttcattatcgatattaattctttggtaccatattagagaaaagtggtaaaattctcattatctaataataaaaaaaaatatgatatttatacaaagtgggaaaaactcaaataagaagcctaaaagataaaatgggtaagttgaaaagggaaatttgattttttntgcttacatttggttaaaaaaaaatttctaaacaaataataactaatatttgtaagatatgacaatttttataatatctctaaaatacccctattt

SEQ ID NO: 111047 - DNA, 2372 bp, Cannabis sativa
ccaatgtactacaaaatataaaggcacgtactaggtacctaatattttgtacattttttttactaaacatcatgcataaactataaatgtactcggtacaagatatatcgtactccactaccattgtataaatacatagaaaatatgaagggctgaaaagataaaaataacctcaggccgacaacatggacccaccctctgtagtactattattttagatacgaatttaaaaaattatagaaatattttcataaaaaaattgtgtgtatatataattttgactaatatttttgtatttttcatctttaaaatattaattaatttgacttattattttgtttatgcatttgtttaaaaagatcaattttaattcttattataataatcattcagtaattattttaatatcttttaaaatatattatatttttagtttttcttgctataagttaattatgattatttttcttgtcaaattaagaaattatgaaaaggatcaacaatatataagtcgtaataagtttaattattattattttttaatataaattaatatcatatgaattataaagtattttaacaaatgagttataaaaaatgagataaattattaaattactaattttataaagtaataattaataataaataaaattatgatatatgaaattatatatttatcatatttcataaaaacaaaagccacaatatttaaaaataataaatttttttatcaagataatgcattagataaaatataattttcaaaattttttatatgaaatttaattataatttttaatacttttaaacaaatagtcaaggtccagtctaattttctataataaaatagaaataagatagcaaatagtaatattattaatatttttctctttatattctttattattttttattcgttttagtttttattcttctttgctcatatttatacttttaatttatatttacaatttttttctaatgttttttttatatactgttaacgcagattttgttaactaaaaattgagcctaatagtgacaatctcacacagaaaaataaaactagtaaaggaaaaagtatgaacacaaataattttttacgtgattttgcagttaaaattctgcatagttgacgagtcaatcttattagattttctgatggttttttcagggccttcttcccttatgactttttcgttccttttttgatctaacttgcctctacttataatcacatagtagtcagttaattatagaatagactgtaatctttacaacgtttttcccctgaaatcatggagtttgattacatattacgtagtataaatgcgattattatttgaatatcacacagctgtgatttatccgcttttactgggtcaaaatgattgtgtgtttaaacacgtcttaaatcataggttctgggatgtctcaacaggaactcagttccaatgaccttgatagcgagctggagctttttctcttatcttttcgaggtcgacaatgtacgcttcattgcttctttgtttgaaggcttaacgcttcattttgacaatcacatttcttatttacaaagaatacctcagcagtcatttgaatgtcagcttttgactcgtcaagactataagtctcactgaaagacgtctgaagtggttaaagtcaaaggagtgtgccttcctatagcaagataggcgactcgcttatgaggtcttgagtccacccgactgttatacttagtttgtatatattgtacgctaagtgttttcacaatcaatatgcatcgctttttgtcttcccaggggtaaccaagtcgatgtcttgccttatgcatcaaatgcaatatggtttctcgttgatacactaggtaacagtttgtatatctttaccctgcataagaccttataatcaacgagttgcaagtatattctgttacttacgcaattaatgagttattcccttaaaagtaatttcatcgatccatattccccttaacttgacatgtgtcctctattgaaatggtagccaaatttcgggtataacatataccaaactgtaattttatatataaaaaaagtaaactatttgtatatatatatataaaaaaatttctttctaacttttttttttaaaactacctctcaactaatttaaattcacaaaaaaattatataatttaataatcaataccaaaaataaaattatttatttattagtcaagatataaaaacttttatcaattaaactatttttgtaattattttttttctaaagagaaaaagtctaaataatctttggctaattagtaatttttctccctaaactttggcatgtaccaaattgtgtcccctgaacttttttgaccgtta

SEQ ID NO: 111048 - DNA, 932 bp, Cannabis sativa
ctcaataccataattataaaagcccgaaatgcagaagggcaacaaccatgattaaactccataaccacttttgatcagcactgaatttttctttctgtaattcataggccatcttcttcacattcagttgataaaagtaaaacagaaaaagcaggtgcttcccaagttaaaactttcccagcattactatttcatttttctcagcattgtcccaaattttctatttttcaacaatgcaaaaaggataatactaaagccaccccttgtgggaattcagtgctttcaaaaatcaaacaaaaacattcaatctccttaaatcactttagttcaaaacataagcttaagaaatcatattgactgaatctgaaaggataaagaacctaactttatgataatagcatagaaaacaacagagaaaaaggatattaacaccataatttcgaaaatgttaggattgattccatgatttctctcctaacaatacttcagccaatcagccaaattactccctcgtttcattaaagctaaaaaatttccatgattgaccgattcatcaatccatttcttcaacaaatttctcaaattaggtttcaaatacagtaaaatcgaagagagaaattgtcaaatgaaaaatacaacaaaaataataaaaattaatgatttgaagaaagagagaggggaaatagcaataagaacgaaccttcaacctcgtgaatctcaacttcaacgttgagtaattcttcaagtactacttcttcagcttccatttcaaaccttctttgagtttgggatttttcttcgccctagccgtagccgtacagtgagtcacaatggaaatcaaatattccataattacacttttaggcctactaaaaatagatattagcatttacacccatagttaattactattgacaagggctagagttgaa

SEQ ID NO: 111049 - DNA, 6996 bp, Cannabis sativa
  modified_base (6932)..(6934): a, c, t, g, unknown or other
  modified_base (6961)..(6971): a, c, t, g, unknown or other
ttcaggagacatgatttggtacatgtcaaagttcaaagaacaaaaatcctaattaattttttatatatatatttttcaatttttttctaaaattttctccataaaataatttttttgagaaaaaattatatttttgcgaacttatactttaaaaaccataaaaatgaacattagacaagaagagttgactgtggggaacagaacagataattggacaagaaccataaacaaaaattaaatagatgaaagaaatgtataataaagaataagctaacaaattattttcagttgtattggtgcaaattcagaacatctgacacagcattcacgggttactatagctgaaaaatcagatgttcatgcacataagaaagtagaatattgttacatgatttctaaatgaaatgattatcatgaatctaaatcagtatatttaaatcatctcacttcatatcttcaacttcagcttattttcaagacacaaattattcaagagtacccgtcggtcgtaataatcgcttaaagatcgggcatgcctactcctcttttcgcgtcgtaagtcttctccagcaccacatctattggagtatccttaggaccagctgcaacccaagttcagagaattgtcagagcaccaatgagtgtaaatttagtagaatggaatttaaaagtgaaatgaaaggaaagaaatatgtccaatccaagattttgcttgagaaatcttcatcattggtttcaccttagaaaccaagaaaacaaagtgtatccaaacaaacaagtttactaggaaagttattggttcaaactcaacttaacaaaaccggtgttatgggaggattgccctcggcttattaagtggatcgagtatatatctccagctaatataatatgggactttaataaagttcatattgaattggtaaactatttggatcacatagcattttacaagaaatatgttcaagttagcttttgattacaagcaacaacagtttgattaccaacgcggttggccctgaggtgaggcgagcaaggcatgcgccttggggacctgaacgcttagggccccaaaattgtaaaaagaaattatcagtataagaggtcaaggattaattcccaacatctattttttatttcttttttgagaaatatttaatgtgtagttattgagaattgaaccttgcaacttttaaaagttttaagatgtgtaccaccacaccaaagtactagaaatattgtttagataataattttgtcttagcctaatataccttaggaacgaccctgattaccaagctcatagttaatctttcaaagcctaaattcatactattaacacgtccccgaaaatatcttttttcgggtaacttggtttcgatttaattgtctaagtaagagaggcaacaagtccaagcctcatgtttagtgaatagtgttaaatgatgcacaagctactacttttatgttgtatatattcatatggttttagtacgtaccgactgtaggtctcggagtagttcttatcttcaagatctcaggccgaggaattattgatccagatgatccaatccctctggatactcttactttagtgccatcttcaagatacttagtcccaatcttacaaggtttcctgcagaaaaaaattgtaaatattcattctggatatctgaactgtaaaaaccaggaccaagcaccacaacatatgagattaaaatttatactcttgtaggctatacccggtaactggatcaagaacttgaacatttgagacatgaagaggggcttcaactgtaaagatcccaccttcatgaccctgaccttgcttgatatgtttcttaacctgtaaagatgaaaatacaagcttgtcacaaccataattttgaaaaacaatgtagaggttgatgaaacgaacatcgttactaaagggctcgagtcaaaataatatttagttcattctcgcaaggatcttaggaagaaactatggacacctataggatatgaacatcccaagactcaatttgtcttgaattacttggtgcttttatttaaggtgcacaacagaatttccacaagaaagtagtctctttgagaacataaaatatgatgtaagcaaagagataaacaatgtaaagacataaaatatgatgcaagaaatcaccaaagaagaagggtaactcaaatgatcagtcatgtagtttgctttcttaaggtcttccaataactaaaaagcgtattaaaagaatccttaggaaaaaaattgtctaccgaactaaaaatttgtcgatgtctctagtaaattaaaatcattgtttattagttattttgcttcgatttttcctttaataaaaaagcggtcaatacatccaacactaaacctgtaatccaagtcaattcacatgatcttttaaagtcacctatgagatacatacgaaatacatggagaatcgtcattagtattatcatacttgccaaccatcgattaactgatcggattaatcaaccaaagtttgcttcagtgattatatatgtggcttgctttcttaaggtctaaggttcgagtcgctcaattggtataatttttggatctccaaatattgtaaggcttggcaaggatggattacaagatatcattgttcaaaactttgaaaacaataagttgatgaattacagcagagttaaatagctccctctagaatttctatacaaatgaaaccaaatggaagcacatcatgatgactatgaagattgtttcattgttataacttctaactcccaatccactctttatccataaagggtgtgtttggaaagtttggacttgggtgtaattggagataattacacaatttagtacttttgtctgaccgcgtaaatgtaaaattagaggtaattgagtggtttcaattctcatgaccctagattgtgtatgatattaaaatttcatatccaaacacgcaattgtattttaatatattgtgtaattgctcgactaagtaactttccaaacacaccctaaagaaacaaaacaatttgaaatagttgtttgaagggtagattatgtatgagactatgaggagaaatcaatgcaaatgaacacaaacccaattgaaatcacaaggcatagctcaatctaagtccaacacaaatcttaccaaatttttgccttcgataataattcgattctgagaacgaacaacacgcttaacaagaccactctcacctttatctttaccccttgttatcatcacctgaaaaaaaccaacaaacacaagataattcagaaccatttcttttcctttaatccatgttaaagttcaaacaagaacaagaattgacactaacagtcaagtgtttttgtttacattatctcccctgacaattttccagtgtctaataagcttctctgctgctttccaacccatacttaatcaaaaatggtaagagttagagttccccaaaaatcctcaagatgtttaataagagatatctgcaacaaaaaaaaatgtttactagactaatgttaatgcgaatttgaaacccatatcaaaaaaacagaaacttgaaccaaaaatcaaaaaatcccaatttgcagaaacaatggaaacttgttcaataaaaaaactcagcttgaaaatgtgtttagagagagaacactgaacagttattgtttagttcgatcatgtttagagaaaattgaaggaatctcaatttatgataatcaattaatcatcatcatcaacctttgaaattcaatctgaaatcgataaaccctaattaatggctaaaaccctcttcttgtgatatctaaagactgtacctttgaagaaatggcaacggcgaactcagacgacggcaaaagtgtacggaataagcccatctatcattgggcctgtttgtttgtggcccatttagaacaagcccatatctttctttgtttgtttttttttttttttgaaataagcgtattcattcaataaaacaagaaattgttagacctcacggtcattacacagtagttcctccgatacagaggataacaaaatagaaccgtacagttggtgggtaaacgcccacttagccacattatgggcaacaaaattacaattcatgctaacattagaaaagttacaactagaaaaaaagggagatgatttaatacaaaaggagacatagttatcaagggcccaatgtggtctcgaatcactctccacaataacatacttatatcttaattctgcagctgacgaaacagccaaacagcaagccgcagcttctccgcataaagcatccgagaaatccaaccgagcagagtgaatccaaatcaccttacccagataatttcttgtgacaaccgctatgtacatactctctaagcccactctaacatcacaatttacttttatccaatcctggggaggaggagtccaggtctctcgcaggatcggcgaagggttaggtaaaagagaagcatgtaactctgcaaaagaggtgcaaacattgtcaatacatttcaacatatcagggggagaattattgtgaaccttttcattttgcaccctccataaagagtcagcaacaattgaagcataaaggaagacttcctcaacccggattcccctatttctaagatcccaaatgaatttcacccgattccagacacgaataccagcatcacaaatagggtaaattccccaaggtgaggatcgccacaaatgcatcgccacctcacacgagaggaataagtgttcaatagattcttcctcaaaccatacagaggacaaaaacaacaacaacaaaaattagaaaaatataaaaacaacaacaaaaattagaaaaaaaaagggttgtatgaaattttcaacaattttacatttttttagattttatttatataaaacacagttttttgtgtattttttttactcttgttattttgttatttgtataatatttttatattgttttaatgtttttttttttatttttatagaatactcaagcggtatggggttctgggtctgtgtgctcgacggtaggagttttggatcggggttaacaccaaagagtgagagagttagagcgagagatatttttaaaatgtaaacgcatttttagaagaaaaaaatattaaaaatatatatactatttctaattgagtggtatattaaaacaagatgttttacatttaagcatactaaccttccttcttataatactaattgatcttaaattatttttttatcacaaatttctctttgagctcacaatttcgaataattcaaaaactaaattaggcatgtttatattagggtgttttcgagctctcgtaatgtaataagagatgagagaacgaagaatatgaaaagtaaaataaaagttattctaaaaataaggaaaatttcatcgcaaaatcaattagtgataaataaaataactaatatttatataaatgaaataatattgtcatacatttatcatacggatacactaatagtcaaactttgtaatcttgcaaaaatccattctatcagcacaaattcataaatctctcaaacgtaacttaaatcttagctcgaacgcactcatgtaaaatttgaaacaattcatacaaattttagtagcacatttctttaaccgaagcttgaaaaactcgaaccctaaaacgaaacccgaaaacacctctacaaactacaaatagaaaaatctatgcaaacttacatgggaaatatatagtataaacaaagcactacaaagtttatatatgttgaaataaaaataccatttgatatttaagaaataatggttctagttaccaaattacatcacattttttcaacatattgattagagtagacataatctattaaagaaatacaaaagaagatggtgatgtttatttttagtactatgagcatgaaggaaaaaccaattctttttgagtgaatccaacattactacaaaaagctttaacaacaccatttccttctcttaccaaattcacatttctcattgaaatctcttcacattcaaaagttttgctacaattgatttttacagccacttctgagaagctactccctgttatgttactgtacaccacattgcttatttttactgccgagtactgtcataaaaaataaaaattaaaattaaattgtttatatttaatattatttagagtaattggtaaaagttattttgcaaaatagtgttactttcataattttttgcaaagtaaccactaagataaggtgaaaaattattaagttacgggtaatcagtgaaaatatactcttttataatgtcattttcaaaataacatttttataaggctatttttgcaaaaaaaaaattattaaaatgaagctactatgcaaagtgtttaaaaaataagacaattttgcgaaatagtccttaaaataatgacattaagaaaagattaagaaaatttatattattttggtaaaaaatttaagttatcttataaaaacaataaaaaaaatcatataaaataacgtaataataacataaaaataatataaaaataacaacacaataataaaaaatacaatataaaaataacgtaaaaatataaaaaattggtattttttgttaaaaaaaaatcgtattttttgttaataaaattttaaaaaccgtaaatatatttaacataccgtacaattatatttttatgacatcttataagaaaattactaacgtaaaaacaacatagaaataatatacaaaacaacaacacaataataagagtacaacataaaatttacgtaaaaacatacaaaaatccataatttttataaattaaatcttaaaaaatgtaaaaatatttaaaattctatttttaattaattattttattatttttaaatatttatgaaattatctcaaaaattatatctttatatattaannntgtctatctaacggcaattcttggttnnnnnnnnnnnggtttaacgattctttttttattta

SEQ ID NO: 111050 - DNA, 3020 bp, Cannabis sativa
  modified_base (2955)..(2982): a, c, t, g, unknown or other
agtgctcgcatcttgagcaaaatagcacaaactagcctttagtaaaatgggcataactctcttaatgtttatccaaataacttggttcaacttgaattgaaaatatcttttcaagggggagttaagtgtgtctcatagtaatagcttaattgaagttatcgggctcaaaattagctcacaagataaacgggcacactttaatcatgaattgagtggtgcaagtaagtgtaggatattggagaactatgtcacagcccatgtggcatcatatgcgagaagtggcaccctaaaacatctatttccaacacttttctccaatttcatgaattccaaaccaagaggtgacatcccttgtcacttctctctaatttggtacatttcttgccaagaataatcattttctcaatatttgtgagattttggcctaagaataagtgagatttttttagatatttatttatttgtactcttttattcattattgggaataagatatgagatttgaaagtgagacaacccaatacgtaggggatcattaacaaactctaagcctatataaagatggtaataggctagctagggagagggggacgaaagacttgagagataaaaatcctttgtgactgcttagaacacataacccgttgagatttccttcatctttttcctaagtcctccatactttgtcgacaccaagtctctattactaaatcaccattaacttacaaaattaccaagaacaagagaccattctcttttcttgctactattggtttattgttcccaagaaccttacaaccatcatctttatcaaatttgtgaacattgggtcttccatgagtcttgtgttcataagtatcgatacaaattttacctagaaatctattattgtattattgtccacacactcttgagagcataactctggtgtgtcagatccaattaataaaaataaaaatagacgtgaccccattaccatcgtgacatgggggcaaactactataaattcttgatgtccattttattttgataaattaattcatcgtaatcctcttattttttacgatcttcttagatcagttgatgaaaaatcgcatcaacagtttggtgctttcattgatagcgttgtagtgaaagtttggcaactttccgtgaaaactcattatttcaacaacaatggcagattatccagacaagattgactagataaatcaatacccatgtggcgaatttcaccttgcaagattgtttgacaaaaaactccaatctccataaggggcacaacacccaacactggggacaccaatcatggccatcatggagaaaattgaagtagcagaggcgctaaatattgaggaaattgatcctcacattggtgatgacagggccgaccttggtccaattgaagatcttgaagaagtcatactaaatcttgaagaaccaaccaaaactgtgaaggttggcaagcacctcaataaggaaatcaaaaagtcccttatccaattcctacttgacaatcaagatatctttgtgtgggtccattcagacatggtgtggattgatcccaatgtaattacccatgtcctatacctggataagagcatcccagtaaagagacaaaaaagaaggctccttgatgagacaagatatgttgccttaaaggaaaaagtagataaacttcttgctagcaattttattcgagaggcattctgccccatttgggtggccaacctgttttgttccaaaaccaagtgaaggctcagtgaatagcctcagcttcagctaagattggagaaagacctaaggttgcagaaaagtagaatcctactattacacaatcattcgaatcttgaacaatggccccatatccatgtttgttatcctgacttcttattgcagcatcaacactgagcttatattgccctgtaacaagtaataagaaaactggtcttgattgagctgcctttaagttttgcgtggaataatttgattagagtgtgatcctcacctaggctgagttgtagtcctacaaataagaaacaagaaaaggttctatattcatataaacaggcttctcatctgcaaacagtaatttgttatgatggttccatatagcccataaaatgccaaaaaagtatatccaatttgtctttttgaaaagtattgaacgctctcaataaaatttcttttatatcatacaattcccgttgttattgaaaaaagttgagaaactagtgtacttccaacatttacaagccctggaacactctaaaagggaatgggagttagagtcaatatggttcaagcgcagggagcaatgagagtcatcaaggatctttctcgagaagagattaagtttagatgggaggaggtggttaaaagctctctaaataaaatgttttattttaggaggaatgtttgaagacctaaataaatttataattggaacttgtattatattttacactctagttttctatgaattatttcaacaaacaccgaaggcatttcaatttaagaatattttcattcataaaatctaagtaatgattctaacaaatagagacacatatatataaacataggatgaaaaagaaaccataaaatccataccagagcaaagggagaaaagcaataccaattcattgatagaaatagaagattacgtactattaaatgggattgaatcaatttccgtcaatatggtggagacgtagtgccggtggttgtggcagagatggtaacgataatatagtttcgatagttgtagtagaggcggttatggtgattgttacagaggtgaagtactactacatctgtggagagtgtagaacttcacgacattgagaaagaagaaaaagagttgtttcgcatgggttgtttgagaaagttaattaaaaaatacgagttctactttgtaatgaccactttagtaatttggattagtaaaggcannnnnnnnnnnnnnnnnnnnnnnnnnnnttatttgtgaatttatttaattgtcgaccccaatattt

SEQ ID NO: 111051 - DNA, 1894 bp, Cannabis sativa
gcggacctcggccgctattggtccgccgctattgcttggccgctattaatagtattagcggccaaaagtgtacgtacaaattattcgaaccgcatatatcattaataatttttttttgaacaatatcattattaatcatttctaaaataaaagatttactgtaaaattaaggtttaaatatatatattatatagatgtaatttttatttttaaatatatataataaaattatttttttatataaaatatatacataatttttataaaatatttacataatttttattattaaatatttatttatattataaaattaatgaagaatgttttgttaaagctattgtggaaaactaaaaaatatcattaaactaaaaattttgttacataaccacattttatataaaatagatattaatttatagtaagtcgagtttatttaataaaaataataaattttcattgaaagtaattagaagttaatacattataaagaaaagatgagaaatcatccatttaaattagttcattatccattgagtaaacgaactattaatttatgtgtacaataattatgaataagagatatctcaaaaaattggatagcaaactaactagcaataaaacctaagaaagatcctacttcaaaataaaaaaaatgatctcctaaaaaatagtaaatgaagataatcaaccaaactcaaaagatttaattaataggtaatccaatgcaagagaccaatccaacgcaactactaaaacaacataagttcaacttctactataatttgtgaacttccctaaaaaccaaggaaaaaaaaactaaaaaaaaacatatcttgtacttatgacaaagaaaataatgtaataggtaagataaaaaaaaaaaaaaaatctaacttgaatcaagaaacttatctctaatttgaatatttgaagagaaattttgttcggacttattaaatttttatcaattctaaaaaataaaattttaacataacaaattaaataaacattaacataacaaaataatattactgtacaaaataacacgctaagttgacggcaagttgagtgtttataacttaattagtcaatttctctccttgtgactgatttattttctctatagactataataagatgaactatttatgagtttataaacatatatatttatttatatgttcgtgaatcatgaccctccaactcctaaataataaagatagtgaacgagataatttccatatgcattatttatgaattggaaaataagttgaatacacatatatcgaaatgattaatttcaaatatatataaatatatgacagcgcaggtactagataacagtatgtggcattgatctaggtgccctatatatacatttataaatatgaaactattatttctaagatgactatatatggtctatatttgtggtggggctttaatgttttgttatatacctaactaacaaaaaggagctggtagtgcttcataattggaataatgaaaatatgatttcttaatagaattaccaaaaataagaaacataatattattgactctcatgatcttatgcatgtatatgtcttaagctagtctgactatatatgaatattaaagcttatcgattttcgttttcactacttttaattatattaaatggattaggttttaagtctacgtagtatttggtgttatatagtataacatgtataccataataatttcatataaaaaaactaattagtataataacatatataatgtaattacaaggatttttaaaatatttcaactaattataaatagggaaataacgcttcaaatctcacttatatttattcttgtaaagtcctttttttggcaagttaggtgacaaaataatttttcc

SEQ ID NO: 111052 - DNA, 3582 bp, Cannabis sativa
  modified_base (619)..(631): a, c, t, g, unknown or other
gaaactaaaagttttcctatcaaaacaacatggaaataccctaaatatcacaaaaagggaaaaactagggttcccaaaactgccccaaccggaattccgcttttatggggtttcctaaggacaatcagaattccggttcctacaggtcccactgaaaacttcaatgtaggaaaacttcaaaaattcacaactcactcaaatcaaccccaaactcaaccaaatctttcagacatgttcaatatatcccaaggaacataaacaaggcaataaaacaacctaacatgctcaaaatcataaaacaccattagagagcaaagcttgaattcttaaactcaaagcttgctcaaacaccacaacagcccctaacaccacttcaattcattataaaaaaaatcttaactaaactttagaaaacaactacacacatcactcactactacagaaccctatctcaagaaaaacatgcttgaactcaactaaaaacataaaataaacaaagaggagagtctaagggagttataccttggattggaacactagaaacttgctagaaatctctgaattactgaagaacaaaatcaaaccctacctgctctagggaaagagagagagagagagnnnnnnnnnnnnngagagagagagagagagttgaagagagagaaaatgtgattttttttgtgtttttcttttaatccttaaaaataaaaataaaattggttttatcaacttaatatcagccaaaaaaaatcatattaataatcaaataaaatctcactaaaggacaaaaagaccataatgctcttgcctacaccaaaagtcataaaatcacttaggggtagtctggtcaattttaacatatcaactattctcgacattctaaatgtctaactatattgtcccgctatactaaaaatactaaaatttgattctaataaccaaacgccgcgttccaatattgtcgggcataaaacatacaaaaacatgaaattctatgtatgacatataaaatgctttttgaattcaaataaatcttcgaaaaataataattcataactaatatgcaagtttcatgaataaaccctatttatctgctaatttctaaattaaagttaagtggtctttacattagaattcttaatggataggctattacaaaacaagatgcacctcattgatataggtagtacctgtcaatccatataagccctcttcagctatgtattcctatacctacatagtctaagaattatcacacttgaccttcctcaggcaatgtgggattgcatagcttactcagtatttccccttacagatcacatgactactgactgtcacaatcaccccctcacggggtttaacgtcctcgttgaccacacttttggttgggtcaaggctttaataccattttaacgcccctgctttaagcctccattatggcatactcccacggactaatggctcttatacacgggtacatcactttggttgcttcttggattaatgactaaccctacaaacaaccactagtatttttatcgtgctttgtcctcactcgcacgctccttgggtaagcttttcaggaggtcactcatccctttcccgagacgtcacactcgattgtccatttaaaagcatttataaaaagatgataaactaatttattaaaaataaacaaagcatgagatctcatagttttaaaacaaaacacttgattcatttataaactttaaaatattaacttctacaaaactaattgagtcataatttttaacgaaatatttttaaaccaaaacacagtgacaatttcctaacatgaagtttatgcctcgagctctccatcctcactgcttggttttgcctttactgcacacggagtactcgtgagctaatggctcttatacacgggtatgtcactctgattgctttctggattaacgacttaccctacaaacaatcacgagtgtttctagcgtactttgtcctaactcgtacactccctaagtaaacttctcaggaggtacccatcccttaagaactccaaagttaagtgttcttgacttggagtaatcttgagatgggtgacctcctgggaaattcacccaaggagcgtgcaagtgaggacaaagcacgctggaaacactcatggttgtttgtagggtcagacgtcaatccaagaaacagccattagtccatggcaatatgcccaattgagacttgaagcgatgggggttagatttcctacttaatattagaagtctatacgtatcctcatccttaaccagcttactaacatcaaccttttcctttccatgatctattttagttttcttcacccaaattaagcctttatctttggcacataaactgacattatgccccaagagaccacaggttgcacaggttgtgggaagccattcatattcgataacatgatccttcaaatttgtcctctctcattgaagaaattaatgttaagtagaggcttatctaagataggcacttcaacaagcacccgagcaaatttaccatcgaatgttcacttgttaccttgtcagtcataatcagattgccaatagtactcacaagggcaatgagagtatctctaccccaatattgcaatcccaaaccattcaagcaaatccagggacaagaacaaatttaacaagcttgagggaatcaagatcaaatgagcacgatctaattaccattggttttttttttatcaaagtggacaaccacaatttccagcacaagatccttggtagcttcatctctaaagctaactagagtgaaaccgaagtgcattctcacaatgcgatcaactcccagatttccccacttctgtttgatgaagccctcaaacacacgaaacgggggattagctctaaaaacaacacttatgaccaagcttttgcaaaatgaagcctcagcttcaacctcatccacatctattttagcaattaactaatcaccatgtttaattggttcaataaaattaagtttagtaggtgtcctaacctaattagccttaaatttggtccaaacttcctttactaatgatttgaagtcctttgcctcaacctcctctcccaagatcaaatcccaaatcgattcagatcaatctcatttggtagccccaaatctatccccaatttcgagtatcatgaaaacccccaatctatccccaatttcgagtatcatgaaaacccccaatctaacttggttcttccacatttttctggatcaaagggagctcctaatcagttgagacaaagccgatggtctaaatctcaagcttctaaagttttttctttctccttcccatggagtgaattcgcacgctttaacccaaattttaatatttaataacttaaataacaagttttaaaattttaattaccatattaatatgtccaatatattctatatatatagggtaacgattcagtcacgccttttacagagctgaacttgttccgcctatgccacgtcactaatcatttatatatataaatatgagtgagctatattttactgttagttttttttttttttctttatatgttatttttattttatttt

SEQ ID NO: 111053 - DNA, 4403 bp, Cannabis sativa
tttgaagtgtaaaaataaaaaatgtcctattttatttataaaactatatattaaatatattattattattattattattattttgagataaaataacattgtattgataacaaaagttaaaatagaatagacataattagaggaggtacttcctcccgccatgaacaattagaatccaccgaaagagcaaatttggctaacaggtgagccgcattattagcagatctataaatatgatagatttgagttccatggaaattagatactaaaagtgaaatgttgtttaacaaataatgaaaatctgaaacatgtctttgagaagcttgcaatccgttaaccactaacagagagtcagtctctatatagtgaactggtaattgaagttctttgagccattgcgagctataaaccgaagtcattgcttccataacttctggtcgaaaatatccttgaaaatgcatagccattacaactattatatctcccttactattacgaaagattgcaccgaagccaggcttgttattcattaactactgcattagtgtttaacttcagccgactagagggaggattcagccactgaggatcctgctacagaagtcttgaagctgaaccatgagaaggagttgcagaatctggctttgcccgagcagcatgatattcttcaaggtaatcaactgcaaagaaaagaagaatttcaggcggctttggctttgaaccatgtctttctttatttctctcattccaaatgctccaaataattgtagcaaattgctagctgctttgaagaccaaatcgaggatacatgtaacattagttccattaatgacatattgttaaacatgtactcttggatagaaaaggaagagagctgccagactttctgaggtctttttacagtgaaacaaagcatgagtaatggattcattgttgcaatgacataaagagcaagtagcaaaattactaatatgtccagtatggaggataccagcaatagggagacaatcatgtatagctcgccaaagaaaaattattatttttgaaggtaaggacaaagactagaattttttccaccattgaaaagacttgtttgaactagcagtacgctgctgctcttcaagaagggtagctaaagcatatactgatttgactgagtacattccaatagctttatgatgccatataagttggtcttgtttgttacaaagtgttaaaggtatactctgaatcttgtaaacatcagaatctaaaaacaattgttttagtagagagtgattccattgtctagtttcagtaatcaaagtagataccttcatagttttgtctgtattcttaaagatcaaaggctgaaatgaggtaataccaagcagccatggatctgaagcacaaaggatatgagatccatcaccaactttccaacgcaaacctttgcaaagtaattcttttccccaaataatacttctccaagttagtgaggggtaagatcctaaatcagcatccaagaaagagttatacttgaaatatcgggctttgagtattctgtgtaaaagtgatgtagggttggaaaaaattaactacgcttgtttgactaataaggcttagttaaaatgaacaaaacttttaaaacccatgcctccttcaactttcgagtggcaaagaacattacaagttttctaattaatccctgaggatgaggaattggatccccaccaaaatttattcatcatgatcttaatttggtgaattagagacttggaaagacgaaagcagctcattgcatatgttggtatagattgggctacaactttaagtagaaattttttaccaccaattggaaataattgttcccgccttgctgaaagtagattccataacttctctttaatttccccaaataggattttttttgtctctcccagagtaggatggaagccccagataatgttcatgacaaggcttaattggcatctgtaatgtttgttggatgttgagttgtattgccgaaagtgtgtttggagaaaaagataaaactgatttatcttaatttaatttttgacccgaagcacgacaatagtaatctagagaacgtttgatatcatcaatggatcttttattggcatgactaaggacaaggctgtcgtctgcaaagaataggtgcgacactgaaggagcacctcgagctactctcagaccttggagattaccacggttttcctcatattgaaaaagccttgaaagcccctcagcacaaatgataaaaagataaggcgaaagtggatcaccttgttgacgaataccacgactaggaattacatgaccttgaattgagccatttatcaaaaaggaaaaggaaatgatgtttagacattgttgtataagctctactatagaaggggcaaatcctaaggcaatcatcatgctacgaagaaaatgccactccactctgtcaaaggctttactcatgtcaagattcatggctgcataaccttcttttcctctttataaatgttttagtgagtgtaataactcaaatacaactaacacattatcagtaatgagccgagattgtaagaaggcactttgacattcagatataaccattgagagaaagggctttgagtgaaacacaatggactttgaaactaatttatagagcacattgaaaaggcagattggatgcaattgagacatattccttggctttttaactttaggaatcaatgtaatcaaagtcttgttaaagaagatggatcaaccccattattaaggatattgagaacagttttggtgaccaagtctcccacaatgtgccaatagttagtgtagaacataactgacattccatcaagatcaggactattgtcttcactcatagaattaagggcagtgtagacatcttcagtagtgtatggttgagttagaatctggttcatatcagctgtgattttacatggaacagaagagataacatgatggagagcctctgaatctatgccatcagtagcataaatattgttgaaatattcttcaattgttctactaataccctctagagaggaatgttcattgccttgatcatcaatcagagatttgatagtattgtaggagtgcctactgtttgctttttgatggaagaattttgtatttgagtcaccagactttaaccaagaaacttgagaacattgtttccaacattcttcttcctgtgcaagtagttcatccaaaataggttcactcgattttagcatatcaaaatgtgcagggctggtgtcttttgaattgttgagagtagccactttgtcttgagtaatctttattatttttaggaaggtcactgaattttgcacgatgccaaaaggacagttgtgatgaaattgcaataatgttttgcacgagttgggcagcagaattcgagtctgaagcagatcagtttttagcaatgatctgagcaagcatcctcttgtaaccatattttttcaaatctaaatcgagatttagatttctaaatagtagaatgttgtagtggagcaattctagcttttaatgctcgatggttcgattgaaaaaaattcaaattagtcaacatgggagcagtaaagtcagtaaaccaataggaattgacaaagccataatccaacctctctttcatattaatgccattaacattattgttatgcgaagcaaagctttctccctcaaagttgagttcttgaagatcacaataatcgatcacatttctaaaagcatcaatttgtatttcatttttcagagggccaccaagcttatcagagtgtgaaatgatctcgttaatgtaacaccctaactagtttaggcatgttagcgtaaattttaacgtactgtgcagctcgttgataatcaacaagaatatcgaaaagtgtgattaattaaaattttacttatttaattaaaaacataaagtatcatacttataaaattctcggatcccgtttacaaaaatatttacaaaagtttaattgtacatatacaaaagtctgtcgcctagcgattatacaacaaaatccctaatgtcccaaagatcgtacgctccaggtcgaaccgccccgacatgtataatcttcatctgctcgatctcacggctgctcagccttagccttgtccttacctacacataaaaatagcaactgtgattcaacagactcagtaagaaaagcataatataaaacataataatatcctaggttataatcaggcgcccatacacccgaccataaccctatccctgtgtcccacacggtattgagtctagaatatttatactacaatactatcaaccataatgtcagcctatactcaatatgccagtcatactctagccatattgatgtgacaacatcgatcagtatttcaaccaacataca

SEQ ID NO: 111054 - DNA, 8351 bp, Cannabis sativa
  modified_base (999)..(1006): a, c, t, g, unknown or other
aaatattgattaagaaaaaaactaattaaaaaaaatattaaaagtgacttttttctgttttcaaaattttgattcttatttaaaaaaaaattaatagtgaaaatagttttatagaacatgtttttttaaaaatattttcacttttttaattttaaaaatagaaaactgataaaaaaagtattatcaaacgtcattataactgttcattggtagacttctagatgatgaaattggtaattatattattaattgcccacattttatattgtacttaaaaaaaaaaaagaaaaaaagaaaaaaagatttggtgatctttgaaggacaaacaaagtcatggaccctatattttggtgtgattgaaaggtggaaaataaaagggagttgggcctatgtgttcaattagtgctacttttcttcaacaacagatggcacaagtgtagaatgattgatactatacatgccttccaaattcacaaaaatgaggactaggtgtcaaacttgttttggtaaaaaaaaaaaaaagaatgatagcttccttggtttataagttttaacgtgtcaagaaaagggaaaaagatatactagaataagctagctaatcaattgcacgtaataatattttctttttatagaaaaccctccgatacaattttgttgaaacataattatttcgaaaaatttgatcaccattggtatctttacttttattttattttttaaatttatgcttctaagtattaaaagaacaatatttcgcataatgtaaatatataatgattgacacaaatactaagatgacaaaaagtaattgttgtacacacttttcaaataagacacgtgttaccacgaaagtcaaagagaagtccacttggagtgaccaagtagtatcccaagcgaaaattaattaaaatagagaaatgctaaagggcaccagtggtgcttagcaccctcctatatgtttatattgttattcgtccaattaagtatcgggtcccatannnnnnnntataatagcttttagagagtattgttagccaatcgcaacgcgacatgtcgagaaggtactagacatcactggtatctactagcaatgctcttaaaataaacaacatgccccgtctaagggtggttaacatcaaggacaagagtcgagatcccaaaggttatcgtcatcatgagttctaagaaataacttagtatcaatcacgatataacttggctcccggagtctaggagctccttgatgaatgttacgattattacattttagtgaaaatagagaaaatattatagcttgtcctttttatacaaacaaaacaaattttccataaagcggaataaatgttgggatttgcatgcccactattagctgatgtgtatatacagttagttaattcagttacagagttagttacgtctgctatagtgtgttcagttgtatctatcagaatccttaggatgttagatttcagttagttattttctttcttgctgtgtattcaagattgtaacaacctttttactctataaatagcaacctcttgatcatagttgattaatcaagcttttccattttctcagttctgttttctaaactaattgttcttaaagtctttcatggtatgagagtaattgactcacgtccatggcaatagcttcatccgatgcttcacaaggtcatggttctaccatgtttggcaacaacaataccactccgccaagctctgctacactggcaacaaattcttcatggaatccattctcgaattctctcacatcatcactaaccatcaaacttgatcgaacaaattacttagcatggaaattgcaagtcgtaccaacagttatatgacatgatcttcatgagatcttgttcaacaatgttcgtccttcaactactttgattactggagaagcaaatcctgtcttcaaccaatggaagagacgtgacaaactcttgttgtcatggctaagatcatcaatgagcgaaggcatccttggatctgtgatgcctattccacctcctttgatgtctggaaatctcttgaacaaaaattctcaagccaatcaaaggccagactgctacaactaaagggcaaattaacaaatatccagaaaggtaacatgtcaatatttgattatgtttataaaataaaataaaataaaatctatttgtgataatcttgccattgtttgatgtgctatcaatgatcaagacattgagttgcaaattctcaataatcttggaccagagtatgactcagtagtttctggaatcacctccagcaatgaatccaagagtcttgaagagattcaagccctgatggcccacgaatgtcgactcgaaaggcatcactcagtttctgatgtcaacaataaaatggttgcaaatcttactgttggaaattcaagaactgtctacaacaacaataggaacaataactttagatctttctattagcaacgacaatcaaattcgaatgaaggaacaagaggttcaaataattttcctccaaggtatcccaattccaactcgagacctatttgccaagtccgtctaaagattggacatactgcctcggtctaccattacaggtttgataaaaactttgttacaccaaagaacaattctcaatctaccaaagcctatctttctgaacaagagtcatttaaagttaatgaccctcaagcctacacaactacaacaaccctgattttggtgatgatatgagatggtacgtggacattggggccacaaatcatcttgctcttggcattgagcacctggacagtgctactccatatcagggttctgagacattagtagtgggagatggtaaacaactgcaaatatctcatattggaaaaaaattcattcactctaactcttctccatcactaaaattaaaatctgttttaagtgtccctgctattaccaaaaacttgattagtgtgtttaaacttacccatgataataatgtatttcttgagtttcacaagaattatttctttgtgaaggacaaggacatagggaatgtcttagttcgagggaaacttaaaagcggcttgtatgttcttaatgaaaacaacacaaagttttcccaagctgctattcatggtcaactggccaccatctcaaaatccaatctgcccttagaaatttcttctagcagtactaataatacatgtaaaaatgattgtatcatcaattttgtgagcattagttcacctacaaattgtaacaatcaatccatcaataaagattctacttcttctaattttgaatctcaagtattgttaactattgttggttgtgatgttaatctatggcataggaaattaggccaccctgcaccaaatattttaaaacagattttatctgtcctatctcttcctacgtcttacaagatctacaattctttgatgcctgtcaaaagggaaaaagccataagcaacctttccctctgtcatcaactagagccacaaaaccactagaactaattcatactgatgcgcgggggccctctcacacaccatccatagatggttttaggtattatatccatttcatagatgactttagcaggttcacgtggatattccctcttacacttagatctcaggcttatgatgtatttacacaattcaaaaaacttgttgaaaatcaattttctttatctatcaagtctgtccaatcttaccggggaggagagtatgtagtgtctgctaaatttttgcagggacagggtatccactttcagcatccatgtccacactcacatgagcaaaatggtcgtgcagagaggaaacatcgacacattacagaaacgggtgtcacacttttagctcaagcaggtcttgatatgtcatacttgtggcatgcctttcaatgtggagtttacacaatgaacagaattcccacaagagttcttggcaacaacagccccttccaatgtctatttaataagtcaccagagtatcagtttctcaagacatttggctgcatctgttatccccatctcagaccatatcactctcataaactaagcttcagatccgaagcatgtagatttttgggatattccccaaatcacaaaggatatatttgtgaaagctctacaggccgaaggtacattgcaagggatgtaatcttcaatgaaaaacacttcacatttcccctttctcccactacaacaccaaccaccccaaaatttgctccaactgctcaattttctccacaactacctgcccaaaattttactcctgcaatgtcacctgaccatcaagataatgatgtatcccttgcatccccaattgccactgtccagagagcctcgaatgatcctcacccaacacctacacaacctggttctcctttgtctactgcttctacatctcccagccttcaacaactgcctactggttcaacacaggctgttgcttctgattaaatgccccctattcgaactcatgccatgactacacgatctcagaggggtattttcaaaccaaaatcctatatgactaccaaacatcagctcccatctaccgtgctcccatccgaaccaaaaacattaaaagaagcccttgctgaccctcgatggaatgcatcaacgactgctgaatttgttgctctcaaaagacaaaatacacggacattggtcccttacactcctgatatgcaagttcttacaaataaatgggtgaataggatcaaactaaatgcagatggaacagtggacaggtacaaatctcgattggtggcaaagggaatcctccaaactcttggcattaattttgaagacacattcagccctgtggtcaagcctgccacagttcgaacagttcgcacaattattgtgtctcatggttgggaagtcactcaacacgatgtaagcaatgccttcctacatggaaccttgaatgagcttgtctacatgtaacaaccagctggatttgttgatgcttctcagcccactcatgtatgcaagttaaacaaggctctctatggcctcaagcaggcccctcctgcatggaatgaaaaactcaaattaacattactacagcgggggttcactcaatccaaatctgacaaatctctgtttatctatggttgaggttccaatcttgtcttgcccctggtttatgttgataatctgatactcacaacccccaacaatgatctcaaacaacaacttatccaagatctcgacactcatttctctcttaaaaatcttggtcctctacattattttttgggtgttgaaattgtgcaaaactttgttggcatgtacctctcccaatccaagtacatcacagatctcttagtcaaacttcaccttgatggtgtcaaaccatgttccaaccccactagttctgctcacaaattatctgtcactgttaaagatcttttcccagacattcacttgtacataagcacaatcagggctctgcaatatctcaccttaactaggcctgatgtgtcctatatcattaaaaaactgagtcagtttcttcatgccccaacaacaactcactgggaagccactaaaaggttactgcgatacttaaaaggcaccatgacagaaggtcttctcatcaaaccagcacattttctcaacttgtatggctactcggatgctgattgggccaactgccctgacgactgtcatttaactagtggctacaccatcttcttaggaggaaatttaatctcatggtctgcaaaaaaacaggcttttgtggctcgctccaacactgaaagtgaattccgtgccttagccaatgcaacctctgaaattaaatggttggtttctcttctgtctaagcttcaactcaagctgcatgaaccaccaatactttgggtcgacaactagagtgctgctgcactcactgccaaccctgtgttccatgcacgcaacaaacatattgaaatcgacatgcactttgtccaagatctgatccttgccaacaaacttcatgttcgatatgtttcctccattgatcaagttgtcaaactcgtcaccaaggctctcacaaccgatcatttttagtatcttaaatctaaactcaatgtagtcaccagtcacttttgtttgaggggggatattagctgatgtgtatatatagttagttaattcaattatagagttagttaactctgctatagtgtgttccgttgtatctgtcagagtccttaggttgttagatttcagttaattattttctttcttgctgtgtattcaagattgtaacaacctttctactctataaacagcagcctcttgatcatagttgatagatcaagcttttccattttcttagttttgttttctaaactaattgttcttaaaatctttcacccactattttcgcatacacgttttctatgcactcataagcagctcacatagtcaactatcacatcaatgaaagatatgtcaactctactctacctacgaagtgtggtgagcttgctccatatgggctgaatatagagaaattactcatccaaaatgtgtattctctcaattagaaactaaattattttctcttaactgacagaccctggcttccactataaataaaaccacttcttcattgtaaatgggtttagattttcggttatcaagtctaaatattgccaaatccctgaaagcctccattgttgtagcgaataattctttaagagaatgaatggtggacagaggcattggtttttatggtctaaacaagagttcatggtgaaagaaataaattaagaaaatatttattgaaaccataagcccgagatctcaacatatttataaacattaaatcctactatacgagtaatttaattttaccttccaattgactatcaagaatccttgctcttttcgtacatttatttattatccagtccaatcttgctattgattatgtcagattgcataccaagatcttccgtatcaacctccaatccacaaaggcatgcttgagtactagattattaacttaggaatgatttgtgatcattaagtgttctcaacgcataagacttagcttgaggggtaaaaatattctcaggggtataaaagtaattttgctcataataaatatagaagagataattagatgacgtgggagattttataagaaatgcaccgtttcattaaaaagaaactaagaagaagcaaaatagagcttagaaagcatggaatgtggagtagagctcgaaggaactaggagtaagttttgtgaagctcgaagagtagaagaagacaagaaaatccacgaagatatgaaacgaattagtccacatggatatatctgactgagagaaaggaaaggttcagtggtcattcctgcctataattgggagactccatccttcaaaatgacaaaattcttgatcacacctgacaagttgaaattctgccaaaatacattctcaaattattcttagctcgagaagcaggacgtctaaagagagattatcaaagtttagagggaattatgtaaactagcaaaccattataattctattggatcaaattctggtgtaaagaatttaatgtcataataaaactttgttcttaaggtaatttttagcataaacagctagtagtggcagtggtaatcactagaacaaaaagctaaagactaggctacaatctaacatgagatctataaaagcagtggagaatgtgtagaaggtaatagcttcgagaaaattaaggagatacttcaaatcaaatttttgatccaaaaactgctcgagctatggaaatgaacaaaagtaagactgcacaagataagtacaatgaaggaatgtagcgtctggtagaacaaaatggctagcatgagtgaaaagtgaacaagacaaagactcaacatgaggatggacagacaagcagttcaaaatcattgttattttgcaatacacttcagcaaaaattgcaacaagcagcgatttctcaagatacgacgagagagataaggaatcagctaggctgggcaataaaagaaaaagatttgctggaaggaacaagaacgacaaccacgataagtgaaaatcatgattccagtctagcatcatgcaatgttgccagtacgaagcagacattccaaaaatacttcaataaaaaatgagggaatgtgaaagtaagaatgtaatgtggaccaacgctaggtggaatagcacaaaagtttccagtgatcgatatgcggccatagcctttgggccctgaacaatctagagatgacttgctgttagaatatgttttaccaggatccagatttactaccatgtatgttatttaacatcctcaatatgaatatctaaaataatgtaaataaacacatataaa

SEQ ID NO: 111055 - DNA, 2150 bp, Cannabis sativa
  modified_base (2090)..(2099): a, c, t, g, unknown or other
tatgctgagaatggtgatcccctcaatcgatcaagtttgaggtctttgatctattgctgtggggacatgattaactagcactcctttggaaacctgcagattttaaagatataggggctggcttgccatacccttggacagtgtatggtgaagattagccatgccctcaagaccctggccaaccattcctaggtatgggatttggcctaggcaagcctggtttgaacccagttattgcgcttggccggtaagacctgtaatggatagggtctagtcacccagtactcctccatgaacggctagacctacaaagggctacaagaggttttgtttcattttcatgtagcttatatttaatctatatattatgttgagatccttgggattatggttcagatttgattaaattaattttaataaaatctgcttatgctttttctaacgctgatagggaccatataaaccaacatttataactacaaacactagcatggtcgaagtacggaatgtatatgctacaatatattattaaagggtatgacatagcattatcaatactagtacaagacgagtacagagtgcatgtggtataacatccagttgtactcagagtataaacaaaccctaccaatactagtattagaaagatatttagacatatggtatagagggcgtacttctgttaagaacgttcttgattcatctgttgagccttgtaagtaggtgtatgggcgcccagttacaagtcagattgtctgtttatatattttatatttttcttactgagtctgtcgactcacagatataatttcaggtgtagataaagaaaaagtgaaggctgagcacagtgagtctagggacaacacgggctcctattttgtagtcgatgggtgacaccttttgaaacataatatattttgaaatgtttaaaaagtttaattacgggatgtcgacacttgtaagaatatgtatttgattaagtaaagtttattaaattgtgaaagttttaattaatcatatttttttggttaaaccctttgattagcaaaggttgtcacagtaatttaaaaagtgctataccgtgcctaatcaagtaggttaacattaatttgaggccatgtcatcgatctatgctaattttgggataacagattatttatgcgtggttgtgcaattatttatcaaagggtaaatactatattacactctatatttagcaaaaattattgattacacccttacggatcacggctagttaggctctgatatcatttttgatgctcccactttacatttgtagtcctatatatacttacatagtataaagaggtagctgcatccttggaatgaggattgttcttgcaaacaaccacgagtgtttgcagcatattttgttcttgaaaacttcccaaaaaattactgatattcttaagattaatctaggttattagtatgctttactttggagttttttttttatagactcataatggttgtgttcaataatgaaaccatgcatgtatagaggagatatttttagtgtttgtaatattcatcacgttttttttaaattgtttttggctaagtcattatttccatatgtttgattgaaaatttgaaacatatttaggataatacttgggtggaggctaataaacgtttgtaccattttaacaactttcttctcactaaaatgtttcccattttaagttttgtttatatattattcaaagttatttggaattattaacacacccaaaaacgtctctttaccaattataccttacatatatgcttaaattttataccatagatattttatctggacataaaataaaagtgaaatgaaaccttatcttgattacacgtgttttaattcattatgatggtatagtctatttcattcaaactataaaatatatattattgtaggttaatttgattctacaatgcacacctttaataaaaggagaatattgatgcacttttatatatttcgacattcaaaagaaaaaaaaaattaatctaattttttttcttcatgtttacgttataattatttaaaacatcttataaaattttgagaaatnnnnnnnnnnttacaatatagaaagtagtgttcaaacaatctatttcacacacgtataaaa

SEQ ID NO: 111056 - DNA, 8088 bp, Cannabis sativa
atagtctcatcaaaattcagatctcagctattcattaatgatcttacatttttcctactgatgctatctctaaatggaagctggtaatgtatcttagtgagagtatgacacaaattcttggtttggagaaccagcaacatattacttctggtgtcatgacaagtttggttgctcttttaagttggtattctctaagaatgattggaactcaccatttttaaagcactatcgagagtaaatttaatttggcttgtgttttctccctagttatatgctacatactccaacactcctacatggttttagaagagaatctctgctttctttttcatcccttttatggttttctcttcactcctgttatagcatatgcttcaacctttttgcatttttgcagcctcacttttccacaatttattatctttctttttccttttgctaaaaataacaaatgtaagtcatttttgtgaagtaggaaatgcctctgaatttcggaaatggagaatagaattgatatactttcatgaccaagttttcttgagtctttattttaccaaactaaattttataaatattgtctaagtcaattttgtgtaatggaaactggaaagtatcactattctttaatgttttgactgtgcttttttgtgtttgtgtttcctaaggaaatgtttctaccttaattgaacaagtaactttgctttggtccaatctccactaatgaaatttgcttatgcagttgctccggggcctcaggtatctccactctgcaaacatccttcatcgtgacttgaaacctggcaaccttctcatcaacgcaaattgtgatttaaaaatttgtgattttggcctagcacgtactagcaatggaaagaaccagttcatgactgagtacgttgtcactcgctggtaccgagcacccgagctgcttctctgctgtgacaactatgatacatctattgatgtgtggtcagttggatgcatctttgctgagcttctaggccgtaagcctatcttcccaggttctgagtgtctcaaccagctgaaacttatcataaacatacttgggaatcagagggaggaggagtttgaatttatagataatccaaaagcaaagaaattcataaaatcaattccatattcccctggaactcccttttcccgcctgtaccctaatgctcatcctttggcaattgatctgcttcaaaagatgctcgtgttcgacccgtcaaagcgaatcagtgttaccgaggcacttcaacacccttatatgtccccactgtatgatcctagtacgaaccctttggccgaggttccaatcgatcttgacatagacgaggatttgggagaagacatgataagggagatgatgtggaaagaaatgctgcattaccatccagaatctgctagtgttgagctgtgttcttagtcttattagacttgcagaggctttggaaggaaaacactattctgaaaaggtgaaagtaattgtttttgttcatttccatgtgtttcttttaagtgatccaagtagatttttatttatctccaaaatcttgaaggtgcagactgaagtgggctacattgtttgttcatataatattataattaaccttctatttttcatgtctatatgaagaaggaggctgtgcattcaaggtagctggcctttgtaagttgtatatatatgtatgggtgttgttcaatgactacggagacttgtttttgttttgtaaattagtcaaatattactgtttaatttcataaggatgcagtaatcctagaaatgtttttgttttttgtctagaaaaagattagcctaagtaaaacctcaattccatcaagaaaacttgaaaaagacatattaaaatcatatctctaataatacattctattctagataagatggaaccaaggatttattctcagtagctttgatgacacaatgcagtttttatgttttttactccacatcaatgtgattaaatccaaatatctacccaagtagtctttgcagattcaatcgagtattaagatagaatgataattttgtttttttattgttgatttgatactcacaaatcacatcacacaatgatatgattcacatattagtaaaaaaaaattaatttaattttttttttatcgataaataagtgcgcaagtatacgcaatcacgaacaaattttagaaatgtaagtcgaaaatattattacattattgaattgtacgaaatcaaccacaacaaaaatgataaaaattcgattaaactttaagctaaacaagaaaataactaacaaaacaaacaaaaagacaagagaggaagacaatgaagatgaggcaaaacaattaattttcctaaatatacaaaaattgatatcaatactacagtaacacaatgacaaactaagtgttattaatgaagaattgcaattaaagtcacaagttctcatcagaatcattatgaaagagtaagccctagatgattgactagtattttgctaggttcaactaaatcacaaattgcagcaaataaatcaaattaactcaagaaccacttgaggctagctcaagtggccataggtgggtgtgtgtgtgtgttggaggtcctgagttcgagtcccaggtaaaacatggctgtaatatataaacgcttaaataataaaaaaaaaataatcaaatgaactcaagattacaaggttcacctcctctagaaacacattctaagcggctagtgctagggtctccaacgaaccaagtaaatgtgactcaactaaaaatcaatagtcatcatacaaataccagttcataaatcaaagaaataaatatacaaattgattcttattacactttaccctaacatcttaaataaccacttaagattccaatataagtccccttagattcacagcaagacccccttgccctagtagacaaaatatcaatgaaaatatccaaataagtgagttagataaaaacaatcaataagctagcttatataccaacaattctctcataactgaaatttacataagaataacagctagcaaaacaaactaacaatatacaataaagctaatgtgtcaaagctgaaacttaactgattacagacatgctaagatgcatctcagatgttcttagattgacactgaaatcataaatttgccacacaaacaaacatgattctaacaatttctcctttggaaaattatgatcaatgaataaaccatagtgcatgaaagatagcaaacaaaaactgaatgaaaacccaaccatactgacttatattcaccacaaacatactacatatgaccacatacactgagccaacaaagacaacatacactgacaaacagtcaacaaatgactacaacataagcaatataacactaacccacaagactctaacaataaccaaaagacttaatcaacagagtacggaaaaaaatgtgacatcagtaccatctctccctcagtgatcacaactgtgaaactccccatgaattgactagtcttgatttgaggctgaatggagcagtgtgctccctctgaaccacacgatcttggtgaagtagaaactctcccagaattagaagctcccccatgcgacaaaacagtcttgacttgaacttccacattgtgagcaaaaggaatgtagaaggatctggagactaaaaaatcctcatctactgaacataaagagaatccaacatgtgataaattgagtgcatactcatcattgtactacaggtgcttcaaccaatgatatttttcaaacatgatagaggaaaacacaaagctcttagaatgctctaacaatattttgagagtgtgtaaccaacatttagactttcttcaagaaaaaattaaagagcaagtgactaataaaacatattgtgacacacaccagaggcctcagcttgtgtatggaacaatatatttccccgttgagaagaacatagacatgtgatagaagaccccaaaaaaattcaaatttagctttataaatgttggaaacttattcagctttgatccatatcaatactagaattcaaattacacaaccaagaacacaatgcactcgcgcatatagtcacatacaatacaagggaggcagggagagagaatcgaattgtaatgttttattgattatagtaaaatgtacttaatgcttgttacaagactagttagaattacattaattgaatctatttataagtgtccaacaagagcttatgacactaactgtcataactgtcaaaacacttatgtcctaactaactaatttaacacttgcaccgagtacaagtaagtgtgtgtatgtgtatattacaagggaaatctaatacaacaattctctaccttgacctgtaatatacctaggaaagaaaactgtgagtcttaattctcattgtgacctgaaacatcgagaatttggagatactttgtaaatttggcaataggcaggggctttgtaagcatgtctgcttgatcttacctcctgaatttatatctcgaataaaatgcattcttacatcaatatgctttgttctctcatggaacacttggttcctattgagatgaagagcactttgactgtcacataagataagtattgatctttaattaataccaagttttgttgtaattcgttttagccaaagtgcttctttaatagcttttgtgcatgctatgtactcagtctctgttgtagacaataccactatagattgtagatttgattttcaattgattgtgcatccatttagttgaaaaatatatccagattgagatctcctagtgtcaatgtctcttgcattgttagagtctacaaagcctctaacttcttctctattattgttagcaccatagatgaggcatgttgttgaggtgtcttttagtgcatttgctgtagtgtgttttcggtatggttctttaaattttttttaaaattttactattttagagaaactattgtgaatgcttaaataacctaagtgacgacaaaaacggatgtcattcaaaactacagtagtctcatccataagcggagagaaagtggcactactgtaccagatggctgaggctaagacgactccaagcaagttacggggcactagacttgtgcccgcaatagatggtcccataaaaaaatgagtgtaattatattgtgtaattacaaaataatactatttagataattaattgttatgcattttttattttttttatgtaattattaatttatttttcaaatataaaattataattataattattacatgacatccaaatacactttattttttaaaaatagaatttagttattaattattacctaattacaattacactgcctaacaattagataattttttccaaacatgttattaatgcttacctaagaagaatttaaacatagaaacttttcttttgtctaataaaaaaataaatcatagaacttttcagataaatagtttttagattttctaaaaaatataaactagtctgataaatggatgagaaaaatacaataattattaaaaattagatgtttaaaaaaattaaaatttgttgaatttgttttatgtgtaaaatttgattgaaataagagacaagaaaatgaggagtaattggaaaaattagttgaaaggcaacattaaaatcatgtactaaaaattgacccaattgtatttatacctgttacacgtatcctccccaagatttctttttgactaaattcagttgcaactttatcaccaaaaacaaatgtaccataacggttaaatccggtagtggcgatgaaatagaggttgaaaaaaatagtgagaaaagaaaaatgtgatgaaatggtgtggtaaatgctttattattattattatatataatattcctgattgaacaattattattattattattattaatattataatttttatggtgtcctgctcaccagctggaattggaggacggttgtggaaatttcatctccaccccacatttctaatctcctatctctatctctctctctgcctcattccaaataaaataccttaattctttttctttttcttttccctaattatatacaaccaccattctacgagcatctaaagtcttcaaccatatttataatttaatgtgtgggaattgcactaattaccgtatattatatataaagtaataaatatggttagattatacaatactaactacaggaggaggaggagattccaacgcttctttctttttattcttttctttttattaattaatttctactaaattttattatttgatttccatttacacctttttttggttctataaattggcccctcaacgccattcccaacctcttcctttgcttcctctctttctctctctaattctaatagattattattattattattattattattatatagctatctagcatatctgggtgttaatcaaatcaccatcatcatcatcatcatcatcatcatctgggtttatgattatttttccttttggaggtggtgggttttgttttattaaaataattatctctagatgtatcgttcaatctttgttgttgttaatgtttgaaattgatgtctccagttctcagtgaaatccttcgttccgggtttatgataaattcctcactcaggcgcaggacccatttagttcaatctttttcagtcgtcttcctctactggttttatgttttctcataaactacttctcaatcctcaccaccattaataattaattacaactactatagtaatagtattaccacttaattatcttctttcttttttttttttagtatctgggtcctgcgtctttaatttaaagcacctaattattatactgttaatatatatttatatatatatatatatgggttcgtcgagtggaaactcgtcccaggggtcagaggaagatttgaaggttttaaaagatgatgatggagaggagatgaggaaaaggaaacgaatggaatcgaatcgggaatcggcgaggcgttcacggcagcgaaagcagaaacaattggaggagttaatgggtgaagtgggtaagcttcgaaaggaaaacaaccaaatcatgacaaccataagcatcaccacccaacacttgatgaccatcgacgcccacaactcagtcttgcgagcccaaatggtggaactcaaccacaccctccactccctaaacgacatcataaaccacatcaataataataataataataataatagtaacagtagcaacagtcacagtaataataatagtcttcttcatgatcaaaccacgaatgaattgtatgaatgtgatcctcatcatagttttatgatggaccaaatgaatatgctgcttcgtcttaaccatcccatgctggtggcggccactactcctgatatgttgttttattaaagtaattattattcttaacaaatttggctagcctccatccacagacacacatccatatggctcagttttcttctggtcttgtggttattttattgagctatgtttagagtatgatgttatagatattccattagcacaggtaatatttggagaaggaaaattaaaaaagaattctcaatatatataataggaccccaataataaatgggtcctaagttatgtaaaggtaattatggatttaagtggtgtgaaagactatattttatttattaagtacaaaaacttgaatgattgtttcttctattattacaagattttattaatttttagttaaaatataaaaattaaaatgtaatatatttatttaaaaacttacaaaaaaaaaaaaaataggttaattaaataaaataatttacattctcagtttaaaaatgcttatattattttgcaaaaatatacttaataagaataattgtaaatagagatattaggggtgatcgaaatcttttaagttgttgcttttaagctaagaatatattctggggcttttttcataaatgtacaacaaaaacaaaataattacaaaaaatgttcaaaaaaaattattttaaaaatttatatattttgaaaacttattacatcaaatcatacattttaatc

SEQ ID NO: 111057 - DNA, 2632 bp, Cannabis sativa
cataataaaataattaaaaataaaatcctttttttactattttataattatagtcagatcaatttttaaattttcaattcaaatttattgacatatatattgttgtattaaattatttaattgaaatatatcaagagaaccaattctgttttgtgtaatattaaagttagttttgtctagccaagtggttaattaggcttcttaatcgtttcccttagatatttcgtgagcttgtgttcttagctcaatagctttactcatcttttagttcttgtgtgctttgatcaatacaataatacatttttgctctttcatactctttctttctctttgtttttctttcttttcttttcacctttgtttttctttctttcatcatgtctagaaaatttaatatagtatcagagcttgattttccgatattaatagccaagcaaatgaaaaaaagtcctcccaagagacacctcaaactcaagaaatgcaggagctcaagccaacaatctgacctttcaacacattaggcgaagagatacaaatgaaccaatttacttcaatcatagtctttcaatcaacctaaatgatcataactttcttttgtggaaacaaaaggtacttgcagccatcaaaggaaaccgattgcagagcttcattcaaggtcacgatccacctccaaagtttctcactaataacgatcgtgcacagagcaacttcaatcaaacttatcttgattgggaattgcaggatcaattgctgatctcatggcttcttttttcaatgaccctaagcctgcttacgtgaatggttggatgtgaaacatataaccaaatctggtcgacactcaagaaatactttactcttcaagtatcttccaagatcctcgagttttagaataaacttcaaaatatcaagaaaggaaatccttcactaaatgattatctactcaaagtgaaagagacagttggagatgttctcaatccgagagataatgttagagctattttcaaaggccttcctaaaaaatatgacacatttgtcatatccactaacaccaaactcaaacagtactcaatagctaaaatagaagctttgcttctagtttcagaatctcgcatagagaaatcggacaaggatatagatcttagtgctcatgttgcttcaatggaacttgatccaactccagaagcaactcttgcaaattatggtcgaggagcttacaagcaaccttatccaggacctaactatcctagaatgtcatccaatgcaggacatcgtggtaactatgaaaacgtcaataattctccttcctttggatctggtcgaggtaatcctagccctcctgctggtttgagcagaggaggtcgatactctactcctaacaataggcctcaatgtcaaatttatttaaaaattgaccatattgctcaacattgttactatcgttttgacaaaacgtttccaagtccttcctttccaggctcttcctttataggaccatcaaatgcagcacctccacaagccaatgttgttgtagcatcaaatgagtggggcgcaagttggtattctgactctggtgctatcaatcactacactctagatgcatccaacatacatctcagcactgaatacagtggacaagaacaactatttgttggagatggttcaagtttgtccattgaaaatataggtcaatccttatcaactctaataaaactcgacaacctcttattcttaacaacttgctacatgttcctgctataacaaagaatttattgagcgtttctcagttttctagagataacattgcattcttttgagtttcatgtttaatgttgttgtgttaaggaggaggatactcatctaactcttatggaaggaaaatacagaaatggcctctatacttttgacgcttcaaatccaaattttacaacctgagggactcatgccatcaaagttgcctcaaatgccaaagattgtgatcatctcttatctatgagtgttgtctcaacatccaccaaggggaatctaaatgttacctcttgtaaattctataataaaacaagtttttttgcttttgacaaatagcacaataaattaggccatccttctcaataagtagttcaaactatattaaagcattgagcttaaatgataaagtgtaagtagaataatagtttagaggatttagcagtaaaaaattattttttttcaaaaaaaaaacaaattctaaatctattgcacattaaacattgttgttatttcattttaggttaattaggatttttgtttctcgaactttaacatgtatcaaatcatgctttctgaatttttcagaccgttaaaaattctctcgaactattgagattaggatttaaggacttttgtctaattttaccaacagtaatctgaggtggataaaaattcagaagcacgatttaatacatgtaataatttgaggtaggactagcaaaacggatcagacacgataacacgacttgaaactcacacgagagttagcgggtttgggtttgccttaaatggatttgagtcgtgttcaggttgacttgtctaactcgtttaataaacgggtcgtgttcgggttgacacggctaacacgaaattgacccgttaatga

SEQ ID NO: 111058 - DNA, 1315 bp, Cannabis sativa
tttcccatatttgtaagttttttaaaaaaatgccatatttagtgtaattaagtttttatgccatatatatcaaaacttatctttattttcccatatttttgtaaatagccctaaaatatataagaatgttatgactattaaattacactaataacaatattacatctcgtaaaaatactataaacatcatagatacattttaacatttatcataaataaagtaatatatgtatatggtaagagctttgaaataatattaattaagatattattgataataagtagctaggtagatgccatttattaaatattactcgaaataatacatgaggttaggtaaccgtatacaggatcagcagattcattaataaatgtctttaaaaaatcaccaactcatatatatacatcattaacaattaattaatattcaactgatgaagtagctagctagtactagtatagtgctataaatagaacattattagtagtgtttaactcatatacacataataacttattactaataatatatatagttatataaatatggagaagagtactaaaattagtgtgatgataatgatgatcacgatgagctacatagtagttactacttatgcaatttcaggtggaagaaatctcaataatgttattcaacttcactcctcagatgaatcagaatcagaaataatcaacggtcaagatgaaaagatggcgacttttatggaggctgatgcttttgtggatatgctattgaaggaaaggtcattaaaatgcccagatagacgttgtgagcctgggagatatccttgccctagtggatgtatttgtgttagatcatcaaccacttctacgtacggaacttgcaagtaaaactgtactttatcctacatcgattggcacctacatatataatatttatatatatatgtgaaatatctatgaataatgtcaatcgtatttataaatattgtaatgaataataagaatgctatactatacatgcatgatgatatcgtgtgatgcatatgcatgcatgcatgtgtggcttctatgtatgtatggtgtaaccaactttatgtatttctttatcgttaatcaaatggaaaagtactatattattattatatatattgattagtaagtgttgtgtatgtttcaccatacattattgtgtttagaataataattagtacgaattttgatttggctcccaactattatcagttgggaaatttgattttctatgcttagaaaatcaacaaatttgatttttaaaccaataattaaaaccctaaaaaaactataccttttt

SEQ ID NO: 111059 - DNA, 5321 bp, Cannabis sativa
gattcaataaaagagcactactgctcacggtttttctaagtgttcaaactggtttgtaattgttcttagatcagtgtgttggattgcataggaatcgactcattccttacattcacaaattacactcaaataatacacactaattaacgtgatatttttttggcttcatttcattttggactctatattttcaaaaatgatacaaaatagtactctgagctcaattttcgataatttttttttctaatataaccaacttgaagacaattctagcattgccagatacaaaaaatgtatccagttttatcatagcaactttagattaggctattattaacttttatttttacaaagaaaaatcaattcagagtactatagtccaatttatcatttaacaaataaatggcctaatcaataatttttataaaacacagaatctaaaataatatttaccttattttttcaaccagttaaagaatacaataaaattaatatgcatacatatttcttatatatattacaaaattatgatggaaaatctaaaataatttttaatattttattttgtataacatctaaaagtatattacaagcaagttaggcaagaattaggataaatattttttttttctcaaaaagtgctttgatgaaataatattctacacaattttttttttgtaacatttatcaaaataatcataaacttttaaattagcactaacctgagattttttaataaagtcatgagcttttgccaagattggtccaacttcatcaataaggttacttgcaagaagagcttgaactgcaaatgtagcatcccacaattgactaccaaagctctacaaacaaagatgtataaatatcactacatgtctctttatataaatatatatattattaaaatacaaacacaaagaatccatgtgtgtttctaatttctatagtgtttatataaaataagataagtatacagggttgattttaagttaaaacgagttaggtctatgcttatagctcacatattttagaggtttaaataaaaaagatatactttaagatatatatatttttttaataatttttataaatactatttatttttataataaaggcctaaaaatattatttttcttttggcttatttcaacttaaggctgactcggtataatatatgtgaactaggaagaagagtaagttatactagttagtgtatgttaattgctaactaactcatagtaaagatttgcctatcataattgggtttagacaagttcttctcatttgggatgttttgattagtttttaactaaggtctttattaataatactcacttgtatcttcaatccatcttcaccaatccatatgaagtccggaaccctagcaagatgctttttgaaatacattccatttggatcttcaacccaacaagcgagcatacataacacctgtcttgaataaagagtttgagtaactttataaattatagaagaatcttaagtaaagaccttaaaaataccatcacttcattgttatttttttatttttttttgtatatgaaaaaattataacataaagttttccatacatatatatgaactaacgtacattataatcataattataataagtatcttgccaatattataattatagtaagtatcttgccaatattctagaaattttgaataatttccagagttaaaattaatattcaaataatcaagcaaatgtaattttttgtataagcatggtaaaaaaaattatttgaactctgatttcactatcataaattattcaaattaatttcgaacatattgattagaatgttataactttaatgtatgtttattaccaaaaaatattagattataatttctaaaagtgtcaaaaacagaaaaataacaccatggtagtgttataactttaatgcatgtttaacatattgacataatgttataatgtaatgtatgtttatttttaaaacatgatcataataaataatatctcgatgtatgcttgaatatttttatcaccttttcaacacatccaatagtaatgtatcgactattctcatcttcgtaatgaatatgtttcattgttacttgaagagcttgttctcttataatttttttcaacggccaacgacttaaaagaggctcagtgcataggtaaagactatcccacaaaaaattttgtatccaatgaggtggataataaagatcctcctacaataataaagttataaaaagcattaacttataaagatagagataaatgttaaccaataaaatgtataagatatgtttgtttgatgtgtacgcacacatacttacgtattaagtcactttgaacaaatataaattattttaagtgagacttgatattcaattacactaataataatatataacctgcttcgggttgggctaaacctgcatctatggcccacctaacctagagggccaaacaaatatcctttgaaaaatatacatattgtttaggtggtttttgaaaatactatagattatttttttataaagggcctaataattttcttttcacctaaaacataccctatctcagggtcgactctgtatataaagggttaggcattttaaggtggtcgatctttaacattttttttatgtgcgtgtcaactaattacataccttagaacattgatggcgcgcatttttccagttgatttgattataaggttgagtgtaaagttcctctctcaattgtagaataagtggtgtgatgggaccaacaaatctttttccatataaatacgacataggcaaataaaccagtcgacaataacaccatattttagctacaattttgtaagaaaacaaaaaagtgtcaattaacacaaatatgtcaaacaaaatgtaggtatttatattaatttatgattgattaaaatatataaatatacaaacatggatgtataggagaaaatggtggaagaatccaaaattcaggtggcattgggttgcaaccaatccattcaaagactcctaacatctacaaagaaagaaaaaggttattaaaaaaaataattaataatttatcatcttatttaacatattaatgtaacgtttgcataccgaaagccaagtctttccccaagagagtattttcgttacactgccatgatcgaggatccattttcttgctcttgcacaagcgttatcttcttcaccatttttaggtaattcttccccgagaattcgtagacaaatatagttaaaagttgtaccgaacattgaactatggccccctacatgtaatccccatccaccatcttcattctaaatgtcacaaaataatgttccttaataaatgaatgtgtacagtaataaaagtgtccttttgagatggatatcgtaaccaaattagttaaaatacttttacctggtggttatacatatgacgaaaaatttccttacgatgttcactagtaaaaatagtattaaggtgacctgtaatgtataaacacataacctgcaatcaaacaaacaaaatgttttatatgttaatgtatttatataacgtaaagagaatatacttatttggtaacgaaatatagttaagtatcctatgttctcattaacagttattgagtactctataacttgaatcgtgcatactttggtaatgtttgtattcttaaatgtaagttatcttgtaatttgaagataggtgtaaaaggcactctatcacccacgaaaacatacatatttggtaccttgtagcttgtgaccaaatttaaacctaaagtactaatgtatgtttatttgaattcaaattgcaaagtactcgatattataaattataactttgtattttatggaactaaaggatatcaaataagtatattctttaaattaaaaactataaattatttatatttaagaaagataaaatatactaacaaatggcggtaaaaaatacgatggaccactattttctgcaggccaatgtccatcgctagcttgtaaggcggacaagtagtgggcactccttcttattgcacatgttatcttttcatggctgatcacttcatcatcttcaatatgaacggcgggaatcgtttgtttgaaacttttttctctcaaaaactacaaaatatttcaaaaattgaattaaactaagatatttttcatattatcctattatgaaataaaatataaaaaaaatcaattaggtctttactatagttactaaattgtaatctttttgtatagataaacacttttagtgtctctctcatacttttagtcataatattaattttctttctcttagtcagaacctcactgggcttggtcggggttctgcctgggagggttcggagacaatttaataacatatattgtgtgaaattaaacttagaatttatctatttaattttcttaaaattgtcaataggttgaaaattcaatattagtacaaactttgtatatgatcaaacaacaaatttatttgatatgtatgtctaagtatacaaatataataatcacgatttacaataatatgattataaacaaaaattagaaagaaaaaaaaaataagaagagctgaaatattattattattattattttttaaaaataagaatataatttaaataattagtaaaagtaacatttaagagggcttaagctaaccctaaactcatgtaacactatccatatgtatacatatatgtatacctgcattcgccaaagagaatcaacagaagtcgtaacttgagaacgacggttgtagaagttggagcgagcggcttcaacctccgctcgctcttcagccgtgccggcctcagcatcaaactcccatatttgtcttcccacgaactcatttgtgctataaatgtttggatcatttcctcgctctcctatcttaagcctccacataatttctccttttcatttttaattcgattcgtaaatacattgttaatttgtattatgtattatgtgatagtaaaaacttgtgagaaaagattattctatctttattcaaaattaataatgttaatatggtatgataaattacaatagaaaatatatatcgtagcacatatttgtagttcacatgtatagataagatagaatttcatagtaaaaaatttaaataatttcagttgttaaaatagattctaaataaaatgttatgctcgtggtgtgaaactgcaatttcaaaactatctttattccttttatggcatgtttactaataagtaatgagaatcaatagtaaggtaattattctcttacatttgtttacttacattattaaaattaagaaa

SEQ ID NO: 111060 - DNA, 3910 bp, Cannabis sativa
atgaatttctcataaaccaagaaattcagttatataggcacactttatatagaatagatatacatatatattctttatttgaaaaaaaaaacattaatgtatattagatgaaggtttcggagactttacaaataaaatatgatatccttaccaaaacaataaactcctaattggtttcctaatcatgcttagacttttaaccttctgccatcaactgacacatcaagaattcaaattgacactcgaaacaattaaaagtatgaagtttttgaagcaaaatcgacatgaaaatgaaattaaaaagcagaaaaaaaaaatagttcattactttttgtcaaaatcgagaaactaatcattccctccgaaagtaaggaggggatagtaaacttacagaaaaagaagtaaagcgggaggagctgtaaactcagatgatagaacattatacacaaagccccatcccctaatgatatgggagaatcatatgaaaatataacaacagggaagaagaaacaaccacctatactctatacattcgctaatccaaaatcttatgtactaaaattacaaacgaatcgaagacaaaagttctcacctacctcatcttaagcacgcacctactcacccacccacatgtgtaagaataccatttctttttaacactataaatgtgaaccaatcacttctatcacagaaagaactacacacaacaacaagagcagtgtgaattattaagccaaacagcgcaagcatcctcagccccctctcactttctctgtgcagaaaacgcgcaggctactataaattgactgaatcaagtgagctggagtagttctgttttcttcaccctcgcctttttcctagttataaattttcaccggcttctcatatgcgtgacgattctgcaaaattgaggaaagattccaaatgaaaattaggtacaagctagtaaattaactttgacactaccatatattttgtttcattcagacttcagagcacctgttttgtattgattctaaaactttaaatgagtctatatactaagacaagtttaaaaagcagctcccaaagcactagtcagtatctcatactcgcaaatcacacctttaaaatgacaagactccaattaattaattataatcaactccaatctattccatattggttagttttccaaacactacccaaaaatccatcttcacaagtcatttattgacatgaattggctatggttagttcaaagtaaggtaaagttgacaatgctctaatctaagtaagaaaaagttcatctttattcatgaggcaaggtcagctgagaaaaatgagaccataaaaaaatgtggtccaaaaaaggtgggaatatgaaaattcgcaatagataatcaaggactcaatttctgttgaactccatttcaatgtgaaattgcctcctgtcctccttgaacttttatcataggctaagtcaaaagttgggttgtacactaaacttagtttgattaggcggaataattgccttcttttcaaagacaaaaaaaaaggctgaggcttatttgggggcgttgctattaagatgggtgtgctaattagctgaaaagatgatccactatactaaaatgagcatcacctaaaaccatttctacatcatccatcagccagtgtacaggtatgcatgatgtatttatgaatctaaaagctgtggcaaggacagggaagttatatacctgattggcattgtaagaccttttgggagcagtgtcggtgtgttccaatcccagatattgctcccaagcgccataaacatccctcctctgataaataaaataaaaattaaatttaacatccagagtgatcgatcacttgtaaattatttcatatttacttttgtgtgtgggtattagagagatgaatatatatatatagagagagagagagagagaaagaaactcagcacctgaaaccgactggccacaacatcactgtcttgaaggtactcggggcgaccaagtgacaaaaatgcaaacttccactgaaaacgaaaacaacagaatataaagaaagttattatgcttttaaaaatcaaactgcaacgcaatgtgcagaaaatgatcatagacaacctgtgtttctttgtttcagtagtcagtatgataaatatctacttgggagatgagataatagtcatacctttgcgaactcctcatcagggacttgcaacttcttctgtattctcactttaacctcagctaaagtctcatcctctctaattaccaagaaaaaaggttccccaaaattttgaacttgctgccattttcaaatttacgtacaaaaagatagtcacatacaaggaccattcttttaaataatctactacaaaagaaaaggtaggtcaacccacctggttctgagctgtgtccttcataaaatgatagacatggattatgcggtcatgaggaccaaagttcttctcttcttcggggatctgcataagaataaattaataagtgcagagagagagagagagagagaaaaagagagagcccaagaaactccatttggcaacagctaagcctacctcttcagcacgtaatgtccagtactgatcattaatattctcaattttttcattaagcggaaaaatctgcaggcagacagttgaagaattacatgacttggtagaaattgcaatgggagaagtaatgactctacaaagaactatgagtatccaaccattccacggtatatataaaagcgccactgtgttcactttagagcatgggaaaagcctcaaaaataagcaacacagccaaatttaatttaaggacatatgaaatccatgactaccaattgccataaattctttatggtaccttataaatcttgtgatagaaaacctcaagcaatctaatctctgcggcgggatgagacaattctacctgtttcaattataaaatgaaacaaaatttatcaaatcaatttgtaatttcatattacctacaaatttggcaaaaacaaaacaaaagccttcaatataatatataaaaagatatttatatatatataggagtaacaataaatatacacccatacattacacagtgggtcctaccttaaataaatgttatttattgagaatttgacactaatgttttgatgcatatatttttgtcaatattttgtgtgtatatacataatacacatatatcacacttgaaaaaacacttgcccgtcttttgttcctttttcaagtgctctatttgaagttcctaatgaagtacctcttttaacaaggtttattgtttcttattaaaaatatacacacggatatagtaaatatttattacctttgttttaagatcattaattacatcccctacagtgctctgctttggcaatctaacagtatgaatgacaacctgagaacatgaagataagtatataataacaagaaaatacaaatattgacttgcaactaattataaatgcttttcaaaaaaactaattataaatgcacaagatcaagattcatcagcactcacttcatccttggtcgaatgatggaaagcaaccttcaacgttttgagaccttgcaattccggtagagggatatccagtatttcataatagagaatatcggaagtctaaaaaataaagacagcattttgagagaaatcaggacacagatgaaagagggaaagcattcaaatgaaaaattattaccaaatagattagctaaggaaaaaccccaaaactaatataacactaacccataaaactgacaaaacttaaaatagatatatcaagcattcccaatctcttaacatatcgaaaaatctctttgttgttcctaatttaatcatttaaaatgagatatctatttatacatgtatacatatgagagagagagagagag

SEQ ID NO: 111061 - DNA, 4791 bp, Cannabis sativa
taaattctaatagaaaagggctgatcttctcaattatgtctataatataaatattttcgcattttaattttaatttcttcttcttcgtcttcttcaatttccattgaggggtttagggtttccttcctttcactgtaacaatgtccatatctcaagatctttacccttctcaagatgatcttccctacgaagaagaacttcttcgaaaccccttcagtctcaagctatggtggagatacctcattgctcgtgccgactcgccattccaaaaacgcttcatcatctacgagcgagctctcaaagctcttccaggaagctacaaactctggcacgcttatctcagagaacgcctcgagttggttcgtaacctacccgtcactcactcccacttcgagaccttaaacaataccttcgaacgagctctcgttacaatgcataagatgcccagaatttggatcatgtacctccagactttgacggaccagaaatttataactcggactcgacgaaccttcgatagagcactatgcgctttaccagtcactcagcacgatcgaatttgggagccttacctcgttttcgtcagccaaaagggtattccgattgagacttcgcttcgcgtttatcgaaggtatttaaagtacgaccctagtcatattgaggatttcattgagtttttgataaattctggtctttggcaagaggcatctgagaggttagcttctgtgttgaacgatgatcagtttcattctattaagggaaagactaaacataggctttggttagaattgtgtgatttgcttactaaacatgctaatgaggtttctgggttgaatgtggatgcgattataaggggtgggattaggaagtttactgatgaggttggtcgtttatggacctctctggctgagtattacattaggagaaatttacatgagaaagctagagatatatttgaggagggtatgactactgtagttacagttagagattttagtgttatttttgattcttatgctcaatttgaagagagcatgctggctcataaaatggaggttatggatttgagcgatgatgaagaagaggaagaggatgatgacgaagaggatgaagatgtgaggttgaatttgaagttgtctttggctgaatttgagaagaagattctcagtacttgttggctacaggatgataaggatgtagatttgaggttagctagattggacaatctcatggatagaagacccgagttagcgaatagtgttcttttacggcagaatccacataatgtggagcaatggcatcggagggtaaaactgtttgagggtaatcctacaaaacagatccttacttacactgaggcggtgaggacagttgatcccatgaaagctgtggggaaaccgcatacgctgtggattgcttttgcaaagctgtatgagacccatagtgatattgtgaatgcaagagtgatctttgataaagcagtccaggtgaactacaagactgtggataatctggctactatttggtgtgagtgggccgaaatggaattgaagcataaaaatcctaaaggggcattggagctgatgagacgtgctacagcagagccatcagtggaggttaaacgtaaaggtaatgaattgctgctgtgtttttctcattacttgttaggctttcttctttttaaagttttctatgcaattagtgatcagggtaaagtaacatatttatggtaatgttacttgtattaggtgatgcactggttttgattttaatcatatttatggtaagctttgtttattagtcattacttttatttttgtttctgttgctttgttggaagataacataggtttagttaagatgttagaacaagtttgaactatttcctgtgaacattggtatggttagtcgaggagccttagtttcaaacatgggcccagtaagtgagttaggggattttctcttgattaaaatttaaaaagaaaagaaaacctgcatggtttcagactctgatgttttatatctgtaaaggaagcaactgtaatctgaatgtcttttattaataatgaaaaatcttgtgactaacaattttgcatttattgctattacagtggctgctgatggaagcgaaccagtacaaatgaagctccataagtctttgagactatggactttgtacgttgatttggaggagactttcggctctttggagtccacccgagaagtctatgaaaggataatggatctgagaatagccacgccacaaattattattaattacgcatatctattggaggtatgcaatttattttgtttctttttccattaatttctctgaaagttttgctatcaagacttggttcaaatgattaataataatcattttgtttcaggaaaataaatacttcgaagatgcatttagggtgtatgaaagaggggtgaagatatttaagtatccacatgtcaaagacatatgggtaacttacctaacgaaatttgtgaagagatatggacggacaaaactagaacgtgcaagagagctatttgagcacgctattgaaacggtatgcgcagttcccattcagttttattgttgtcttataattaaacacactagtgccagtgccttcaactattttctggtgactttgcaatttagttttgttggttagttgcatattatatcttcttaaatgtttgttagacagatgtttccaaaagccgcaaacatctttattttttttgtctctagtttactaagacctgatgacattatactaggattaaataatctctctttactcttgtctccatcattggttttatagatatacattgttaatgtattagcattaaacataatcaatagtttatttcagtttagatttcaagttagataattgtttctgctactaatgttgtttgtgctctgtttttctattaacaacttgttatggtactaaaactaatgctttcggttttgtctatcagacccctgctgatgcagtgaaacctctgtatctacaatatgccaaactggaggaggaatatggtctggcgaagcgagctatgaaggtctatgaccaagccactaaggctgttccgaacagtgaaaaatttagtatgtatgacctctacatcaaccgtgctgctgagatctttggtgtcccaaaaactagggaaatatatgagcaagctatagaatctggtcttccagataaagatgtgaagaaaatgtgttcaaagtatgcagagcttgagaagagcttgggagaaattgaccgagctcgtgcgatatttgtctttgcatcgcaattttcagacccacgatcagatacagatttctggcaagagtggaataactttgaagtgcaacatggcaatgaagataccttcagagaaatgcttcgtattaaacgaagtgtttctgcaagttacagccaggtaagaaaatagttttattttcatatgcatcctttttgaagcttatgattgtttgtcaagtaataatctgtatttttaatactgatcttatatttattgttttccagacgcactttattctgccagagtatctgatgcagaaagatcaaaccgtcgaccttgatgaggcgaaagagaaattgaaacaggcaggtgtccccgaagatgaaatggctgctctagagaggcagttagctcctgcagcaaacgatcctatcgctaaagatggtaataggaaggtgggattcgtgagtgctggagtacaatcacaaaccgatgaagggttgaaagtcacagcaaatcacgaagatattgagctgccagaagaaaatgactctgacgaagacaacgaaatagttgaactcaagcaaaaagatgtacccgatgctgtttttggagagttggctcacaagagaagagaaaatgaagaggatgaagctcagaacaaagacgatgaaagtcgtttgggtgcactcgagagaatcaagaggctcaaaaagccttaggatgtaacagactgataagagctttttaggctgtaaaattgttgattccttcttatttagaagatgttgttacttagtaattttagtattttttgtcatttttgtaataacttgagtttttgaagaaaagttatttttatgagtaaaaagtgatgtattcgatgtttttttatgttggattgacgcaccaaaataatatttttgtagagtttcgaaagtttatgaaaatcagggagtgttcttcatcttttcttctccttaaattatttcaaaacaagagacataaatttttagtttcattattaaatgttattttttagattccattatatatcaaattgattttattcttctatattaatgttatgattattgttttaatcttgtttagatgaccactaaattaagttttactttaatttaccgtcattttaagattactattcacttaataatctagaattctaagtgtttgtgacaaattgtatcttgtccatataattctttttgaagtaatacatcatttaatcaataataataaataaatcaataataataaataaataaataattatgacaacgttaaagttattgttactgaataatatagtggcacacctcatttatatatttgtttcttttctaacaacattttggtcctaccacaaatgataatttgagaagaagtaattaatttacagtatgaatacttaaattttatttttgattattgataaatatttaagtataatttttaacggtaataatacttaagttatatatttagaacttcagtaaatac

SEQ ID NO: 111062 - DNA, 11887 bp, Cannabis sativa
  modified_base (11846)..(11846): a, c, t, g, unknown or other
ttttgtaagtttcccatttttttatttgggtctctaaaatgagtgggccctaggcgcgggcctagcccgcctatgcctagggccgccattgactaaagctataaaatatacatataatttagtaattgtaaaaaaaaatataaaaaagcaaagtacaaatgtaagcccgaatatgaaaacgggctagtctgtttaagaaatgcgggtcgtcacgagtaaagcacgacacgaatccgagcacaacacgaaaataccgaacctacgagtcgtaccgacttaccttttataaatattagcatgacacgatatgccttattttttgaaaatcacaaataaatatgagttggaccagcacgacacgcacgaactttcaaaattattggtcattactttaaaaaaaaacaattaaataatttttcacgtacaagtaaaggtgttcattagaccacatccaatatttttagtgcccatctggatccgatctaattatatattggatgttagattttataatctaatttgatccaattaatttcaatcatctaatcaatccaatagatgttgaatttgatcggttctatccgttaaatgtatttcatgtatgtttattggtttaattctaatttataacaacataaaatctaattacacattcaaactaaataaaaatattaattagttcgattggatgttgcatatattggattttcaggtacctcatcaaatattagatacaatttaattgtatatttaaaaataacatccaatctgatccgatcacaaatagatatccaatatttaatggtcaattgtaattagatctgtaaattgttatcggatcaatttatataaaacaagcacaaattttcaatcacaaagtatcaaaaaaaaaaaaaaaaacatgaataattctcaagaagagatttgttccaaaaataaaaaaataaattaaaacactaggaagagagatcaacggtctcgccgttaatccaaccagcttctctttctctgtaaaaagttccggtacactctgctccggtcttccaaagtccgagatcggagattgaactagtaaatcaatggaggtcgccgatgttcccctcgatgataaggccaagagaatgagggatctgctttctagcttctacgccccagatccttcactcccctcgtctccatccaagcaagcctctctcgacgccattaacaccagttccttcgatcccgatcagtacatgaatctcctggtactcccttcttctctatttgcaacctcacttatgttaagtaatgtatttgtaacaattgatcagttgatgctagggttagagctgaatcaagaaataaaatagtatctgaactgaaactatagaatttggagtatttgtaacgaaaaggtttgcatttgtgtttttgaatttagaatttggagtcaagtttttcaattgtgcaggtacaaaaatcgaatttggaaggccttcttcaaaggcatgttgaaatggcagctgagataaagaatcttgatactgacttgcaaatgctagtttatgaaaactataacaagtttattagtgctacagatacaatcaaaaggtaatcttttgaactctatatatgacttgtttcattgtgaaatataacttttttttttgagttggctactgagaaatgtgcacgatggaatgactagtgtcagagaaactttcatgtctattttcattaaaaccatgttctttccataattccaacaggatgaaaagtaatatcgtgggcatggaagtaaatatggaacagctccttcataaggcatgtgaagtgatatcttgtagtttgatttctattttttctttcgttatatgaggggaagattaacaaaatgagggcataacaatgttggtctccaaaatcatttcagataatgtccgtgcaatctaggagtgatggcgttaacacttctctgtttgagaagagagagcacatagaaaaacttcatcgaacacgtaatcttctccgtaaagtccaggtatttgaatattaaattcaaatcttacttaagttctaatttatagttatgaataatttgacatttttttattcatttaacccaaatagaaattcaaacttgtcccttagatcgcctttgcattgtaccctggcctagtggattgacttcttgattatcaggctgggaattgagtataacaaaaccctttttctcaaagttttttttaaatggaattgtatttatctttaaaaaattaggtgatgcattttttggatacaagaaaatcctgatgtttcatgcaatgtcactttgtactgagcaattcattgatacttacttcaaaatttcaagctacattgctaaattattataaagccctttattttgtgattctgagaattttattttatatgcaaatattctgtttgacattgtatgagttacagagatttgttgtctgtgttaagagcagtttatatacgatttacctgctagacttggaaagtgtatcaaatcagaggcgtatgctgatgcagtcagattctatactggagcgatgccaatttttaaggtttctttttgtttgattgatgacctttccctttctagtgttgattcaatcacttttatgtactttgaatgcaattttcttgtaagtttgcttttgaagtggctactgtagtacttcaaaatgatatttgtcttagtactttctcttttaggtgtacggagaatcatctttccaggactgtaagcgagcatctgaagaagcaatagctgtaattacaaagaatctgcaggtatatataattctatcttttaccatgtctagccaaatctcggaaaaactttagttatttattttggacaaaatttaactcaaattttactctttctacttgtattagagtagcaagtacaatgagaaagagtgttcaaaagctgtacaccaaagcctgaacaaaagaaaggaaataaaaatagtaaaaccttccctgatcaagaacagagaatttttttaaagaaaaaaaatctcgcagcaggaaaggaacttttttaaattcttgtcattatgcagccttagagcaacttttggccttatattatcccacaacctctcgacctcactttcctcgtcttgaaaaatcttttatttcctttccaaccataaaatccaccactctataggatattttgacttctccaaagggtgcatttttagttccaaatgctttgctgtcttctttattttggtttggtgcatgtgcgtgtatgccagaggagtgggagcctaaaattctgccttatgatgtgctgatttcctttttcaggggaagctattctcagattctgaatccatacaagcaagagctgaagctgcagtgcttcttaagcagctggatttcccggtttgtactgcatttcactttaaataatttttattcactattagaatgaagtgctaagcccttcattttacttcagataatttgttgcctgctcacttcaatttggcataaaattatacgtaactggaataaggaaatataaaataaatatatcctcttataattattactcaaatgtcttatagtttactttttgtagttttttatttttatcatatcaaatatctttctcttttgtggtttgattacatatgaagtctgaaattggaagaagaagtaatatctattgagtatcatttctgatatataactgtccatttgatgacagaaaacccacattttggcaggtggacagcctacaggcaaagttacttgagaagttagaacaatcccttgaggacctacaactgaatatggaagacatatcttgtgcttcagtggattccagtgatccttctgaacaaagaaatatgtccacgacacctcctattacggcacatgaagtgagtagtaataattcttacctctggttgtttaagtttaaaattggatgcaaatgcagaaaaattagctgcgtgtgctgccatctggtagatttattattactagttccttgttagtttgaagtactacttaagtatacagccttatttctcctctggataacttttaatcaaaattatgtctaaaagatggttatttaaggtctttgaagagtcttcaagtaaacactataaaatttctgttaggatataaaataaatataaacagttatatttatgccacaaaatattataaaagtaccccatttcaaaatgttttcttattacatgtttatgaagtaaaatggccaaaaatatactgctttaaatctttaattctatttataaaattttaagcttactgagtgcacccaatcctattttaattaaaattgtaaaacttttcccctttaaattgagtatttataatcttttgaaaatatattataacaacacaacagtaaatttttcttatcgaaaagaaaatcatataatattttaagcttattgtatatttaattatatttttataaacttatatttgatattctattaaacattttatgattttttatttagttatttattctattaggctttatcgccttttcaatgaaattctcacttacctttcaaaaaaataaacacataaataaattaatgtgagatacacaattttattctatttttattttttgtaaaatgaggtaaaactaaagacctactatagagtatagacatcttttaaattatgaaatatggtgtttttagtttgcggggtatatatataagtttatggggtgtaaatatagcttccctataaatatttgtctgtactatatttaggacttccatttttcacttcactagaattgcatttgataaattctgttcaactattgttttttgaccttcatattagagcattttcaatagagatgcaaataagttatgtaaagctaaatatagctcacctagcaaaaaaatattccaatagtgtgccaaaattgatttaaatttggcacatagaaaataatgtgttaaattgcatttttttaataaagagaaaagatcctcttgtcttagacagaaccctccccgctatatattaaaaagccttacttgtagcggaggaaaactatggttacaattcaaagcaaagcaaaaagtcctaagacaaatttcactctccaatactgccccagaaaaggactaaaaaaaactaatcgaagccacatactgcctttacaaaattgttttccattctctacataaatctagaaaagacaggtcctcaagatgtttggttctaaagactcaagtagcagtccaaaacttgactttctcccacacaatctgcttctggtttagcagccccttcaaaaattctggcatttctttccggccagcccaaattgttgctaagatcactgtttgccatagctttgtcctatgtttactgccaattaatttggaagctatcatttgtgatacggaccttggcataacccaagcctcacttgtggcggaggaaaacaatgatcactgtttgccatagctttgttaaattgcattactataagagcacctccaatggagtgctaaaagtgtggtgcatatgcatattttagcccatcttcataaaagtgaactctaatagtagtgtataaagtggtccaaatttagtacaaaatatagcatgagccaaattttacaccacaataaatcacttttttatttattctttttcacgtattaatataattaataactttttacattttatttatatatttagtagagttatcaataaaaatttaatgtttttattgatttttttacacatttctatcaaaaaaggttaattttacccctaatgcattggaacactattgtaaaatttgggacaaatataagaccatctacaatgtaagatgtaaatattgtgtttaatttgtcacaaaaaaaataagcaaatgctatatttgctacaacatttgctattgtgctccaatgcacaatagcattttatgttgcaaatcatgacaaaaagtaaaatatcattgatgagcatcaattaattaaatatttaaaaaataactaatgtcaatattgttattaaaaaaaaattattaaagcttattaatgatcaatgacaaaactgtaattgaaaaagttgcatttattgtgtgctaaatttggcacatgctatatcttgtgccaaatttagcacaacttttagcatggatcaaatttagcacacctttggagagctaattttctcatattttgagccaaatttaactcaatatatacaccatctgttggagatgatctatgcactactttttttgtttacatttatgtccttttgatttttttattattatatttaagtatagtattatattataaaccttttacattaataaaaggataaatagtgacatagtacccaaaattttgagtttgttagtggcataaacccaatgattttttttagcggcataagttcacaatgttagcaaaagtgtaattttcctcaagttttgtcagtacagatactctgttaatgtcttaaacaacacacatgtcaggctcagattctaaatcactaagtttggacggaaagatgtagcatgtgttatgtctaaatcttcttttaataaaacaaaacgaaatctctattaacgaaactaaataaaaattacaattttacaaatattgtgtatttacctcgataaaaaaaaatgggtttacgccaattataaaaacaaaacttggggtacttataataaaattaaggataattttttttatttatatattttgacaaaagcattaactaatattaaattttgcatcaagttttacaattatccattggagtacaatattaaaaattgattcaaatattttattaagtaatttttttttgccaaatatagcacaattcttacctcttccaatgaagatggtcttagagtgattaggttatacaaagaagatagtgaataaagccacctttctatttgattttatttattttatatttcaacatccttccatggaatttttatttcttggcctgcataagtgtagtccaatgttaaaacttaatttggcaactgtatttgttagctagttttatctaggaccgggaagctaatttacccttcaaaactgaggctctttctccgactagcatctggcatgcaactgatttatgcttatgcactttattagtttatatttttgaatctttacttgtctcccctagcagctgttttgtgtagttgtgtgactgatatctaaacttctctgtaggcttctgttcgtgagtttgcagaggctatccgtgcatatagagtaatatttcctgattcagatgaccagcttactaaacttgcaaaacacttggttaccaagtaagaaattaatttattatgagatattttttaaaagatttgaagcattttcctgatgcaatgtaatttgtgtttgttatattttaggcatcttcaaaccactgagcaatatgtgaggaatcggattggttcagcagatctgttacgtgttcttcgtaagtactatgaatatttgaaaacctctgtcccttcttttcgtccccctttataattttaggataataattcaaccaattgatgaacccttcattagtctatttactttgtaaaatatgcttaagcgaattcctattggatttgtgtactgggaactagtattataatccttgtcatggaatgttgtagtttttctacactagaccacatacttgtatttttctttgaggtaattttagggactttggcttgcttattgtcctctttgagacttctagagggcatctttactttcccgaataacaaattattaattgctaggtttattcatcatgtctgataatttcttcctagctcttcccaagctttctgctgttcggaagttttcttctttgttggttgcccatcatttgcaacctaaaagtgatcatcatgcttaataaaatgccatctgcaggaattatatggacagatgttcttttgatggatgatgtgattcaggaggctgttatgggggattactgtctggaggttttattctgaatttctctcattatgtcttatttaccctttgtttaaagctaacttcagatgtattttcttggctgctgaaaatcttcttggtaaaatagaaaccaatctattacttttaggacaggttgaaagtttcagactaaccgtatacatatttgcagactgctcgggtggttgttaaagagtacattgcaaatacattttctcatcttctacatgatatctcaggtcaggatattaaaaagttccttctatagttaaatccaatgtatttaaaacccatttgttttcagtttttgttagatccttgatatcttttattaagaatttctgccttgtcagtcttcatttgctttttgtgtctatattgttacttaaaacccaaatatttgaaaagaacatgaattgtgcaaattataagtggaagggaaagaacagaaggatttttagcagcttcttattatggtataactttataaagttggaagttttacacaatcacctgatatagatagcaggaattatcttttgtcgaactttcaatcttgataatcaaggatagaatagttttagtggcttcatagttcataatggaataagactactttattatgttggatatgtagacaatcacctgatttagatagaaaggatttcattgttaaatatttattcttaacaatcaagtattaagtaaagaagagtaaaaataaatcaatttgtgctgaaatattctgttgctgcatcttatctggagacttaaggttctaagtttaatttatttgaatgggcatcaagtctaactttaatctgtacaatatggcagataccctcactaaatcccgtattgaccaaaaagatggattagaaaaggattcattgcaagttgctttggaggccagcaagaaaaaagtgcttcaaggcagtatggatgtcttactggtaatttataaaataccttggatgcaatagttgatctatataaatatgttggattcttttagcattctggatcatgggtgtaaataagtgaccaattagtgtacatattatattttttgtttccaacttgtaaaatagatttcttctgtaagtatgttttcttttcttttgttttctgttctcatgtatgtatctaataggattgtttagatatttttacgctaagtgtacgtgcatgctgtgctgtgtatttaataattctgcactttctagcttacctatatttcacacccaattatttcaggacttccgccaacttctagatgacgagttagagctactagttaaactgaaggactggattgttgattgggtacaggaaggatttcaagatttctttaggaaacttgatgatcgcttcctcttgctttcagggagaaacaattcatctaatcacgatcaagtcttggctggtcttgtactagtgctggctcagctttctctgttcattgaacaaactgccattccaagaatcactgaggcaaggagatatggccaagaattctatgtttagtgttagaaaacatcaatttttagttaattttatctcattcttctggttcctgtggtggcatttgatctaattttcaggaaatagctgcttccttttctggaggtggtattagaggctccgaatatggacctgcctttgttccaggagaaatttgcagaatgtttcgttcaactggtgaaaagtttttgcaccttgtatgagttatatgctttgatatattcagtcttttgagattattccaatctattataaatggcttagtaggatctcttctattgttattggcctgcatgttgcttttagaaagtagatgtttctttgagcattttgacttaatgctaatatcctttcagtatataaagatgagaactcagagggtatcagtactcttgaagaagagatttaatacaccaaattggatcaaggttaggttactcttgaggcattttgcctatggacttgaaagaaagtaaccagcatgcagtaatttaactctgatttttctattatctttgcatttttaacagcacaaggagcccagagaagttcatatgtttgttgatttatttctccacgaggttagtagatcttcactttcctttttagactagtagtcaagcatggctgacctttacatttccattttcaagtgttgtgtagcatgttttgcacgacagtttatgtgttctcctttttgttaccacgctagttggaagctataagaaatgaagtaaagcagattttacctgaaggacttcgtaagcatcgtcggactgacagcaatggaagcacaaactcatctcggagcaatccattgcgagaggaaaaattaagccggtcaaatacccaaagggctaggagtcagcttcttgagacgcatctcgcaaaactattcaaacaaaaagttgaaattttcacaaaagttgaattcaatcaggtaattttgttctgtccgtatatatgtaattaacaattttgtgaaattgtttaggaagcctaaaattgtcttcaaattgcaggagtcagttgtatcaatgattgtaaaactgggcctcaagagtctgcaagaatttgtacgcctgcaaaccttcaatagaagtggattccagcaaattcaattggatattcagttcctaaggaatccttcaaaggaaatcgttgaagatgaagctgccatcgactttttactcgatgaggtaaaatagaaaaatactcctacttgagaaatactgcacaggaaatctgcaactagaatactattactaagttgtcacattgagcaggtaattgtggctgcggcagaacgttgtcttgacccaatacccttagagccccccatcttggacaaactaatacaagcaaagctggcaaaaactagagagcagaatccaacctctcaataacatgtgaaggtgaaacattgttttgtttttatttttctcttgttttctgtgattggtattattttgtttctgagatactggcttcccttttgttcagttttgatgctgtttgaaagaaatcattaatccactccactgtgacaatgagatttttctaatttgaggcatcagcgtgagctctcagctaggagtctttcatctgtagactgatgaccataattttgtggagtttcttaatctcatcagattttactctatttcgagctctattggtcgattgatttgttgtggttacaaatgtctgctatacttgtggacttatagcttgtaaaacggtgcccagaattttaactgatttatgtgaagaagttgatttgattacattgatctattaaataatcaggctatatgaaagtgatgttgccagtgcagcgttgaattgcttctaatttcccaacccttcccaaaacaaagtttgtaggagtgtaattcttacactccataacactaaaaaaaaagtatattctctatttttactttttcttttttataaatttatctcatctttatgtatatcaaacattaaagttaatcttttaataatattcttttattattaaaatagctattactgttccaccaaaatatattttattactttatacctactgacaaaacactatgatgcaccaaaattgggggatcagtttagccaacaagagtagactagtgagattaatatcgattttggattagaatgacttccattatttaggaaaacattatttttaagaggctaattaggatttttgccttttgaattttgacatgtactaaattatgctccctgaanttttaaggttattgaaaatgccccctgaattattgagattg

SEQ ID NO: 111063 - DNA, 6614 bp, Cannabis sativa
ttttttttttttttgctaaaatttttttaggtcatattacaaaaatataaatataatatatatgtataaataaaagtaaaaataataattatctcttagtctatattagttagacatgatttttttaacaaataaaataataatcacatatatttgttgtgactattcattttgttaaataattgtaaacatgtactataattttgttttaaagaagttttttttctaatatagattcatgtataaagctatttctaatggtactttactttaaaaatttatatttaatgtaatttttcccataaaatgtttcaattgtcttttttaaaattaaatatttcatttatgaagtaaatatttttattatattaataaattaatatcataataaaaaatatagatttaaatgtaatttttagtattgtgattattaaaaaaaattggtactaaaataatattcttttggttttaatttatactaaatttaagttttggcattggaattgccctaagtaaaaaattagtgggttaattttattgtaatggcataattgtaataaggtaataatattatgtctagttattaagtacaaataaagtaatctcaaaaaatgacatttgtcactaaattataaagagagtgcaaaagaaagtacaaaagagagtctccatagcacttctcatatttatataaagccgaagtgtgagtggcgatgtaagagcttaaaattgcttagaagtattttatctattttttttctaatatttttttaattttttttttaatatttttaataaaaaaaatcatacaaaaaattattctttttgtatcaaaaccatataaaatatattactaataaaatataatcctaataaatctatatatttttttatctatctctgagtatatcaatatatctgttatccgcgttttcagatgaatgatacatggcaaaagatggaatgcgatgatctaagtaattaccaattaagttcccttaattgtaaaaatccgctgaaagactaaacaaacttaggagaggtttaaatctgggaaagacccaaggcaaattactgtctgggactcggaagccctgtcatcctttcgggactcaaagaaggccaaatcaattgagcttatagggagacacctgagagccatattaagagtctaagacggatgcgaattgcacaagggaaattgaaagcttgtcatgaagcgaaagttggacaactctagtgatggttatacttttttgacacaggatcagttcttttctcctgtgtcagaacatggtagtgtgcgtacctcctctgaatgcacccttctgtacgaagactcatttgaatgttttgtttaccaggtgcaacttctgcccgacacgtatcttgtaccaacaatgatcccaactgtacgaaccccttgccccacgagaaaaagccttcttaggggcccaatagtcagtgttttcatgtatttttaccccaattttgggtgagcttttcatagaaaatcctaggctgttatgggtatgcctatacctacactttagcctatataagcctctttatttcttcacaaatgggggactggaaaattacatagtcgaagctttgctaaaatactctttaaactttcatattcttcaagaaaaacctagagaatcagagttaggatttcattgtaaacaccacttataatatatttaaacgcctaaaaggccaatatactgactcgtggactaggaataattaacgcctaattcacgtaaaatccttcgtctcatttattaaatagttatttaattcctaaggctttcctttaattagtgtccaaaaaatctcagtaaatattttggtgctttcactgagagttgaggaaagatctgagccactgcattcctacaaccatgtggctacacaaatagtgatagagaaaactcgtcaaaaaaacatcaatgttatcatggatgatgtaaatcctccccctccagagtacacccaactgagccatgcgaggggaggggatacgtctgaagctaacgacagaagggaagacccaactcgtcatcgtaagcaagttgaagacgaagaccttaaggccaaagatgatgaagaagaagatgaaggatacgtcaaagatggctactataaagacatgtatcattatgactaagacccagatctggttcgagtatccaacgaactgcttaagactcaacataagttagtccgtcaagaagagttctcttaaaagatggaaaagataatggcctacctccaagcgaagttcagaaacctagaagaagattctaaagaggatgcttcagtggaactagttgatagagacaatagagcaaaccctaccaatgccaaaactcagtcttgtaaaggacaaggggaaggcaaaagtgggtgagactctaaacaaaacaactcccttacctcctcaaaaaggcgtgaatctagccaaccagctctcatggatgcagaaggccatcgatgcatccgagcttggatgccctcctgctccaaatggcaaggttgcgccaaaagggcatgttacgaaagtacccaagcctaatggaaggaaaaattgccctagtgatttcattaattaggacggtgggacagaagaacaattctccaaagacaactagtccactatagacctttgaaggcgccttgacgccaagtatgaaaaggctaaatgagagaaggtgaggggacctctaaaggtgccttgatcccaagtacgaaaggaaagaaggcgaggccatgtggaacgacctaaggaatcacttaaatgataaggctcacggatacaacctcccagacagtgacacgaaaaggttgaaggaccaaattgctactttgactaagctcgttcggaaccaaagtggggtcctatcagattcggaagatgaggacctagagccatgtcatgcggatcatggaaggcccactacctaaaaatttcaaaatgccacaaattgagttgtatgatggtcacttggatcctaggacccacttgtcaaaatacaacaagatgatacaagtagcaagagtgagtgatgatgccaaatccctttgtttctcatcaacgctaaccaagtccatggaagactggtggaagaggctaacttccgaatcaatccatagctaggaggagttacagtcttccttccaaaagcaatttatagttgcaagagactatgatatgaagttagatcgctcaccaacatcaaacaacagctaggtgaaagcctaaaaacttttattcaaaggatgatggaggcagtagcaaagaccaaggttggcgatgacatgaaacttgtagcccttcaatctaaaattacagttggctccctattatggggagagatgcaaaggaaaaaggttgaggccctattcgagttcatgtctaaggcacaaggtatcattaatttaaaagattcttatcgacaagcttttggagtccctccagctccagctccttccacgtctacaccaagtttcaccctacaagtcccagttctagaaacttcacttctcagaactcagtactctctggctgtctataaaccttctaccgctgggcacgctcctatgcaaacccatttttttgagtatggagcagcacaaaccagatgtagtatcgctcttggtaagttgaagcaacaaacagaagtttcagaacagaatgtaagccattccaggaataagaggggtggaaagaacccaaattgaagtgaaactttgaaaaaaccaaggagggagtaagaaccaaaattctatgagtaaactagtttagttgacactcaggaaaatgtgtacaaggtaacctgcaatatggtccattattgaaagtcccaaaggatgcctccggggggaagaccaaaggatacgagtatcacaaaaatgtagggcacactaccaacgagtgtgattatctgaaggatgaaattgagactctagttagagctgaacacttggggcaagtagatccagatccaattatctatcttggataggggttattcacggacagatgctcgttctcaaacagtaaggagctgtaaaccctccgtagggggtaggcctccctcaagctcttagaacacaacttctagccctacctgctctgccagctcatgctctagtagtagttttggctccaagactagggaactcgtatcccccaagagtagctttgccacccatttgatgggtatgtggccacgatctttagaggaccacatattgcaagaagcacccaaaactcccaaaaaagatatttaaaagagttaaaaaatgaaagagaaatgtgcgcattagtacagtcccccgcacaacgtccgtggatgatgaacctaccaatcactttcacaaaagaagatgctaggcatgtacattttccccacaatgacccacagatcatagaagcccagattgccaacaaaatagtttccagagtgctggtggataatggaagttcagtcaacatactttttaagtttgaattttagacaattggactaatggaggctgattggtcaccttgccccattctaaagagttgaaaaagacttgttagtcctaactaataagcactccatgccaagtggacataaataaacccacccctgtgggcccaaatgtcaatgaacaaccaagaaaagtgtatataacaaaaagagacacaaatacaaatgtgttctcgacagacaacaaagaaatacaaagtcaagcatgaagagaactctccactccttgcatgaagagagcattatcaatatgccacaactctcctatagatcctatcctcaagactttagggctaggtgagaagtaacctcttctctcttctcttcaagctccatgttagcagtggtaccctcagtattggcaggggccgcgtgggtcttccgaatatgtttctcaacttcactttgcaatgtactaaagaacttgaagtcctagtcattttgctagcaccaacacatgtaggcgactccaaaggtgttgtccttaccgagctctttaatacgatcaagctcactcatatgggttgtcttcatttgtttgatagtttccaaggcctgcttgtattcaacctctagcttaccaatagcggccacatgtttgtcattcaaagccttcaactcagcctcaagtttgataagtttcgtatttaaggtaccaagctcattatttttttgcttaaacataatcttcagtagcctttaacttttcacccacctcttttagttgctttttagatgtctcctaagaagaagtgagcatgccctctagttccttcacttttaacatggcctctgtatagtgcctttccatatctttaaatttctccacatagatgttgtgagaaatattggtcctatggaggaggttaaaattgtcaaagaggaactggaaaaacaaagcaatacagttagccacatcatgggtatccacatgtaaaaataaagactaaagttgtaaagtccaaataccataatgagagagctacgacgcctttaagtaagcttactaatcggaacaatatcgctatcaaaggcctccttggtcgatgcatgcaaagatgagattcctgagccaatattcatcaaaacctgcccactccggtgacaaaagcatcagaagcctctccttgaagtaaaaaactccgagccaattgttggaggatgttctaatttgatgcaacataggagacaatcccatgactagaccctaaggctgtccaaaaggaggggccacttgtggaacatgtgagcccataggtaatgccaccacggccgctgggggtgaaaccccacctcttaaagtgggggcagtggtagccgaagattgaggtagcatactagttggcccaagcccgatggtgacatggccatcggggagggactcgtagatgtcggggcatcttttgcagccacaacatgggtacttggtgaggccacttgagtcggagtggttgtttgttactttctgcctcttagctgtttgtttaatggaggcttctaagttgtccatgtttcctagaagatcaaaggcaaaatatacatgtcaaaagttacaaaatttataaaaaaaaaaacaaacaaagtgcaagtcataattgtggaaagaaacatggagaaaaagtacgaccacaaacatatatctaagttaagaagtcaagcaaggtaataaagaaaagacaattttcttaaagctatttttgctctcttcgaaggaagtactaaagtgttatggttatacccgaaattcggctacactttagagcgtgacacgtgtcttgtagtggaatatgaaccacctgatataatgaaattatatcatttagtgaaaagaaaaagaataactcgttaataaaagattaatggaacttattcataacttgttgactacatagtcttaagcgagataaggataaaaggcagttggaacttataattgatgagatacatgcacatgcctctgtatcttatattcagaaaatatcttaaataaaatagactcgtagagtatgcagatttaactgcaaaaccacgtaaaaatatctaactattcggaagaagaagtgttgc

SEQ ID NO: 111064 - DNA, 3932 bp, Cannabis sativa
acatttaaaaaagaaaaaaaaatttaaatcattagtattttttttttttttaaaaataatcattattgtaaaaaaaaaattgtcacattccattcctctctcaaccaaacaaagtaatcttcatatttctaagcatcatcataacattactgcacataacgaaacacattaatgttgctttcctaggtttataattcccttcatcactctctcagcaatgttaaacctattcttatgaaatgaaacctgcataccaaacgaccccttaaatataatcttctaattataagttataggacacctttattttattttatattatttttttttacaagtaatgaccaatattattgataattaaataatgtcgtacatgctaaaggattttgcattccaaatactaaaataatagacaatttctagtcaaacaagttgtttattcatttgaagagcatgcacaactaattcatatgtagctacattgggtgattgatgtatacggatcaaggacactttaagaaaggagatctggataacatacttgttgcatccactaacaatgattctctgaagaaagaatatctcctagcaaaagcaaacacaattgttaaaggtcggaatcaataattttaactaactttgaaggaaaaattatctaacgtcactaatattaagtggcatataatttaagaaaaaagaatatcgctaaataataataacaatgctcttctttattttatttaaaaaggaaaaagaaatttaacggtcaaactctgttactgttagtcacgtttctttcacacaccacaattgtccaaccaaacggtcttttttgcgattgaagaaatacgacatgtcgttttgtgaataattacatgtcgtttttgcagaatagaatacgttagaaactctctctctcatttctcaagctgtcaaacacaacacaactctctcatttgtttcctaaacaaatctctggcacaaatcatcttcatccaatcacacacatatatatatatttatatatatatatatatataaatactcaaggagaaaccaaaaagtttttcactttctcatcaagatcctactcgattctagctaaggttagtattttttttttgttaattgtttgtttttttcaatttcaatttcttcgagatcgaagaaaggaagaaaaaaagggcagatttttcatttgtgttgattatcttagtgggatttgattacgtaatgcaattcatcattgttcgattcagattcccaattgttccttaatctagtgtttagttaaactttataacctgaattcttgattgtttaagtatgcatcaatggggtttgtgtttggattgtgaagtaattgttttgcccatttcattatactttcacatatgggttaattaattccaaaattttgaaaatgtgaaactcattaaatattgattaatacttcgttgctttaaccgtttagttttatacatgtgtttagatatttttattagcaaaatgaacttgttatggtcgcagaaacgaccataaattaattaccttgtgggagcataaacaactattatagtggcaaaatgactatagatttacactttgtgatcatcatgatcctatcaaatagagtattttgtaaattttagtattttatattgttagtttggcaaaggtttcgactccctaaaccaggggatggaatgcattaagaaataaaatcagagattacagccacctaatgataacagaaaagaaataacataaattaactcaaccacttagtattccctacaccagatgcaactcctccacctacaaaaccagtatgttcctgcagcagagagcaatttatgttttttggtataatattgccaaactgattagtagagttagtccatttggctatgttgtgagctaccccgttacagtttctaggtatccagttcattgaaccaaagacaaggttccttaagattgaaaggaacattatcactattctttactatccatgaagtggattgcattgagggagtcattttgaaaaatgactttatggaaatgtagttcctcatccaccatagtcccatgagctattgcaagggcttccccaacaatgggtttagaaggattgatttttttggtgttaatatgaacaactctgccctcttgtatattcttgatgaatttcacttgttgtgattgatatatttgatatacatgctgattactatccatgattgtaaatcttggtttaccaggttccctacaaaacagatactattatccgtttaatagtttcatttgacttatgatttgttcaaacatggttctgttgtgaggattctaaacatgtcttttttagtattactatgcccatcttaacctgttcaatgaatgatattgcctgtattttcaagacatgctcctaataaaatccctcatgtaattgatcttgtgcccgagtttatatgtaatgatatccttctttagttttaatatagtcttcttatgcctcaggtttgaagttttgctctagaaaatgagctggtggtgggctggagctattggcgccgctaaggtaaactaccattttcagtctccactttgttatgctgcctgagatgcctattgtagccaaatatgagattttgatgaatttaatatgcatttacagaaaaagtttgaagaagatgaaccccccagaagctaccagagcgtgggtttggtgattggcgtgactgggatagtaggcaacagcctggccgaaatcctcccactctcagacacgcctggcggcccctggaaggtgtatggggtggggagacgcccacgtccgaactggaattctgatcatcctattgaatacattcagtgtgatgtatcagatcctgaagacacgaatacaaagctctctggactgaccgatgttacacatatattttatgtcacttgggccaaacgagccactgaagttgagaactgtgaagttaatggtgctatgttaagcaatgtgctgcaagtgctgattccaaatgccccaaatctcagccacatttgcctccaaactgggaccaaacattacgtaggtccttttgaggcccttggtacaattgagctccatgaacctcctttcacggaggatatgccccgtttgaatgttccaaacttctactacactttggaagacatcctatacaaagaggttgagaaaaaggagggcttgacgtggtctgtgcaccgtcccaacgtgatattcggtttttcccctcacagcttgatgaacttaatcggctccctttgtgtgtatgcggctatatgcaagcacgaagggcgtccactaaagttccctggaagcaaagcgacttgggagtgtttttcagtggcttcagatgcagatttgatcgcagaacaacaaatatggactgcagtggacccatatgcaaagaacgaagcttttaactgtaacaacggtgatgtgttcagatggaagcatttctggaaagttttagccgagcagtttgggatcgaagaacatggattcgaggagggtgtgagttttaagttgacagagttgatgaaggacaaaggtgctgtatgggatgagattgtgaaggagaatcagctagagcccaccaagttagaagaggtgggtaattggtggtttgctgatgtgatgttgggtgctgtatcacagttggacagcatgaacaagagtaaagaacatggctttttaggtttcaggaattcaaggaactctttcatctcttggattgacaagatgaaagcatacaaaattgtgccttgaaaaattgaaaatgctgaacaatctcttgagtttgtttgtggggttccattggtggttttaatttagtatgaaaaaatgtttgttgtgtatctgctgtttttcattgttgttgttctaaatt

SEQ ID NO: 111065 - DNA, 4976 bp, Cannabis sativa
  modified_base (295)..(295): a, c, t, g, unknown or other
  modified_base (4628)..(4638): a, c, t, g, unknown or other
ttgagatctacatttcatggatttaaaaattgaagtcacgacattagttttatgcaaattaaactggatttccagttgaattttagtttcgtagtaatttttctacatttttttataaattcgaaacaacccatgttttgattgattctggtcatcttctcagataaagtcaccagatataatggtggtactctttctggttgaatttttgtttcagttgtgttgggttgctgcgtggttgcgcgatagttgcccatgaagcatggatcttgggttgaaggtgtgtgtaagtggnatttgtgtaatttttttatttgggctgtatatttgtttatttggccaactggaagtatttttgtaatattgttactttttttggttaaaacttaaaaaagccctatattataatgtattttccttttgttgttgattaacaacaaacaatgtattttcctaagtaagagtgcatccgggagcgagtatgagggctttcggagtcacggtcaaagccactcgttaaaggatattcctagataggaaagagccagctggaattgactgtccgggactaccttcttgaaagaacaactagtcatccaaggctccttttcggagaggactatagctttctaaagacccttcttagaaggataagaaagccttccaagaccaacttctgcgagtccacaatttttcaggaataataagactcttgaagatcttttcatttaaaggaattataccgcaatatatatattaattttatataaaaataataattatttattactattttttttataataatgatgactatttttgtcttttgattcttatatttttatatatttttagcaggtaaaaaacttttataagagtgtttattggattttttttttttttgattatataatttagtaatttaaccgtgacaattatttcccgtccaacccacaaggcggtccccctatattttatatatcatattcccaaaaaatttcttgtttttttttgactgaacatccatcttattatcatttaattaagatgattatgtgtacacaagtcaactttgctcaatcattgtatcccaataacaaattgcttcacgagtactgctattgggcactagtggtgtctagtacccttaagacgtgtagtcttgtgattggctagcgatactctttaaaagctattatattaaactatatgggacccgatactaaattagatcaatagcgatattgacacgtaagagggtgtttgacactactggtgccttttagcatttctcattgcttcactttcaaatttaagaaacttcctcctatgatctacacacaattatatatatatatatatatatatatatgttttgtcaattaattaatgaacacatttttaattgtttgttgagagcaattacagcatgagataagcatatatataaattgtcatatcaatttaggtggcaatagttgtggacgtacatgaattattttacataattttgatcaatattatatttgcagagaacattattaaatgaacaaccttcatctatgcttagcctatttaaggatgtgccaatacacattcatattcatactaacaaacagttcaaagatttctaaattaataatgatgaaactcaactctcttatattactatttgttgttctaattagcttcttggagggttctcaatgtggtaatctcagtaaaaatttctacaagaaaacttgtaaggatgctgagactattataaaacagaccacagagaaacatgtggccagtaatccagctgtacctgcaagattactaagaatgcattttcatgattgctttgttagagtaagccattttattatttaccacttatgtgttaattttttattaccttagaaaaatgtttaatttaattaaatgcatgttgtattttagggatgtgatggatcagttcttttgaactcaacaaacaataatgctgaaaaagatgcaattccaaaccaaactttattgggtttcgatgtaattgatgatattaaagaagaagttgagaagaaatgtccaggagtcgtttcatgcgctgatattttagctttggcagcaagagactctgtttcgtactcagtaagaaaatacataatataattttatatgatgaaattaataataataatttgtatttggtaattgattttgttacatattaattattcagtttaagaaatctatgtgggaagtacttactggtagaagagatgggaaagtatcacaaatgagtgaagcattacaaaatattccagcacctttcttcaacttcacccaactcaagcaaaattttgcctccaaaggtcttactgtgcatgatcttgttgtattatcaggtaagcaatttttatatttaattataattagtttgtccattattacctataatatatagtatatattacgacaacaattaagtagtgtagtagtgtgacaaaaactataaattaataaaataataatatcaaaatgtcacggactaatcttacacaattatatatatgtatgcccaactgttaatatatatataagtataataaataaaagtcaatgaatttgagctctagtaatatatgcacgagaaacaatatataaatattaattaatctaactacttataatattttgatgagaaatgctaatagttacatgtggtatttaatatgtgttaatattgttattggtctaattaagtattgaatctcatataatttaatgtaataactttcaaagagtatcgctaaccaatcgaatgacatgtcagaggtagtagacaccaatggtactaacatttaagagaaatgctaaagggtgccaatgacaggaacgaacacactgataatagtgtggtggctatagccccagtaaaaaaaagttagtgttaaaaaaaaattaaatattttctatttataaaatagttatacaataaaatagtaaaaagcctccataaaataattataattttaatgaaaagtaaatataaatatttttataacaattaagctctcacttatcaaaaatctcgggtctatcactgaccactgacactctcttacgtgtcaatattaccattggttcaaacttcaaataagtatagaatctaatataatttaatgtaataacttttaagaagtattgtaagtcaatcgtaagagaacacgtctagaaaatgctagacactactagtacttaataacaatgctctatatttaattgtacaaatatacattgttcccttaatttttaccatgattcattagctaacttatacatttacttttgtaaaatatgattacgaaaaccacttgataacaccaagcatgcaaagaagaagaaattattagcaaaacttgcatcaagttcattatatgtatttatttataatattataggaggacacacaattggagtgggacattgcactggattcaacaacaggctatacaatttcacaggaaagggagatcaagacccttcattggacaaagactatgctaaaatgttaaagaccaaatgccctccaaatgaccaaaaaacaactgtgcaaatggacccaggcagtgctctcaaattcgacaccagttactacaacgttgtattgaacaataaaggtcttttcacctcagacgccacacttcttaccaacaaaatcgcccgtaaaaccgtctcagagttggttgaagaaagtgattttttcactgaattttctcagtccatgaagaggatgggagccattgaggtccttactggcacagctggtgagatcaggaaaaaatgttgggctgtcaattcttaattagaagaatttatatgaacagaactgaagttgtccttctcaattgtatctacacatggttgaaatttgagtttgtgtgctcttcttttttatatttcgaataaacaagagtattttttttttaatcaattgcctcatttgttgtggtcaatggtcataatcaataattttttctttagtttattgtaagagggagtacctaccatttattcacttaattaatcttcttaattgttattttccttgtaatagttattaaattgcttgttttgttagaaaataaattcatgcaaccattccatatcgatcctttcaaaaaaaaaaaaaaaaaaaatatcaaaacggtgtctttataacagaacttttaaaatgacaaattttagaccctaaacttatgttcactttgctaacaaaaaaagaagaaaaaatatatcataaaaatttgaggaaattacattgtttactcattttactttatttgtattaattttacctctatttttatattctttaagatatgcccacttttataaatgatgttttcattagaggttaatgtagattatatgttagacttaaatagagagtgaaggtatattagacaacccacttaaaaaagtaggtatattttaataaaatataatatgagagtaattttgattaattgataaaaaaaaaggaaaatttacatggtatactaacttttatcattttttacaaagatactgtcaggcagtattttttacttttttaatgtatttttttataagtttcatannnnnnnnnnntgtgttaagttttcactggtattccactggtgttttttagttgttctactgttgttttgagttgttttgttttgtgttctactagtattttataaaaacacagtattttttaaaacttttatgtgtgatagtatttttgtaaaacttaacccaaattctagtattttttgtaagtttcaccaaaaaaataatatatttttaacttatccctaaaaaccatatctgttatgtattctaaaaggggttgagatgcaaaatgaccctcaatttggtaactaagttagtaaatgtccacttttaaaaaaaaaattaagaaaatagccaaatctaataaatta

SEQ ID NO: 111066 - DNA, 6166 bp, Cannabis sativa
ttacgaaattctatatagaaactcatattgcaactaacgctacaacttaaattgcaataaaaaattatataaaaactcctattacaactagtactgtaaccactttaaaaaccaaaaccgtaaatttaaaacaaaataattaaaaaaataatatataaaataattctcctaatttaatttcattctgttcgaatttaattttcaatacatattctctacttcttcaaatatttctttttacatactctatttatatcatacatttaaatcttgtaagcccatgcaatcaaccgaagccccacaaaatagagattcttcaattcttgtgtgagagagagaggagtcacaggtggcggcgagctaagagaaggcccccaattgtttggcgcctctattggacgccacgaatccattgctaataccatcatttctctaaatcttttcccactaatttcaccaaaaattcaatcaaaataaatatatacataatcacacacacccatatatgtgtatacgcacgcacctacgtaatcaacattgacaatccaaaaaagcctctcctcaatttctgttatttttcattgaacattcacgaacactgaacgcctttctttctttcttgttacaatttctagagagagagagagagagagagataaaggaataataatggtgggatcgaggcagggaataccttcctggataaccgcggcggcggctacaagggttgatttcgaaggaggcgccgaaaccatgttcaaggatggtagtaaacaacctccttcttctgcggcggcggtggaactttcgaatgcccatttgggttttggagagagggctttctctgctgccggtgctgctgttctctccgctatcttagttaatcctcttgatattgccaaggtttatgcatactattatcgtttttttctttttctttttgttaattatatgcatctcaaactcaattgcaatgcccattttccagttttctttgattattttgagtaaaccttgtttgtaagaatttattagattattatatgaaaacgctatgttaagccatttctcgagtttaaaactataaagattggtggattttgtattgtgattcaatattgttgttgtttgatgaaaatttaaaagggtcttatgcaattttgttgcctttacctctagactcggttgcaagcacaagctgctggagttccttatcagggggtttgtggtagcacatgttttgaaaccgccacggtatgtatacagccattttcttaatatgcgtctgctgtgtacattattgtaataaacttccattgattttgtgttttggttttaggtgtttcctgctacaaagtattcttcatcgggtgtgcgttcaattgttggtgctgaacctgtgtgccctccggaatgtgggcagtataaaggaacattggatgtcctatataaaattatacgtcaggttagtaggcctacacattggaatttgttggacaaatgtgtttcaattcattgcattgtggattacagaatggagatagtatgtaaattgcagctaaaccatgtttattcttgtagcaacaacacacgcatggaccttttattaaatataattgcgctgaaatgatactctgtttatagtagttatctaatattttctgattacaagcttgttgatttgattgtagttattaaatataattcccatgagaacgaataaaatttaaatgcataaaaagaattaataaaaaaattattaaatttttcctcatcttgcattgggataatctctcattctatttcataatggaatagtcattccaccctaatggtagaaagatcattcgatgggaattacattccagtactttaaaatgcaatcaaacaatagaattgaatgaaaattgtttcatttccattctattctatttcattatttccaaccaaaagccacctaagtttggtcagaaatttgtgcttacaagaggtctcatagaagtaaattttgcaggaaggtttcacaagattgtggagaggcacaaatgctagcttagcattggctataccaactgtgagtctctttcttagcagaattttcccagtttagccatctcctttttgtggttcagccctgtcaacatgctgactcaaactgttatgtagattcttctggtgtcattttgttaatacatgtttttcaatgtataacaggtggggatatacttgccttgttatgatgtttttcgtatttatatggaagggttcacaaatcaacgttctccaagtttgacgccatatgttccattagtggcaggatcggttgctcgttcattggcttgtgttacttgctaccccgttgaattggcaaggactcgcatgcaggtgttaatgttgtctaatattttactatgccatagtcataaccttgctaattttttgttttagttggttattttaaattaaaatgatgtcggatattgtagtgttaggataagtttatactagattttcctcttcatgagtataatctcctcctcctgccttttcattcagggaaagtttttccattcaattgtagggatcatacaataaatactccatactctgttacatgattctctgatacttctcccttaagactatattttatgaaaaagttcattggttatacttaattaggtctcttcttcttgctttcataggcatttaaagaaagccaagctggtgtgaagcctgcaggagtctggaaaacgctgcacgatgttgtcaacccggcaaagagcacaagctttcttcaaaaccgtaagttgaattcaaattttatatttcaacaagttagtacattatattgcatttgacaaagagtgagataaagaggtatttatattttgttaatattaatacactcatatataaagagcattgccatgacgcactcatggtgcctagtaccatgataagtgtcgtcctataattagttagcgattttttataatatttattaatgtaaaatgaaggatccgatattgagttgcaccaataacaatattacacctcacttgggtgttaggttagacattatgggtgtcctttagcatttctcataaatcactgaacttttatttcctttgctgtgtactttctaacttttgttcacatcttcattctgcagctgttcaaagatatcgcgtcttgtggaccggccttggagcacaacttgcccgtgatgttccattttctgcaatctgttggtcaaccctagagccagtgggtcattctcttcaaagctttcagcttgatgccaattatttctgttctccaaaactaaaaagcctttaaacttgatcttaatttttttttggttttgttataaagatccggaaaagacttcttggtctgatgggagatgaagccagtgtagcgagtgttcttggggcaaatttctccgctggcttcgtggcaggaagccttgcagctgctgctacatgtccattagacgtagcaagaacacgacgacagattgaagtaaaaaaatcttcgaacaatgctttaaaaaattggatactataacttgagcaactgtttttacaaatcaattcttgtttgcatttcagaaggatccttcgagagttttgaaaatgaccacaagaaagactttggtagaaatatggaggtaagaacacaattggaaagaaaataaagagtaaagttttgaatacaatttaatccaaggtgtaatttgaaacagggatggaggaatgaagggactgtttacaggagtaagtccacgagttggtcgtgctggtccttcggttggaatagttgtctcttgctatgaagttgtcaagtacactatgtatcaaagaagcctcaaaaacaatccaaagtagagaagaaaaaaaaacaggatttacaactaaaaaggaatcaaacactaacatacacacgaaaaaaaagggctttttatgagcgaaccattctttgtttaagaaagtgcttttctggagcactctatgtaagtaaggttttcaattttgccatgtcaaagataaatttttggtatatagccatttttgtaatctcaagctatgcctcaagtggctttttgaaattctacgtgtttattttcattttctgaaacttattttttgcttttacaaaataaaattaacataaaatgcgaatgcaacttcttttcattttgatttttaagatagaaaagtgactgaatttgcaattggaattttccttttttggtaactcaaattcaccatttctggatgcaattattgtcttgttttaatcccaagaaaatgaaagacgcacaagatgtattgtataaaatagatggaagaggaaaataagtagaaaagcaataccattgaatgaatttctcatcaacaccgaaaaatgaaaaaaaatatacacaacccatcaaaatcaatagtaacacaatatcccaaaactaataaccaataataattataataataataatatatgcaaatataaaagaatcgttaagatccatctgaacgccctaaaattgaaactaatctagaagtaggaagaatatgcgtccaagggatggatgagatatgtaagcaccaacgccagaagcatcagcacatacgcaattccttggtcaatcgaggtccctgaatccattaacgaagaaaaaactagatctcagtataaccacattgaattcaatatcaaatcttacatattattttctttttcctttttagaaaatgtaatatatattttaaagaaaatacgtaatcagatccagaatctttcaaaagaaataaagaaagagagatttaccatcactggcaggagcaggagctggagccgaagactcagcttgagcaatggaagcgaaagcgagagcgaagaaagccaaaacaacgccaaccaaggcggtggagcataaaccagaagctgccattgcttttttgtttttctccaaaaaacttgaacaagaaaatggagaagaaatggtaagagaaagtggtacaagaatctgatgtgcggcaagttgaagatgggtttggatttaaatacaggggatcggcgaggggtattttgggaagttcgagtcaaaaatatattacgttgtgtgttcttgatgtgtgggcctaggctgattacacgagccatgtggtggtttttgctgtgtttctctatttttttacatcttttttggtttgccaccctgtcacattgtcactatactattctttttttttaattatttctttattattattttttttcttttgtgttttctgcaaaatatttaatattattatcagtatatgatatttgtgtgaattgtaatattaatatatcatcctcggattctacatctggccaaggaccctactcattagtttttttcctcaacggattaaacggctcttattattattttttttgttctcgttgttttcgttctaaaaggttccaaaatattcaactactccaattaaaataagtaaataaataaacaaacttgaatgatttgttatttatttcaggcatttgccattaaaatattggaatttaaataaatatttgtaatactatttgaaaagaataaaagaattggtggcttttaatacacacattacatttgtatatcatttaatttagatagaatcttacgtttttaaagtagaagaaaatgaagaataatactagattattaattagatatcaatgaatgagaagacaacaggacaggacatgcattccccaaggcaaagaagatttttgttacaaaaattatggtttgcattggttaggaaggagagacatccatcatatcttgcactgttgtattttagccgttaatgatttacacatcatattcatcttcttttggcccccatgatgtaaggtcaaatttagtacacatcaatttttcattccaaattcaaattgcctaatcaattcaaaattgaaaaaatcagtcaaaggcaactaatttttttttttttttttttttttacagtaataatacttaaattatatttctagaacttctgcaaatacttaaatgacatttagttggaggtaataaaataaaatagaatgaaaaaaaaaaaaacaattttcatttcattctttaatttgattgcattttaaaatatta

SEQ ID NO: 111067 - DNA, 811 bp, Cannabis sativa
  modified_base (771)..(771): a, c, t, g, unknown or other
tcctatgaatatctttagtgaaagtctttgggagtttaaataaattcattgtatattattaaatattattattagatagtattcaataatattaaagtaaaattatttgttcaaaatatacaccgtaaattttaaattaacaaaaaaaaaaagaatgtagactatatttatttcactgtaaagatttaatatttctaacaaactaaatattcagagatgatcgtttggttgtgttttcacttttcaatttttagaattgtggtttttaaaattagaataggaaacaatttttcgtcatttcaaaagtttaaaagtgtttggctaatgttttctaaaaactacttttagttttttcttttgccaaaaaaataaaaataaaatactacttcaatattctacaccataccacaacatgaattcagtcccatactggactcggacctcggacctggacccaaacccgacttcgggtcctaggtcctaggtgtgaggtttgtgttcgtgtctgggtctaggtcccaaggtcgatctgagtcctagttcaagggtgtattcgggggcgggtttgggtcctgagaccgggtatgaatatgggtcctgagtcagggagccgattcgggggcaggttaggtcccagggctgggttgggttcgggtctcaggggcaggtccggtccaagtaaaaagtgtaaaaaagaatgtgttatacaaaaaataaatacagatttttttaaaataaaaaacaacatttgatgttttttttttttttttntttttttttttttgaaattcttttttttgttttttttttt

SEQ ID NO: 111068 - DNA, 5349 bp, Cannabis sativa
  modified_base (3519)..(3523): a, c, t, g, unknown or other
aaaaaaaaaaaaaaataccaagtgacaatataacctatcaactattggcttaaagatcagatcagcccctccctctactttccactgctgattcatatatatcagaaaaacacacttgttttttttttcttcttgcatgataagcactgattctttaggtcatcttgttgggacaatagctttgtcacctagggacccatctcaccccatcttaaaactttggattgtcattggtcccctgctttagccaattattttgtttacttacatattttaatctcttgcttcacaaagtatagggtaaatatacagtatacggctttttgggtacgacctatatttatttcagcgagatttttttagtctatttttctcttcataattgtgttaaattttttgaaaattttaaatagtttatagttcgatattttactgcactcctaactgttttttaatgcaagtaaagtaattgtttcaattatattttcagcttaaattattttaatttttttgaaaattatttattgtttgtactttgtagtgtgtaatttgagtgtgtgagttagtatataccacttgaggctagcttaagtggccatagaagggtgtgtgtgttggaggtcttagttcgagtgttatgtattgtgtaatatataaacgcttaaataaaaaaaaaagttagtaacctatattatattataggtgcacaaatgtgtatatctattttatatgtatgaataattataattatatatatttataaaataattttttttataaattctaaataatttatagtactaaaaacatattttgaaaattatgtgctcttgtttttatttatttgacgtgtttaaaacatgcaatgggttttggttttaagttgtgtaaattatttatataatatcttaaatatctacaataaaaatatatatatatattcactgtatataagtgtatgatagaatagaaattgatttgtgaggaagtcccaattatttggggtttagaaggtgattttgatttatttaaggcccccatgaagattctaacacccccttttacgtgtcaccgttgggttttaacaactagttgtggttgggggaccattgacctcaccatcaatacaaactagtacacacacacactcttttatttgctttgttttgtttttattttagatcataatttggtctcttacatttattattatgtggtattcgttaaacttgatgaatcatctagtggtcataataagttatatcaaaaaatttttttagtgcaaaactattctaatgaccaagcaaaggcattattaattaggggtgaacccacacataggtgagggggcatgaattttaattagttacaacatatatttataataaaaaatgatatttatatacataataatagttttagtgtaatggttcaattcttataaagatcattttctttttttaaatttacttttgcctccactttaaaaaaaaaaaaattacgcccctcttactttaaattctgggtctgccactgtggagaatatgttaacataatataataatatacttatggtgcaccatccaataatgacagttagtaaaaaaaaaccattgttttaagtagtgtaattttgagtgcatacgtgtgcatattaccattatataattttacatataaaattagcaatttatttagatatatattcataaggttttaataattactaaattatattaatttattactatagggtttatttggtatgctagattagattgggttgaataggattgttaattaaaattatttcaaaaaataaaaaaaattttataaaaatatgattgtacggaatattgaacatttttacgggttttgtgattttatttacataaaatacgattatttgatatatttatgttgtatttttattattttgttatttatatattattttttatgatattttttaattatttttatgtgggtttttttgtgtttttattaaatatttagtaaaaatgtaaaaaaaataaaaaattaaacatacaagtgtaattttttttattattaaaagtagctgttcatgtaatgttcttttattaattagaattggattggattcatgttataggactaaatttaatagaaagttattttttaaaaaataatcataatttttcgaaaaaaattaaaagaatattataaaaaatagtagtaaaaaaagaattagaagtaaaaattagaaaaaaaatagatatcatttctaagtactcatgatattttttttgatattttttgtatacactatttataaaataatgtaaaagaaaaataggaggtttattttaatcatctttttgatgggatattataatagtccaagccaaagggacaaattgtgtggagtggatgaaattatccaattccctatttaatccaattccaagcactaatccagtactgcaacaaatatggcctgtagggttgagtactgtgtatgacaaatagatattttatgttataaattattatgaaaatgtacgtgtcaatccatttaacactacaaaaaaaaaaagtgtgcaatatagaaagtatttatgaatctattaattaattaacatgcattgattgtttggtaagccgaattacatagagaatataatattaattagtatatattttagtagtattatgtaaaatatgatatattttaatacaacaacacattatataagaatataaattattctaataatgggtcaaattcacaataaattttatttttttttatttactattataatttattaaagtgagttgaatatagcatatatatatttttatcaaatatagcataaattttaaattttgcataggatacatatgatctaatatacaatattatagtaatgaatccattttgctctcttagttaaaaataaatgtttcttcgatcaattattatgaagaagtttttatatataactagtttttattatatttaaatttgtgtttagaaaaaaaaaaagaaatatgttttatgaatgttgaaccacaaatttgtgtataaattgctatgattcttgtatattgactttaagatcaaaaggagaagaaaaagaggattaatattttgtcactgataattgaagaccatgacttttgagccctaaaaggttaccttcaaaagaaataaaaagcataaaaggcaactctattctatagggtttggagccctagattccgacattaagacaagccaaaatgattccctttctatgatatttttcttataaatattcatatattttgtgtacaaacttctttttctgaagaaaaaaagccaaatcatatattgaaaccttttactagtctttttaattttttgttgtgttttttaatttttatccttgtcaaactaactctatcttactttcttgaaaataattagacaattctttttcttcctaagtatactatattgccaagagggatcttattattattattattatnnnnnttattattattattataaaaaaatgaaaaaaatgagaaaatagaggaatcttattacatttaataattgattaattaagggtacttatttcaaggccaggtttgatctatataattcagaagcgctttattaattaatgctattttctttattttattttttgtaaaaaagctattatagtttctttttcttacattaaatactcatcaattttgtgcactattttttttttttttttggttttgagtatagcactttagattttatatatataaaaaaatataaactattgagtatagcactttaaattatatataaaaatataaaacattattggtttaaatgatagtgtcattaattgggtgagcatttatgtccccactaatttaaatcaagattttatattacaagtaatatccactaatttaaattaagattttatattacaagtaatattattacatccccaacataaattgatttgtctttatttttttcagcacccaatttcaaatttcaattttgtgatgatcatgatgaaatgggaaacaattaataatcatttcttggctaaaataataaaagctaaaatctggattttatcaatgtagcaaatgggctattattataataaaattatacattattaatatatgtgttaacctaatagggggaaataaaggattaaactttctggtaagtatgatttggtctaatgaaagataataagaaacacacctttaattatatactaaactaaattccaatcacaaccctacatttgtatcataaaataataaaacagttatacaatgctctctaaaaggagaccaattatttgaaaagaaatattaggcatccataccaatataatactctatttctcaacaaaacacaatatagcatatctaaattgattttacaattggttattagaggtggatataaacaagcaaacaataagtttaatcagcctattaatgtgttcactaataagttaattagtcatatcaaaatcacaaagattaaatcttgcttatttattaatttttatctactagttgtcattcattgaaagaaaaagttgactaataatgttctcttattcattaattttggccttaattagtagttaatagctaccatataaataagagtaattgatggttatacattgttatgggacactaaagtgttagcatcattatgaagtgtcactctataattggtcagcggttctctataatttttattaaagtaaaatatgttagactcgatattgaattgcaccaataaaaatattacacatcacaagggtgaggcattatgggtgccctttgcatttctcatatttttaacactttataacaactgttgggattaaattcacttaatctgtcaaagtcagtaagttcatcttttcactcatcagatgaatatggagaaagctgttgttagttataatagttagctttgttaccaacttaaagagagctccaccaacatctatatatagaagtgcctcgactccctcaagtaatctccaatgctccaattttagagtcaagtttagagaaagagagtctaagatcacaatgagtgtgtgtgtgtgtggagggatgtaatgggagtatcactctttaagtgattttactcattgtgagacatttctttgtaattgtttattgtgttgagttgtattcttggacaatctcatggtgcactactcactattcctaatcaataaatatccatgattcattcattctcaagctaagtttattcttgtctaatttcatctaagttctagttttgattttgtgatt

SEQ ID NO: 111069 - DNA, 2428 bp, Cannabis sativa
  modified_base (2378)..(2381): a, c, t, g, unknown or other
aaaattgaggaagacaaaggcccgatagtgggcccgatggggcccgatgcatgtgtaaaaaatagaatttgatatggcccgatgggtccgatgggcctgatgggcctgatggagcccgattgcatgggtaaaaaaatagaatttgatatggcccgatgggttcgatgggcccaatgggcctgatggtgggcccgatggtcgacaatgtgaaataaagagagaagaaaagagaggggataatgtaaatggggagtattttagagatattataaaatgtgtcatatcccacaaatataaaatattatgagtttaggggaaaatttttaagaatatgtaagtataaaaaatcaaatttccctttaatattcataaaaaattagtaactaacaccacaccactaaaaagtagttggaaacaaatgaccatttgatacgtggataataagtatgttaccacatcatgtactgtctatactataataagagagaaaataagtattggtattacatgatagtatattattatactagctaccattatcataagataatttttttttatcatttgttgtgttatatatgtgacctaacgagttattgctacaaatgttaatacaagcaaaagaacctgtaattaattattatgaaaaggattcttttattgtttattacaattgttttgtaagtatacaagtcaattgcatataattcatgaatcttacgtattatttatcttaataaaactaataagtttagttaaacgcgtaaaacaagcctttggtttttacatcctaatatcgaactttggattggactacagaacacttagaccaaaacatttgtgtatattccctaattataaggattcaacgagcaaatatgaatataatatatagataaaagatttgccttttgttgttagaatttgtgagagtgtggttgaaatgagatttagaaagttgtatgaaggtgagtgtatagtaagatgtatgtgattttatcttaaaattaaaatctgtcacaaatttcgctagattaggagtagagggttgcaaaaatacaagccacaattcaaagaaagggtgaggagatttagagactcaggcagtagggtcctcctattgtacttcctcctcaggtacctattgccccagttccagtgttgtcagctgggtagcctgctgctggtaaccgaatggaatcgttgtataaaaggttttggaagcagggacctccagtctttttggaaggcctatatgtgatgaaagttgagcagtggctgactgttacgaacagaatcttgaattttatgggagtcactggtaatgaccgagtgacttgtgctacatagtcatacttgggggatctctgaattgttgttggccttatgttttgggtttcgatctttcattgtgatcatcctttacatagttggtcatgttattttttttattcttatttgaataatagggttattattgcctaatttttttgggagatttttgggtgatagctattaataggaatgatttgttattggttcatcaagttggaaacttagtattctattttaatgctttatagctggcggtttagtagtaccttcattaaagatgttattaaagttttcattcttattattgtaaataaattggttagcctattatttttgagtttgttctttgagtgatgtctttatgtattagactttgtctgatttacttattaacagatatttttatttttctttcaaaatattataataaattaattattcaggtgaaaatataattgaaaacttgtaaattatattttagttgtgtataaaaatatttaggtagattcatgctaattaaaattacattataacatgaatttgatatatattttttttaaaaaaaattaatgtattatttaatgtattatgattgatgataatattgaatttaaaatccatctttagaaaggatttaagattattctaatctcaattattatttctcaatttaatatttattgatggttattaacaaaattaaatataaatatcaattttagaattactaaactattagattttgatcaaatgattaataatataaggaaaatttaagtttatatacttaatttagctattcaataaaatttacaacccgtctaactcgaataaaccgcccaaaccaaatcgaataaatcgatcaaaaaataaaactcaaaataatataataaaaattcaaaccgcccaataaatatattaagtaatttgtaaattattctaaaccgctcaattaacccgaataaatcaaattaaattgatttatatatttcttaataaaagtgtatataatatattatataaattacatttattagttaaannnntttgtatttaaagtttagacattttagtgtttaacttaaaacttaga

SEQ ID NO: 111070 - DNA, 4431 bp, Cannabis sativa
  modified_base (2724)..(2740): a, c, t, g, unknown or other
ttttagttacaagtaaatttttgttgtgaccacaagtcacatttagtcacaaaaagattatgtacgttgtgactaaaaaattatcactaaagatgacattttttttttgtactgcaagatatgttgttatgaagatcattacttttaggcaccatgatgtggtgccctttaaatggctaatgattttctttaaagatatgacatcttataagggtgctacacactatggtgcgcccttatgaataacattaatattaggtatcatggtgggccttaagagcattgctattaggcaccagtagtgcttagcactttcttgatatgtcacgttacgattgaactttagcatttttcgagtcttaacaccactataaggtgactccctataaattgctaatggttttttatattaaaataaaatagatgagattcaatattaaattatattagtagtaatataataatttataaaagtactagacttttacttttagcattaatttctctaaaaaaaattgagattccaagtactaaaactaaaaacgttcctaccaagaaattttccaatatatgtatagggaattcaagactttggtaggtaagtgtgtaatgtatattgagtttggccataaatcactaatataatcaacctaagctgaaagatccatactcatctcattctttggtttaatttgttaataataattataattatgatattaattattaatacaacttttattattacatatatcatggtatatattggtataattgttgtatattatgaagattattaatttattgttatgtatgcatgtgaatttcatcacgtactataattattagttatttaataataatagttaaatactatgttcattaattattaataaaagaagatcattataacaattttttactgaataataattaattaattacattgttataatcatttaacttaatttaattttggcttattttttttccttaagtaaatataaattccattactcataatctacattattaaattaatggtcttatttagggtgcatatataaataaatatattcataatgttattataactaattaatgaaagttgatatatatagacttaattatatatcaatattagttccgatcacacttattaattttaataattataacaactagactttgatcagtaccagctcacccatgactgttgactaattactcatattataataattatatatattaattcataattttattttaattataatttttatggttaaaaatgtgtttattgaaaaagtgtgtatttgcgtggaagaaggaaaagggaaatacttacctaattttagattcacggcttttctatatatattaattcaacacttatatgtattaattaattaattaacacaattaatctcatcatcatatcatattatattattaattaattaatatgtacaccaaaatattttggtgtaagaaagaaaattagtcacccatatattataggataatgttttatttgacgtattaaaaaggattttatgtagagttattttttttaatattttaggttaataattaatgttattttttaatttatatattttatttataattatttattaaaaatactattatatccaaaaaaaaaaaaaaagaagaaaaaaattggtggatatatatatgaatatgatataagaggagagagatgtacaatttttttttttttttaaattgttctttgatttagatcaaatttttgagtcttaacctctatttttctttttaaaaaaatatcaaagcccattgtttttgttacaattttggactttttgaggagagacttttaaaaacttttagagagagaaagaagaaaaaaaaagagaaatgacaaaaaaaatgataatatttttaataaataattatataaaaaataaataaaaaaaataataataaatatcgacataaaataaaataataacacattattaaaaaataactacataaaattatttttaatatctctattgaaatattattatctaatattatataatgtgaatattaatttttttaaaccatatgaatctcaatctaattaataattaaaaaatattgtttagtagtactttatcattaattactcaaacttaaattatacacttaatttgattaaattattttgtttaattgtacacgtatatatatcgattcaataacaaatttaatttgagcattaagttgagattctataagatatcgatcttcatcccttgatttgcatatcaaaataaacaaatgagaatatcattaattcattaataataatcttattatttcatatatttacaaatatatataattaatttatatatgtgtggcatgtgggaaaagaaaatatatagggtaggctaatatgcaatatatattactgttcctcttaccaacttaattgactattaatatatatatatatatatatatatatatatataattggctggccaaataatcatgaatagctacaaattaaaacaagtcaatataattaatatacatttatatatatatggaattgagatgatgagcttcctaaagttgacttatatgtatggatgtttagcttgcttatttttcttttgcctataaatataaccttgttcacaatttaactacaaatcatctcatatctctctctctctctcnnnnnnnnnnnnnnnnnctctctatatatatatatatataagaactataataagaaagagtatattgagagagaaagtgaagtattaactaaacaaagttttttaattatggagcacttgtttctctccctattactaggctttatgacattggtatctcttggcttttttgttttgttttacaagcacaaatctctctttgttggtaccaacttacctccggggaaagttggttacccgatactgggagaaactatagagtttctctccacaggatggaaaggtcatccggagaaattcatttttgaccggatgaccagattctcatctgatatcttcaagacctctttattgggcgagccggctgcagttttctgcggttcgacttgtaacaagtttcttttctcaaatgagaataagctcgtcactgcatggtggccgagctcagtcaacaaagtcttccctacctcagaacagacttcctctcaggaggaagccaagaaaatgcgaaagctcctccctcaattcatgaaacccgaggctcttcgtggctacattgggctaatggacaacatagcccaacgccatttcgcaacagattgggataacaacaaggagattcttacattcccgctagccaaaagatacaccttctggctagcagctagggtcttcgtcagtctcgacgaccctaatgagattaagaagttcgaggagccattccagctcctcgcttctggaatcatctcgatgccaatcgacctcccgggaaccccgttccaccgagctatcaaagcctctaaatacataagaaaagagcttgttaagatcataaaacaaaggaaagttgacttggttgaagggaaagcaagtcgttcacaagacatattgtctcacatgcttcacacgtgcacagatgacggcgtttacatgacggagttagacattgctgataagattcttggcttactcatcggtggtcatgacacagccagtgctgcctgtacttttatcgttaagtatttggctgagcttcctcatgtgtatgatgccgtctatgaaggtaatcaatacataaaactctcacacgtttttatttatttattatttcattatatattctctctcttgtagtgaatcaatcaatatcataatcataaaacgagcattgttataaggtaccagtggtgtctagcaccttctcgacatgtcgcgttgcgattggctagcgatatttcttaaaaactattatattaaattatatgggacccgatacttaattgaattaatagcgatattaacacataggagggtgctaagcactattggtaccctttagcatttctcttataaaaccacgtaaagtgtttttttattaaaagagaaatttgtgtaatggttccaactcttattgatgcattttaatattaagcttgtcattttgatttaataaataatttgaaaattttatttgtatgtgacttagcatcataattttaataattaaggaaatattatatttagtgtgatttaatttattaggaaaaaaataaaaaaattatgtgtgccttatgccggccagaaaactttttttcaggaaaaagtaaaagaaagatacctttatcagaaaaaaaaaaaagacaaaaaataaaaaaaaaagagcaatttgcggcgaaacccccttatgttttgatttttatacacttaa

SEQ ID NO: 111071 - DNA, 7798 bp, Cannabis sativa
agtgatttttttttgtttttaaaattttaatttctaattataaaattgaaaagtaaaaacaacaaaaaattaattaaaaaagtgttaccaaatgccacctaagttaattaataattttgtataatgatagttaaagtaaaataaataaataaataaagatagaagacgtcattaaaagaaaagggtgggcagtaggcaccatggtgccgtttgtgtattgtaatttgtaattgtacttacactcttctttcttgatgtactctaaagaaaatgtgtataagtgaaatacgtcacaagccaaccaaatcctttgtaatataatttgtgaataattctgatcatatcaagcaaaggtttggtgtttggtgacagaaactggaagtggaagaacatcagagtaggagagcatatgaatctagccttacaattataatacatatgtacattgattgattgattgaagggttgagcaaaacccaaaagggtgatatggcctcggacgtgccttgttgtgggtcgctattctccttgtatgtattggtgattataggtttagtatgctttgcgggactcatggccggtctcactcttggtctcatgtctcttggccttgtcgaccttgaggtcctcatgaagtccggccgtccccaggatcgaaaacacgccggttagtaatcttcctttcccccttacctacctactactactactactaccactccttccataacttttgtttttaggggttctggtcttcttgaatttggaaatttagaatttcaatcgtcttgtatgatcctgatggttattcttgttagcgtactactttcgattgtggcaagtaagcaatatcagctgaaaatatggtttgagattaatcgttaactccgactattctgattttttggcagctaaaatttatcctgtagtgaagaaccagcatcttctgctttgcacgcttttaatgggcaacgccttagcaatggaggtataattacggtaccctcttcttgtggatataatctggcgattgttactgtttgatttcaattttgtgggttatttttttatggtttgtcgaattgtattcggataggctcttccaatatttttggacaaattagtacctccttgggcagcagttttgctatctgtcactcttattctcatgtttggggaggtacgttttgcttttcctttccctgagccagaaggtttataaaattaataatgacacgcatgttctgttctcttctgttccagatattgcctcaagcagtctgcactcgctatggcttgactattggagcaaaattggcaccatttgttcgagttctactcatgttatttttcccaatctcttatccaatcagtaaggtgatcttctcatctaaatctatagatgataactgattgtaggtaaaaatccaagcaacctgtgtttttcccaagttgacttgattgtttggttcactaaacagtttaaatgcttgcattcatgtttctgtgttcattggtgtagtgttatttttgttctattgatctaatccatttgacatgtaggtgcttgattggatgttgggcaagggccacgctgtccttttaaggagagcagagctcaagacctttgtgaatttccatgggaatgaggtattaagagttccattggaatgatgtgtttccctgattcactcttttttgttcaaaaacttacatgcttggagtttgtttacatccgtggggacatttacctctggccaccttattcattttcatcgatgaaatattaatgtatatatgacgctgttatttaggctgggaaaggtggagatttaacgcatgacgagactacaattatcactggggcacttgaattgactgaaaagaccgcaaaagatgccatgactccaatatcaaatgctttttcccttgatttggatgcaaatcttaatttgtaagtaaccgatatatatatatattatcttggttgtttaagtagactagtgattcagcaaagagaagaagaagaagaaaaaaaaaaaaagtagactaaggggcatgtctatatacatttcattccttctgacttatctctctcatggtgcattacagggagacattgaattcaataatgaccatgggtcacagtagagttccggtttatgctggcaatcccaaaaatataattggacttattttggtaatttcatttcttttgtattgaaagaccattttttctagaacttgatttttaaggtcaccagatttttatgtttccttctactttgattatgtctgtctactttatttatctttacttttagatgtattcctcttgccttgggaaatagtattaattgattgtttgaaaacaaagacctgatattgttttgtaagttaaactaatctattacttctgttacttgtgtaggttaaaaatttattggcagttgatccagacgatgcagttccattgagaaagatgatcctgagaaaaattcctaggtataataatcatgaggcacgatgtcgttcgcatgattggctttttaatgatagatatgatatagtagtaagatgctgattgattgattgagcttttttgtttaaattatgtttgagcttattgattgcttggacaatctttttgctggtgtggtttgttattcttgattttatcattcattttacagggtttcagaaaacatgcctttgtatgatattctaaatgaatttcagaagggtcacagtcacattgctgttgtctataaggatctaaatgagaaaaaagaaacaattgaccaggctgggccattgtctaagaaaggtaatactttttaaagcatcaatgagaaatctaatgccaaattttatcatgtgttaatggtagacaccgttctttttttttcctgattgtgaaggtgtttgtattcactttgtgaaggaatttcgagttccttggaaaatactaacttctaatccactaataatattctatgtgattcatccaattgtggctacttccacatgatgttgtaaaactttcgcttaatgataaatattgttagtgttgacattgttttttgtcaatgatattagaaagcttaaaactgttcgaggcaatgatttttttgcgtgattcattaatgacttagtccactagacaatatattgagtaagaacttgcaaatcccatgttaccttttaatttggcagcatttttgcttgctcaaattgtgttgttccttcaagtctctcccacaaccctatttatagacgtttgggcgattagtactcttaatgagggtaagttacattacttatcctaaatatttgccaagaacatgtttacccaaggaagagtaggaaaaatatattaagtgcaagaaatttgttgcatttcctttgttcaataaggaatatggtctactcgcatcctgtagccataacttttggaagaggaactggatgagtgtacgatcgtgtcttgggaaatggcaggagatgtcaggccgtgcacctaacctccatttccccaatttgattttatttcttacctttcaagtttttggatgtacaaagctagcgtccactcctcttacaatcgcaaagttgtcggtggtagttggacatgcttgctttttggttgtccatggtctccgcgtccattttgcctctgctcttctggtagttagttgttacttttcagcgtgtctcatcaaatccgagtagctagtgccttcaaggaactttggacaagaccacatactaatatcgctggtgcaaaggggtcattgctcgaggagctagtcggccttgaccctcaatgggccatgagtagcattagttatctagttgagaagtgacagcttgttccaagcgtgacatatgtctcgtgacgaccacgaacaccccacatgtgaggttttgacaaaacacgagtaacagttcgtgtttcacacgacactcaaaaaaaaaaaacctcacatacttctaattccaaaggctatttttttattctttctatttttctctggccgtcaacccatcctccattttttgtacttcaaacctatctaacaatctctcatatataggctgattttaattacgtcttcacaccctgatctatgtgccaaatcttcttgatcgtgtcatgcttgcatgccaactgaagtggaacacaacttcaatttgttggtgatccatagtcttcatcaacatggatgctgatttttgctagctaggatcttttatgtccttacaatatatcctctaacaaagacttgatgaagtgacaacgaaatctaatattctttggcgtcacattcttctcaggtttgaatcttaacttagttaacaattgtgaaaccatatcttgtctaatgactggtcaatactcttatgatttcaaacaatgcaaatgcccactatgtcaataggtaataaagtgaaagtgaagtactgtcccacagggaattattactaaaagttgttgagtactttaaacagattcaaataaacaaatatttctggggagcctaggactacaattttccctcaatatttcattgaacataattacgcttacttaattctacccctcaatgcgaaatgtcaaccaagaaaccatattgatttgcaggactttcccgatggtcatgccaatatgttttacttaatcaactatctatattcctatgatgtcaaattagtataaaactccttaagcatttactttaaaccagttataatagtcaaagttactagacaggttgttgctttgtttggatgctccaacatggcttcaaccaatgtatacaagagaaatttcaattcactctctaaaaatgtcctgtccatcaattttatagccaaggtcaaaactagtaactttcctgtacaaaaccagttacccttttttgtattcggttcagcattgcgttgccaggcattaggtaccgcgacactaaagtccttgtacacacaatgataagctttttatcctcttggcatcatgaaacttaatgctgtctgtctcgatgcttaaagccttgacatgcacaacaatctgctttttattccctcaacattgcaatgcacaacatggctgagttctaagacaccttaaccatgaagtttttctcttactttgtctgcgggaactgatctttagatagatgaaggtgactgacgtgaggtgtactaactgtcttgacacaattcatattgaatctctgcaagatgcttttgatataccctgctttagataactacaaagtcttttgggatcagaaaatgagatttatttgagtggtgtgtgactcttgtaatatgttttctttatagttaaagatctgatgcaacatttcttagaaatagcataaattgagtgcatgccgtaaaatagtgcacaaatttgtctattttctttctacatctttgttaatccaattggtcgagaaatcaccatgataaggtggtgggccattgtggaattttattaatactttagcattgtcattttgatgctccttaatctgtgtgaattggtttgcttgctggattaacagatgataaggtggtgggccattctggtgcaaaagaaaactttggttttcatgattctcaaacaaataaaagcagtggaggacagatgaagaaaagtccaccatctacaccagcctttaagaaacgacaccgaggttgttcctattgcattctagacattgagaatactccaattccagatttttcacttgatgaagaagttgttggagtaattagcatggaggatgttatcgaagaacttcttcaggtaaatgttatttttcgaaacaaatgcaaatcatggccatgcccgatcagtgtgttatttgtggagcctgtcattctatgtggtttcattaataagctagaatcctactgactagactggctggagcagatcagaattctacttctgcagattgttataattgtcctacttgtatttcatcctgaaagatcggagctaattttcagtttgtttctttcaggaggagatattggatgaaacagacgagtatgtgaacatccataataggtaaagtaaaagtttaaccatttttcttccataacatgtcgttcacacgtgtttccttaagcttgatccgtcgtcgcctattgcatttgcattccattttattaatctacatcaaggaagagcctcttcttttggtttaatttattaggcatttatggcaattctaaaaaatatttcttggacaaacaggattaaggtcaacatgcacgcgtctcaagaaaatgcttataaattgacttcaccacagccttctcagaacggtttatccattgctactgcacattctccggactctattagagtaggtggtccagatcaaacatcatctttatcagtctccaatattgcctctgcaaaagggtcaagctgaaggtggcatattaataaatcggtgagattcacttgttctattttccatttgttgtttttaatgaaagattaaaacgagaatccagataatagtcaatcagaacttaattacttttattggttgaaattaaccaaaaatgcactgttaccatatggagagaatgctgtttttttcctcaaagaaaaactttcattatgtatgatatgaatgctcgtgagctgaaaacctttccatctcaattcacttatattagatttgtatttggatagttagtggtcattttcagttctaagcaggtaatgttttgattcagcttttatatattgtgtagtgctctgctctgctttgatggaatacgactagttcatttcatattcggcagttttttactcatggccattagcgtttgaccattttatttagcaggtctttcgtttcaagtcttatataagatctaaatacgacaacaaaatctttttttttattattattattaattagatgtataattttttgtaattaattaatttgaagaacttagtatatcatctgttacataagtttgatgatgttgatatatatatatatatatattttgtatatttgtgtttcaaagttgtaaacaaggcatacattatgttgaatatattggagtaagtttatttaagttgctttgtattaaacagatttgtgagttgactcagtgttaatttgcttaaaagtaggcacgggatgggagtttgtatttcaatcacgattatgaaattgttggttttgagttgagagatagattgttatacatggatttttgttttcttttttaaagaaatttatacatggagatcaactttatattaatttaattcttttttctacttatatgtatgtggactcttattgtagtgatattttttttcgtttctttttatcactactataccccataggctgaatgtttatgataaatgatttttcttttaatggaaagaatataaggttttaaatatagtccctgttgttttatctcaaacaaaaaaaaaagtccctgttgtataaaatgtattttttaaaagaaaataaaaaaaataaaggagaatataaaaaacaaagtgataaaactaaataaagtaatgttttttctcatttattttatttgttaaataattaaagggtgacttttttaaaagagagacttcttcaattagagaaaaaaaggaaaagagaaatatataattgaggggaagtgaataaatatagggtaaataccattttggatcctgtgttttgtaaaagttacagattggcccctgtgttttgttaaataacaaaatggaccctgtatt

SEQ ID NO: 111072 - DNA, 12673 bp, Cannabis sativa
tgctcctcggagcttgtccaacagtgaggggtagacagattttccccaaaggtgcaacactctggctggagaaaccatacaccagttgggtataggggagtaaatctttaagctggagccccatcttctcatatgttatcttaaattgaggaggctccattgtctatcatggtcaggcccactgtcttgtttgctatctatacttccacgaccaagggatcatttcgtgggaggtgaacgtggataacatcttcttatgtgaatgttatagtggtttcccctacccatggtattcttagctttctctcctctacaactaaaactctttccttttatttatgctgtaaggctcgggcatactttttctgagctttgcccgagtccccaactggatgtgggcccccaataatgacatgtaaatgcacgtccaccagcgggggcattagtagatcctggttattgtctgtttgggtggccctttgattctggtcggccttgacgtatttttgcaagtgcgggttattctttctgatcaagaattcaatttcccgcttcaagttattggactcatttgtgtcatggccataatctgcatgaaagtggcagaacttaaacgtgtctcttttacttacgtccttcttcatgggagcagggtttttgtacgggaccatagactgagttgttgcgtagatcgtctctaggtcgtctgttaggacagagaaggcaataaacttggaggaattttctctagggttgtgttcggtaatggctatgaactttcttttttttcccattgccttgcctaccaccgttgttagaccttttcccgctcggagttgaggtgctaatatattatggattttaggcaggtgcccctgccgaggagatatgttgctggcctttcttatgcccgacggtgtccactcgccgaatagcctcctcaagcttaataaatccatttgctcgatctagaaattctaccatcgaccccacggggccacacctttcgatgtgtttccacagttctccgagtggctcaatgccccccagtatggcagccaaccttccctcctcggttaaccctgtaacctttgtagcctctgtcgtgaatctacttatgtaggctgaatgggttcacctagtacttgttttacttcgaccaggtcctctacgtgcgaggggagttgacgagaggaagagaactgtgcgtggaactctgaggagaaggctttccatgaattaaaccttcccgaggatagcttaaagtaccattgttgggcggcctctacaagtgtagcagggaatattctacaccgcacatcaccccgtaccccctgcagatccatctacatctccaaatatttaagatgtgataagggatcttctttccctgtatacatcttacaggtcaacatcttgaatttaaggggtaattcaaggacttcaatctctagggagaagggtgatccatgtgcttggtccagctggtgatcggtgagttttggaccggttaggtcttgtaccatatttttcagttgatccaattgtgcttgcacagatggatgaactggttcagcctcttgaccaacctttgtcacatcaggatctcttagagttgggtcctggatgcagatgcctagttggacagctggttggacgtattgttcgtctaaacctcttcttttgtttaggtcagccctgaggtcatgggttgcacctaatttattaaatactgaggtactaggtggtctcggtgtctgactagttcggctggtgggttggcaaaaactttcaatttagatgaagttattaggtataactccacctgaagagtggccaggtaagatctagctgtctaccgcttggtacacaagttggacctgtggccggggattggatggctgaccattatgaacttgggtggtatgcccaataacatactcttctgtaccgctcagtgggatactagatgcggtaactggttcctgattagcaacttggtaggccctccgtatcagtgcggtggcttgccttgtgcgatcattgatgtctgcttgctgagctttcaatgtctccatctccttgtccctccactctatgaattggcattgttgctcatcaaaagagaggtttatagcagcacggagatccttttgatcatgatgtaaggcgttattatggccttgcatgagtccaagggctatacggaggttttgaatctcaaagtcatcccccaccgtcctctgagcattggtggtggatgggattccagtgttgggagtggtttggtcagcagcagaactcgtattcctagtctcttgcacacttgatgtgtacctaatcagaggggaagtcaaaccatggcctacagtaggtggctgtgtattggcctgttcaagattggtccttggtggtactctcgtattcccagtgatttctacggtaggatccatcaccattgggtggctctgatcgaccaggcctctgcgagtttgcaccaccattttgtatgcaacaaagaacaaacttgggtttttgctctcaatgaaagcaccaaaatgttgacatcgcttttagtcaacaataatgagtcaattattaagcgattagatatataatagaaacagagcaaaaaccaataaataataaagaacaccagattttaaagaggttcaaccccgttagtatggtaatagcctactccccttagattgtattaactcgagaacaaagaacacaatattttctctctcaaagctcttacaatgaaatctctgagtagttctcttagatctttctatgaagcaattctttcgatccctttcatagtgaagctagatccctatttatagggccttaatgtgtgaggaaaggtttcccttttgcttacaatatataaaataggaaagaatcataattacataattacaatgtacaaaataggaaaatagaataggtttccatattcctctgactcaatcccacgaatgtagggattgtctttgtgcttggacttcacaatatcattctgaagtagtcaagtcctgataagttgttcggaaagccaaacccattcctactcaaatagtctgccttttaccctgctcaggtaattagagattatacatgaagatgtgctactcgaagtctatttgggatatttatcttttcccagatgcaagaaatgtaggacacgcgtcacttatgtattctgccatgccatagtgcgaaaaatgggataatacatggtttgagaaagaaataaccatgaagttggaacatcttctcagtcagcactaagggtggtccaggaagatgaacttgatccacaaattggtgtggaatgtgtcatacaaccaatggaggaagtggaagaattattcatagatgatggagatcccaccaaggttatcttagttgggaaggacctgcctccgacaatgaaggaaaagattatttccatggtaaaggcaagaagtgacgtgttagcctggattcattctcatatgattggtattagtccccatgttattttccataataccgatcccaatgcagaaccagtccgataaaagcagagacctttagatctagtgacatcagaagtagacaagttgacaaacattgacttccttagggaagctttgtatcccatatggcttgtcaatctggttttggtaccaaagcctaatgggacatggagaatgtgtatagatttcacggatctaaacaaagcttgtcctaaagactattttccacttccgtgtaatgatcagatggttgatgctacctcagaatatcaactcttaaccttcatgaatgcgtactccgactacaacaaaataaaaagcatgtggctgatcaggagcgcaccattttccaaacggacaaaggaatctagttctacaagatcatgccactcaaattgaaaaatgatggagccacttaccagcgaatggtgaataaaatgtccaagaatgttctggggaagaatatggaggtttacgtcgatgacatgctggtaaaatcaaaaaccttcgaaagccaccacaaagatctagaagaggcctttgccataatctgggagtacgaaatgaagctgaacccaaagaaaattaaatctcttctaaacatgccttcacccaaaaaacacaaagatgttcagaagttgataggaagaatagcagcagttactagattcgtctccaaatccagagataagtgcataaaggaaataacaaatttgaatggacagcagaatgtgaagcagcatttcagcaactaaaagaacatctagtgaaggctctaattctgtcaaaactagttgatggagaactgttgtctttgtacttagtgcaatgagaaggaatagtacaatttccagtatattatgtaagcaagagactactaggcacaaagtccatatatcctatgattgagaagctttccttttgcttactaattgcttcacggaagttaagaccatactttcaagctcacgccataagggtactaaccaaccaccctcttcgttaagtgttatagaagccagagtcgtcaggaagactcctgaagtgggcaatggaattgagtcaattcgatatacaataccagcccaaaatttcaattaaaggtcaagccttagcttactttaatatggagtgcccaaggataaatgatgatcctgaaacgtcggtcccagagagagaagtgtggaagatctacgagacagagcatcaaatgaaaaaggttctagagccagaatcatcttaatatctccacagaacctccaactccaaagtgcacttcgtttcaagttcaaagcttccaataatgaagctgaacacgggctatgatttctgatttacaactagcaaaagaagttggtgctaaaaacattgaactctacagtgattcacaacttgtagtcaaccaattgtttgaggggtaccagacaaaaggagaaaaaatagctagttatgtagcaaaaaattaagagctattccaacattttaagcactattctgtgaagcgaatctcgagagataagaatacttttgtagatatgttggcaaaactagaaatagatccagaaatagaaaaatacaaactagtccccatcgcacatctgatcactctaagcacaaaacattgggggtattcgccattgacctctcaaattcttagatggctccaatacttagatacttggagataggtacacttccagaggaaagagctacgtcacggaagatccagaattaggcccttagatacatgatcatggatgggaaactctacagaagaggattgtagattttgtatctaatgtgcatagccaaaatagagataagcactatcatgcatgaaatacatgaaggattttgtggatatcacacatccggacccaacttttccaagaaaatcattcttcatggctatttttggcctactatgaagaaggattgcactgaatatgtccgtaaatgtgagcaatgctagtgttactcgaaagttccaagggccccaccaacagagataaccctcatgaacagtccttggcccttcactgtttgtggaatagactaagtgggatcacttctaactggaaagggaggagtcaaattcgccattgccactgttgactaattcattaaatgggtggaagttaaacccatgagtatagtaacttctaagaaggctctgacttgatatttaaaaacatagtatccagatatagacttccacacaagatagtgtctaataatggaaagaagttcgatagtgatcagttcactgacctttgtgccaaacatgaaataatcaaaagcttttctactatggccataccccaagcaaacggacaagtgaaagtcattaataaaattctaaagaccactttgaaaaagaacctttaggcttgcaaagcataatggccggaagaacttccaagagttctttgggcctacataaccactgaaagaacttctacatgccacactctatactccatgacttatggatgcgaggctgtaatcccagttgaatccatagtgcctacacacaggagggacacctacgacccaacttaaaaccatgctctacttcaagaatccttggatttaattgaagagcttcgagagcagtcacaattacaattctaaatgtatcaaaacaaaatctccaagaatttcaactataaagtcaagagcagaaggttcaaaatcaaagaccttgttttgagaagggtatttccatcctctaaagagctcagagtggggtcttaggaccaaactaagaaggtccataggacattatagataaaattggtgatttagcattttaagagactagatggaacaagaatcccaagagcatggaacgctgaccacctacgctgatactatcaaaaaactgggggtcattaggttcctttttatttctctttactttttattttagtattaattttcatgtacaccccaaagcaggaagtatttgaataaaagaaaaagttttcatttcacatttggtctttgaaagttctgtcatgtaacaagtgattaaaagtctcaactattaatcacttggggtagcatatattatattgttataaataatattacctcttttgcaagaaacatctaaattaaattctcaagtataagagtagggagtatcgcctgaaactagaacctcaggaaactggaagtaagccactaccttattatatttgaagttaatctagcatttaaccaagtataagagtagggagtattgtccaaaaccagaacctaaaggaaccgaaagtaagacactaccttattatacttggaatcagttctaacatattaacagtttatccaggttaacttggaatagaagtttaggcttcatgattacctcaagttaacacagatagaagttcaggcttcatggttaactcaggttaacacaactaaagcgattgggctactttaataaattaattaatttagattaattaaatagttaagttttaaagccttgattataagttgtatttaccaagaaaggtccaattttaaagtaattaattagctcacattaattggttatttaagttttagagaaaccttccagtaaaaccactttcaaatatgtaagtctaaacatttaattaaaattctaaaggttcagaccttttgaaccataatctcacgaggctagaagcattcaaactagcaaatttgataaattaaagggtaaatatctagagagttaattaaacagtactacgtacttgaaaaccctgtggtaagggtataaaaatattttctacgcacacacaaaaagggggacccttgtcccccaaaataaaaatatatagtaaatataaagttgttgaaaaaaagaaaaggatggtctaggctgggatggatcctttggaaattgtgtatctttagttggaatgctagataagacctctgggatcgtagaggttgtcgaaataggaacattagaggccaaaagagctgagtcatccacgttatcacctacaggaatggtagttcccagatcgaccacttttgtcttctgagctacttccttagatttgtttgcctcctcaagggcacgaatcttaggcatcagatcttccttttcttcagcatcaaagaggtctaatacaaatttatcatgttgccatatggtatacaccgagtagacaaaggcatgttccaaagctttagtgtgctgggcttcttgctcttgcttctccaagatttcctgctgaagttgtccctttaaacttgagttttcaccctctattttggtgatcatttttagggattctttataggctttcctggatgactcctgtttagttttagcctcttcagccctctagataggctttgtctcagcttcctccgccttctgttgcaactcctaatgatgtttcacctttctctctagagtggtttcattaatgaacttctactatatgattttagcttgtttgtcatactcttgagatagggtggtaagcttatggtctttctcttggacatccatctttgcctactttaggtaggcctttaagtctttgattttggtaagagtggtggaatgaaagtccttatacttttctccacgcctctccatcttggttgccctctttttgcaagataaggccttgtccaaagattcagtcaccttctgctttacgatggcttccatactggcattggctttaaatagagcattggcagcttcatctctcctctgtttagcattggcatgctctgccctcagcacctcaagctcgtaggcctactgactgaccatggaactattcctctccaccattaagctcacctgtgaaaaaggaagtacacatgaattaaataatcgagagatatgaaatgttgattgatatcaaaggaaagtcaaacttacaacgttggcctgggtcctcatagcatctgccacatagattagatacctgtttgccatcatggcaatcctgtcagcttcgagtctacaacttgtagtagtactctgatccaatagatcaggcaaaaatagtaacatattagttccaacctgaggataaagcttctccgtcatctcaactctattcatgaggggaggacagggcttatcccatttgtcatagtcaacaaactcagcattacgtttggtggagatactcctggtcagtttcttcatttctttgtatttgctactacgcctcttttaataaaactgctcaatggcctccaggcgtgtgttgtctccttttgtcatcgacaaaggcctgataagaagggtgaaaggtgttggaggcaacgacagtaattcggttctctccctagacaactaagtagaggtggttggaataatcttagatgttaggggtggtggaaaggatcttgattgacccttgaagttttactgcttcgccttggtggccttccaccatcagatacatcagaccccttctaggactgagtttccatagcctaccttcttgaggctgccagttgtaagaccttctccttgatctccacccttgcctttatgctggcaccaccttcaaaagagctcaatcgtttcttattgatcacgattggtccatcgtaatcaaagatgtctctgccagagttctcgaaagggacttgcctcataggttccacatccagaacgagttcggttagattgatgatggaagtagacaagtcttttgtgcttagagccttagaggcaacctctggatttaaagctggaggtgctggctattgagatcctctcctagaagctttcccttctggcccttgtctctggcttccctagtaacttcccgaacctcgtcagacttggattgaatgttgccgagaaacctgtttagcagccccatttgtaaggtggctggttgatcttcataaaacaaacaaaatatccataaaaaaaggccatagtaaagaatacaattttcacaacaaattatcatggaagacatcaagaagatccaaaccattaattctagaataactgactttccccctagaaaaaagagcaatgtcttatcgacctaagttagtctcgtgttggaagaagcctgggaagaaaattttactaaaagcatccactctaaaatgatagtgtacaggtggaatgaagtggtcgggactccttacgatgtaatctactttatctatgtatttactgcaagggtatttacgatgatccaaattcaagaagtatggatcaaatccacactgatcaacaacatctaagtcagttagagtgggagccttacttatctgaaagggtgtctcaccactaccggaggtgcttgctcctggagcaccctcgttctgcactacctccttaaatatgatagtgagttcttcagcctcgcttaggctttttaggaattttctcctccaattcgccagccatttctcatcgacctttactgcctttaaggcctccttagcagtgatgactgggatagcctccttaaccttatctgaatcacctcagaaagcctcctaaacttggttcttcacaaaaagatggtcccatcatgatgtggagcgatgagacctacttcccataagttcttaatggtcacaatttaccttaactccttaggcaagaagggtttgtagaaggctatcctctcttacaactcaggggtcaagggccactgaggaaggcagtctaacagatgcgaaaaaatgtattagaatacatcaagcaagagaaaattcagaatcttaaagtccaagaaggaaccgatacttacttgcaatattgaaatcaaaactgatggtgggaaccctcttcagtgggaagccggaggtgtaaaagtaataatccttgtagtcgtgcgtgtacttcatggagctggtaggacaaggaatactcctagtgtatctttccagcctatagaagtcgacttaagacttgaacttatagaaatataagatctcctccaatgttgaacacagaaaacgtaccaccctgacaacaagcagtatgcctaaggaatgagttgaaaaggtgctactctagccacatcgcaaaagtttgcaaagtagcagctcaaaggcaagtgtgcacccatttcaatattggcccagctcaagacgccaaagccctcttccacacacttgttgggcctctccccatgaacaaaaagcctgttccagaacatccctagaacacttttgagccccctttgggtcttgtatttcctcaggttgttggagttcctaaacttgtttacatgtggtctatctcccatggacttttgttcaaaatcaattttggagtgttttctcgctccataatctcctcctccaagtcagcttcctctcagcgatttcatctacacataatttatgtacaaaagaagaaaacccaagtagtcaaccaccctaactacttaacatagaaagggagctgggagtcctcccccatgaactgcttagagaggtcccaactagactaactgcccagaaacaaagactcccaaaaataattcattctagacagagagttaggagcgacacgaagaaaaaccacgacagagattagtagagaatccaaaaccaaaagaatttttggtcaagggaaaattttttctagcataactacagcagaatgctcaattccaagaaaccctatattcaagaaatagcacaagttatggtgtctaaattttctagtgatagtagtcacataaattgaaaaccctaaattgtataccagaccgaacatgtagaataattcacaaacccagaaaaaatgatctagaggcgaaaagagtaacatacctgatgtcgaaagtggggatgtcaaactaatcactgctgggtttagccgagacattcaatcgaacctttcatggagacgggaggctacggtgatcaacacgtcaacttctacgtcaaaatctagattcacaccttcttcctctggcgcaaaactcacaattgctgggggttatcaatgtggaaattctcgtgctttaatccttagtagaagatgatgcagaaattgacgacgctttccaaattgctaaaaataatttaactctaaggttggttcttggtctcgaaggatgaggagaaaattttaagctctaaacaatttaaaatttgaaaaggtgaaaaattaggaaatgagtgaaaaatggtaactggtcttcgtcaagggtatttatacaaccgagaagtgatccacgtgtaagagaatggagggtctacgattgatcttccagaaacacaagatgcatccaatggccaggaggttccacaatccacgcgtatcctcgcaattaatcttccccataattgaggcgcaaataaatgatgaaaatgcccttttcaatttttgcgccaagtagtgaacaaccgtaaaaaatatagccatttctaaaaaatgactcctcaatgggcgcgcccttccatcctcatgcgattgacacgtggatgtattatcatcacagacggaagccaccttctacggtcgagtaacattaaaaatgtcatgatgttatttctcaacctccacatttccatattgaaagagtgattcaagctccaccatacactatattctgaaagctcggggggtaaattttatccgcatttttggtattggacacatagaatccatgtcagcatccaagacccatcagtggaccctcagcaaaggtaaactgggccaagcccacttagataagtccttccaggaacgtatcccaattctgcaatcgtaaagccttctgccttcggtgaaccgtactcggaagcatatccagtaccatgagaccaaaggtacaagatagcactttcccggaagacccttccagttttccttttttattcttgcgcacaaataaagaaattctagctgccaaatcacaatagagtatcgtatcaggattaatggggaaacttcttatagtgaatattacgcaattaatttacagattaattgcccataatgagtgcacacggtgttgaccaaatcaatccaaatccaattcgcttagtcaggagatcatcttcttcataggttggacttcatgagacaacctaagtgtattatttactgtaaactccctaatagagatgtaaagtccttttttggcaagttagataccaaaatatttttt

SEQ ID NO: 111073 - DNA, 1664 bp, Cannabis sativa
gccaactgcgccaccacccctttgtgttacattctctgtacatattatttaatactaatgtctttttaaattttttaattaaaattatttttaaaaatttattttttagttttaaatatttatttaggtggattaatattactgtgtatatgtgaatgatccagttaatacgtaaaaatggatagaaatggcaaattactaacatatcacagattttagaagttttaccactataaaaataaactttgagagttaattactagggttatatcacaatttactcatctatataaaaactactagaggatataatcgatcataataagtttgaagtctttatatgtttttggcatagtcattagtcaattttaagggaggaggtgtaaacttccatagccaatttgatttgaaattattatgtaaaaatgcaattatggatagggtaaagaactatattgcatctcttcttttatagatgtaagatcttgcaagatgcaagtaagcagcaaatccaaacgcactgagaatagagagcagccaataaaagtaatcgagatgagcgcggtttaggttattagaaaaccagctatctcggccatctccaccagttgaattctcaatgatagagacaagaaagctgcttaagaaactaccaacaccaactacactaaggtacagagcaagccctatgcttcttagctctgttgggacttgatcgtagaagaactcttgcataccgatcaaagcaaaacaatcggctattccagacaagaggtactgaggaaccaaccaccaaacactcattggaatcgtcacatttggcttgtcaagtagatcatatttgagagcaatgttgagtctttgaatctccacaagagctgcaactaccatggaggtagcagaaaagaaaattccagtgcctattctttgtaggactgtgatgcctgctggttttcttgtgaaagctcttgcaattggaacaaaagtggtatcgtaaatgggaatgatgattactgtggtaaggcttatcaagcattggagtgaagcagctggtatcttgaagcccgagacaactgttctatccatggtggccccttgtttggtaaagaaagttggagactgagcaagtacaataccatataccaagcatggcacccatattggaaagagagcaagtacggccttggcttcttcaacctcatttaagctacagacactatcattgttcttcaaatgttttggcgcaaacaaagctttgttgagaaatctgcaatattacaggttacaaaaaatagaaattagaagagaaaaggctcattggacatgcagtactcaaccataaataacaattaacaatgattttactaaatttcaggtaagagttactggtgcgagattctttagtaactagacattacaagatacaatagcatctactatagagttttattatacgtggaagtgaatataaacatggcgaccaacataacattctgccggcccagagatttttgagctttaggggaaaagttaatgtgaaaattatatgaaatatgacattttgtaaaaaagttacaaaaatatagcatttataggtttaccactattctatggcattttttcacatttaagactttttatggtatttgatatgtcatattttt

SEQ ID NO: 111074 - DNA, 4444 bp, Cannabis sativa
catgttagaatagtaacattactcatatatacatttataatttgtttcaaatgcatggcacaaacaaatcaacttatgtatgtatgaaaaacaaaatgtatgggttaaacttaaacatgaatgttttgattgaaaacatagaatttttagagaaaattagagagtagtgtacctgtgtttagcttagctatgagttggattggagacgctccaacaagtttgactcacccagcttgtaggtttcatacatctctcccatactattaacataccaaaaattgactgacggaatatgctgaattttccaataaccagcgccatttggttgtagatcgaccacaaactcccttgacatgtccatgatatcaagagatttgagtcctttcaagagttgaatatctgaaggcatctcactcattgatgggaaagatccaagccataacttctcaagctgaggcagtgcatctctctctattttcatctccttcatttctttaaaatgtattactctcagatgtttcagtcttttaaaaccaccttcctcaaaatgcaattcatctccaacatatgtctccaccatcctcaagtatgctaaatttggcaaccctttgaggtattttaatggctcttcggttaacctcgaaaaccaaagaactaaagcttgtaaattttgaagctttgaaatccattttggaagctgttgtagtcgacagaacaaagagagataacgtaagaaaggaggaggagatgaaagtgattttaaatctagaatttcttcttctgtcttggcatgtaagtgtaattcttctagttgactcattctctcaatggatgaacacagtgtttcagtactgattcctgatgtcaagtgttgaatccctaacttcttcaattttgtcaacttctctagttctttcactaactcaattgtgctaggagatattctcacagatgaaagtgtttgtaactcttctaaattcccaatccctttatgtattctcacaccaatatctgaatcaaatctgtaatctttctcataattaattaaaactccagctagaatgtgtcgcagacttcgaagcttataaatctcaattggtaagtcttgcgcatagaaggacttgttcagattcaacatctgtagattttgtaaattaccaatggattttggaataatcttcacatttgtcattcttaaattcaagtacttcagattgaacaaatttcctatctctttaggaagcttatgaagaggtgcattctcaaaatcaaacacctttaacaattgaaacttttgaaacaagctaattatgaaagattctgtcacttcatcaatgtcaaaaagaaaaatagatcgaatcttagaattgcttcctacaagatttagaacatcttttgttgtgttgtggattgcgaggcggcgacaatctcctttgaatcttaacttgctttgattgattatttggcagaaacacaattcttcacattttgttaaaataacatcatgaatcaaatcatgaactcgacactctttttcaattccatttactgtttcaaacgaaaccaagtttctatgaatgagctcattcaagtattcttcagcaacttcttcttctgtcttgcctttccttgatttgataaaattttcagcaatccaaagtgaatataacctcttgttataaattttactatcttctggaaaaataccaaaatataagaaacaagttttaagatagtagggtagatcatcatagctgaaagataaaatcttgaacacactagtaagttggggatttttttcaaactcgtaattgagattatcaaacactcttccccattccaatttggtcttttcttttttagagaataaaccagctacagcagaaatgacaagtggcaaaccgtgacatttgcttataatctgatgagacaattgctctaactcttttgggcaatgtccctcaaactcaaaacgaaatgcttttttgcaaaataactcccaagccaactccgaggaccatgttttgagctcttgaacatgatcaaagggggtatcttttgcatcataagcaattctagtattgcgagttgttacaatgatcctgtcacctttattattactactaggaagaacatgtttaatattcctccaaaagtctacctcccacacatcatcaaaaacaattacatacctctttgtctgcaaatgttgccgcaaaagctcaattagtccttcaatagtttccacatgctcttcttcgtttgttgggcatatctgacttttcatggtggttaagaccttctccaagttgtatgattgagacacagtgatccaagcaaagtattcaaagtgtgttctcacatttccagcagtgtaaacttttctagcaagagtagttttcccaattcctccttggcctacgagtgaaatcacagagcgggtggttggtccttcgagcaaactccttataagttcattggtggttgaatcaattctcacaaactcatcttcaccaataaacaacgaacccaatcgagggtcaatgacagatgcatccctatttgtgatcctactactacttgaaccttcctcaaaatgtctcaagccataacttatgcctctcttttgaacttttagcaaagactcgttaatgtctttaattttagaagctaagttacgacgtagtttgacggacccaatataaccagcagctcttcgaattgaaatgataagtccatggtgatggtgatggtgattatgagcaagatggtaaaggtactcgtcgataacatcttcaatgcgttcagccacttctctcatctgtttaagccattcttttgcagcatcactgagttcatctttggcaagtttcttttcggcatcaataagaaaaggctgaatgatcttcaactcatctttcaagctctctacttctttgtggactcctttcagcaaagttacttgctgattaagcagatcaagtaacttgtcaatcacagggctcaaaaacgtctctgccatttcatacaatctgagaaattgggtattcaaaacttcccatcataatttgtatggcattatataaatggagtagttcaaaagagacaagagttttcaaactccttttctccctaagtcataatatacggtctccccagctgttctgcaatgtatttataaaatataaaattttgtcgtttatagtggaagtagtgacctagtcttcaaagtagcattcaattatttaagggtatgtactaattaaatattgccttttctttttcgtggatacattctaggtgggtgatgtattattgtctgcatagttaaaatggaaaattttaaaaaaatactattttgttttatttataatattaccaattaaaattttcatttataagaatatacttttaaaattttaaaattactaagatatactttttccaagtaagaaaataatcataagaaaccaacaacaacaattataaataaattataaaacaactaaaaaattcaaaaataacttcattgcaattgtaatacaactatcatttctaatattgtgctgaatttattccagacaggtatgttccataatgcccttaatgaaactatcatttctttaatccctatgatagtccatcttttgcttgttgtaatgccctttacaagtgttctaaaaaatattatgcgtgaggctttcagaagtgctctcttacttaattcatcttaaccagggtgctttcattaaaaatagattaatgacacatactatccttatatttccagatcttcttaagagatacgctagaaaaatatttcagctagatgtttgatgaaaattgattttagcaaagcgtatgacatagtagattggaactttgttcatgaattacttaagggtttgtgtttcccctctcagtttatagattggataatagtttgcctaaaagggtactacttatttgcttatgatgaatgagagaattcaaagtgcttttaaaggagaaaagggtcttcgtcaaggagatcctatgtctccactcttgtttgttctcatcatgaattatttgacgaggttgctttaacaagtttcaagcactaatgcctttggatttcatccgctttgtacttccttaaaactaatcaatctttgttttgctgatgatttagttatcttttgcaaaggcaatgaaagatcactcaaccttgttcaaactgctttcaacaatttttgtgaggccacaggcctttcgaccaataaattctttgacttactttgggggagttattgataactgtaaaaggagcttgctgaatactttacagatggaagacggttcatttcctctcaaatatcttggggtccatcttcgcccaacaatatagagagcctgttaggttatttttagtattaattttagattaagtttagtatatttt

SEQ ID NO: 111075 - DNA, 1883 bp, Cannabis sativa
  modified_base (1847)..(1858): a, c, t, g, unknown or other
atagcccttagcattagggcgctacataatatttagtaaataaattatataatttattataaatcaaatattgtaatataaataagaatccaaaagagtaactgttttgattctccggatagtttttctatgttgaaattacttgggaagaaaaaatccttttataggaagggttgagttctttagtgcgatttttattttctttggtttgatcatagatcttaatcttgttaatcgtcttgctgaagtcttaattcttgatgagggtgatgggccggtactgtcactgaataaagatggtgtgaaagaaggtaagaaaaaattggacttatgccttattggcaaggtcatcggtgctagactggccaacaaggagggtatcgtgaaggctatgaacggtgtttggaaaatcaatcaccaatttcaggttgaggagttaaatttaaagaatatgttttggttcttctttgggtataaggaggacagactgaggagctataagggaggcccttggacaattgataagtaattaatttattttgttaagcctatggggttgggggagatctgtaagatgaatttcaattatttcttatttcggatttgtattaataatgttcctctagcgtgtatgaatgagttatttgcaagggagtggggagagagtattgaaaagttggaggacatcaagatttcaaatggggctatgaaagtgagggcttgatcaacataacaaagcctctcaagcggggacttagagttgcggtggacgatcaagggactaaagtctctcttatctttcaatatgatcacttgtcggatttctgctttgattgtgggattatcggtcataaggtgttggactgacccttgagggattttaatggtggtaatctagtcgttgagcgagatcattataatatatggatgtgtgccctaaactcacctccccgtgatcgattttgtaacaataggaagagtagtgtgtctccatataactgaccaattatgtctatgggggaggtgtctcagattattaaagtggttaagaggggtcatgttcgttattctataactacggtggaggagttagcccccacttctattctggaggctcgagaaagggaagaagaaactaggaacccatctttgagtgaaattggtatttcggagccacgcaatattgaaaaacaatgtggtttggttgagggcggttatgacataagtgataatgtggaagctcaactaaagtgaattaacaagaatggtgtgaactcagtgggtgtggaggacaaggatatggatggtgagttagctcctagtggtgatgggaatgtcatgttggacgtatctatagttcaacctaaaatgaacatctctgcgatggttagtgtggattaaccgaaagacaagggaaaaacaattttcttatgcaagccaacatgagttatcattttagcaagcattacaacagactttagaaccaattatcaaggtgcaaaaaaatgaaaaaatgaaagagagttccacctgcaaccgtgcatcaaagagctctccttgttcaggtcctctccctcttagtccaaaattgtcccatgtgattgttgctaatgccaagaataaactaagtcctagggttgggggtgcgaataaatgtaagcttgagtcagaacataagaaggaaagtagtaagaagggtcgacaatgtattgatactaaagcttccactagtttggtggatgacgtaatggcgatgtctgcagagcaggctcgccaggatccatgagtctcttatgttggaattgctaaagaagcttcacaacttcttagacatagattttatttannnnnnnnnnnntctcaactattccagaaaagataaa

SEQ ID NO: 111076 - DNA, 2583 bp, Cannabis sativa
  modified_base (1570)..(1572): a, c, t, g, unknown or other
cccaagacccaaacccggacccggatcgggacggggaccaagacggggacggggaccgagaccgggactaggacccgaacccgaacccggactcgaacccgggcccgagacccaaacctaggactcggacccgagacccaaacccaggactcggacctgggacctaaacccaaatccatatctagacccatacctagattcggacctagacccgaactcgagacccgggaccgacacccggactcaacacccaagatccaaacctaggacccgggacttggatcgggacccagacctggacttgggacctagacttggacccgacaactgcgacccaagacttggactcaaacctggactcatactcgaactcgaacctgaactgagacccagacttcggactcgaacccgagattcgggacccacgacctagactcacgactcggactcgagacatggacccagacccctagttggtgttggggtcgagtgtattgaaaatatattatagctttacacaatctattaatataagtcaaacataatattgtattaaataatactaatacaacacaaaacaatacattacaatataacatactaaacgagcccttaatgacatatttatttttcaacacatttatcactaatttatatttgttataaagtttataattaattttaaactaatcattatatcgtgttaacctgaagacaatacgtttaataaacgggtatagacaaatcaatctaaaagtaacccaagcttatttaaagaaaatccactacctgagtgagcttataatattttttttcataaatcagcagcttatttatttatatacacataaaattaatttgtgttaatttgtgtgcattaaatattgatctgctaccccacttcaagttggtgatatgagattacgtaggatagaatgcaaacaagatctgatattctctttcagatttctatcatcagaaaagaaaaaaagaaaaaagattccaatttccacgtctttattaagtaaattaataataagataatataatagggcaaggccaggagggaggaaagaattgtgatgttatgacttgagagtgacaagtgagtaggaatcagagtgaaacagtggtcaatcttatataattgtgtatatataatccatatttttattatgtggtcctagactcatacctaataatatcaactctctcaattaacctaacctaggtcagtgtaaagcaaaagaactggtcccccgtacaatcaaatctaaccccactaaataatgttatatttatatcttgggcaaatcaaatttaataaccaaaaaaaaaaaggaataattatatggttcatcacattaacatatgactggtttgttaagaatctgctttggacaatgaagaataagttgcctaattaaattaattaatcggcaaatggagtgtgtcatagtgtaattaataacattaattttttgagaaatgctaaagggcactagtgttgtctaacatccttctatgtgtcaatatcgctattggtccaattaagtatcgagtctcatannntttaatataataatttttagggaatatcgctagctaatcgcaatgcgacatctcgagaaagtactaggcactactgatatctaataacaatatttaatttccttgatgtatatatgtctgtatgtatcataaaatgaaatgaatatgttgttgaggtgaggtggattttgactgggattacgtgctttctgtctaacttgcactctctctcattagatctctcccttttacacactgtgtcttttcatgttttctttcacttctttcttgcaaatttcaattcttctcctcactgacttgttttgtttattttttttataatgaagaaaaataatcatctttaccttaccttttcgtttgcctcattcttgaaaaagaaaagaatgggaaaaacaagagaataagagaattttaatcatactaggcagatgtggtgttaattaattcaccactacataatttataatagctgtaactttataaatagtgaaaattgctcaaacgaagtatattgtgtatgtatgtattaggggtatttaatggaacttgtccaatattttagctatgattcaaggaattattggattggattggtcttttataggggtgttcataaatatagtttatttaattccattcacctgatccaatcacatataatttaatctaattcttaaattgaatattgattaatatataaaactagctgattcattaaattgaatgttattaggagtggagcacttattagtccacccctaaagagtaatgccatgtggaggagcccgccgctattactctaccaataatacttagtcactaatatataactaatattagcagtatactaatacaatcactgctaataatagtgtcagattcgtaaactgacaataatattagtggcggaccaattcacgtctatgctttttattttggctaattagcaattttttccccagaactttgacatatatcaaatcatgtcctctaaacttttttggccgttaa

SEQ ID NO: 111077 - DNA, 3421 bp, Cannabis sativa
taaaaaagaattttacagtacataacttgttttgatgtcattgttgaatattaccacgtgattttgatttatgtaatttttattttaaattattacagcaattcttaaattaattatttaggatcgtcacttgtacattttcaaagtctatctttatcttatatggatctattttcaagtagtggtccaatcttttttatttttttcattttcattaagaaaactgaataaattaaacaaagttgtggaacccaataatttattattggtatatatatacatatgacatattcaatgtatctttatatataaatgaatacgtagctaataactagtttggaagtttgttaatccagaaaagttgacccaaagatatatgattgtaatataattgttctttgttaaatttaagcaaattattaattaatgagggataccatatagagaatatatctctaattataagtacccatgatcctcttgtgtcgttatacatcgcataatattcctaactatataattgataattgatatgatacataattcataattttatataaatatatattttttgctaagtactaattaaatttaatggtacgtatcataatgttatgggaattattgtgttaatgtcaaaaaaaaaaaattgctaataaatgtatagttcacatcaaatgttattgatcaagacaacgggaaagaaagaaaacatattggtatttcaattctctctgacttttatttatttatgtttttggttttttacgatatattagatgaggtaattaatatttgggcataattagtaaatttttattaaatttatttgtgtgatggttttttttttcttttgttttttattgtgtgaaaagaaaaggtgataattttttatcatatatatttggattaattattatattacctagcaagctgtaaaacttaaagagatggataaatcttatttggaaaaatttattatatgacaaaatatgataatttcttcaatgaattcaactgcttaatattatattatattatagatatatttttatatataaaatattataaatatatttaattattattcaatcatcataatttgtactctacaagttttacaatttaaatttcaaccaaattaggtggtctttgatttactgaaacataatgtaataataatgaaaatattaatgtaatatagtgggtaatggaaatactattatggtgtaattgatttattttataataaacatgtactcagaattcttttatttaatttggtgtgaatggaatgaaataagtattgtattacaaaattattcttactttattattaatattatttttttaaaatattacaaaaatattaaaatctcgaaaatttttatgctttaacacataacaaattaatatcactattttaaagattttgaattatttttattaataaaagtattattttattatattcaaaaaaattattttatttataataaattgaaaataatacataaaataatatataaagataatatttttatatattatggtacaaattgtttgcttagaagtacgagtactcatataaaattgacacgtggaccgagttctcgatgaaaaagatgatgtgttaatagatagcttccatagagctaaccttgcttgatgagaactcccaagatgatgcgaccgagatatgatttaatcgcatgttatgcctcgcatagcataaaaaataagcaagatcaagagaatttgatactggtcacaaatatatcgactatatgtgatgactaaatagacttttcttacgactaataaatatcgattctttagctaagagtggtcctagtgactaatgtgtttgataatttgttagaaactcacatgttccatcttgtcaacacatgagatgtccatttatgcgatcaaagataaatgcaaatatctaaacgataaacccgaaggccaccctgcgaatataagtgcacttaaagcttgcgagctcgagtgttgaattatgaacatgcaactcgcggctcaccaagtcacatatgttgttgcactaaatacaagaatagattaaactgttcttcatttattctttaggtatttactttgaattattattatcatttaatgtaaaaacggttctgaaatcgatcaattatgtttaaaggatacttactttctatataaagcagtgattcaaatcaaataaactaagtagaaatctttgcaatagtggactaaaccgaccgagctctgactgaaccactataattatcttgttctctctttatttttgcttttattttgtctgttcagtagccaataatttgagtactccatactctaagtgagtactcacatgtttttgattgagtattcttattgactttgaatactcacacgaattcggtgttgtctaaattctttcgacaatatttggcgctatctatgggaaccatgtatatgtgaagatttctggaggagaatcaatatggctatggatcagacaaatgtgaacaaaaactctggatctttcaacgttaggattcttaatattcatattcatggtggaggaacatcacttggcggagtaacaacccctggtggaggaacaacccctgttgaagccataataggaggagtgggttgtacccgtttcaccccttcaatctattccctgatacagctagacatgtaggataaactttgacgccaacaactactgtgaggcattttccatcgttcacacttgttcttgcgtctgagggcatcacttagctcacaaccacgcattatatggccatgcaagaacaaatgcgggcattacaagcggacatcgtagggagagacacgattcaaacccaacgtctgccacgagtcccaaattgacgtcgtaatgatactcaggtaactgataatactagatgtcataatgaatgtcaagacaatactcataatcacagggaacgtgtagacaagaatggccaggaatggcttgatctaaatcaacctcttcacgactctacacgtaatagaggccccgatgctcctgatataggtcaacaacttggttgaaaggaggaaagaccgcaagaggaggatctcgaacaacgcaacccacgaagtcgtgtacaaccacaaactatggtaaacgatgggaactctcacttttgtataatagtcattccccagtgtttataccaggtcagggacagtatttacaaggctaggagaaaaatatcatgtgcatagaggtgatttgtgagattgcctcaatgaaggatttcgagctcgatcactgtaaagcccgcttagttaatttggaaattagcagctgtttatgttaattatggaattatttatagctatttaaataatttattactgttagttatggaattcagaa

SEQ ID NO: 111078 - DNA, 1429 bp, Cannabis sativa
cgctcggccaactggctgcgggtttgcaatatctcaaaccgctcttgatgacggacggggtcggctttggctttaggaaaagtagtgggattctgtttaggtggtggaaatgtggaagtggtgcgcttaggttttggttggcccttggaggttaagggagcggtttttgcggttggagctttgggcttaggtgaggaggccttacggggacgagtatggggtggtgaatgtgtagtggaggaaggcaaggcatgggttggtgggattgtgtggattggttgttgtggtggaggtgtgggcaaggtattggctggagctttacgcttacgagatttagctttgttggttgccatggcgcaatctcacaacaataaactcgaaaatatctgctacacagttcacaagtcaacaacacatcattagccaaaatcaatcacatcaagttcagcaacatatcaactcattttaatgacaatgacaaccattcaacttgaatatcccccactaggctcaaaattagaattcagcacaattagtcctagagcattcaactattcaaccttctaaacactgtgaattcttaaaatgcaaccttctaacacaagaattgtcccacataatcaaaaatgggcagcaatgacaagagtatcttcacaacatttgagaaaaagatttaccccaacaacaccacaaaccaaatctttaatagaaatttcagcaaacatggccaatgacagctccgattacgaacaagaatcaagatagcatagcatatttcagaataattttccgatttagcacgcatctaatcaagctcattatattgcaagagatattgtcaaaacttacagagatttcaacgagcaatggcgcgcaagattgggttgctgagatggggaagttgagtgtgggtttcgggtctgggcaaatcggagcaaggcaaggggcggctgttgtggtcgagtgcggtttggctggctctcacgagtgggggcggtgcaatggctgagatggaggttcggtcctgaggtaaacggagaaggggggtcgaacagagttgtggtcgggtttgcctggaacaatggagcaaggggcggaggtgaaagcggctgggtcgtcggtttctgggatggaggtcgaatggtggaggttggggcaggtgcgggtctgagcaaatcgaagcagggggcgatggggaggtcggacggtggctggtcgaggaagaagggggttggttttctgggttggggttcgaaggtgcaatggagggcggaggcaaacgggttctggggttgggttcggctgaatggggtttttcttcaagcagtggtgatggaggttgaaggagatgatggggctggggggaaagtcaggtagggtaggaaaaattgtttgaaatttaattttttttttatgtaataataggata

SEQ ID NO: 111079 - DNA, 1759 bp, Cannabis sativa
tttttttttttttttcatttcatctataaatatatataggaccctgagcagtcagtagtttgtttgatgtcagaatctttagcatataattatacaatattataaataaattctccttcttatcaacccatgatctttaacattgataagaaaaaaaaaacaacattacgctaaccattgcattaactatataaccaatttggtgtacattaaaagaaaaagtagatacataatttttttataattaaaaataaaaaaaaaaagaagaagaaaacaaaaaacaaattccttcccattaacgtcacatataattatgccttaaatatctcaatatcataacaatttctttagttccccacaaaaaaagtcaaaatcctcctcctcaattctacataataaaaactttctctcatcatttttattttcatttcattttctctctagccaaacaaactatatctcatcgaaaatcatgtcctccaacaaatcaaaaaacccattaagaacaattttcgccaccaacggaggctgtggctgcgccaaactgaaactctgcgacgtgttagagccaatccgaaagcccaaaatccaggcccaaaaaagcccaagtaacaacaacaacaagcgcttgagtattatcaatactactcccacctcttcatacggtgtcgtttcaattctatccgaatacgacaacgagaatgagaaggagaactcttcagccacaacaacgacaaccaatgtggagaacacgtcatcgtcgttttctgttgagacagagaactctagtaagtgctcctcttcctcttcacgaagcaagagattaaacgacacttgcattgctgtcgttaaagaaacgaacgacccttattatgattttaaacaatcgatgaagcaaatgatagtggagaaggaaatttacgacaatcaagatctgaaagagcttctcacttgttttctcgatcttaactctccttcacacggtgacgtcatcgtacgagcctttactgagatccgaaacgacgtcgttccaaagaataaaaatgccgagtgcttattattacaagaagaagaagaagaagaagatattcaatcttccagctgattacgtacgtgtgaagcgtgccaaacccatgtgttttcacagaattcgcacgtgtgcatggcaaggaaaaaggtgatgaattagcttagcaagtgagatctagaacagatcttaaaagactttttttttttttttttgtatttttgtatgtattttttttttatttaattagatgatcatattgtttagtttttcaaactatataatttaattacatcctataaaatgttattttgcattggatttgtaatatttattttaattttgttttgatattttattgttgaaaatcaaataataataaaagatttacattaatttaagaagagtttgtggtttggggcagaaatacaataaagaggatgggcacagaaacttgatataggtataaaaatgagggagtgcatttatatttcttattttggtatttatgatgatgaagagaattccaatataggcatttaatcaatttataaataagcttaggtgggatgggagtataatttagtggtagttgggccatcttttctccctttaaatttccctgccttccaatttaggtcggttcgggaaagaattgcattcaactattaaaattcaattttaaaatttaagtgcctttaatataaactttgtgtgttttttttttttttt

SEQ ID NO: 111080 - DNA, 2547 bp, Cannabis sativa
aactttgattagtttaacacagtatgggacaccaatttttaaccggagatcttgattctaataggtatggtggcaactgcaataacggaagcaaaacgactccacttggcacaagctaaccctgccatgtcagtcgtgtccatgtcagccttatggctcgtgccatgtttagtgattgtgggaataggtgaggcattccattttcctggccaagttgcgttatattatcaagaatttcctgattcattaaaaactacttcaacagctatggtatcacttttaattggattaggatattatcttagtgtggttttcactgattttatagataatactactggttggttacctaataacataaacattggcagagtagattgtgtgtattggttgtttgtggtgattggagtcttgaatttcggatattatttggtctgtgctaaattatatgagtaccaactctaattatattgttcataagtaatggtttttgacaaactatacgtacatggaagaatatcctgcaataatatgtttatgaatatatgtttatttcctttttgttttccaaacaaggtaaaagccctttaattattaggtttgttacacatatgatcctcaatataaaaaaattgattgcaaaagcactttaattttcatttttgttgcatccgtcgagtcaagaacattaattgacaagtaagatttattaaactcatgtgattggtccacataagaagctgacatgggttaattgatgatgtgtattatttaaaactaaataactcaaatatcaataaaaataaaatatatatttaataataataaaaagcaattagtaaaaagggagatctcctccaagctgataactctaaatccctaaaatgaaaacattagaaaaaaaatctcatcgaagaagttgatctcctccaagaaaataccttattccaaatacccaatctcctccaagaaatttggaacccagctatagaaccctctcaaagaaaccccttcaaacccaaacaaagaacctcacttcgaacccagacgaaaaactcaaagcctcctctccaacctgttatgatggcgaaacataatggtgtgagcaaatctggagttgtggctgaagaaggaggaaacgaatttgaagctccatggatgaaaggtatgttttggacttgtgagccaccaaatttgacggtgattagaatttctaggacttcaaagaacccaggaagacgcttcaaaacttgtgtgaagcatcgaaataaaggaggttgtaattttttttgaatgggttgacaatgaaccctatgcatgtcaatgtggaatgggtgtattaccagacttgatgaggaagaagctattattagagagagaaatatactctatttctgcaggttcaatatcaaaggcttacaaccatgaacaacaaaatagagagtttccaagatcaagtgtgagtgatgtggaaagttggggtgaaagtaatatcaaggaaactgtagagaaccatttgtttaatattttgaagaaaattgtactctgtttagttgttatatattttctgttttggttgataaaatgagtatagtttgttattaactaatatatttttaaatgtaatgttaatctaactaagtttcccgtcttgctagtgtatgtcagttgtgattaatggagaaattattttggtattattttgattagattttttcatttcttgtcattactataccccattcttcacttgctaccaatacatagggatatttattaaataatctgcataatcttacaaagtctagatatttagtctcaagacacataaaaacctaccattaatatgtaaaaaaaaaaatattgtgaagtttggtgaccaaatggtagaatattagtattagtcaatggcaggtaaactaagagttgggaagtactaattgattatgcaaccctgcaacttgtcaatttgttctagcaaaaggataagaagagtataagttgttattggacttggaagaaaagacacaaagtaattgagaataaatcaaaaaaaaaaaagcaaagtgatcatcctacagtagctttatatgttcaaagcttttgtacagcacaaacactgtaagcatcctaaagtatcattcaatttcgaaatagcattcgggtcaaagtccagaaagacttccctgtgtagagatacatttcacatattaatcaaagactttttgagactccagtaagtatctggtataactcacagtcagattataaaactttaaggctgcaaagcactagaaataaactgtagcaacaacagtcacaatgcagataaaaatttatagaattcaacacatttctatttcaaatcatttccattaatatcataaacactctcatttagtctaaacaatgcatataagtaaaccaaaaaacaataataaaaaatattccaattaacatcaacaaagtcataatacttcacatgtagcttttaacattacaaagtcataatgcaagctgcattaacatcaaaaaatactagctgca

SEQ ID NO: 111081 - DNA, 1522 bp, Cannabis sativa
tttttacaaaaatactatctttaatatttatttgtaaaggaaaattaaacttaaatatttgtactataaattactgttaattaaaaaaatgtcgttatgatcatgttgtggtattttggctagtagacgaccacccacttcactgtagatttagtcaagtgcaactaggttatcctcacctatttcaatttggttatataggttactttcattaaaattacacataaagataaagtattatattatttttaattagtatataaatgattaatgtatttttttaatgaaatttggagctttacaatggtgagtggtgacccatttgtttaacaatagtattagtaacatgttgggttaattagttgagtcacaaaatcacttcgacaatgaatcattaaaaggtaaccaatggtgaccctttaagtcacataagtagattcactaagggaaacaagttactattattaaaattagtcttatattgttttcttttttacgagagtttttgtcttatattgttttcttttttacgatatttgttaaggaaaatttcatttattatccataaataatacttttataacaaatattaaaccctctactaatttattcaaaacaatgttaatgttaactaatcaaatccaaaagaggtaaaaattggtcggttatgattaggttttacaaatttataactgaccagtcggttacagtttttattttacaaaaattgtaagtgaccgtttagaaattataaccgtataaaatcgaccgtacgatttttgacgatttttagtggttttcaatttggcagttttggacaattttggcaattttgagcagtttttgatagtttttagcaatttcagtagtttattggtttaacaatttttttaaattcaaaaatcgaaatcgatcgccgtgtcaaaaaaatcgtaatcgaaaccgactgccaaattcggtgatgacgtggaaccgaaaattcggttgcagcctagttagtttcggttttttagtttttatgaacactcctacccaaaataccccttatgttttgatttttcctctctctatctgtctctccctctttctcgcactgtcttcccagagactcgaaaattgactccttagtcttccttcttctctatgtctatctctctcttgctctcattatctctctcaaatccacacaaatagcagatacccaactctgctcaaaatcgaattaaaattgactcctccctcctgctacccacttttgctcgaaaactcaaccaaaatggagagaaccaacactcggaccaaacgaagagacacaacactcgaccaaagacccaaccacccaaccatcttttttagctgcataaatacctttgaattgattaaaaaaaaatgaaagtaaccgtagctacatgtttctatccaaacttaatgatttagaattttattttatatgtgcccctttcaagaaaataaaagagtttgtatatactcacgaaactagaagaaaattacagttttataa

SEQ ID NO: 111082 - DNA, 8141 bp, Cannabis sativa
tcgttacccctgtggaggtggatggtccatcccctccacaagagccatgattggcgttccttggaactgtagagggttggggcagacctctaaagttttggaattgaaagctttgattcagtcttgctcacctaactatattttcataccgaattaaaagtggaatccactaatttggtacgtactcttaagaatttatattcttataataacattgttgttcctactgtgggtaatgcgggggctttaattcttgcttggaaggtggattttattttcgaattcttatgtacatcgaaaaaccaaatttcaggtattttgtattcttacccttagcataattcttggttgttgtcttgtgtttatgggcctccgtactttcatgagaaaaaaaaagttgtagttgaactatatggaccttggttttaagtttggcgggccctggttgatccttggagatgtgaattttgttttgagtaactctgagcgggtgggatccaaagggaaggaccagttcctccccttcattgctgaattcattaatggccatgctttgacagatatgcccataaaatgtgacaacctgacttggaataaccatagagatggtccgtctcatgttaagtcagcactcgacaaggctttagttaatgaaagttggttaatggctttttctaaagcggtggttcagccgctctacacttgaaatttagatgagtgacccctttgttttagtattgtgaatcctgagtctagagtgcaaaggccctttcgttttgaggcttggtggaccatggacgcgtggagtatcctaattatggatcatgcttgggagtcagtttcccataactaggccctagctagagtttttaagaaagtgggtgctacctgcctggccctgagcagctggaaccgagagtaatttggtaagttggatactaacatctccatgatggaaacccaactctaaaatatccaaaagatgtgtgcagggtctagaaagtgggcccatgagttggaggtgagacaaaatttaaatgagactttaagatggaaagccttatattggcaacaaagatcccgcgtctcttggattaaggatggtgataagtgctctaggttctttttcatttcggccaccatccgtaacagacgaaatacagtggatagtatcttggataaggatggggtgtggatctctaataaaagagacattgctagagaattcgcaaattttctaaggcacatttttaccaacccagtccaaggccctttagcgaatctggactatctaattttgaatcatctctctcctgtagagcaggttgcattagagataataccggggcgagaaaaaattagacaaacactcttttctatgggaagtttgaggccctaagccctgatagtatgtcaattctcttttttaaacattactggaacttagtgggtacaaatttctgtgaggtggtggtggattttttttcaattatggactatgcataggggtctcaatgctatgaatgtgaccctcattcctaaagttcctagccccaaaaaagtgtcccagttcaaacctatttctctttacaatgttgtctacaaggtaatttaaaaaaatattgctaataaaattagaccgattttttccctggttgatctgtcctactcaagtagcatttgatccgctatagaatattcaagttaataatattttagttcaagagattatccactcgtataaacttaaaaaaggtaaagaaagtttgtttgctatcaaaattgactcggttaaagcttatgataagttaacctggcaattcattgatcatgtgctccaaagcttcaaggcccctgataagttttgtaattgggtctgtcaatgtgtttcaatgacttcctttagtgtatgcctcaatggttgcaaggttagtaacatcattcctgagtgcgacatcaggcagggagaccctttgtctccttacctcttcatatgggctgctaataatctctcgcgcatccttgaaaatgccctggatattggagctattaggggaatcaagttgagtaggaatggtcctaggctctctcaccttttatttgcagatgattagatccttgtgggtagggcaaatttaactgaagttaagggcttttggtagtgtctaaagaagttttgcgactggtctagacaatggattaataaactaaaaacctccatcttcttcagcagtaatactagcgagggtatgagaagagccatcatgcaggaacttagactcaataatgtgatgggtaacattaactacttggggctcccgttgtttaggtctcgccaaaaagatgcagatttcaactttactttaaataaccttgtttccaaactccatgggtggaaattgaaaactttttctaaagctggacgtactactttgtctaagattgatggtatggccagagatttttggttagactgtgagtaggggaatcatggtctttacttaaaggcttgggatcacatatgtctccccaaatctcgaggtggccttggcttctggaaatctttggatatgaatcaaacgttgttggcaaggtggggtcagtcccttcttaattaggaacaatcgctatgctgtaaagtgttaagtgccaaatacctgaagggtagagagttcttggagggttcctttaagaactcagattcttggttctggaagaattttgtgagaactaaagatattctaaagaaaagtgcttgcaacattatattagatggcaaagaaacgaatatatgggatgctctgtgggttattcatggacagaacttctatccaaagcctattaatcatccccctgagggtttgaagaaggttgcagatttactccttgtggttgaggaaatgatcgatagatgggtttggactaaagaaccgagtggattgttttctaccaagttttcctaccttattcaagcctttgaccgcgcccctatgtgcgatgttggcctagcgttgtggaacaagttatggagctctaaagtcttggaacgtcacaaggttctttggtggagcattctttctaatgctcttcctatccgtgccctccttgctaggagaatgcatattgaggaggtgcttgtcctatttgtggggagggtgaggaaacgatggagcatatttttctctgctgcaactttgcttttcacctttagtgatcatcccttatgggagtgatgccagtttttgattttggtgctcgggtttcagattggattaaattcttgtggaatctaaaatcaaagggattgatgttgacaagttgtttttctatgcctcgatgatggtagatatgatttggagggctggcaacaataaggtacataataatttacttagtaacattaaacattgtattgactctatctctatctgttacgcagactatgggccctgcttatttgcttcgtcaaaagttgttaagtctcctggttggtcccctccacctgttgattgggtcaagatcaactgtgatgtgagagttgggtgcagatccatgtgcattgtggttttggctagggaccacacggagtcagttttgtgggtggctacaaacatgcttaacttctctgatcccctcattggagaagctgcagcctgtctgttaaccatggagacagtcgttttattttaacacctttttgtgatggttgagagtgaccttgagacagttatcaagactctaaagggaacctgttccagttggggagttgataactgcgtgcatcattgtaagcatctatctacttttatgttaagttgtaattttttatttattcttagagtttgtaattttgtggcctataatatagctaagtgggtgtctaatgttactggtatggttgatctctcttctataccagactttatcctttgtcatgaccatgaggtctaacttttgatttttctatttataaaacgatgatttaaaaaaaaaagatgcttcaataaaaaaaaatgtctattgatcattgcaatattttgctagttatagtatttttaacgataaaattcattatcaaatttctactaacattctaaaatatgctcacataccatatttaagtcaaaactaaacaattttcaaactctaattttaaaaaacacgatacacttgtgattatatttcaccagatctaaatcttacctatgttgattcatatattagaaaataaaataatttttcacattgaatctagatcttacctatattgactcatatattaaaaaaataaaataatttttaatattgaaatctcaagagaaataaattcaattatcatatgaggaaagagattcataccaatatttttaaagtatagagttaatttttgttgcgaaacaaatatgccaacaacatgcttttgtaggtacaaaatttatgccagaactcctttctcttgaagtgagttaccataccaattgcttaagcaaaccatcactcttgcttttttttttttacatgtatatggatcaatcattttaaatgttattcatgtgagcacaaaattaatacttttgtataaaaatagaggattaaattaagaaattctactacaaaacaaaaacaatattaagatataattgttaccataataaaataataataaaaaatctactaaaaatgctagttgaacaaagtcaattactattggcatatatatagattgaatggaaaattaaaagcctcttgttataagttgtgtacacatgcaaaaaaataaaatcactctattcataaatattgtgacctttcatatttttttatggtaagttttattttttatagtacatatagagagatatgtaagagtgatggttatgtaaggttataattgaaataaatttattatatatcagtgtgaataattaattatagaaagatggagaggtaagataaatttaaaggtaaagaattcttaactaacgaaataataaaaatcaaaataaaagtaagatttggagcatctcacctaaaatattcaatttgtaaggtttagtgtaacgaaatgtataattactattagttcccaatatcccttgtatatttgataaacccttctaaaaatatgcagagttttagttaaatttattttcagtatggcccaaaatagctatgttatattaaaaattattaattttgtaaaaattaaaatctaaatttaaaaaataaaataactttagttaattgaattaataataagtttttaaaaaccaatttatttttgtgtgcttcaccaatagaaacgtgatttttctcagattttaaaaattaataaaatataataatcaattgaaaacataaaatacctaaaaaaaaaaaataacgcttcaaattaaaaatacctatgattttacacacctaaatcaaacaataccatttctcctccatctggctgaaccttttttcaaaaaattaaaaacattactgaagcacatacagttcagtatccaggttcagttggtttcttatatgaaatataaaccatcccttgtcctaatttgaccataggatggcaaacattcaatacgtatatatttatatacatcaactgaaacttcaaagacaattgacctgtaaagggtttgagtaatgaaggcctgtgtcattagcagccactaccactagcaggttcaattgaactgagaagcccgttgcctcgaagctgcatgcagtgttcttcagcgtcagcctgagcacatatgatcaccactgacatgccattgagatgcgcttcttgcataatgttcacagcattgtcaagagtcatcccagggataaccttcatcagtacttgcacaacatattcccgtttattgaagttgtcgttgtgcagaatcacccggtacggcggggctattttccttgatttcctgtagagtttaaagaagtacaatgtatggattataagtttacaacccatgttgagaaaaatcacatctaaatgattcttcctttgaatgcatgattccttagctgtgtgtcactttggtgccgagctcttagagggtttttctttatccgttcatttggatgaagaaatgatgagaaatacataaaatgatatcttcataagtgaaatactagaatggtaattcattgaatcttatttagccataaatcagtgttaagtcatttcaggaggtgattagcacacaaaacttacagaagatttatattttcatattcaatacatttactagacaaaactattcaagaaatgcagcagttgcaattctaccatattctagtgatatgtctacttgcaattcctacaatttcttcattgcaagatatcattaccctcagttcagttcatgctgcgctcagttaaaagaagattgagcagaatggaactagtgtgaataaaagaaaaggtaattttaagatgtctaataaaaaaattcatgttaaatacacgacggtgttcaagaaaattaagattgtacctcacatcaaactctgattcacgacctggagtagttttctctataacaggcctctctaatacactgccccctttacctggtcctgttgctgatatggccataggaattccaagactggggcatggtcctttacaaagagattgtttgttccctgtttcataatttttaccaatccattaccaccaataaaaataatcagtatatcagctagtcatgcaaaaactaagagtatttattaacaagtaaacaaaacattggtactaagaaaaaaaaaaataataagcaaacaatggcaagaaagaaaccatatcaaattatcttgtcaaaacttataaataagtgaatatttaaggttaattctaatatcaaacttaaaagaaagaacttgaaagtttatacaaatcaacaatagggaatgccctgatataaaccttaaagaatggcaagaaattttatgatacaaatgtctccacccagctcactataaactctagagctgtaatgatccaaaaacgtttaggtcaaaacattatcccttggcaatttgtcaaaagtcttatctaaattgcttaccaaacacagagcagttttacatgagtgtttcaaattagaaaagttacttgttctaggttagctcaaacaggtctagttacaatcatcctaacctcaggaattgctcatagccaaggcaaagataacaaagctctcgattttttctcactctttttcataattattcttattttatgagattatcaactaaattatataggaattacataacccaacctctttcttgttagcagcaatgcaacaatggtcactcatgagagcaagataatttcctaaccctgataatttcctagataattcatttctgaaaattatagtgaaaatctgttcctctaccaagaaagactattgcaaagtaaaacaactagtacccagaaagtaagttccaagatacaaaaaacatttgaagttcaagaaaccaaacccttttgtttgaacaagttataaagtaaataataagaaatacccaacgcaaaatttcggaagaacgaaaaaaagaaaccaagatttaatagaagaaatcccagaactgaaacagcgaaataatactaccacagcttcaaagaagcataatttcaaacaacaattagtaatgttgaattaaatttgaaaagggtaggtaatacgaaattaatacctggcttaggattgaagacatggttgggagagagagccagtctcccacaaatcgctgtgtccatgacttttttggtgtttggttattttttgtgaatgaaaaatgggatgatatgatgatgatgcactcggattttgtttagtttagtgttttttgttgttaatgacaaataccaaactgaagaaactggtggtcgtggacgtcgatgggtggtttggtttcaaccagacaggcctgactggcccatttatcccgaatatgggcctacaattaactgtttgggctacactttggcccatcccaaagtctgagatttgatatttttttagtgaaaattacatgaaatatgggatttcataacaaagttagaaaaatatggcatttttaggtttgccacttttctatggcattttttcacatttaag

SEQ ID NO: 111083 - DNA, 11279 bp, Cannabis sativa
  modified_base (3452)..(3467): a, c, t, g, unknown or other
aaaagtgttgcttaattgcttgtttaattcagggtggcaatcctttggactttaaatttgggaccacagcttctgttagtgttcagtctacttcacttactgatcaaaatccagaacaatttgtgactaggtataattctgtttccctgcagatgttgttcttgagccatgctatttctctttgttagttgactcaagtttggtttttttggtttttgttttttttttctcttccctatttttttttttggttatcagtgaagcaaaaggtagttttgcgttgactgcgtcaccgcatggagattctgtagatagtagtggtaggccaggggttcctacagttagtgaacctaacaccgctgataatcttttactctttgatggtgaccatggtttgcctgaaaaggaaaggaattctttacgtcctagtcggaggaataatattgccccatcagaacaatcatctcaaattgatgggactcaaaatgccaaggaatcagaagattcagcaattgttcgtccttatgctcgtaggaataggtctagatcgaatcgtgacggtgctcgatcaagtgcagttgatatggttcagaatcggagtggtcaaggatctgttttacctgttcgtggaggcttaagagatgccaagagcaagattggtgaaacaaacaatagaaaggagcaaagtacgccatctatttctagccttaaatctgcaagttcaaatggcgatattattcctaaagctgtttccagtaaaaaattggatacagaattggatggtgagcgggccccagaggtaaaaactggactggctaaagctagtttgcaagaaattaaatctgatgtcacacttcccaaaatttctcttgacatccaacataatcaaccttctcgagccactgctcatcaaactccagctgaaattgtttctatggaatctgatattggagaaacggaacagcgggtttcagcaagtttggaatgtccaccttctgtacctacaataaatactgaacaggaaactacaactattcagccgaatggatttagtgacttaacgagagagaacaacaatatatcaactgaagttcaaaatagcaatgcaggagtaggaatggaaggtttagattctcagtcttcttggacccaagatagcgtaggattagatgtacataaagatagtgttatgtgtaccaatactgatgttaacaggaaatcaatggggaatgcatcagttgttgatgggacagccaacccggatgatgctgaaatagtaatggataaaaatgagacggaaacagtgaatgatgatgtaatcaatgatgaccactcttctatttgtgaaaaagaatctgatagtgctgcagtcaatattgataaagacacccaagaaaatttatctgaatttccaaatgaagttaaggtttcagctacggatgatgttaaaaacagcgacactactttaccagaagctgatggaaaagtgagtgaatcattagatgataaatctggcatccaaaaggagaactctacagtaatttgcgaggtccccttagttttctctatgcatgaacagcctggtactgctttatcggagatggattctagtgtagcaattggtcctcaaacaactcctgttaacagcttgaaagttccggacaaggcacatgaagattctattttggaagaggctcgaattatagaggttctggatcctgttgtactttgatatagaagtgtctttttggcagtaactttttagtttcttaattgctaagctgtaaattgatgacatgatgtgatatgtaggccaagcgtaagaggattgctgaattatctgttcgttctatgccctcggagaatcgtcgaaaagctcattgggattttgtccttgaggaaatggcatggttggccaatgattatgcgcaggtatgatttttagatgtgtcatgtgcttggttctttttgggtatctcgaatgtcatatatttgtcaactttattcatcctcgtgtaagaggtttctcttttattatgcttgcctataggagcgcatttggaagatagcgacagctgcacaagtatgtcaccgagctgcttttgcttctcagttgagagtcaaagaacaacagcaacgttggaggctaaaagaagttgctcatgccttggcaaagactgtcatgcaattttggcattcagctgaggcaattataaaaagtggtgacaccagtgttttttcagataagtgcgagtataaagtagtgaaagatgtttctaaagagaagaatgaagaaactgacattgtagaggtatgttgcttgaatttttttaggttaatttttctgttaatttgttgatggaaatttataaaatattggttttgttatgttcgttctttttatacggttcttataaaatatcaacatttataaaatactgtgaaatattcagataaattaacatttatatgaaatgagatttgcattttatgtatttcaaaacttgtattcttgcctttgttgacatttgagtttaggtagcaccttatttgctccaaagtgggatatcttgggtagacggtaagctgttagaaaaacctatgtcccttttaaagttacgtttggaaaaaaaatatttctgagtttttctgaatttgttattctcattcagataagatatcataaaacattacttgtgtctatgtcttatgtttgataaatgtcacttatatctgtagtatgcatgagctggacagaagcagtcgatgatgtattgtatattttttcataccttcatatgctattatatttgttgatacattttctggtcttctgcaggaggaatttaaaaaattggaaaatcaatgttccagaaaggatgtttcgattgctttgcagggttatgcagtgagattcttgaaatatagcagttcttgtggtctcacacaaaaagcagaagcaccagcaacacctgatcgggtatctgatttgggcattcaggatatgtgctgggaggatcatcttacagaagtataactaattcttttctgtttcccttttagtgaattttctagagtgatcaattgttattgcaagcctgttattgtagctttctcttgataagttgctgcatcaaatgttggctttgcaggagaatttgttctatacagttccttctggtgcaatggaaatttacagaaaatctattgaagctcatcttgtacagtttgaggtaaatgtcagctcctctgtatggttttccttttgctcttctctctggcttgcaaaggcgatcaaagtttggcagtaaggactagtaggcatcttcatttgagaaaagaaaagagaaacccatggaatggaagtttctatggaatctcagattatgtgaaattcttgtgtctacatgataggaatataagtatacatttttaaattattattattattnnnnnnnnnnnnnnnnttattattattattattattagcgcgcgtgtgtgtatatctctattgaaaccattgcttaagtatttattttgtttcttgattaaatgtatttggttataaaatagctgaattagcaaattgaaaatttcagaaaactggaagtagcatgcaagaagaggtggagacctctatgtacgatgctgtatcaggtatagctgatattctacaagctgccttgatgtgccttgaatctattgtgggacttattagtattcgaaattttaatttgcagactatggttttcaagagaatgcatatgctgaggatgaaggagaaacaagcacatattatttgcctggagctggtgatggtatcaagtcatcaaaacctcctcagaagaaaaagaaaaatgttgttttatacacgaggtcatatgaaccaggagctgattttacttatggtcagagcaactctgcaactcagcagtccatgttgatgggaaagaggcctgctaatctcaatgtgggttcaattccaacaaaacgtatgcgcactgctactaggcagagggttattagtccttttggtgctacacctgctgcaaatgttcaggttcagatgaagacagatgcttctagtggagatacaaattcttttcaggaagaccagaatagtttgctaggtgggtcccagttccagaaaagtatggaagttgagtcttctggcaattttgataagatgttaccgtatgactgtgcggaaacttcaattaaacccaagaagaagaagaaggcaaagcatttggtacatatttcaacattcagtcattttctgtttgttttgcagcctttatcacttgtcaagtcacttgccttctgatttgcaggtgtccgcatatgaccagggatggccgctggaatctaccatgcctgaacatgtaatcaaaaatattgcttagagtatcttcttacattgcttgtttaatttgttcaattagctttggtcttgcagtagtaggatgtacatatatatatataaatgataatgtagctcaaatgctgttatgatctcactaaccttacttctttgtcggttacatgtttcacattgcaaactttctatagcattaattagatttttaatggaaccatttaatgtgcagagggatccttccaaaaaaaggatgggaagtaatcattttgaatctaatggcacaagtggtaaagtctttctcaagctggtatttcttttagtcatttgtaaaacattttattttctgtatcctttatgtgtaaacattttcttttctagatttatatgcccaacacaatgccaagaagccaaagatactgaaacaaccaatagagaatacttttgacaatatcactacaatgggtggttccattccttctccagtggcatctcaaaataatatatctaacgcgactaaaattattaaattgattggtggcactggtcgggacaggggccgaaaagccaaatttctgaaggtacttaagggtgtcgtgttatgggcagtatcttaggaaattttatttgttctggtgatattattattgggtgcttacccatttgatatcctatgttttatagaaatacatacttggtaccttatgttttcaatattgctctcattcatttttggtatcatgtaatttaaaatcgtacatatttggtacctaccttggacttaaacttggtcaacaaattttattaaatgtctaaccatccctcagtttaagtagttaaatttgaatttaaaacccacgtagctgatggcagtttagtcatattaatgaaattttactgattaaatttgagttattggtatccaatatgtatgattttaaattacaggtatcaaataacaagtaccaaatgaatatttaccttatattttttttagcttattgtattgttggtttatcatgtacttgagcatttgaacctcctgcagatgtctgtcatgcagcctggttctggaagtccttggtcactatttgaagaccaggttagtacggatctttcttttgttatatatataaacctttcctttggtcgaattgtgtcttagtaaaattattgttgtaggcacttgttgttctcgtacatgacatgggccctaattgggagctcataagtgatgctatcaacagtacattgcattttaaggtgagaatgacctacttgtctttcgtttctttattttttggcgacgttgcaattttttgttgattttttcctcttggttaatgtaaactttactttgtaagtttctgttatctacattccctgcccctctttctctttttatttgtattactggttgtaacatgtccaagctacacagtgtatctttcgcaagcctaatgaatgcaaagagcgtcacaaaatattaatggacaaggggtcttgtgatggagctgacagtgctgaagattcagggtcatctcaaccttatccatcgacattaccaggcattcccaaggcaagacttaaaatttacgagtcagaccataatcactgggaaaatcattattatcatttcttaattggctgttgttgttgaagcagggcagtgccaggcagttatttcaacgtttgaaagagccaatggaggacgagaccctcaagtctcattttgacaaaatcattaagattggtcagaagctgcattaccgcaaggctcaggttgtaatattaatcgttctttcatacagccgaatttatttgctgtctgtccaaccattaaaatggaattaatttttgacttaaaaaaatgaacttgatttttgatctggtagcacacttggttttattaaacgaggcaaagcttcaaacctgggacctcttttaccccaagacatttaaaaaatgttttagtactcgaatatttgaatttttcaacttctttaagttttagacacaggctgcaacattgacatgttatattatgattttgtgaagaatgaaaaccaggatttgaaacaaatagcaccagtccacaattctcatgtaatggctcttgccccaatctgcccaaataaccttagtggaggtgttttaacgtaagttgcttttccttgttgcatgttaatggtatcattactaattcctttcttctctttgatttcaaaattctgacatgtcttggtacttctattgatgacttatatttaatttctcatgttgcggaatgcttataatattattttgttctcactctcttgaaggccccttgatctatgtgatacaacttcatcaaaccaggatgttctccctcttggatgtcaaagttctcattctagtggtttagcaataccaaaccagggtgctgttgcttcattgcttccctcatctggtgtaaattcacccctacaaggatcttctggtgtagttcttggttctaacttgtcatcaccatctgttgcacttaattctactgtcaggtaatatgatatcttgtagcttgacattacatagatattcgaactttcttttgatttttttaaactcttttttgtctcttaaaatgttttcagggatggtcggtacagcaattctccaagagcttcatctttacctgttgaagagcagcaaagattacaacaatataataatgcaatagctggtcgaaatattcagcagtccagcttgcctgtgcctggtgctctttctggaagcgatcgtggagttcgtatgctatctggtggaaatgctatgggcataatgtgtgggatgaatagaagcatgccaatttctaggccagggtatcagggaatggcttcaccatctttgttgaattctgggagcatgctttcttccagtatgtccgggatgccaagccctgtaaatatgcattctggagctagttctggtcaaggaaattcaatggttaggcctcgtgaggctttgcacatgattagggtgagtatgtatactttgatcacagctgcttccttttgtaagagaagagaacatgctaggtttagtaaagcggggacaatgaaaagatgtattagtcttatgtatggattaacatacgctacatgtccgtgtttgttgtttcatgcaaactaattgcgcattgatgtttcgctttaagttctacgagtcacttacacgtggtttgctttcttgtataaagtctattttgttgactgtaactctttatttgactatacaacctttttattacagcctggtcacaatgcagagcatcaaaggcaaatgttggttccagagcttcaaatgcaggcggcacaagggaatggccaaggtattgctgccttcaatggtttgaatcctgcctttgctaatcagacaaatccaccaacagttccatcatatcctggccatccccaacagcaacatcaggttttgccacaacagtctcatggacatagcagtaacccacatcaccctcctaatcatacagcgggttcacagcagcaagcctatgcaatccgtcttgctaaagaaaggcatatgcagcaacagcggtatatgcatcaacaacagcaacatcagcagcaacaacagtttgctgcatcaaatcctctgatgtcacatgtccagtcacaggcccaccatccggtttcgtcaactcttcaaaacagttcccaaattcaagcacaaactccatcacaaccagtgtcgatgtcccctttaacaccatcttccccaatgacaaccataccagcacagcatcagcagaaacatcacctcccccctcacgggcttagtcggaatcctggtgctagtggcttgactaatcaaatgggaaagcaacggcagcgtcagcaacaacagcaacagcagcatcttcaacaagctggtaggcaccacccccagcaacggcaacatgtacaatcacaacagcaagcaaaacttttgaagggagtaggaagaggtttggttcagaatcactctgtggatccttctcatttgaatggcctttctattcccccaggaagccaatctctagagaaaggagagcaaatgacacagataatgcaaggacaaagtgtatattctgggtctggactcaatgcaatgcaaccaccaaagacaatggttcctcaatgttcaaatcatcagaagctccttgttagctcgactcttccttccacgaagcagctccatcaaatgccttcacattcagataatagcacccaaggccaagttccacctgtttcatcaggccatgcattatcaacttcccaacaagttccagtggcagttatgggtcccaatcaccagcagctgcagtcacagtcacagccacaccctcatcaaaagcaagtcaatcaaactcaaccgaatgtccatagaattatccaacaaaatcgtcaagtaaatcctgaactgccaagcaagtcccaaaatgatcaagctcaagctgatcagaagcctgtgaataatagttctcaggtgggtgcaagcgtggcaaaacctcaatcatgtccggactcaactgctgcagtgcctgtgtcttctgccattggtactcaatggaagtcctcagaacctgcatttgattctaatcatccaaattcaaccgttcaagcaggttccactgggagcccatctgtttcacattcacttggaaatgagccaacaccacctactagtcaagggttaggtccaagacagttgtctggcagcttatcttctcatggacataatgttgggagtcagtggcagcagtcccagcagcagcagcagcctccatcgcaaccagtacaacagtctccaacactgtcaactgcctctcagcaatatatgaaacaagaacaacaacaacaacaacaacagccagaacaaaagtcttctcagaaccaactgccactgcaacagcagcagcagcagcaacctcagcagcaaatacagcacctgcaagggcagggaagcttatatttgaggcctgcgaattctaaaccagaatgaaacaaccatatgaactgagcagttttgacagcattcggtgctaacaaggttgggcctatttgtccttggtacagctgtgtacaggtatttttcggtttaccttaccaattctttccgcaagactaagctaatatgcgtgcggacttgttagtgcattacctttgttgatttcaagcttagcattagtgaattttcttggtatatagaaagaagctgattttatgcgaggcttatatgcagatgaagcgagttattccgcaagggcattgatggatggagaagctgattattatttgcaggtttcgttaaaaacttaactgggacatccgaggctatattgacaagggcattttctttttgatttgaaaatcatgtaaattaccactctagagcttgggaagatagagactgatatagaggtatgtgtacagggtctcatctctcctttggttctaccttattcacttttctccggtctctctgcccttatgcagttgggagaccgcttttattattttttcttcttctttttccttctttgggtagattagaggatgtattattaccctgtcggttcggttcgaggggaagggggtagcaatcatttttatggcaaaaaagcctctgcaaattttgtgaatattgggtttctggtgtatacactggttatggttaatgttgttagaacagtcgaaatctctctcaatgccatgagcttctgtggaatcattgtaatctgtaacggatttctcagttcctataatgcaaaaaaagccttggtagctaatccattatccaccttctgtttattaaatttggtgttatacttctttatacttacttttgtttatggctctctctgtctcacacacacacacatttcattttttctaaacttattttatattgatttgattttaccttacaatcataagactattacttctggtatatgattaattgattcatttatgtctagtgaaaatcttgtttgtttacagtaaaaaaaggtacaagtttaggtcattaaataagttgagtgtatattgttgagtcagtttgtagcacttaatggcattgtacattgtttggttggcatttattacaaaaatcaatatcaaacatgtgaacatactacaataggagggaatggactatatggtgaataagtctaaataagtggatagattctttttctttcataactaaatatgaattaatcaatgcccttgttgtacaaagtacaaacagccagttggtagactatttatgctgaatttgtagggtttatgtggattaccaaaaaaaaattataataggtggtgtttcagtaaaatttttgttattttattcttcaatcacaaaaatagaagtaaaattttattttaaaaaataaaattgtgttctaaccacttttgtttttcaattttaataataaaaaataaaatgtgttttgtaaattttttttccattggttgattttatttaagtcgtgttctagattaggactagggtcagggtcgggtaggagtttgagtctgaggtttgtgtcagggttggggtcggtgttcgagtttggggtttgggggtctagttcgggtctggggtcaaggtcaatgttcgggtccagggttcgggttcgagtctggatttgagttcagggggtcggagttcagggattggggtcaggttcttggttcgggtttggagtctggggtcggggtcgcgatcctagttggggtccaagttcggtttcgggtctgctatttggggtctgggctcaaatcagggcctgggtcggggtctgtgttcagatcagggcctgggtcgaggtttgggtcgggttcgaggtcgaggtttg

SEQ ID NO: 111084 - DNA, 5384 bp, Cannabis sativa
agagagagagagagagatcaaggaggttaaagggagctgtgtgagagagagccctcaaagtaaggagagggacaaagagacgagaggggttttggattttcttttttcagttttttttttacattttttttattttaaaaatgggtaaaatggaaagttaatgtaatcaaaggaattatttggtaaaaattagtagggggaatcaaatttgataagggatgtattattatgcattaataatgaaatttcccttgtgttatgcttcttaatgtccggggaccacatttggataagtatcccttagtactttgagagtagatacctggacaggtcggccatgccatgaggaatgatttctttgtgtaatcttgactttatgttcaagttttagcctttttatgcctttatgagtcaagtccttgttggtttccttgtcggattggggactctaagataaaaaccctcgcgcagcccataaaccctaagttgggcaccttttggtgtgggtccctgcaccaaatgattggttagtatttttatgagtttctaacatgcaccatgagaccctcaaataggatgtcttaatctcatccaacctttgtaaatcttggccaaagtcgtagctagggttgattttttaatttctcaaaaaacgagtataatatatatatcaaccaaatttgcatttatttaaattaatttttaaaacttaactcaatgataacaatctgtcaccataatattcatctttttcttttttaagatttaaattgtggatttcacattccacttcattaacaattttttagattttttttgtattttttttctgattgttgttgtcaggggggtggtttttcgattgttggtgggtgcatcctgatcgatacgggagtcgtctcccttatttttttcactcgatcctttttctttgtgattctattaatttggtaaataatacagtataaaatatgtccatttgagtaaagcttaaaagagatcttctcacgatatgaaaataccgaacttacgagtcgtattatgcctacctataaaattttcaacacgactcgaaaattctaaaattgcgagtcgtactaaggctatttataaaatagtcagcataacacgatacaacttatacatattttttgtatcccgccataagactatccgtatttttgcaggcttttgaaaatacaaatcgaggcaacacgacaagcacgtatttacagttctctattagtgggtagggtatattgacatttccttttcataatgaataaatcaatttgttaggctggattttctggtccccattttcggaccaccacacaatttattttcataataaatccattaaaatatcttaataaatatgtgtgttcgagataactacaaattcgagaaagaaaatggtgttgaaatagttggtcttgtggcttgatgtgtctccactctgttagagacccaacatttaaggggtcttaaagaatagttaaagagtttagttaataatgtttgaaaaaatgggaaatgtatttgtatctagtttgaaaataacgttctctcttaatttgttaggctgcaaataacacacatatttaatattgaaattttttgaaatagataaataaataaaaagttgttaatattgctagaatatttctaattttgtttgttataaaagaatctatagctatcgatgatttttgacttgtaaaccatcacaattcattaagaaggaaagaagttttatcatgtgttaatttcaaataatgatttacaaaatttgtcaacacacaataatatatataaggtagaggttctactcatttatcttaaccgtcactatcacatttattttgttttcatatttttcgggcagattttgtggttctaacttctaatctaagtcagctctccacatcaatttcaaattgcgcaatttttctttaaaaaaataaaataaaaaatcttaatatcaaaatagtatcacatttttttttatttaatcacatatttgaaatgtatcaaagaaaaaaaataaataaatcaataataacatcacataataaaatcaactgtagaattcctcttaacatctataatttatttcttctatcctaagcttttgtatgatccttgagaatttgtaagtgttctaagctcaataaattattaacattattctaaaacattgatcaacgtaaattcccagaataaacccatgagataatgttttgttcttcataataaaataatgaaagaacttttgtctttattataatatcatacatacatacaaaaatccaggcatcatatactcaaaaaaataaataaacaaaacaaaaaaaaaaaaaatcaaaattgttacataaataactgccgttttattcgaactgtgggacatatggatattttttttgtgttttttacatgaaaatttagaaaaatatacattacatatttgggcaaaaaaggtttgtggcgattgtatttaaaagaaaaccgccattttttctcaaaatgaaacgtgccgttctctttcaactctcacagaattcgccaatgccgccaacgtggcgaggaagagggagaagaagaagcggaggagctctccgattccgacactccaaagaacaggtcagacaagtaattcgctacgtcttcgggggtatatttgacataacacctaatctcattctcctcattcccaaccctagaacggtgcgtttcgtagaactctttgtaactagacacgacctttctcgccagcgaaaccttaatctcgtctcggagtttctggttcggtaacacactcgctctttgcttcctataagcttcttcgaagctcgcgttgaagttccggaacaccgtcttcgcttcccccggcgtcatcaccgccgtctgattattattagtttcctttaaagccgcgatgacgtggccccatcctagctcttcgtaggtctctgcgaattgtttgacaatggtttcctgctttgcggcccattcctctcccaagaggtactgtaaattcgatgtgcgaactttgacgatgacgtgttgaagattattggccaaaaataagtacctgagcgaaacatcgttgtattgcttggcttttccatcgagtttgcagaggaggacgagtataagccaggctactcggagtgacatcgccggcgctggtgaatcttcggaatccgagctgtcgaagaatgattccggaatggagaaattcgtcggccttgtccaatctcggaagatatcaatcaggatgttgctgtagtcggcaaggagtgagaggtaattcattacgtagatggtcaagcggtggacaccgccgccttgcgctggaaccgacttcgatgagtccttttggattgtagattcgaagtctgagagaactgcttgaacgaactcggctagcttgacgagcgagttgaaagcttgtgtacggactacggcagttgattcgtacgagaatatagcctcgatttccggccagttctcgaagatcgagttgtacatgtcgagtatgcggaacattttctcgggtgtcttcttgctcttagccacgagttctgggaatccaaacagaagaagtgctccttctttggaaatgtccaaaaagcatgactctctgatagaatctgaggccgagaaaacgtgatcgcagaggatcctctctccattgaagagtgttctcatcgagattttaactgcgtctaaccaattcttgatcctcatttcaattacgtcccaatccgtcttattgatctgagacgagcttaatttctctactcccattcgatatatgccttcatcgatgattgattttctgattactttgtatatgcttatacactccttagcataaccagcagagatcatgcattcagcgattgatttcagctcgtccatggcaacagaagagacctgttctacttcagaaattgaatcgctagcgacacgaatttcatcatcagtagtggctccaccgtcgtcgtcgtaatcggaggtgcttgatctggtggaagcgcgtgaggagcgagtggtggaaactgactcaggatctaagtaagcacgattcatagagagaatctggtaaaactctttttggagtctcttcatggcaacctgcataagactctgacagagaatgagtttctccgatgaggaatcttccgttaccaggaaatgcatggctttctgtagatcgttaacgcagtggatgaactgttgagcttcgactttgctctcgtaaaagagagaagtcactttagcgtagctagaggactctggatcccatttcatgatcagcacagcagctgattcaatcatctggtccatcatggaatcggggaataagctctgccgccgagtcggcgtcgatgctggagtagtcctttgcgacgacggagaggacgacgtagcagtgccgtagcgagatattgaaagagacggcgttttggggttaaagcaaatgctcctcattccttttctcggcattagacaacctgaaatattttgtgtttgtttctcgagaattataagtaggaatgaggggccaggagagagaattagagattaggagggtagtcgtttcgtaaatgagatgaggagggtgttcaggtataaataggcaaaaaaacaagacagtggaacgacggcgtttttaggataaaatattggttgactattatcccatgattgtccgtacaggacttgagaattttcaccttttgagcgcgtaacataacgcgtggcgatcaagcaactaggtttcgtgagctcatgaatggagaaaggtaaatggcggagttggattttgaggggtcaaatttgtaattcaatacaaaatacaattttcaggttgaaatatgacacatcggatcttaatcagtaactatcctctataattggacaaaaataatattaaacattgttcattgaccatatagacaatatgtcaagtttgcgccttaaaaaagaactatgggtaagttattcacacgtgtacatacttattgttatttccgcaagtttctttcttgatgcagaagctaatctacgtatattattatatgtgaacagaacatttagctttcaagttatttttgggtgtttttatattgttaattaaagcaacttatggagaccgtagtttatcgagaaaatattttgagtagcatggctgactttttttttttttttttgagaaaatttatatgcaacttggcaacaacaatttaggattctaatttttctttttttctgatttttttgactttattttatttttatatgttagacatttatttgtataaactgaaacatatatcattatgtataaagtgcggaattaataaaacata

SEQ ID NO: 111085 - DNA, 5952 bp, Cannabis sativa
tttcttctccaacaacagtagtcacaagatccaacaaattgtggtacacgtcatattatttgatatttatataccttttaaataccacaatttttctaggttcaaactcattccaactttcttcaaatgatgcacatccaattatcagatatagatgatagatatgcagtgtgtttaccaaaatatctaacatattatattgcacgtaattcaaggaaatatagagagataagatgaacgagcaaacatatacgaagactaggtgaatatcacttacatagcatggtatgataatcgttcgtacttgtgaccaccctcccctgacttgggctgatatgaacttttcactaatggaagtttataactttctaataactgcttcaggaggcgggggttacctctaaaaacatccaagtataagggtatcaagtcgaaaatggggtcacctacacaacaaagggaaaagaaataaaagactaaagtattgataaagaaagtagtaaattggtaccgcatcacaaagaaagtaatacattgtttcatatttcaaattatgtacgtatagttttacggaaaaaagaaattatgtatgtataaatacttcagtttccatctatccatatcacgcatgagaatttactcagatcataattgaaatatacagtaaagtagcacataaacatcaataaatggaccagtaattttcaaatggaagaactaaccgacagacagatcactgaaatcaagaaggtgactaggatgccatgatttttccattgaagtgtcatcacagccattcatggagctattacatggggaactagcttctttcaaagcttcactcaatttagaattcttattaccatgttccatgtgaatattgtcgtccataatatccgagtgtatccaggagaggggtttagaaactttgcttttgtcattttcaacctgaaacaaaaagaaaaaaaaaaggaagggtcaagatatatagaaacatctagacagtggatcattctgacaaagtgatcttgacatgattaagcatgtggatggatgagtaagagacctcaaaagcaaatagcaattcagcaaaattatctgggatgtattcatcaactttcccaattagaaagctaggaatcggatcccccctgcagaatgtaactcaaacactttagtaaaagtttcacatcaacccaaagaaaatctatcaacaacaataggcaacgtagcaaaagcttcatagatgagtagcattcaagtacaaacttcagcatctttagtcccagatgaccatgtgatttgagcaaaaatgtataagagatacaggtttgtttaaaaagcatgaactctttaaaaagaaaaaaggatccctccctccaccccttcctccccccctctctctctcacagacacatatgcacacgcacacagacacatcattataaaacgggaattgtaatcctcttgagtgtgtacatatagtagtaccatgtagtcaagcggttagaggcatcctttttcttcttatttagagttttgacaaagatgtcccattcagctggcatgtttaattcatcaaaagcttccccataaccattagtatggttagattgtactgcactttcagtatctgataaatttgaattacgagatggaagtggcaacaaatgaaggtggcgtagctgctcaccgagaaaggaagctaaatttagctcctcttcccagtttagtttatctcttctgcaaaaggaaatatgagaaaaaagggctcaagtcagaattatgctacctacacacctacagataaatatcatcaaacgcgacttaaagaaccaccaactaaaataacttacaattgtgcaaatatttttccttcgcatctttttgttatcatgtatggccatatcctagtgcccccaactaaattgaatgacgtagtcgtcatcccagcttttctatagtcatattgttgcttactccatatgccaaaaggaaagctaccttctttcttcactgaaagaaaatcacacttggaaataacttcaggaactccacttccatcccaaggtacaatcttataagacccattttcaaggtaaagtatcccactgctcaaaacttcagggatatatttttgcagaggagagttgacttcactaagaaggctgtgaaattcaagctgtgaaatacacacaagtaaaaaagaaatatacgtacaaaagatgcacacacagaaatataataaacgtaggtatataaagaagaagaacaagaagaagatgaacctcagtgcctaaaccataaagtgaggtttccagtccttcttcaacaaaaattttcaccacacaattcggcatgagataaacctgttgccaatgacatgtcagattctttacttcaaacttcatttgcatatatatcgatatgtatatcacaatagaagttataatcttgaatcatagtaaactaactcacaggattgctaccagtgccaacaggaagcctttcaaactctgaagggcgaggcaaattgtggaagacacatatttcagtcatgcattccaaccatctgcctgcatctagtgcgatacatgctccctgtaacattaaaagtaaagagactaacaacaggagaaaataagtatttcaaaaaaataaaatttactaaggcctttaagagaagttctagttacagttttttatttttaataacaataataggggctaatatatactcagatgaacagacagggcaacgaaaagaataatgggtggttcgacaatagaaagaaattgagtaccttccatattagctctcgcatttctggtttacctacccaaagcctgtacaaccattccctcatttcccgttgtcccatgcaattacctgagctccaaggagaattatagtggtctctctctttatcaagaaacttagttaagaaatctatatcataagagaaaccatttttccacaatttgtaatttttggcaacaacatgatccatttttccatattttggattctctccaggttcaattaatgtccttgttacttcccttaaaaggtcagagcaattcaaatcgtcattatcataagagatgtttttgacaatattctcaaaaccatcatcatcaagtgcaagcaaaccagcacggcagactcccttatgacggtatccaggtgccatatccaaacaaacaaattcaaagtttcgagaatttacaaaattctgtgtaacagcaatagttgtttctagatttaagacacaatgccaccatccacttggaacgtaaattgtctccccagggagttgagtacactcaattggtttatcttcatcggcaaggagtggataaaaatctaaccaccactgttcacatatataaaattcctcaagggtaaatttataaggcaaagaaagatacccaattacagaaagagctagagcatttgaatggtatacctgcagtgaagttggagaatcaatggcgacatcaccatcttcttcatttacatgaaccgttacacctaaaggaacttttccaggagggtacaatgcccatctgtataaaaaagattaccaagcgctttagatggataaacaggagaagattgtatagccgattgtggattatcacttgggatagtttatcaggctttggaagattgtttcagagaagccttggttgttaattaatcaaactagaaaaaaagccagtgtgcaaacattaacccaagtagaaaaaaagcctagtttcaaggagattatattttcaaacacttcacatgaccacattcaacaggacagggctaaaagtatactgcttttaagctgataatagacctttaccttttacgaccgcataaaagggtattccaagcactggtaagagctggatcaacatgccaagaggcaccagacctctctggtccaataatgagccatctaaatggaggtcgctgatctctgtctaagatatcaaaaaagtcttcttcaaaaagatgaggcacattataatccttcaacaggcctggtgctacttccccaaactgcccaaaaattatactagctcaaaacaaaataaaatagaacatactcacaaatgtatgtgcgtgtgtatatatatatacatagagagagagagaggaagaaagcatgccatatacaaatgcatgaccgtcaatgtaccttgtcgtcaaaaatatacaggggatcttcatcgtgctgcagtttcgtgtatgagacataatctttgaatttcatcgatattttattcgaacttctctgagaaatcttgaatgatgtatcgccatagctcatcaataactggtctgttgtccatgtatgctttgctggccaagtgtcagccaggccattaagcaaaatctgtttatatggttcaatcgctgacaatgtgaacattacttgaaaagaaagaaaaaaggactactaacgacaagaagtaaaaggccttctccataataaggttctgttttattagtgttagtaaaaaataaatttaaaaaagtcttcccacttaaagaaaattgtgatgtatttcaatgaagtgttataatgtccgtgaaaaagcaaggtctctattttcaaggtgcaatgtatacccataacacttgtaaggaatagggaagaagctattctaccatctaaattcagtatactcttgcaaactcaaaaagtaaactgttatcaacataccggtttcttcccatcatactcgcgatagaactcttctaaagaaggattttcctttctatccacatttcccttgtcaaaatcaaaacccgccaatgtggtatagcacctgtatagtcttttatagaggaaccaagagttgaatcctgagacaaaagtaaacaggcaatggaaaaagcttattttagtaagtactcaattattttagtaagtactcaaaaaaaaatatataaatatatatatatatatatattcttcactgatcttcaaaacgaactaaggagaataaatgaataatacaaaacaaaataatcaaattcacaacataaaagactaagatgcggccaatggtctttacaaaaattattaattaccatcaaaacgcaattgttttccgccaagttcatcagtttctccaactagatgccctctgcatccaaaaatatataagttgtaaacaaaatttaacaaggagacaagcgaaaagagatataatttaaataacaaaaagcacaaatatgtaatgatatgctaaatttcagagacatacaacaaatgcaatgtggttcttttccaggagcctttgtactgaattggaccgttgagacttcgaaaacattgcttcatccatagtggttcttcattgcataatatgtacatcacactggaaattaaaaagataggaaacaaaaattacactaacaatttccataacgtcaaagttcctattcggttctcgctgattccacaattcattttccaaacaactaagttttcagaagaaatgaatacagcaattagggtaaggaagtaaaacaaacctgctgacacaagagagacgagcgaggtcgggaggagtgagatactccaagatggcgcagacgagttcatcggggagaactcggagatctccaagggcgggcgggcggcgatcccgtagctcctccgccggggcgtcgggattctccattggcgaaagtttattctttttggaacaatccattagaatgttttattagtacaagagcagagacaaactaaatcggtggttcaatggcaaaaattgaaacgtagcttttattggtcgttgattttctcggtaaagagagctggcttttgcttaagatttaagcttgcttacgctaaaattacacgcttttttttttattttttatttttgaaaagtaacatctatagataaataaaagttaattagaatttttgtctctcg

SEQ ID NO: 111086 - DNA, 2329 bp, Cannabis sativa
actttgttagtagatcttttaacatgacaaactttaatatcattcaaagaaaatagaagatttttgtactcttggacaagaagaccaaaaatagatggtattttaacaaagttattaagagattgaattgcaacaaaggagtcaatttccaccacaatattgttcaaactcttcctctttatctagtttagggtctccttgatactcaccatctcaaccattgttacttgtgaaccactagttgaatacatagcaaaagcctccatgacaatactattataattcctagtaacgaaacttgtaccgaacgcgttttttggtgaaaaaattgctcaagccacattaatcttgattatatctatcacaggtttagtccaataatctttgctgctaacaatatcaggttcgtgaagcaacgactcaatgcgacgagactgagcatatctccattgatcaagaatgtgccctcattctttatttaggtttcatatcaattatactagggcacttatgacatatgtaatattattattggtggtatttaatatcggattttttaatttaataaagagaaatactaaaaagtattattggtatctatcaccatcttccgtgttatatatactgttattggtataattaattatcgggtctcatataatttaagaaaatagtttttagggattatcacgaaccaatcataaggtgtcggacaccacttgtactcaatagcaatactctttgataaagattatagagaaatcttaactaattataagatgtcaaattatagaggtgctacacaacttagtgtcccatagcaatgctcaatagtaatacaagataaagtgaaaaaaaacaaaaaaaaaatatttgtaaaaataagtctagtgttgtttgggaaaataaaataataataataataattatagtgtaaatattattgaaaattattatattacaccccttctataaagacatgttctggttgactcttatatatgtgttggtattgaggaaaaaaaaataatataactttttttatgatcgtgtatgttgtagatatttaaggtcagatataaatttttagattttatgaataatttatcgtattgaaaataagattcaaataactacttactacgcgtataagaaaaaataattgcgcgtgtaacaaaatatttaaactttattttcgtcatcgtaaactatttaaaattttcaaaaaattacaaatagttctaaataactacaacgtacactaaaataactaaaaaggcctccttgatgctaaaacaactagagagtctaccaaaacacccttttaaggagtgtcctataattttacccaattttataagggaaatttaacttttcatgcattcattaggtaaaattagttccctaaatttatgctaaggtgtattggttatatatgtcaacatttctatttttctcataatacccatccctatactctcctccttatctttcttcactcctttcaccctcttcatcctcctcccgattctctctttctcctttatcaaagtcacactaaaattaccaatgttacctacatcttgtctcttcaatgtttgatactccattgaaccaacaccaaagcaagacattgttgaggcaccgaagaaatttgagaacaatcatgggtaagtatttttttttaatagttcttaaattttgggttagaatgttgttttcataattgatctacgggtaattgttgttattttgttattttgtgtgttgaaatagttgttgcgtgtgaatactgcatttttcttggaatctgctttttttgtctagtccgataggacccaatatgggcctggtgctagtttgatttggttcttggatctaaggacagagatgaaggcctgacgagcctgatagggggacgattatagtctaatcgttattttcggtttgggacattgatgatgggccgatgggtggctcaatacagtctgaaaatttgtggggccgtgtgcgtgttcgatattctgtctgatgtgatgtccaattgcatgtgattttgtggcttttttaaacacttttctcttagcctcctgcatttccgcttccaaatccaacaatttttcttaatgtggcctggcttgccatagtgaaagcagccatcaattttgcttctagattttgatctacctctggacttgtcatttttatacctgctttctttattttgacttctcccgctattttctaaaataagggcttgagactccacacctctcgccttgttttgcttttcaaatgaaaccaaggcctctgcaatgacttcatactc

SEQ ID NO: 111087 - DNA, 2808 bp, Cannabis sativa
agagagagagagagagaatgacagagtatcttccttcaatccttcctggccatgaaacttcaacaaaatttgactctttggactgtgatgtgtgaactgtgaatgaatgaatgattctcttcatttcacaccattgattctctccttccaaatatggctataacattatctcactgtaactactaccaccaccaccaacactctttagcttcaagaaaagttcccacaacaacacgactcaacgattcaaaatccaaacaagactccgccgtcgtcgttaataataatccaaagaaatcaaggactttacagacctcaattcttcgaactcacatcaattctgggcacatgagggatgcgatttcactcttcgagaaaataaaccattccgatgcgtatacttggaatcttatgattaggggttttgtaaataatgggtttttctgggaagccatttgtttttatcgtagaatgggaagtgaaggggttctagctgataatttcacctacccatttgtgataaaggcatgtggtgcttcgttttcgttggaagagggagaaaaggttcatgggaagttgtttaagattgggttggattcagatatttgtgtttgcaattcgcttatttctatgtattgtaaacttggttttgttcagtgtgcagagaaagtgtttgaagaaatgcctgtgaaggatttagtatcttggaattctttgattagtggatatgttaccgttggggatggtagaagctctctggcacgtttgttggagatgcaaatgcttggaattaagccagacaggttcaccatgatcagttctattaatgcttgttctatagaatgtttaatccgaaatgggaaagagattcatggccaggttcttaaatgtggttttgaattggatattatgattcagacttctcttcttgacatgtacagcaaatgtggaagggtggaccttgcagagagattgtttcatgagatttctcctagaaatgttgtggcttggaatgcaatgattggcgggtatgttctgaattcgcgacctttggactcattggcatgcttgagaaagatgaaaaaagatgataacttgaatcctgatgttattacattaataaacttgctcccttcatgtgcacagttaggagctttcttggttggtaaatcgattcatggttatgccattagaaaagggtttctccctcatattgttttggaaacagctttgattgatgtctatggggcctttgggaagccaaaattagcagagtatatatttgatcgaatggaagaaaaggggttggtaacatggaattcaatgattgctacgtttgcacaaaatgggtggaataaggaagcattaaaactatttcaagaacttttgaataagcctctcataccagatgctattaccatggcaagtgttgtaccagcttattctgaagtatcatcactcagagagggaaagcaaattcatggttatatctcaaaatctgaacacaataagaattcctatattttgaattcgcttgtctatatgtatgctaaatgtggcgaattacaaactgctcgagaacttttcgatgggattccccaaagggatgtgagttcatggaacactattatcatggcttatgcaattcatggattcggaaaagaatcaattgaattgttctctaagatgagagaccagaacatagaacctaattacaacacctttgtttccttgttaacctcttgcagcatatccgggatggtcgatgagggttggaaattctacaactcaatgaaaacagattacaacattgattgtgggatagagcactgtggctgtatccttgatcttcttggtcgagcaggtgatcttgaccgagccaagagttttatcaaaacaatgccgagcgcacccacagccaggatctggggatcattacttactgctagtaaaaaccatagaaatattgagcttgctgaacttgttgcagaacatatttttcgcgtggaacatgataataccggttgttatgttttgctatctaatttgtatgctgaagttggaagatgggatgatgtagaacgaatcaaatctctcatggaacagagaggattggataaaactgttgggtgcagcattgttgagaccaaatataagactcacaggttcattaatgatgataggtcacacattcaaactgacatgatctaccatgtcttaggtatactcttgagaaagatagaagaaaacagaagtactcattgcagcatcaccaagttcaggccaatagatttgaagaataaaagatcaaagtcctcagattatcacagcgtaagattggcaacctgttttgggttgatcagtacaaaggttggaagccctgttgttgtgagaaagaacactagagtttgtaaagattgtcatggtgctataaagaagatctcagtgatcaccaaaagagagataattgttggggattctaaggtttttcaccatttcagagatggtaattgttcatgtcgtgattattggtaacgtgaatgaacacttaatacagattacgtacatgttgtatcaatcaaatgtctactagcaaaaaaatcttagaaaattaaataacaaaagatacagattttttgtatataatataaaacacattaataattatatgtatagtaattactataatttaatttgatagtacaatactataacttaaatctttccccctaaatctttaaacgaaaatcattatttgattatcaaaaaagatattattgttatgagataatatgtatttatagagtt

SEQ ID NO: 111088 - DNA, 6855 bp, Cannabis sativa
tttttgttgttgtttgatgttatttttatgtaattttttttattattttcttgaatctacgaaaaaccgtaaaaatataaaaaaataaaattcttcaaaggttaaaaatataatttttttttttttaaaaataattaggttaatataaaatttaaaaaataatttgatttgatttctttttctaaaaccccaaaacctccgccgttctaagccgctttcgccgttggccgtgtgattttcttcttcgaggatcagatttggggttggtctgcacttcacggcaagaaataggaggcctctttcccacgccattgttcttttcttcctgttctgaatctgagctcatttggtatttatttctgtttgccttttataaatgaataaataatgtgttttgattgaatttcaatatattatctcgagtttgattcgtacggattttcagcttcctcgttttttcttgtgatttccttattctcgggttcaacttcgagactgttcggaccctaaaacccctaccaaatacggtctttgtgataattttcaaggttaattttgttttgatccatttagtgagtgaggtggctctaattttccactaagttcagatgctgtgtttgatccctatgagcaagaacattaattattgagttctcttgtgtgtatttatgtatatatattttttatacataattattgagttattactggttcttttgattatataatatgttcttataaaagcatgaagatttacaaaatttttgtgcacatgaactgtgtgatgaaattccttaataagtatttgcttcaaactgtttgtgggttatatattgttattgttgtgtgtgtgttattgcttatattcataactttgctttcgatttaacaggtttcagattgcttcactacatggaatctctcatgggacttcattgaccgcagacaatggagttatcggaggagtggaagtccttgttcccaatctcagcagtgtttaagtctccactccttctttcaagcccttccattaaacccattttaggtcctcttgtctttaaccccatacccaatactatatcatccctttccttctcttcttctcttttgcctccttcccatccttttccccaactctcatttcctcaattccttctcacatcttcttttgactcctttctaccaccctctacttcttcctccattgtttcagtctttggcactaaccatcaccaaactaatgttacttctaatttcttaaacaatcgccttgagttacttcgttgcccaggtacaaacaacctcattatcttttttcctactggtgaaaactcagaccaaattggatttcttcttttgcaagtgaaagattcatgttctaatgttcgtgacaatggtgatgttttcatggctagttttaacttaaagcatcagattttgaggatctcagtaaaccctgtcttggattctggttctgagttttcaacttcgagagaaaattcgtttggcactattggatatttgtttgcttgtacattgtactctattcattggtatgttataaaagtcaaagaaattggttcagacactgaggttccaagtttaacttatgtgggttctaaggtctttaaaacttgctgcattgttcatgcatgttggagtccacatttaccggaagaaagcattattttgttagagaatggagcattattcttgtttgatatggaatctgccttgaaaacagatggtttgaatggtaattgcaaaggaagtagattgaaagtttcctgggaagattcaagtcattttggagatcataagtggctgagttgcgagtttagctggcatccgagaatttttattgttgcacgttctgatgcagtctttatagttgattttagatatgatcaatgcaatgtgaattgcttggcaaagattgagatgttgcatatgtacacatcaattggaaatgaacgatttcaagctgtgaaaaaggctggacctgacggtttccattttgctctagcttctgatagtttgttacttctctgtgatgtgcggaagccactaacaccagttttgcaatgggctcatggtgtttctaatccgcgccacattgatgtatttaggttgtctgatttaagatccaacttgcaggatgacatttacaagtgggcttctgactcaggtttctgtattatagtgggatcattttggaattgtgaatttaatctcttctgttatggaccttcatctcaagctttaaatggatcaacagttaatagagcaactaagtttgacaaatcttattatgcatggggatacccgtcgaatctcttgttgtcgggtcatgtgtgtccctgtggaagctgtcttgtgaaagaagagttcttaaaagatgatcttccagcatggattgactggcagcggaagaaagaagtaattttaggatttgggatcataaacaaagatttatcttccttggtttcgaaacctgatgaatttggtggttttatgctggtaaggcttttgtcttctggaaaacttgaattacaaagatactctgcctcatgggaatccataaaacttatagaagaaccccatgaaaagctgtctcagtttgaagattatttaatgttcccaccattcgatgaggaatacaaatttcaaaaaacttatcattaccttgatcttggctaccttaatagctatttgaatggtaatcttgatgaaatcatagtttcgaaaatgaagcttccattgacaggctcaggttcagttgtaaaagaatattttagtctagagtttcatgaaatattatgtgaaaagttgaatttgtgtgggcttagtcgatcacggtcatctcctacagttactgttgttttcagagatatcaatttgccatcaagtattcatgaggttgctttgaggagattgtgggcagacttgcctgtggattttttacagatggcattttcaaactactctgaagtccttgaagtgcttgtggctcgtaaccgaatgtctttggaatttttggctgtaccagaccatcctcaactgcctcctttctttcttaggaacccttcgttgcggagcaataagtggtcacagaaagttaaacctcccgatctccttgtcggtccagtgcttcctcttcctattttacttgcccttcacgagtttcataatggttgtcaaagtacagaagagcaatctgctggtttcacagcagaagcagagctcagacgttgttgtgatgaggttaagcaagtagcacgcgaagtggctaattcagattctggttctgaactacacaaagatcatgtcatctcccttgatgatgatagagaagagaatgtctcacaaacagcaaaaccgttctttttacaccatccgggtgcatttcacaccggaacaatcagccattcagacgagcaatctgcttacaaggatgaggtatttggtaccttgatttctaaagtaagtgaagagcatgcttctgttgatactacggaaactatggggttagaatttttcgatagtgtttgcccaattaagctgtcgtttgatgatacttttgctatgaattttgagatgaaggagttgaaggcatacaaattattgaagaaacaattctcaaaatggcaaggtgattgtgatctatatggtcaatttgtgtccatgactaaacctgtaacttaatatattgtaacttttgttttagatttgagtttgattaattgacagtaactgtttgaaagttcaattgtatatgtatgtaatacttgacgaaatagatgaaacaaaggaatcaaactcatctaccaaaaaaaaaaaggaatcaaactcaaaatgggtttgttgataaagcccttaaattttagaatgatttgcatttggaattgttgattgtgtttcttttctgttatgttgcatatcattttgctaatggcctaacaagaaaagaatgaaacaattatagaacttgatctcctaaaatgcccaccaacgttggcaggatcagggccggtcctaggcataagtaggctaggcttgtgcttagggcctacatttttcgggagctcaaaataaaaaatgagattacgggagctcaaaatacaaaatgagaggttttattagtcttttatttaagtgtattgtaaatagtaaataatcacatcttatatcttagttgattagtacgtatgatacattattaaatgtccttaggctcatatattcttagagtcggcctttagtaggacacatttattcgagtcttatcctatgagggctacttcaaacggtgcattcaaggagaggttcctcttgtactggacttctagcattcctcatgaagaagctgctaagacaaccacatgtgattgctgagattatcgtaagtttctcgttcttattcttgcttgaatgtaatgtaactgagtttatagttttgtcacgaacgattattgcctatgaaaactaggacagattttatggaagtaaattatgtggttcaaagtgagtttagcttgaattttatagtcattgacagcttacaaagaaactcaacgtatctagatttttgatcaagtctttcttaattttatatattagtgtcttcatgagtgcagtcctttcgataactgtcttccctgttttagcttgtattttggccgagttgaaacttttagccactgtaggattgttatgtcacctgcagcagtcaaatttagtctcttagggtatgtttggtacgtcgtgttgtattgtgttgtattttatcgtgttgaattatattgtattagtattattatataatattatgtttgatattgacttgtattaataactcgtgtaaaattacattatttttaccacaaatttgatctcaatcccgacctgggtctaatgcgcctttgatattttggttctccattttgagtaacattaatcctccttttaactcccttgaaattagcacacacgatcatataaaatatgtgacaacatatatttaaattttagttcatggatttttactggttttatgagttttggacttgtttttttttacctcattatattatttacatacatagccataaaagagaacctgggtctttcttagtttagactttagagggtttcatttattaaaaagattcttacttttggacttttagatcagtagtgttgtgtttgaactaatcaatagaaattatagatgaaaatgacaagacaagtaaagttgccttacttagaattattggctgagctaatcatatatttattggcttagcaagttagcatgacgaatctaaattgacttttcaagcactaaggaacaatattatgatacaaacgaataattatttacatcgtaataattaatacaatacaataaacctaccaaaccagcactgaatttcttaccgaatctgatctaataacacatagttgaataatcttagccatgttaagttcttaatcttcataacataaccttttatttccactttcagaaaagaacacaaatgagttaaaatccacaccagccgcccaacaaggaattatcttatagaattgttgttattatcttcttctgaacagtttttctatatgtcattagtcaagaattagctagaaaaggccaaaaaggaaatggaaaattgcagtgtcacaaaagaatacattggatggggatttgactagttttattaccttagggtatttattggaccacatttaatattcatattcgatatctaattatatattgaatattaaattttattatccgatcagattcagttaatttcagttaaccgattgattcaacatccattgaatgtatttcttgtatatttttttgaatttgtttaaatttatccaatattttaaacctagtatctttagatcggattgaatctatccaaggtattagatctaatatttattggattgaattagatccatccaatctaataaaaaaaaagtaaaagtttaattttaatttttttatatccatataaagtatgacaatataaaatttaattattcatctaaacaaaataaaaatattaattagtttgattggatgttggatgtaatagatttttatacactccatcgaacatctaatttgatccaatctaatattcaaaaataacattcaatatgatccaacaatcacatttacatatttaatatttagtggtcaattataattaaattggatcaatttatgcactttcctaatattgacttaataaaatttctttcttcttgtttctattaggcttagtctagctatcactgttttaaccactaactctatcaacaagggcatattttgaaattttgttattagttctttccatagaaacgatccttttatttgattgatagagacaacaatcaattaattataacaaataaatgattataataaatagaaaaaaatccgaaactaaataatattctacttagttataataataaaaaagtgttctttattcaaatgattaagcataaacaattacaaagtataaaacccaattaagagttttccctataaatagtcttagaaaaattgttaagaattaagccatacaaaaatatcatccaaacataataatgatgagaggagatcacacttcacaaaagttagccttttctttcattctgttgctcattattgtcttagcatcatcatctcaatctgccttggcatccaagaaactaccactcaatgaaaaatcaccctgcaagagatttgtggtctactaccatgacaccctcttcaacggcacagatgcagccaacgccacatctgcaacggtagctaac

SEQ ID NO: 111089 - DNA, 3686 bp, Cannabis sativa
atgttctctctttcgccgcatgaagaaccagccttaccaaccacctttctccggtcacggacgacccaacggagggcaagtctgagcctcataccctccaaaacctccaggtattatttcatcttgttcttatttatttatttatttattttgctgaaactctgattctcagtcatcgttctagatctctctccttctttcttttctcaggttgacagagctgatttgtggcctttcgtcggtcacggtgcttctaggttcgtggtgcacgaagcttcgtcattggtggtccttgatgggttttttttttgtgctgtgaacctttgatggtgtattaatttgtatattttgatacaaaatttttagaatctgattgtaaaaattgtttcaaggaactgatataaatttttttttgagttttttttattgtatttatgactgttaatcccgtttatttcataaaaattgggatgaaagtctcttcttatcctggtttttatgtaataatcaggataaaaagtcccccttttatcctgatttttcaaacatttgttatcccactagcatatatcccaatttttattttagcaaaaatcgggataaaatgccttaaaaatcgggattaaaggcctttgttcgggattaaaggcctttgtttgtagtagtgcatgtaggtctagttcctccacttcaatgctctgattaacatgatcctttggagggaagggctttccatcctcgaacgttaagatcatgtacttgagtacgtggccatcgttttgcacgactctgacctacagattgattggacggattagccctggggcatgagcaatcctttctttctattggggttggtcggctgctcttcagttgtcctttggaacattatgtgcaggtattctgggagggtcacccattatactccttttgcattttactggagcaaatggtcgacctacaaattggttaaaaaatttagcaggagggttttcttctgcgaagttagtttttgcttgtagtagtacaagagcttcttgcatttgatgttaaacttctttttggtctgctaatctcttttcgaaatctacgagctctttttgtagctgtattacttcagggtcttgctcataatattcttcacactccttgttgtaatttttgtcgtagttaccttggggtccccatccgccaatactatggtcagaatctagtctcagacccaagtcttggactcgactcccgaatcgaaccccaatcctttagccttggacttggacctcggtgtcggccctcggcctgaacctaacccactttctctcaccttataaaaataaaatttataaaacatacatttaattttatttttaaaataaaaaaaaaacacacaaaataactacagaacatatttttgttttttaaaaataaaaacttgatttttaattttgtaattatttaaatacgaaaagacaaacatattagcgaaggcacctaaaacaaacatgccttgtatatctcaataaccttgatatacaattctcacacaacactaatctcattcaataagtgttgtgcaaaactacaaagtacaaaacccatgtggaagacacaacacaaccaaaccaaaaccaaaaccccacacacttcaaactttaaccaatactaaatacattagttgtgactaggactggcccaaaccacaccgacacaatattttctttttctttttttcttttcttattattttagtaaatagaattgctaaagagcactattggtaattctcctcggtgtcataactatattagtataactaaatatcaaatttcatataacttaagaaaataatttttaaaaaatatcgttaatcaatcgtaggacactacctataaaaattgtcaagcaccatcaatactcaataacaatagcgtttaacaaattatattattatattattaccctgcctttcttttttttccattgcggctatataacactttctgttctcttctcttctctctgtaccgcactcacatataaatacgtgctatccacacaccattcttcttcattcatttctttcttcaaaccaaaacaacaccataacataacattgtaagtatataacaaacaaacaaagaagctgaacaatttgattcagtttctatggaattactaagcttattattacctagagttaaactctgtgctactctcctatgtatcactgcttctctgttgctcaccattgttaaggctgaagatccttacagattctttgactggaatgtcacttatggcgacatttacccgctaggtgttcgtcaacaggtacctatactctactgctattattattattattaatttttaattaattatttcgatgtgatgatctgaatgtactaatggaatggaactcgatctgtttgtttctagggaatccttatcaatggacaatttccaggccccgatattcattcggttactaacgacaatctcattatcaatgtccacaatagcttggacgagccttttctcctatcttggtaaactaaaatcactctctatttctaatcttactttttctagactagattaatgtaaggtagcttaagaaaattgtagttagtgactttattctcagatctgaaaatttcataattgatattcccttttcacaattggattttaaattccaataatcaaggcaaaaatgtaaagcccatccgtgactcattttccacctaggctatatatcttcttggtcattatcaaatcggttgtcgttaaacaaagcctggttttccaagatgggtcccactaatagtgtcaaaagtccaatctggaccagtttaacatttcaataaaccaacaggattaatttaatgtggtatcattagtttagtaggaaatattaagtatcaatccattaataataaataattattagaacagtgacactttgaagttcattttcctttatttaaaacattattattttaatggagaaaaaacgacagctggtacaaagggaaagagcgctagaatccaaatccttggcagaattatgagtatgagaggtgaaaaggcaatagctttttcaattttccaatttcgatatattcctcgattcctgctaatttgatacattttgagaaaaataatatatttatacctcactcaaagtcaattttttttattttattttactgaacatatttatattacactaaacatccagatacgaatagtagtgtgggggcttatgccttcaataaagaaaaaattagtcttaaaatatatcactactagtgtttagtactttctatagttggtgatacttaatgatattttttaaaaattattttcttaaattatataaaatttaatatttaattataccaattacaatatattaccgaataaggtactagacaacacaaaaatcttaaatctatcactgtatacatcaccattaaggccactcaaaagactaatttagtcttacaaataaataaaattaggtgaattgtctcgtatactattttttaatttttttaattatttttatggtttaggttgctcaaatagtttctatgtgggttgcgatttagtttaggttatttcgttagttgctatgtagatttccgtaaaaatacaaagaaaaattactttaaagtgta

SEQ ID NO: 111090 - DNA, 3070 bp, Cannabis sativa
catattagtaattaagtttttatgccatatttattaaatcttacatgttttttttcttcatatttttgtaaataacccttgcccttatgcatggcgatgtttttgtacctataattgtctttgtgatggttggaggcacgtagcaatccaagtggtccttttttttttttctgtacaaagactttgagatgcctcttaaaaaaaacagttctggttcttgggtgtaggggaaacaaaaaatgcaaagtggtatattatcacatagatttgaacacttgcgcacatgatcaatcaatctactctataactgtaatagcttatcctcataaaattttcacacatgctctaacaactataagcacaagtcatctccctaaatgttggaactgacttccaattatcactacaaggaatttgcaattgcaacaaaagtgaatttaggaagaatcaaatttattttgtgttcagcgcctctgcttacttaccaatgtttctctcaagaaaaatggatataacagatcgcgggagcagcaaatgatgatggtaagacacccagcagcacaaggcaatactgatggtcctgctgcatatgcagataaagatataaaaacactaaaaaccacacacaatgtaaaaccaataattgaaaacccgccaaccgccattgacaattcgcaaagccaattctatgccttcgctcttttctcaacatgtaaacggataaacatatagaaataatcttaagcaaatgaaataacaatatctctattggctatgatatacaaccaaaattgtaatgaaaaagagaaggcagaagaaagaaattacatatcccttggttatttgcctatgttttaggggtgtcatgatatgaatgcaagttatacaaagctactgccttttttgaagtcagaaacagaagcaccagagtttcctgccttaaccatgtactaatttaagtccatattcaatctactcttttatgggttttagggatcatgtataataaggcaatactaatatggtcctgctgcatatgcatataaagatctaaaaagacaccgaaagccacacacaatgaaaaaccaaaaacccgccattgacattttttgcaaagccaatttctatttcttggttcttttgccaacatttaaacagataaacatgtagaaataatcttaaacaaatgaaattacatatctctattggctatgaaatacaaccaagattgtaatcaaaaaagagaaggcaaaagaaagtagccggcagagaagaactggatggtttgagccccacattaaaagcagtgaacaaataaatggccttggctcagtaattagagttaaaatggcctatatatattaacaaattcatatagtttgacaagatatttgaaaaagatgatcctcctcaacaaaatttggtaattcctaaaacatcttaaaatctcaaccttgtgatcaaaatatccaaaacatttaaaaaataaacagaaaagaaagactgcaacagttaaacaagaaaaatcctagcttgaatgactacaataacttcaatacaagtttactctgttcataagtcaattcattcctcttgttttgaagctccattccttccatgtgcagcttcctccacttattctccaattccttcaacttggaacttgccatcaaaggaagtgcttgcatcaataagttttcagagatggaacttacaagtttcagagagtccgtcaggcatggatatttagacgagaagtcatctgcttcattagggttggtctttacttcactatcattactcacaatctgcttcgacttgttcttagtgcttttaccactatcatcactaccatgaccattaatactaccccaaatcttcttggacaactcaaacgacttgcgatcatgaggctttgaaagaatctcgcctttttcaactttctcagcattactaaaatacttcttcttcaacctggatatcttggtcgacaactgcctcttttccacatcgacgtggagatttttcttgataaaatcaagaaaagcgctcatatcagcggtggggtctttccctttcttcgactgataatcaatcaatcccttcaagatctcaatttcatcgtcgtcactccacaatcgctgatgcgaggatacctgtttcaggtcctcttcagctgtgcccttcttcttctttgagttaattccctcaaggtctttctcagccgcacgcttcggcgggggagtggatgctggggcaggaatcgatacattggccttcgtgggctttttcaccttagactggacagagtcatcgatagactttgaaggcttgatagtgaagtcagcagtagtcggcgaaggtggggcggtgtcgtccgagacagagtccgaatccgtctccgagtcggaaccagagtcagattcctctttggtgttagtcaatgaaagtttttctttttcttcttcttcttcatcatcatcatcatcctcctcttcatcttcgtcttcttcgtgttgactagatcgttctccattatcggcctcggctgcgacaccattctcttcttcaatgccggcttcgctttcagaatctgactcatcagaagaagaatcagcaggaggtggtgcttccttaagccgcctgggagccatgggaattgtattcaagggagtgagagagatagaaaagaagagaagagagggttttggttttagttttggttttgcaggaacggcgaatggagttggagtggagaagaactgtatataaggcttttctttagggcttccaacaagcccacgtaggtggcgatattaggtcctctctgatatgaatacgtacaggcccattagattcggaaattaaatgataaacttacacaaatattagaatttgggttaatttttacaaaaatactgtcacacgaaaatcttttcaaaaatactgtgattttgtaaaacaccagtgaaacacagagcagaacaacttaaaacaacaatagaacaactaaaaaacactagtagaataccagtgaaaacttaacacggtatactgcagtatgaaactt

SEQ ID NO: 111091 - DNA, 2067 bp, Cannabis sativa
aacatatagttgtgttcaagttaaagagtttgagcttttgttttgcatgaaaaagagttaaagtttgattgatcatactaacacacataaaaatgtacatgtaatttttgttaaaaaaatgtatatgtgatttaatttaccatagtcaaaactttgagttttcataacaagaagtagaagatgacgatgaatattatggctagtttttctactaataaaactgtttgtcaaataaaaactcttgaaagtttctttttttttgatgaacaaaacaaaactcttcaaagttgacatttttatatttcgtggggtagtgtcaaatgtaacatggaatcacttcaaaaattattaaaataattcatccatttccagctgcccaaatcaatccaaatacaaacgattcctctgaatccacgttctcttccgatcccttttaatacttttaacgtaagattcaattattgtttccttcttcttcttttaataacgtcagatttatttgcggaggactcaaaattttcaacactgtatgatccatggcgtctctaagcttcactcatgtcaaattcaaaaacccagttgctgatttcgccagaactcgtccaaaaactggtttggcctgctcaaatagagttgggtttagagtttttgcttctgagacccagaaagagcctgatcttagtgtgactgtaaatgggttgcatatgcctaatccgtttgttatcgggtcgggtccacccgggactaactacaccgtcatgaagagggcctttgatgaaggatggggtgcagtgattgctaagactgtgagttttatttttcatttttttcttttgggtttgatccttgattataccctttttggctgctgtgaaaatctagataaagagagagaaattgatcaaattttgctgctttaactttctgggaaagtggctaattagagtattagactttaattatttacttgttttaagggaggtcccagttagtatgattttgggtcccaattgccttctgctattgattttgagggctaattaatcagttctgcggtgaatcatttgttagattagaaagtttgcaatgatgaatcgtttctatggtaaatcattatgatttgcacatgaattttagttttcttacttttgattactgctggcagtttctaaacaccctatgattgacacattgtaatattttgcagtaatctttgtacattgaaaataagatcttatattattgttttgtattgtaatgataaggttttcttgtcattacaaatagcagcatggaatatcttttacttgctgtaaaatatgttagggtcacagtagagctaagtttttgttttttgttttgatggttattgttcattctttgatttttgataggtgtcactagatgcagcaaaagttataaatgtcactcctcgctatgctcgattacgagctggtgtgaatggctctaccaagggacaaattattggatggcagaacatcgaattgattagtgatcggcccttggaaacaatgttaaaggaattcaagcagctaaaggaggaatatccagatagaattctaattgcttcaattatggaggaatataataaagctgcgtgggaggaacttattgatcgagtggagcaaactggagttgtaagctataatgttacagaacttttactatgttctttgaaaatgagatttttctacctaacattctgttatgactttaggatgcctttgaaatcaacttttcgtgccctcatggtatgcccgagcgcaaaatgggggctgcagtcggtcaagattgtgcgctattggaagaggtttgtggttggattaacgcgaaagctacaattcctgtttgggcaaagatgactcctaacatcacagatattacagaggtaaacttttgttcttcattaagttatcccttgttgtaaaatgtttcaggtcagctaatctcgaattcaatctagtataaaagcagaaaatgttagatagttccacatcgctaatgtgtggaaaaaataatagaatatataacaggaacgggctactc

SEQ ID NO: 111092 - DNA, 4420 bp, Cannabis sativa
  modified_base (4367)..(4370): a, c, t, g, unknown or other
tttttttttttttgataattaaggtcttttattgaaagaaaaacaaactcacatagtagccacaaagggggctacatcccttagcacacaactcgcactcacacgagacactctagcataacacgcaagagcatcagctacagagttatccaaacgaggaataaatgaaaacacacaattttgaaacagaggcaacagggcacaacattcatgaaaaaccggatacgaaccccaagcataaggcagaacattagagtttaaagcctttactgctatgagagaatcagattcaatgaaaacagaattgcgttccttttcccttgcccatgtcaagacgctgagaatggcgcgcagttctgcttcgagaacactgtccactgccgtaaagtgcagcaacacacttgcttcatcgggctctgcatcaacttgaacatcacctaacccagccagaccatcgaggatcgatgcatccaccctaaacctgcaaccatccaccagattggaacgaggagcatctgaaggagtgttcacaggttcgtcagcctctaggagctccgatcgaaactcattgaaccgctggagtataatttttactgaagcagccatgtttgctttagctcctctgaaaatgacttcatttcggcaattccaaatgtgttcaatgatgcaagctccatataatatcatcaactcgttccttgtatcgaacaaccataagaaccaatcctccaagtttaaattcccaagtccactgctgcaaggaccccacgggcaagagaaccataggccacgagcaaaatggcagtctctaaacaagtgtacatctgattcaacatcatcaccacacaaagcgcaacatgtatcagtattcagaaacccccccagacggcttttgatgggcagacagccactcaaaatcctccaaaacaatgtcttttgcctcgcatgaatccttagcatctagagacatttccaaacccttttctcttcatgaaatctatacttttacgcattccaataggcattcttgaccgagaagttgccttggctgttgcccctccagaacagagtatcttccttcccagcaagtggtcggatgcgtaatatagcttcatcaacttgcatcgaaaaacaccgagtaatgaggctctcattccatcttagtgtcccaggtatgaaaaaatctgacaccgacgaaaaggcatgagtaacattataggaaaaggcattgcgaacctccacaggattgatccctggaacccacggcctacaccagatgtcaatttttccatttcccaccagaattccagcattttgcacacacaaatcacgggtactcagaatgccccgccaaactctcgaatccgattgtttttcttggacacaccagaagtcttgaatagagcagtactttgcataaagaacttgaacccatggtctagtacttctctccccatcaagcatctgccatgccaactttgccaacaacgctacgttcatgtctttaaatcttctgaaaccgagacccccattcctcttaggttgacagtagtccgcccagcttttcagagctaaataccgattcccttgaaacgctgatcccttccaccaaaaacgagcaacaatgctatccatttcagcacaaacggacaccggaattttcatggttgacattgcataacccgggatactctgcatcaccgagttaataagggtttgcctccctgctatcgacaaatgcttggctttccacccttccaaccgagccaagagtttgtcttttaaatatttgaaatcatcccttctcctagccgagtagaaaaagggattccccaaatatctctcttttttatccagcatattaatgttaagcaacccttgaatgtttgctttctcgtcgtcttcaccctcggggaacacaccatactacttttgcgcctgttaactttctgtcctgaccatctctcgtacttctcaatgcattttcccagctattgagcttcagacactgtcgctgtacagaagaaaattgcgtcatcggcatagaacaagtgagttatgggctgagaactcttaccaactttgatccccgaaatctgtcttccagcttctgcacggttcattaacttggaaagaacttcactacaaagaatgaaaaggtacggtgataaaggatcaccctgtcgtagaccccttccgggagcgaaagatttcagaggagccccgtttagcaggatcgagaatgtcaccgtcgtcacactgggagattaagttgcagaactgctcattaaatctgtttgctttgaggacacgctgcaggaaactccattcaattctatcatacgctttgtgcatgtccgttttgaccgccatgaaaccccggttacttcgaatcttgttgagagtatggattgcttccgccgcaagatcagaacactccgctatccatctccctggcaagaaagccgactgcagggggctgaccaatttgtccaacaccagcttcagtctatcagtgattatcctcgcaataaccttgtagctaaaattgcaaaggcttattggacggaaatggtcaaaggaatacggattgtcagtttttggtatgagacataagaaggtgtggctaagttttcccacaaatctcccacttcggaaaaaatcttgcaccatcccacatatatcttctccaaccgtttcccagtatttcctatagaaaatgccagagaatccatccggtcccagagctttcaaagggttcagtttccaaaccactctcttgatttcttcacatgtggaaacacggcaaaggtctacattatcctcttctgttacctgaccttcaaaaagagtatcaaaatcatcctcaatgcacggatgttggctttcaaagagtgcactgaagttccttataaaataatcactcatttcctttctttcaaagatccatcggctgccatccttgatggcttgaatattgtttctccgtctttgaatcatagtagaagtgtgaaagaacttagagttgcagtcgccttgcgaaacccaaagctctcttgatttctgcttccaaatcctctccatcttttgttccaagctaagaatgtccaattgcacctcagcttcttcaacgctagccgaatcagtatgttgcatttggagatcacttaactttgcatacaatcttcttaattgcacatcacagaacccaaaaacattcctattccaatccttgagcgcctcttttgttcttgcaagtttcccgcacaccctgaaactcggttggccatgacaaattcctttccaagcgttctgtataacatctttacatccgggatcagctgtccacacctctaagaaccggaaaggatacttcagtttttgagtcattggttgccaatccaaaaccaccagggcatgatcagaggccagaatagggtgattcacaaccgtagcctcaggaaaatttacacaccagtccgcacttgctaaggccctgtcaagccgcttcctcaccctattatttggacccttcgatcgcatccaagtataccttggtcctatgaaaccaaggtctactccttccgtatccgacatgaaatccttctcgatcatggtattcacggcctcccctcttttcttcagcattagcaatgacatttagatccccacaaaccacccagttggtatcacctctattcaccgtttcagagagccattgccagaaagctctcttttcccttccataaggcgtcccataaatcagaaaaagagaccagggaaccacgtgattttctacaatactaaattcaaatcccgcattaaacttgtgccgaactcgaagctgaaagcctttcttccacgcgacacaaaagcctccagccgttcccatagaagatatacactcacaattatggtaacctaatctagtgattgtttccaccattaaatccttgtcaattttagtttccatcaagaaaattacatcaaacccctcccctcgagagagcttttttaaggctctctccgccgccggtctccggagaccgcgaaaattccacgctaggcacctcatggcgaaggtgggggcatgacattggccgcctcctcgccattcccaaattttgcacataggtgattgaaacatcaatgcattgagcaagaacttcatctaaattcaatgagttacctccattgttgtctcggtttagaactctgctcctccttgttttaactcctgaatttcttctcaataatgagttacaagtttcccgagtccctctcttatgcctggcccttatcacacccccactggtgcccggtttgaacacctcaatcggcaaatctttgttgggttttatgccctnnnnaaaactccatttcaatgtaatcgattttatttaacatcaataaagaaaca

SEQ ID NO: 111093 - DNA, 2527 bp, Cannabis sativa
aatacgccagctcctccagcagcgccagcgctcttttcttcgtctcggcgtcaaggctcgcggttgcaatggcttgtcctacaccctcaattacgctggttagcttttccctattattcttatcctactattctcgtgataatatgatgcaattggaatttaagttatcttgatcagtttaataaaagaaacattttttttgcatctggaaatagaggaagatagaaattacatgatgttttttgaaacatatctcaggttttagagatcagggttgaaagaatagtatttattaatttattttgttgagaatattggaatagtgtgttatttacaaattacaattatgtctatggataatttgctatcaaattagaagccaacttttcaattttcaattctggtttctttattgtgaagctagtaaactaacatggctttataagggtgtttgtacaagtcatttgtgatgaaagggaattgtacgaattaccttatattatttgaaacttcttcctctaattatgtcgtatgttttttgtgattcaattttgtttctgtgtggatagtgttatcttttacacattttgcttttagaattttgtttcttggtggattgtagcttttagaatttttaatctgtgatacatttatggaaaaaaagtacacttcttgtgcttaaacttacagttctagtttgattgccgttcctttatatatgatgtagatgaaaaagggaaattcgatgagttggttgaagataagggtgtgaaaatattgattgaacctaaggctctgatgcatgttgttggaacaaaaatggattttgttgacgataaactaaggtacaaattatatagatttacatttatatgtattattaccattctggtacagattgaataacggtgatcatgattctgtaaacaagcaaaacatatggttgtacagacaaacatatagtatccactttaatatataccatttggtttagaatagtttttttaattttacaattttctaatccgatcctaaaatatcatgcagatctgagttcatttttattaacccgaattctaaagggcagtgtggttgtggagaatcttttatgacaacaagcaacgcagaaacttcaaagcgtggtagcagttgagcaatgtaacaagttcacatctgggagttatagcttctaggttacttggaaattaaaggacactgcaacaagtggaaaatattgaataaggatatctgagtgatatgtatcaatgtgacaagtccaagcattatctatgtatcaaaagtttatctactaaccagatagaatggttcattttgttatacaaaaatatcattatgttgcacaaagtttcgttttgttttgatggcacttgagagtgtaaatgtaacaacatttttacccagaacagctctaatatttatttgttgtaaatattaacatatactctcatatattaataaaactgtcgtgcttgtttttggtgccatagggcaaaagtaaacattccaaaatgcttattacaattattgtgctgatgcatggtcaggtctgtctggttttaaattttctagtttgtaaataatggaccccttttaaccgaacagagaaacctgctgcctctggtatgtgagctgttagtatataaaaattcattttaaatctttaatcactcgagacgagcttagtgtttgttacctcatgcattaggccaagtcttatttaaataatgaggcttagtgcaaacaatcaataataaactataagtgaagaaaaaatgtatccataatcagaagcaaaatgttaatttggattagattctccaactacccaagtgttccaagtatacaattatacatcattaggtgcaaaaatgcaacagaagtatatattatgataatgtgaatgagtgggcaaagaaagccacttttttaactagtccccatgaaaatgtcatccagctaagttttcagtaaagcacaaagagttacatatacagacctcctaggaggagacaaccggtttttcgaccattcttcaagagactaacggtggagagcattcatgcgaatataaggacgtttttctttgattaatttttcagcaattttctaatcttcaaccacatcaagggccacaaccaaaaaattatcgtttagtcactacctaaagttggtgaaagttgtccaaaactacttagcttcagttttaacttttaatagtaagtaaaaaataaaatttgtgaaatttaaatctagaccatttttgatatgcggtataaagatcatattgtattaaatagaaaataatcttatatttgaataaaataatgtattgttattaattattatgattaatttttttaatacaatggaagctttattattttatacgtaataaatgatctgtattaacttgtattataatacttacaaattaaggatccgggtcaatctcaatctctgacccggacccggacctgacctcgaactcgggtgccaaacccgaacc

SEQ ID NO: 111094 - DNA, 4496 bp, Cannabis sativa
  modified_base (2560)..(2561): a, c, t, g, unknown or other
ttattatgtgttttttaaaaaatataatagctttattaagaaaaaagattcagcaataacaatagaaagcagagcattgtccaaactgaaaattcaacctctagaaagataagagctatgtgcaagtgtgcaacacacggctttgattaacaattattatgttagttatttattgggataattatggcaaaatctttaaaaatttaaaattgatgtagattagtctctaacttaaaaaattagtagtaataattctaaggttacatgttttctaagtccgtagtctctaacttaattgatctgtttatttattttaaaaatattacgtgttgatatattattggtccaaatcataattttaattaaaaataaaaaatcattattaaaaattaaaaacattattttttttttccttttctttttcctgtttctctcgtctttctcactacccaaccactcaccatcctaacctgcacccgtccctatccccattacccctccacacacagtggttcaagcttgtacttacaagccctgtgattatgaaaaccccaacccagaaaatctcgacccccctctcagtctctctctttctcctcatctctttctctctctttgtatctcattggccgacgttgacgatagctagactcatcgtacctgaaaccccaacccagagatcctaagccatgcgttgccatcctccagttgcaagccaatcgtcggagttgaaacttcgcgactctgttatggccgctttgagtttcatttagccaaataattttcaaaaatgagatttactcttagagatcttccaaatctcgtggttgaattctatatgcgctgtcgatgatggtaaatgactaccgtgcacagtggagcttaagtgagcttaggcagtagccattataagggttctagtattgtttatagcccttaaaatcactgttagagtaggtttgaactagcagatctggggatgggtgggtgaaagtcggggtggttttgaaatcactgctgggtgggtgaaggtcagggaagacgaagaagaaaattaaatataaaaaaatggaaaaaaaaagataaaaaaaaaataaatttatgattttaaaatataatttttagtttttttttattttaattacaattattattttgaccaataaaaaattgacacgtggtattttatttaggtttgacatatcagttaagttaaggaccaacggacttacagaaaatgtgaccttggggactattaccgtcaatttttgaagttgaagactaatctgcatcaaccgtaaatttttggagacttttactgtaattaactcttatttatataataacaataatatatattttaaaatataagtggtgtttagtatttagtaattaattttttgtttttttcaattaaaagaataaaaaatatttaaaaaaaaacatgtcttttaaaattattttttacttttacattttttaattttttgaaaattttgttgttaaaaaaatttggaaaaaaaaaatcacttttaaaatttttttaatcaatattttagacttccatcaagccaaacttaaacccaaatccatactccgccctgactcggacatgtactcgaactccaaacccatacttcaaactcggatctagatcccagaccagacccgctccagaactcaatcctcggctctggactcgacttcagaccagacctcaaaccaaactttggactcggcctaaggaccaagactccagttccagctccggacccggacctagaccacagactcaaagtctgaccccgaacccaattccaactctagacctcaaattctaaactccgactttggccccaaacccagacttgaattttggatcctaactccaaactcagttctgaactctaaacccgaactcacacccagacctaaacttcagtcccgaatctagtcccatcctcctccaattcgcgaaacagcttaaatataacgatggcctatttaaataaaattaaaaaagttaaaatatatatgatacttaaattggccgagtaagaaaggcacacactcttgtagttgtaaattgttacggtaatatggaaacgtgtaatatgtttttgctttaatgaaatgaaaacgtgtaatatgttgttaatttaaaaatatatgataatagcaaatgaaaagacaggccaaattatttacacaagtgacaagtgtgtgttttactactgaccatatgggcctaccacctgacattttttagtttatgttataattttcaaagatttgtcgttttgcttgaattttatcatttctattctctctctctttccaattgttccttattttgtggccgatagtatattctgattttgggttcatgaacctctttcctccttattttctttttctttttatttcgtcaaaagctttctcataaataaacaataataatttgaaacacacgacaatattcaatttcaattttcaaatacaacttttttttgctagacgattccatttagaaattacaatttatttttttttattttanntatttatttatttttttttatatatttagtgtatacatttatcatttatggcgttataagtattttttttttttttaaaaaaaaaaaacaaataaacctaattatttttttaaactgatgtgaaaattctcaacgtaagtatacctattattttcaatcccacaaagacggtagcgagtcgagaggcacaagtagactttttttggcagcaaattttttggtaagaaaatcagtaatatttaggctaggaataacaaatgggtcgggtcgggtctgacccgacaggccactaatccagaccgacccgacaagacattgctgatagagatatttataacttttagctatatataattctttcaatattatttggagttcacatgttttcaaaagctgatagagatatgtataacttttattcacaatgttttcatctcattaaacaagttttttcttttttattttaattcgtattatgaaatttaccatttaaacttaaaacaactaaaaaataagtataattttacacaaaatgaatttaattaactaaaacacacttctaaaatactttataatatgcacttaaaactagtttatcattaatgctataagtacacaatatttataaaattataattttcatctaatttcattaatgaagttttcgttttgaatttattaaaagaatatttagcctttcttttataaaattaaaaaataagttaatcaagccatttataaaagaaaaattaaagatactttagtgcacgtttggaaagttaggagaaaaatgaaattgaatgtaattatatttttgcatgtttgtctaaccacataattataatatagctgtataattggaagtatttaagagatttcaattatactctccaacttttatgtttcatgagaattaagtgtaataatattgtataattattaaaaaatttctattttaaatattatgtattaaaaattattttaattttatgtaattgctaattatatatccaaataagaaattaaaaatttataagtaattatcatattatatctaaatccgtattttaatatatagtgtaatggctattttagttattacatagttaaaagcaccatgcaattggaatgagagatggtataagtgatattgttagaaaagtgggtccatataactcaaaaattttgacttttcaatgggtaataaaagtatagttgcttctgttgagcactgatgcttacatattttttatttgttattattttttttatatgattggttagtatattaattatatattaaaataatgaaaataggctccacgtagacagctttggggatgccctaatagatattatgccctaatatatgtatgatcacttcacataccttatgatttctttagacttttgttgttattatgcccctttacctataaaagatttggcttgcatgtgttgtagcatgaacgacttttcattaatattaattacttctaagaaaggtccattaaaatgcaataataataattaaaaaaatcacaaaattgtgtaaattttcttatattagtatattccactatcttccacaagtgtataatattcagtcaattttattttaaatcgtagtgccattcagtgtttctaaaccaaaattaagattagatttttttttttttttttgtgcagaaaattaaaaaaataaaaaaatatttgcgtaccaaatcccctttgggcaactaattaatattcagtctaaaaattggtttgaacaaattattgtgtccatattaactttttcttttttttaaaaaaaataataataaagaaatgaaaatcgcccatattaactttcaaatcaataatactaaacaaaattacttttttataataaaaaaatagggattttttatttttacactccaaaatagtttt

SEQ ID NO: 111095 - DNA, 5247 bp, Cannabis sativa
  modified_base (5177)..(5187): a, c, t, g, unknown or other
caatggtctagcaatagtctcataaaaacttaatttttgaggtaaaaattaatgctagattgatgtttatttatggtctcatgataacttgatatttaaggtaagaaaacgatgctaaaattgattcttaacatggtctaacaatgatttgcgataaaatcaagtttttataaaactatcgctaatcatcgttaagcatggatttaacattatatttttcacaaaaattaagatttcataagacaatcaatttttataaaactatcgctaatcatcgttaagcatgaatttaacattgtatttttcataaaacttaagatttcataagacaatcaataatcaatgttttagtatttgtttttccttgttggcctcaaaaatcaaattttcataggaccatcactatactatttttaagaatccattttaatcaaaatttggaaaatctattttcttcaaaagaaaaatcaaaatttgaaaatctacagatttccaataataataataataataaaccaaaaaatcttataccgaagtcctcaaaattcatgaatgaatgtactaattaagtaaatatttcttgagttaagttttgaaatcattaaaaatatgaagataaaaatattgacggcgttaatggaggatgtggttatacagagaaggaattaggtaatggtgttgatggcatatgtggaggagggtgggtgggtgggaagagaatgagagagaaaaaggaagaacatgatgtgagagggaacttttttgtttagaaagcataaggccatatttatataacaaatagtaaaattaaaacaataaataactagtttcatacttatcaataatgtatgagtagatgacttagatgactaaaaaatcaacattaaacatttcataatagcactccaaaatattggaaagaggcatcaccaaccccatgtctaggaaaatattgaaagaatgaagaaaaaggaaaagtggtattatatagaagaatttatggtgtgacatacaacaaatcccaacaattggtaacaaattacaaatgactcaatgagaatctacaacaacaatcaacaaaccttccaacaaaataatacttgcttatttgttggagaaaactaaaataaattcaatcttatactataatcaaattgtggaaaaaatcactctggccccaaaaagaaaatctcaataaaaaaaaaaatccaatcacccaagtttcactgtcaaaatcaacactaagcaaatctttgcttccacagcaaacaatagacacaacagtccatagaataaaaagacctgtaatcaagcaaaagaaaagcatcaacaaaaaattattatgcttcattccaccttaacattaaaagctcaagaaaatcacaactgaaatactgatgaacaaccaaagagttcatttatgttaaaattaaaatgtacagagccaatacaaaataacaaattaacttagttgccactatgccataattttttcttgcagaccattgagttcttatgtaataagattgttattgagttatcccaactcccaatcaaaatcacattacttttttctttttctgatggaaccaaaatagattattacttggatagaaaatagattattagcatttttatactcaagagtgtaaataaggaatggcgctccttcttaaaggttcaaaaagctatgtactgatagcatggcaaacatgacagcagagattatttctatggtgctggatttcatgtttgtatcaatatctatatctacatgcatatgtagatgtagttgcccatgcatttacacagaaatacagagtacagaaacaaatgcacgagttctcacgtgcctatgcaacattacccctaaatagtcaatttgttttacaaattaaatagcaagtcaacttaattcatgttataaccaagttattatatatatgaaaagcaaaaggggattaaaaaataaaagagaacaaatgatagaaaaattacctatcttaacatgcaacttcgtggcttccaaaagttgagcaacgaaaaaactgaaaaatttgtttggtaactgtaaaaaaatccaatcaacagaactcaagcatgctccaacatggaatgtagttttggaacccgtcggcgaaacaatggttcaagcctgaatgatggagcaccaaactgccacctctgagcatcatacatctcattccatgcttgtacaatctcgtcaatcttgaaaccaagacctgaaaaccaatgcaaagtgaaaatacgttctatatttttctgaaagacatgaggtaagataaaaaaaaaaaaacaatcccaagagcctttcttcttcttttctgttctttaccttccagtgcattttcattggagcagtgattcttaatcataacagctatatctgttggagaggctcctgcaagttcaaatttctcaacagaaacctctaaacattcctcccaagttggcaggccaagcttatattcgacaacagaacgctcatacaacaaggtaccccataaaaggtatatttgtgatttcatgtttgcagcctgttctgctgctacatcgggcacaacatctttaacaaaaccgtccaatcccatcttctgcaactgagctttgtatttatcagctttggatagttcattcagacgctgctcctccatctcctcccacatcagcattcccctctccatactatcttcagccttgttataaagctgaagaacctcggaagaaggttcagtttctaattcaacattgctcccaactgagtagtaccagcagagttttgcttgctcaaactgctgctgtccaagtgcaaggtaaccttcatagaaatctggtttcatcttcacagcttcttcatacttcttctctgccttcatatactcctttcgagcccaatcatatgcaaccttaatctgctcaacaatttgatcccttgaagcatcttctgcataggttactcgcttccttgccttggacatgtgaacatttccccaattaaacaaagccaaggcagtcatctcttggaatttatctgcagcaatgttaaaaacctcttgagcatcatcacttgtcactgtatcctccattgcctctgagtgtaatttcagaccaagttcatgaagatccaagtaggaatcagaatcaaaaccaacatggtttttgaacagtcgtgcgaactggagaatccagtcctcaacacaagtaacccctttttccacatctttatcttttccaatatctccattctcaaaaccaatactggattttgtgctatcttcaagctcctcatcacttattccttcataaaccggctcttgatcaggattggcttcagcaatatataattttagcgaaccctgcagattatctgaagattcagccaacctcagctcatctgtagtagttattgtaaccaaatcaccctcttgatccttgtactttacaagaacacccttcaagccaggaaaccggtccttaacaatctcccttactgatttcatgctgcaattagagggtaactgtgcccaccttatatcttcccccaacaccaacttaacggtctttgtaaccactttcttctcttctttgataggttttttggcaaccttagcttcctcaacgatggtctttgtgatcacttgtttatctttgacagaactagctttatctttaacagaactggctttatttttagcagaactggctttattttctacaaccaacttaacctctgccgtttcctcaaccttcttagtcttcttcttctttaacttctcccttaccaccttacgcaatcgagaagaactagactgttctacaatagcaacacctatttccttctcatcaatagcaatacccttctcactcatcactttcttcacctcttccaatatctctaacgcattaagattattgggttccatacacaatacaatattgacatctctaaatgccaaatccaaccgattcagcgccttataacacttggctcttttcaacaaagctttactgtatcttggtgatacctcaagagctaaattacattcattgatagctcgtgggtattcaccaagacccatttgcatataacaagcagccatattgctatgaagatgagcaacatcaatatgtgttctggggaggagtttaagtgccttttcgtatttcaacattgctccttcatggtcacgtttttggaacagcttgttaccttcttctttaagctcttgagacatgttaatgaagattgcagtgtcctcatcgaaagctttggagcttcgttcacaggctttgattggtttactgttagcatttccagccttttgtggctccaattccttcttcttcccagttggttttcccatagttcaagactaatattagctctaattttttttagcttaatcagagaaaagagaaaaacctatttaccaattcatcataaaagtccaatcagagttcgtagaaacaaaattcatcagaattcaaaagaaaacacacacacacacttttaacaaacaataaaatgactaaatcgaaaatatcaaacgattataacaaaaaccaacttcacaaaattaaaggacaatccccaaaatgataataagaaaagcctaaaatagaattagaaaaagaaaaacccactcttgttctgtgactgcgttgcttaattagtctcccctcaaaaacttaactcgtccgttgctcttgttcggatttgaataaaaatttacaatgatatgataggataggctacaggatgaggtgagaaagacttgaactggacataaatatgggtttttctttcgtcttgggcttgcagaagaaagaaatgtgtggaaaagacgcaattttggttagggttttcctatgaagaaaggtcaacgttgcccggtgggctgctgcactgcctggtcggctccaccttccatgagcgcgttcaatttttttttttattagggttttcttaattggtttataattaatgattttttcttttcacgtaagaattatacgatagttacttgctttgccatgtatttatgagaatttatatatatatttttgggtgattctataatgcacacctttaaaatgaatgtactcatgcatccttaacttgtttcgatacctaaaagaattttttagtctaattnnnnnnnnnnnattcatgtacgttatatctatttaaaatatcctacaaaattttgaaaaattcagaataat

SEQ ID NO: 111096 - DNA, 4753 bp, Cannabis sativa
tttttttttttttgtcatttagttgcttgataaaactgatttcagttaaatttattatttagcatttatattttgttattacattttatagtgtcgaaattagttttatagggttcacaggttcgaaactagtttcaaaagttttaagagttctgtaatggggttgctctattttatgaaattattgtatatttttcattttaagtttttttttttttttttattattttgtttttagattcgaaactggttttcacatttatattttgtttttaaattattgttgtgcattgtgtgtcgtttttaatatatttgagagtatttttttgtgatttttttctcatttagttgattgatgaaactagtttaaattattttcattgtatattatttttattttattttcataatctttattattattttgtaacgaaactggtttttgtttgatttcataatgttcattattgttgtatgacgaaattggatttgatttattttttgtgttttttttttcaaatggaatataattcctctagtataaatataatgaaagatgttgctaaagatttgaagtgctgactctgggaagaaacttccatcttaaccacttgaggctagctcaagtggccataggtgggtgtgtgggtgttggaggtcctgggttcgagtcccaagtaaaatatggttataatatataaacgcttaaatcaaaaaagaggaaaaatcagtaaattggtatatatatttttttttctttttgaagtatgttcatttttttttcaatttatctttatatagtctttatgtttatttgtagtttttaaaattaattttttttagttattttatgcctgtttaatttcttagttggttgtttaagataactcattttcatgtttaaatattatgtttttttttattattttaagaaactagtttcattattcatattttttactagcaaataaacgtaactagtttctattagttatattccaacatctaactctggtaacggtgataacttcgacgaattttttagtgattttttcgacgattataccaattctggtgacttttctggtaccagcaacaactccgacgatttttccggtatcaaaagtaactccaatgatttttctaacaccgacaacaaactccggcaattttttaacaccagtaacaattctagtaatcactgtagtttcattttttaaaaaataaagataaaaaagaattttaatatttttaatagtaatataaatgacatatcacatatatcttaaattttttatttattttaaatatcatattttgtcctattaaatttatttactatatttatagaaattagattttttattaccatgcaaatattccattactaattggatccaattagtaaaaaaatattaaattaggttccaattagtaaaaaaatattaaattaggtgggatgtacattcctaaataatatctaccttatttacttacatattctcttttctatctttttttagtctcactctcaattctcaataactatatcaaagggtagttatacaaatagtctactaatttcacactcacaaatccctcaccccatgtaagagaaaaaaccaaatccaacaaacttaaaatttaagaagggcagttttatatattttttcgaatctttccttttcctaatttggagtcaatagtcaagagttacaaggtaaataaaataaaaggaaacaaaattaattaaaaaaaataaaagtgagctcacacatagccaacaggatatggacccacagaaaaaaaacccaatctgaatttatttttgttttttttttgtttttgcaagaattgacccagctgtaatacaggctgttgcgcccttggtttcatcatcttcttcttcattctccatagccataataactcactccgtatatctttcaagctcgtaccctcccttttttttcagtccacaccttctctagtttgtacttataacaaatgtttctctcttaagaagagaaaccaaatcaaatccaagccaaaactccaggataatattacttcgttaatttatctccaatggatccgtgtccctttatccggatcctaatcggtgacttgtcgataaagttcccggtggctttgaagccgtccttctccggggtccacccttcaacgtcgccgtgcttctgtaagatcaaactcaaaaacttccctgtacagttcgctaccatccctttagtcccacaagttagtagaactagtagctgtagtagtagtagttgtagtgttccaaccccggatgctaattctcaatctctagccgcttctttcaatttgaacaagacccacatcgacggtttcgcagggaagcctctggtattgaagatttccgtctacactggtcggagaggatccacttgtgggtttaacgctgctaagcttgttgggaaagtttcggtaccgttggatctaaagaaggctgaatcaaggccgttcttttttcagaatggttgggtggatatgggggataataatagtagtactaataaagggtcttcgtcgcagttgcatttgtgtgttcgtgccgagcccgacccgagatttgttttccaattcgatggagagccagagtgtagtccccaagtttttcaggttcaagggaatgtaaaacaacccgttttcacttgcaaatttgggttcagaagttccagtgatttgaaaaacaggttggttttcttcttctggattagtacatgggattttctaattaacaaaatctcgttctttgctcttaacatattttctaattttttttttaaatttacagttcaatgtctgaaccaagcacttcaaggaattggttaccatctctgaagaccaacaaggacaattactcgaaggagcgtaaaggatggtccattaccatccacgacctctccggttcgccagtggcggttgcatcgatggttacacccttcgtggcctctcccggttccgaccgggtcagtcgatccaaccccggtgcatggttgattctccgtcccggcgaggggacatggaagccatggggccgactcgaggcgtggcgcgaacgctgtggctcagactcggtagggtacaaattcgagctccttagcgatacatcaacacccgccgctactctcgccagctccgccgtgaacgctaactccggaggaaagtttaccattgacgttacatcgagcatctctccggcgaacagtccgaatagcagttgcgatttcggatctggttccaggcccgggtcgagatcgggttccggatccgggtctgatttcggtttcgctcttccttgtcacatgtcgtatagagggtttgtgatgtcgtcgacggttgagggtttgggtaagcggagcaggccagaggtggaggtgggtgtgcagcacgtgacttgcacggaggacgcggcggcgttcgtggcggttgccgcagccatggatttgagcatggatgcttgccggttgttttcgaagaaacttccaaaggaactaactcagctaaggcagtagtgaagtgtgtcgtttggtactttggattgtcgtttttgagaatgaaagctactttatttttgttttggtgggtagtgagtagtgactaacagcaattttttagctgtattattttttaattgtttaattgaagagcacattgtacagtgaggaggaattagtagggattaaaattttaattattaattttctgctccgattttgtttttgtctgtaaatagtattatctttgggtgatatttattctttgctgagatttgttgggaagctaaaagctgagaatcctatggtggcgtaattattctgaaataatcaatgcaatcgatgacgtggcagcacttatttgtagaatccagctggttattagttggcgtagtcaggaaaattaaaaaagaaaaagggcaacatgacatgatgatgactggaatgtcagaaatatctacgtatttatttattattttaataatcctcaagattgaagatggcagccaaaatatagcatttacgctttatttcgtgaacttgacaaatcatcaaaacaaaacctttccacgggttgtagactgttaattttaaaatatgttaggctgtatttgtaggtttgaatttggtaggggaaggctaaaattgggtagactaaaattctagagactaaaattctaggagaaatttcatttggagaaatttcatttactatttttctttttttttttaaaaaaaaaactctaattacaagagaaaatccttctcatttattttgtttaacttattcttctctctacatttatctcattagactgcccaagagctgccaccctccctccactcctgatttctctctagctccctctcatcagcccaaaggagtagccaccgatcctccgttgaaactcaaacgtccgttgtagaagcttgtcctttatggaagcctgtcgaagatccaaaacatcccaccacaaagttcgaagggtggagctcgtgaattaatgagtaagtatttttcttaacatattttgttaaataattattaaagtattgttgactcaaaaatttagactagacttttaagccacactccctcactagatgggaataaataaagaaatttttacataaaaaatcacttttgcacaatttattactaaaatactcctacacgcctatatcaacttttttacttacaatgttagttt

SEQ ID NO: 111097 - DNA, 2689 bp, Cannabis sativa
ttttttttttttttgtgtgtggttattattgttgttggaagtgtgtgatgaggttttcagatctgatcatacaatcagagaagcatctaagctaggaggtatcttcatactttagagctaaaaatttaattcgagtttaatgtagggtcgtattcatgtcatatcaaggtttagagcatttctaataaaagttgcccataaagtggtctttgttacatgtatattttagtcaacatttcaaactaattttatgaacattattgttcaaaatgagtaatggtaatgtaatattatttatttttttaaaaaagaaaaattactttatcaccaattaattttttgagagaacatatataattataaaatttaattaaatatttgtatgtgagaccatggtatgtaatttttagagttaccccactaatgtaatttttgtaggaaaatgtgttaaatcttaagggaaggagagatcaaataaataaatgatattttaggatgctgtgtattttaagaactaggtgttgacagagacggacccaatcatactaatgtgggggctatcactaacaaaaatattactttttaaaaaattaaatgtaaattttttaatttgataattatggactaaaatagtagaaaaatcccccgcaaaattaaataaatttagtaataatgattataatataagtataaatatttttttttttatgataaataagttcatacaaattaaaatttttgggtctctcactgtgttggcctctattagagatgctctttggtgttacaagcaaatatcaaacttaaacctgactcatttattaatcttgtcaaaattaaaatcaccaacccatatatttgtgatcttatttttttttgacatgataaggctattgttatgaaggtgtcttgtttagtttaattttattttgcttggctcttttgattattatggatgttcgacaacaaatggatatcgagatgggcaatatgttttcatgaatttgagagaagattaggatgcttttctcatttatgaggaagatactgtagacctttttgaatttgatgatcgttggtgtttggttggtaggttccttacagatcgcaccattgattttcaaatgatgcaacacaagatggctttgttgtggtgtcttgttcgcgacttatttgttaaagaatcagaaccgaattgatttttttttttctaattctatcatgaaatagatattgaacgagttatggagggtagtccatggacgtttaatacctctagtctttgagaggctcaaaactggcgagaatccacatttcatcactctatatagattggaattttgggttcaactacaagatatgatctctggtttcatatcagaaagagtggttcgagatttagagaattatattgaccagtttgtcaagagggatccaaataattttacaggagtttggagagaattcttaagggtgggagttcaagtttgggctgatctgactttgaaaaagggaaaaaagttgcaaataaagaatggtctgcaatgtcacgtgaattttaaatataaaatttgacaactttttgctttgtttgtggtatattaggccattcagaatatttttgcgaaaaaacttttgatacgccaagtcacttacttacaaaatcatatggccttcaaatgaaggttgcaccgagaagaagaacacatcatatcggtgcaagatggctgaagttaaaaatggctacaaacactggtggtgttggatcatctttcgtcggagtgacaacaacaactagacaaatggtaatcattaatgagaatcctttgagggaaatcaatcagagaggaaattcggatggtaatgtcgcaagatcaagggagaaaatcagagattgtattggtgtgattaatgtagtaggagagaagattaaggacacagaaaagtcaacgatggtcttaaatgaggagaatttatttaacgaaaccaaccatttaatttgtgattaaaaaaggagaagattgtccttagataattgtgagagatctccacacgtggatgtagttatgggccaagataatgaagaaatatttgttaagaaaaatatggaggtgggcaccacttgtgataatttgcaaaaaaacttgttaggggagggtcctggtttactgggtcgccaagagttatgaatgtactaagtttgaattgtcgtgggcttgggaatctgtggactttttaattccttaaagagattgtatctcataagaaactctgatttatttttctttgtgaaactaagtgtctcaaaagtagagtggattgggtaggaagaagtttgggctttgaaggaaaattttgtgtgaaggccaagggataggaggtggtttagcactcttttggaaagatcaagggtcgtgctttggattactttcaaaaccacattgatattattattacttctagggacagtccagcatggagacttactggcgtgaacggtgaaccctgaagaaacctgagaattcaaacttggaaccttctttgggatcttcatgctatgcattcgttaccttggtgtgtcattggagatcttaacaatgttatttgtcaagaagataagagggggtaatttatatctgtgaggccttattgaaggtgtaaagtccttttttggcaagttaggtgacaa

SEQ ID NO: 111098 - DNA, 3125 bp, Cannabis sativa
tatgttattttttgtcgttattttcatgttacttttatgtagttttcttgttgattttatggtgtttttgtgttattttttggaaaacaataaaatgtaaaaaaacattctttgaacgtaaaattgtaaatattttacaaaaaataatgccttatatcttaattatacaattaataataatacataacagtccatttaatactatcgatctataaataaattattattttttatatgaaatttataaagaaaaacatataaaaaatactagaaaatttgcttttgtttagtttaaaatattctcacaattgccacacaaccaagttattggggtcaatcttttttcttcttaaaattgtgttggtattttctttatttttttccttaaattaatatttatttacatcttgaccccctctcaaaaagaattctcttttgcccctcactattactttcattatatatatgtgtagatcatcattagttatgcattatgtcacatattttatacaaatgattatcatcatcaatatgtatatataggtaataaataatatataacatgtacaaagtggaaacaatcaatgtcactatgatcttatctaatacatatattaattgcatatttaccgtgaaatttctttaatatttataattatcacacatataattttaattaaaaaaaataatagtaaaagtattttattttacaattttattacaattgtattcttttttagttattaaatgccaaataagacaattaagtgtcagctcaaaaatacatgatgatttatttttttaacttatttaataagtaatttaataatatatcgtcatcatgtatttctgagttgatacttaacagttaaaaaatatacaactacaacaaaattataagataaaatatgctacttttttattaaaatcatatatataacaattataaatattaaaagatttcaccacaaaattcctacatagatgtatatttgtaatgataccgccgaatacttatgctcattttagatcatgttatgatgaggtagttggcaaataattatatatgtattatatatatatagcattaattaatatttatgctttaatgtgtatttgtatatgtagtagcatcatcatctcttttccattttctacaaagccattccataatgtcaatgttctttatttgatcaatctaaatgcaattattataaaagtagcatatatgctttttagcaaaaatgataatgatcattccaaaaattaaaggttataattaagataactacattaccttcaacaacaacaactaaataaattatgtactaaagtcaacacattctctcattgaacaatgtgaagagcttaactactatattggaaattaaatacccgtaagtgagaagatagaatacaattttcttatgattattagtctttaaaattgtaaactacaaaattaagcaaacaaacaccattgaaaaaataggttcctttgccaattagctaatcttatttcaagacaagtaactatcacattaattattcaatattaattgttctcaatctcattaaatgtttttcttatattcaatgagaaatgtataattaataaatttattcttatttatttgtttattttgtttattattattgttattattattatttgaaagggttcactaaatgtataatgatgtgtataattcaactccctcatttttccacaataatttcttgtacgtaatctgtataagtataggccgacccatacatatttatttttatatgcaatatctatattaaattaaggaagtttcatataaacaaaaatgtaacaaatttaatagttttatagttttttttttaaagagaaatgattttttttttaatcaaatctgacaataattcgttacataataatatatcatttaagataaacaaactgtgttgtttacaaaaataaaaatataaactctaataaaccttcaaataaaatatatacaactataatcgtcaacattgaagtatcaaagaatcacaaaaaatactagatctctaattcaaatgaacatttgacaaatcacactcatcaatgattattagccaaagatcttctaataaaaagtgcccgcgtaataacaaccctaggtattattctagaataaaaggaaatagtgaaacgaccaaccatagcgatcgataacaatcgtaacaaacaatcgcaccataaactatgaggctaataaaaatcttagaatcccccaaatttgatcatggacaatgatagtcatgctactaacaaaatatgatttgaaccaattgaaattaataaaaccctactactataacaatagcaatgtggtgtagcaataccattattgaaaataaaaataaacaacacactaagaggactaacagcagtgaagagctactccaaaaccaatggacaactcaaatttccaagacacacctctaaagaaagaacactcaggaagaaggatagcaacaactctagtgaaatcgaaaatagtgtgggaatcaataagactcgatgccaaagccatgtcataaggccaagaaacagccaacgagcctagtcaggcaaaaaaaatcaagtagtggataagaaattctagagagaaaccctagaaagaatatagtgatattgcatataattatattatattttttagagttctttatggtactgaattaggtacaaagcggaagatcttgtttccatagcgtcgaggatcaccacatacactaaatttgaaatataaattacatgaaagaaataaataccactcgatgacaatctgggtatcctcaaaatttcttgtaatttggatttgataaatcacacaccaaatcaatccaccacacacaaagagtagtgtgatctactaagataaagtgtataatttgttcttgttgaattcccaacacatgagcaagaattgttcttgagagaaaaataaatttctttatctctaattttattcaaatttaatttagaaataaatattccgatttctcaaagggaaatttgattttctatacttaaatatacctaatattttatccctaaactcatacatatcaccattgaaaatata

SEQ ID NO: 111099 - DNA, 1595 bp, Cannabis sativa
agtatacgtgtctcgcacgtaattttttgctagtacatatttatgggagtaacttttttttaatatttttaaaatatttcaaatatatatctgttctatttttaacattttatttttttaaaataaaaattaacctagcgttaacatttgccgttattagcatttaaaaataaaatatccccaatcaatggctccgattgatcaggagaaggcttaaaaaaattataattttgttcccttccattatcactcccaatctcaatcgtttcataggacttggaacttctattcagccaatggactcttcccttccattcccacttccaatcgtaatcgtacatcgtcgaaaccaacaacccgacgaaccaaagcttcattcgtcagcaaattgctaggtatttttcttctcttccatcttcgttataatataattttcaaattaagtttcttttctgcaaattgggtagttttagaatttcattatttgcttatacaattggggcttattcttagaaaaacgaatcatttgtgtcaattctaacttgagatgtaaagagtcaatcagatagagatagtggtatttctatttttcctgctgactaattggagtacaagaatgcaactaattcttttatttcctgtaacttcacttaagctgtgtgtaaaagggtgtagtgtaatcaaagaccaataaagtttgagtgtggtgtgtgattgtgcatatatagtgtactattaatgttttgtagtaccattttctcagattagtactttattggcttatcttttagtcttaaatgattttttattgttagttatgctttgttttcatcctaaactgtacttgtttcaccccaacccaaaagttcatctttattgttctgctgtaatcgtttacttgtattatattttgcttcaattttgtacgatatgctattgacgttttttttttttttgaacaaatatgctattagggttggtatcttgtaactgttcttttttcagtcgtgattccaagcatccacttgaattaaatttattcttttgtatagatacattaactatgcaatggagtgagaatttaacctgtgttctttgattgtgtaccttctcaaatacaggtatgcttaatatatgctttgatttagattgctctattttatattttttaacttagttcatgactttcttttcctaattgattttatattttggctgaataaaagtggctcatactaatttgatagaattcaatttgatctgattttggattggtaaaatgttatggttctgttggattcatttagtttgtggataaagaatctggatacattttattatttataacattgctatgatagagaaaatcaattgaaccattatcgtatttgaccttttagacttagttctaaccattattctttctgatcttgataaaagtcctagcaagcaatgttcttttttctccattcattatgaaatgcaatttatttattcattctttctcttaacaattcatcttcataacacttttttttttttaatataatacactcgaaaacaattcttaatacgaatagatacagaaaatgtaa

SEQ ID NO: 111100 - DNA, 8970 bp, Cannabis sativa
ttaaatactagaatcgagggatgtacacttaccctatattattttgctaaattggaaattccaactataaataaaagtcaaatttctcttttttagaacaaactatcatcttgtgttttgagttatctcacaaaagtggtcttcaaaaaaaaaaaaaataaagtgaccagattaggcgaatcatattaattcacagatttaagtgtgattcacttcaatgtcacgttcacaacacatcacatccaaaatataacataaagaaaatgttataaaagtaattataactttttattacaagttaaaacccacaagttaattacctttatttatttatttatttacagtttatcttatcctaattattatatttattatttattaatattcatcgagaggaggagcatgagaacaaatgaagtcgaccacactggaaaccaactcatcaaaactaacagaagcagtcgtatccacaacgatcttaggcacttcacccacttcgtattccgtacaccccgcatactcatccaatagcctttccatttcttgccacgtggacggcttatgccactcagcttctccgcgccgctcgagccggcggcgccactcgagctcgtccttgggcttacactcgacgatcaccacccgagccccgtgagaggaggccagctcgaggagccgatcgaggtgggccctacgagagaggggagagacgatgacgaggccggggaggccgaggcggagctgggtggaggcgatctgccagatggcgcaatatgagaggtcgttgaggagagaagaggcggagggcgtgtgaggtgagagagagtgttggagagagaaggtacagtctctgatatcatctttgtctaaaaggggaagtttcagagctgaagctatggactcacccagagtgctcttccctgttcctggatgacctttcattgctattattattcccatttttcttttttgatgaaatttcatgcattgtttgttcttgaatttgtaattttatacttctacaattgtcctaagctagggcccacgtgtcaatctcatcctaagatttttttttttggtggggataataggacatctttttagataaggtttgtggttagttttattatgatttgttggataatacttttattatttattttagggttaatattatttaggataattaggatttttgttccgaaattttgagatgtattaaattatgtttttgaatttttgaagtcattaaaaatgtcccataaactattgagattgagattgttggatttaagatttttgttcaatttagtaatgaaagtctaacatggatgaaaattcaaggaacatgatttagtacatatcaaagttcgagaagcatgatttaatagatatcaaaatatggagagtataatttagtatataaacattcattaaaaaagtaaaattgaatgaaagtaaacaaaaatccttaaacctaacaatctcaatagttcacgaggcataatttgatacatgttaaaatttaaggggcgaaaattctaattaacttattatttattgtaataggactaaattcagatatataatttgatacatgttaaagtgaatttgttaaatgatataataaattttgtatttttttaaaatgatataaatagggctttgggagtttagttttggatgatttttttttatataaaattaatttgaaggcaattcttaacacaaacctatgcaaaaaatgaaattaatttccccaccaaaaagttacagcaaaccagaaaaaaatttcaactattgagctaaaaccagaaaaaagttaaaaagaaaaaaaaaaaaaaaccatagtagaagtactgtgtcaaaacatcttccctaatttcccccaccaacctatctatatatatggtgagtacacattttttgagcacagggctaattcatcctattgattggtatacaacaaatcatcaaatggaggttttaaagaaatgatcattacccggcaccattcttatgccggttcttatatgaatctccatgtgaaccatatgatgatgcttcacgtgggtttgtagctgtacctggcctacccgaaatagagctaaaattaggtgtgttgttcaggctcctttctattttcgaattaagaaatgagaccccagatagaccatcacaagatagaacgcgagctatggcagatactgaggcctcaagaataggaggcagaattgtttttggatgtttaacctacatgacaaagagaacatgagagcccataataagattagtaaacataaatgtgaaacgaaactggttttaagtcaattgctgaaaacttgtctaaagattgatcatattaccttgaatagaattgctgcagataatcgctcctttagcaagtaaatatgagcaatatcaagtgctgttgacttaaaataaagccaccggtccactatgactacaactgaattttcaggcgatgacataactttgtcttcatcactctcattgtcacttccaaaatcatcattattgttgtcatcatcatcaacactgtcatccggagcaacagcaatttctgttgaaaggaataacaagggcaatggtccaacaacggtacagttcttaatgaacatacccccatctcctcgagtgacctcatcatacataactagaggactatcattctctttgaaagataatgtggagttaatggattgagtatgcaagcgaactttatcattaccagcagttttcacgaatatcctcttatccttctgataaggccgaagcaatctccccaccttaggatacaaaccagccacaagaacagcatggagtatacctgagttgcgtgcattcaagctgcaacttgagatattctcaggaataagcccagtttggataagttcgttttggagctgtttccgcataccattcaacatagacatggtgctagacgagacaaaattctcagcgcaaaattgtcccccttggtgtcttaactttgcagtcttccagcactcaaatgcagctacgactgctagctgatcactatggcctccatacattgaagcaaacttatatttagcatcattagcttttttcttttgataaggtgacatgggaagagtaaatgggtctttgtaatcagcagcacatgccagagtcaacgcagggtccaggcagttcatcaatacggcaaagaaaagcatcctgcatattactggatgaacagggagagaacctagctttgctccaagttcagtaagtttctcttcacctgacaaagctccaatgtcttgaagaataataatagcatttcttatggtctcacgaactggaggatccaatgtcttctgcaagaaatcgtctatcttacaatctggatcaagcagcttcacctgtcagtaagaaacaaaaattgaagcaacaaataaattagaacacaacaggctgcagtttattccaaagattatgattagttttacacaatatacgtgtgagtataaaaacaatgtgaggaaacaaaacaacacaatgtaggatttaataagtgcctttacagtttctctctgattttccttgggttatctctatgctactttatatcatctaatagtcattgtcaaactaaaagttgtgatactcggtcagtaagttactcttagcaaaaagataaggataaacaagaatcttcaaatatgattttatgcacaagcaagggtatttcaagtaatagaagcagctcataaacatttttttcctgtctgtgaatggtactgcatcattaaattaaatatacatcagagaaagagaaagttatttggatatctctatttccttgtatttttttacatggtaatacaaaattgttttgttgcaataaataaattggagaattcattgtcttcttaaggcaaatcaaacaaagcacaactaacaccaggactcattatttaatgaaattaaacttgcacctacctctaattccacaaataaacaattagaagggaagaaaaaaaagacaatcttgttcagccacgatttttctttgctccttcacgctaaatatcacctcaatcttatactcggtaaaacacacatggacacacaatcatcacatcccatttcagatctagtttacaaattcaattcagtcaagtaaaaattgcaaaatcttggttatgttatcgaaggcttagtagcaaatgacttcagctcaagtatggtaacaaacaaaaagaaaataagtacctgcagacaaagttcctcaattggcattctcctcatttcaggaacttgaaattctggtaagcttgctgcacgaaccttagaataaagatgataacatatcccaggctgacaacgacctgcacgtccctctctctgcctggcactggcttttgaaacccaagaagattgaagagtcgatacattattatacggatcgtaacttttctctttcatcctaccactgtctattacataaacaacatcatcaatagttatagcagtttctgcaatattggttgatagaacaatcttgcggcaaccaggaggtgagcgcttgaaaaccttcttttgctcttgagatggaatcattgaatgaagagataatatattaaatttggaagtatccttgaataaagggttcataagtaatatgtcacgggttttatttatatcatcccaccccgagagaaaaacaagaatagctccatcttgtgaatcagtacaaattttcattagcaacttcccaatgagaacaacatcagtgtgttctgagttgattcgttctaaatatttatcaaccaactgtttttcttctaaggagctagtaagagcattttgcatatgctgtttaagtatctcagccgtttcttgttggccttttttttcagctaattcgagtgcagttgttccatcattggctcgtagatggcagtctgcaccaaaagatagaagcatgcaaacgtctccaactctacccttaccagcaaacaccattaacgcagtcaaaccattaccagaatgctggtaattatacactttttgagtaccttcagtagaaaccaattctagaaggggatcaaactcatcatttaaccaagccaaattaatagcatcatctaaaacaagcttatcttcctctattaactcagattcttcacgtgtagcacctgatatattactaccaaggttatcattgcctttcgcatgaatgatagaaagtacatcctccaaatagtaagttttgacctaaacaagaagaagaaatatataagatattaaatctacagttaatataactttctttttgttttttaaacaagaaagaggaattagtcttaaagtttttacaggataagtgaatccaggaacacgaattattgggcagccaccaaaatattgtgaaaaacgatcagcatcaagagttgcactcatcagtatctgtagggttcaaaagtatacaacagtcagtattttatattaaaaatgccaaagctaatataaatgatagaactagaggacaacgatttgaacaaaccagacgcagatgagggtatgagggaagcgcgtctctgcaattgagcacagaaataaaagaaaattattctaaaatcagatcattaacaagtacactaaagaaactattacattgatacattcactctttaataaaataacaagtttttcataacagaaatgactgggatggcaaaatttacgcccagattttacacacaatgatgtgtcatattttgtaaccattcatgtttttccaaagtagaaccacactatattcatgaatagttagcaaaaatgccacataagagagtaactttttggtgcaattttgtatgtctctagcatagccttccattttaccattacaagcttctaaccattaagaatcatatgtaaacctatagttaattaaacaaagcaacaattgataactaagtattttatacctcataattgcaagcatgaaatcagagtagcgatcccgttcatgaatttcatcctagcaaagggaagtttagtttagtaccacatcaccacttatatacttaaccataccataaccatataaattgtaatgcattaaaaatatcatccataagcatatggattgtaatgcattgaaaactctgaaaccttcaacatatcagatattaataggttgccttactagtcacatcaaactaactctacagatattttccagatatttaataagaatgaacccaacatagatcagggaaagtcattgaaagaaagaatctacacattaagcacgaatagtaccacaataatgtgagtgatctcagaaatctcttggtttttatgtctcattgttgcttcagtgttgacaccattagaaactagaatccttgctaaaatcccatttgtgcagaatacaattgacgagtgcctcccacctgcactttctaatcgtatctaacaatgcaagaaagaaattagtgagatagtaacagcattatgcatatatatatctggcaactagtacacatactaagaaacatgaattttgaaaaatatatccagaagtatattttttctggttaaatatgaattttgaaaaatgtgattagattggctacactatttgatatcattgttattttactttaaattactgaaactgtcgttggtagacttgctttctaatattataaagtttcttatacaagaatctctagttattaatgctaactacaatttctttccaatagtcttcttcaacttgcgactaaagaaaattaaactagcacacaagacgagcacaaacactattaccttgtatccaatatcctcgccaatattttgtcctctttcagaagagattctctcagcaactaaaaaaaaggagagagagaaaagaaaaacctaagaacattgtacagctgaaaatgtaaaacagaagagggaaaaaagttaacactaattagaaagtataggtgataaagttaaaaaataaacctgacatggcagagatacgtcgaggttgtgtacaaactattttacaaacttcacccttgccccacacatagtccaaaagaaattggggaacctttacaataaaagaaaataaagatttcaaaaacttcaggtttctcttctaacaagcaacttcaggtttaaataagaacataaaggccaaagtgtttgacaagttttagcagcctagtttcatcttaacaatagcattattccacatttatatataaaaataataataaaatatatatatatataaaaaaaaaaaggaaaccaagaccagctttactgagaaattactagacttatatgtacctatcctactcaagaataaaaaggaaaacacatctcaattattcaaaattcttatttacattattacatcaattttcatgaatactacaaggataatcaatggtttaattttaacaatctaattagataaatggcttttttcaataggctagaagcatgttaagaaaaatatgtacgagggaaaaaaatccaaagcagtatatcaaacctgcgtggtcttcccacaccctgtctcaccagatataagaactacctgcttgaagataacaaatgaaaaatcacatgtaatgtactataacgaaaatgcataaatgtaaatcacataatactgagttagggtaaatgagcataaaactcactacaagcatgtatgtatcctttattatgtatacaaagaaatatgtgttatattgtgcctaactaatattctactgcattataatgggggcaatgagtagatagttctgctgcattatttggaaagaaaaaaagagagtgcaaagtaaatactaaatattaaggacgcaagtatgacctggtgagattcaatcgttgatgtaattgcatctttaaaacaagtaattggaagtttggacctatctttagtaatctgcagggataaaaattacacaaaactttaataaactgatatgttagaatggtaacaaatgtagaaaatcttgtaagtaattaacacctgtgtcaaagctgcaacattctttactctagaagcaagtgattgcaccttctgtgcaatatccgccttgctcattgatggcctaagaaaaatatcagtcgtcttacgacgtgagttggcgacaacttttacaccagttcccccaatcatttttttctgctcttccccatcaccaggcggatgccgcataaatagatcatacaatgcttcttttgactcctcagaaaatttcacaacagtgagcttctcaatcttcccatcactcttcgtttcacgtttgtaaacagtaatgcggcgtgcggatccaagcctacccaagattcacacgagtttatagataagaagcatatagtaattgttttctttaaattcatacaaatacaaaacaacttgcttggtactacacttctaccaagcccaagtatattgaacactcacccaccactcctggatgtcattcccatttttctgcatgtttcgtgcactagagctcgttcaaagtttgacaggctagcgtcaaatgtatatgctgcatataaagtgacagattaataaacaatcaaatgaacgctgttttatcggttcaataaaatcaaacagagggaataacaggaagtcagtccttcaccaatcctataaccataatcgaaattcgaattcaaatcaaaaccaaagaagaagaacccttacacaaataaccataataacattaacaacaataacatacatatatatatatatataaagctgatggaactgaatatacgtttttacctgtgtctttggaggattggaagtccttcaatgcccggagtaggaggatcttagtttcctcaggaatgggagttttgttcttattcttccccatttcaaagttttgttctagagttgtcctttttttttgttgagtttttttttttttt

SEQ ID NO: 111101 - DNA, 6427 bp, Cannabis sativa
  modified_base (6395)..(6399): a, c, t, g, unknown or other
aaccaacatttctccagaaaaataaactaataaactataacactaacatgtcaaactcctacaatggtaatcacttgttacacgccagtagaacacctacttgtaaatcataaaaataacaaacagtgaaaaaataatctaacaggctcaaagagtattacataccatcagctgtagattcttcagatggaccagcacccacaacttcagatacaacctccttttctggctctttatcttgctcagacctgtagtacattgatatcaataccaactaagataagaaaaaataaaaacagcaagcagaccaaacagctaattaaaaaatgaattttcaccttattttgcgacacggcttagccccccctgttacattcaccagctcagcctccaattcttttttctaaaaaaataattatatatcagttattacttccaacttccaagaatcagggagtaacaaaaaaaattatatgtaatggcgtacataaaggaacttgccataccattgtatcccgcattttctcaaataatatagattttacagggtcttttccaatccatcgacaaagctcaagtgtaagtcctttagaagatgcacggacattttgatcttgatggtcaaaaagttcaggcaacatcttcaatatcctctttggaggcacaacttttgccccaaattcactatcaaaccatacatgcaaattagacaaagaagtacaaggaagaaggaacataagcatatttcccacgaaattaaactcaatgcaaaccttaaggcttgaaacatgacatcaattgcaggtacaacagctttagcaactttggcttttattgccttctccattgcatcctgcaacaaacacaccatactaaatatcacagaaaattatgcatataaaaagatgaagttatcagagaagcacaatgcaagttatgaaaacacattcaattatacaatacaccagcattactatatgaatgaaaagaaaagacagacaatacggaattgcataccaagaaaggctccactgcctccaattcaatccaaagcatgaaaatggcctgggccttctccacagtcttaggcctaccggtaaggcatttcgccacaaccgcatcacatacttctttgccatacctatacaaaacaaaacaccataagttacacaaccaaacagaccaaaaagaaaaagcaatccaacaaacaaaaattaaataaacttgaaaagcatttcaccttccagcatcagcatcagcggctcgtaagtaagcaatcaaagcatccaatgccttctcttgcactggcgcattagaatccaccacagtcttcctaaaaaaatgtcctgagaagaacaatcatcaacaacaacaaacaaattaacacctgaaaccctaagcaaaacctccaaagttcgaacttccaaaaaacacaaaaaataaacaagtatccctattatttaccaaattcacgaagacgagcatccttaggatcagtaatggagtcacaaagcgaggccaagtcgatattagcctcatttcgaaccttccaattcttatgaaagagacgatcctcccacggcaacttcttcgcctccttcaataatttctcttcctccgacgacattctttcacaaccctatcgatctaatgaactcagcacaaaccgattcgaacaacgataacggcaatggatcgggatccagaactcagatccacttcctccaacacagaatcaaaaattcaatcgaaactcattgattccacgaagaacaacagggttttctcggatagagaacccaaaaatccgaaccagaagagcgagaaagaaagaaagagacgcactattgttgttgttgggttataatgaaattgaagatacgttatagctttcttcttcttcttccttttttcccccgatttatttaatttaatttaattttcaaaaaaaggattacggtgtaatgaaacgacaccgttttattggttctgagattaaacgacagtgttttattaattaaacgatgaaacgacagcgtttggtcccggtggttttatgttgctttgttgaggtgtcttgatctgagccattaatttcaaattaaaggccggctttgctgagatttcacgtaatgtggggcccgatttgaatttcaccgggtactggttaggcgcgtgcacagtccttgtctttgccactactattgtgtgtatattttttacaaataataaatatttttagtcaaatattgtatataaataaataaaaaataatataaagttttgttttaatttagtttattaatggtgtgtatttattttatttttcttgtaattaattatctggaacaaatgtattgtagggacccattcaatttgaatatttgtttggtttattcaaagaagagaaattttcttccatggctaataactctatcatttaaaggtcactttgtattgtcataaagaggtatagttatttgttttcttgaggtattgattttatatcaattatcattgacaattggttaagattttttttttttaaaattggtatgtttttggagttaagtgaaagtatctttgaaagtatctttcactatactattttaagaattttacaaatataattttttttatttagagtgtgtttggatgtcatggtttgattagtaggtcatatagtgttatttttcaaataaaagtctaatgtaaatgtacatggaattttgatcaagataagaactactaagggatccgatgtgcataatgtttattcaaaaagttagtttgataatgtggatactatttttgacacatggcacaaagaaaacaatcttagagccccgcatcctaagatagggcggtgttacctgtacactgggggtacccaggcaagcaccaaaatctagtaaaattgtttctaggtgttatccttcaaccaagaggtcacaatgaccctaaaacgatgaaccataaggttgagtatgtcacgtggacatcccagggcttaacctaggtcggcgcccaagttgacatcttatgcgctgactcgcattagttttgtttcttaataactttctatatgcaatcttctttgccattgcactatgatacatgatagatatgccttagccaagtttcagactttggagatgagtctataataaactgtacctgggctctccagaaccctaatgggcgtccaagttgacatatagtcgacctgggcaacacaatggctagggtttaggtttttgggaacttcattagacctcgattcctcaaatccaacaaagaacaatgccagaacatgagatttcatcaactacatcctaaagaagcccaagtcaaactatgtttattttgtaatggattttcaaaaaactcggtaaatattttagtgtttttattgaaagaagaacttatgaaataaatagagcttaagaaataaacaatttaaataaaaaaaccaagaattttatgtggttggggcgttaacgagccttagtccatgagtcaatattattagcttgaaaagctttgatgtattagacaagaataatgttcttgcctaagcttaagaaccttaacttcagtcttagtatctgagtaatgacttttttgacactttgcatgaagatacaatattctatttatatgttagggtttagattgttagggttggcgtatgaagctaggcccactaatggggtaaatacatttattattgacttttggccaattaggcaaggtccgatttataatataacgatcattcacctgtgcggggtccatttaatggtgacagttgtcgtgcgctgtcagatttatacaaggaatgtcggaggatatgttgctagacagaatccctaatttggtgggattttgtattaattgtatgttgtgtaagccttagcttttagatatctttttgacagtccttccgagaatatcccatgagggtatctgaatatgtcatattggaaatggcagacccatgatttaaagtgatgagggcaaaagtaatcttaaaaaaagtgatcttggtgggatttgaacccttaacctctatcatatatttaatctaacctagtcattacaccaaaactaatattatgtctacaaacactatcttttattataaatatatgtaataactaattaaaatgcatatatatttttccctaattttttcaggagggtagatgtgggtccgcccctgtatattgggcaagaacccttcccagactcagacggttagactttataatggatgagtctaatctattaataaacatggattctcaaactgacccacccatttggactcgagaatgggccctcttaaagtgaaacaaatattgaaagtacaagtatcaccttgccagaaagacggataacatttacccccaagcctttagggctcgagaattgcagaagcttgcaacttcactttatggattcattatggtagatgaaaccatgaataattttagtcctctggaattatgagacaatgtgtcacgaatagtaataaactctacgtttcatgtgagtggaatacacgtggcatcgacttcttgtaggctacacgtcttgggaaaatgcgcgaggtgcctaggtttgtgagataatggctaatcacatcaatgagtttctcgagatgaatatcagtattgttttgcctcgattctgcacaaggcattaaatgaaaacctcttcgcatgccttggctattagatcttgtcatgcttttctgaaataggatttgggtcgttggatttgaagcacacggatccccaacttatgtataaataaaactgtggtcgaacaattaccacttttcactattttcaatttttagttccaatttttttaaaagaaaatttcacccaaagccccaatattttagtgaatgttcaaaatcatcgaggatatctacaactatcttctttgactatgtttaggactattccctaatacaccctagttatcgaaatagattcctcaaagccacacagtcgttgaacttctaggcaaacatcaacaagttcaaagggcgatttgaagcttttcaagcgagccttaggcgtattgatcgtatacctgctatcacaccttcactctccatgtataagcacttatatctagagagattgaagtacgatgaccgaataccaggtctaacatcttcactaaccacacttaattgcttcactctactccttcattttcattttacttggatgttgttaggtcttgtgtataagggcttctcatactattttggacttttataccctttttggtttgcatgttttgttgcttgtggtagcgtttaggacaaaatctcgttagtggagcttttacatcgatgaagataggcacatttattttttgttgctttgttgtaaaaaaattaggttttgtgaaaactatctcttttttcctgaggtcgctattgaatttttaaacttagcaaagtgttaattgttgtaataaattcctttgtccaaaatccttgcagtgccagatgaattatttagcgagcctttcctccctttctttaattcctgatctaatcgtcctagagtaatattccctacgggcgttggtcccgaatgtagggtccggtggggacctttctaagcacttaaaggggaggactctcgtgtacccttgttatatttgttagtgtggggtactagcagcttggtttctgtatctgtttccagcttctaatatggttgacacaaaccattttgtagagggtgattgttgaccgtgaggaagaaacaattcaggaagaaagaggcggaaagccggtagcagcagtcaatccatctcataataagttccacaattacatgatattgtgatcttatgacgagaagcgatctccaaaacattcttgggctttcgctaaaaggagaattaccatgctcctgtatagatagttttggtgcttagagctgggcctatgttgaagtcggagcacacctcccacttcaaagttactttgctcgtttatgtgctaaaagttggtgtggctccatttcagcttatcttgcaagtgttcaagctgctggtggggtggtatgttttttgcaaggagcaaattgtagaggtcccatctcttgatgagttcttctactattataagttggagtcgaatcccatgtggaaggataaaattaaggatagcttttattcactgaagaaacaacgtgatgtcatatgtctgacgatttcatgcaaacatacacattgtagggttgttcatcaaacctctcaaaccgcccgcactgttaaaaaaatgcactttgaaattctttgcggtcgtagtttgaatttttcctaaatcgcacggtgcggttttgaattgttaatannnnnttcaaaccgcaccgcaccgcacattata

SEQ ID NO: 111102 - DNA, 5949 bp, Cannabis sativa
gccttatgaactattacagttatttacttgtctcttctcatgaaaaacaaaaattaatcagtaggtttcttctttcaggcaagtgatggcaagaaattgtttaatgtttcaccaatgctggattatgtaccagatagaaacttatttgaagcaaatgtgatgattggcacacagttatgctcaagacgcttattgcaacagataatttactgtgttggcggtgtttcagtatttttccctcttattgcccagtctgataactatgaaaatgaagaaagtgcccagtttgaacctgctttgactagtcctattacaagtgagcgggtatctgctgatgttattgagattatagcttccgttcttgatgagaatttggctaatcaacagcagatgcatcttctatctggattttcaattctgggatttttgttgcaatcagttcctccccagcaacttaatttagaaatgctttcagctttgaaacacttgtttaatgtcattgcaaactgtggtaaataattaatattcactcaacttgatattattgaagattatgatgttaatctttccgctgtatttattttacactctgaaagctgaaacatgctctatttttgatacttatcatccctgcaggtttggcggagctgcttgtcaaagatgctatatctagcatatttcttaatcctcttatctggatttacacagcttacagggtgcagcgtgaactgtacatgtttctcattcagcaatttgataatgatccacggttgcttaaaagcttatgccggcttcctcgtgtacttgatataatacgtcagttttattgggataatgcaaaatctcaatctgctattgggaacaaacctcttctacaccctgttattggaaaagttataggagagaggcctatcaatgaagaaatccataaaattcgtctcctgctgttgagtctaggtgaaatgagccttaggtattgctttttagaagacttggttatttttcacatgcatatcgttagtatcatcttttcttaatataatccaattattaagtcatgggaaaaatgcagggagaacattgtagcagcagatataaaagccctcatagctttttgtgagacaagtcatgacatgtcatgtatagaggatgttctacatatggttattcgagatgtttctcaaaagccgctgcttgcagcattccttgaacaagtcaatttaattggtggttgtcacctctttgtcaatcttcttcagaggtgtgaatatgttaaagtagctgagaattatttaatttaagaattgatattgtgagtatgttgcttttaaaaagtaaaacttttgtaaatggtgttaattttctcaaatttgatccaataactgatgcataattcttagtctgcctctaatgttttatctagttgtgtgctggtaaattatagatcactaaactttagaaaattattaacttactctgtttcctattctatttttgctcatttccttatgcttattcttcttctttatgtgatgtgaataataaattataagaaagaaatgtaactgctatctacaactataaacccacatgacatgtttaaatgagagtgagaatcatttgtggagtgataatggtcattcaagtgttgtgatgaaattatgtaatgggagaatctacggaccttgtataaaatcaagggaaaagaaatggattgctatttctgtcatgacggtagaataatattcttttcttaattgtttccttctctttctatttttagaaacctaaaacataactttaccctaaaatgatcctttgataataactacacatacgagcatatcctagcattttgtttcattttcctatcattttaagtttgagttttacgagagattttatgctatgtttgagttttatgagacattttacatatgttagttttatgagacattttatttgtacttgatattttaggtgctgtaaagtattttttcatttaaatatttgaggcttaattctgtaatttgaacattgatttaattgtggttcagtaagcatgccatcagtttgcgaatctctgaaatcagtgtggatagtatgaactcaatattgtttggtctaaactttcctctctctcactttcattctcattcgtcttttctcttagggaatatgagcctattagattacttggtttacagtttcttgggagacttctggtgggtcttccatcagagaagaagggacctagattttttagtctggctgttggaagatcccgttcactttctgaagaccacaagaaaatcagtttaaggttgcaaccaatttttgcagcaatggctgacaggttgttcaggtttccacagacagataatttgtgtgccaccttgtttgatgttcttcttggtggtgctagtccgaaacaggtgtttatagacataaaatttgaaaaatagatatgaaatataaaatctctgtggatactgtctgacttttatcttatggacaggttttgcaaaagcaagttaacagacagagaagcaagggacataattctcattttttccttcctcagatcttggttctcatttttagattcctttctggctctgaggatgcatttgctagagtgaaaataatccgagatttacttgatcttcttgattcacatccatcaaatgttgaggcttttatggtattggtttctgaaaataatttgatgcttaaaatgttttctataaaattgttatctcattactacatttccataaataggaatttgggtggaattcctggttagcagcttgtataaagctagatgtgttaaaagattacaaggtcaattcacacgatcaggacatcaatgggataaatgaacaaagctttgttaggagcctattctgttctgttctttgtcactacatgcattatgtgaaaggaggttggcaacaattagaagagacctcgaatttcctgcttatacagtgtgagcatgtatgctgaaatcctcaccatgcctttgttatttcttgtgtgtgttataataaaaggaaacaaaacgtattattaaaagggtgaaatggcagtacaccaagattaggtggataacaaattcaccatattgaagaggatgaaatattacaaaacaaagctctatcccttgaaagattagaaaagaaacgactttgagcagctaccctaatttgttaactagtttaaataatctttaactattgtcttatctcatagttaaaagaggtagtaatgatataacattttttgcaggggagtgtttctcgtcatttgcttcgtgatatatatgaggatttaatccagagattggtggatctatgttctgaagaaaatatttctatatcccaaccttgtcgagataatacattgtaccttttaagattggttgatgagatgcttatctctgaaattgatcaggaacttccggtattcagtttcccctgttaattgttgtgtcatattatcataactgctttctgtctgtggtcctgaatataaattgagcttgtgattttatacaatagcatgctttatgtattaaagaaatagggaggaacaagcaaaggatgaatagctcacgagaaaacatagctgcttaattctgatagttaataacatctttgccctggtagatataaactatcatatgacatttcttttaagcattcctttaattcttgtgcttaaaacatcagataatgctatttgcgatttctactttatattcattgcataagacaaatcatttagaactaatgtttaattttaaacagtttccttcaagcggctcagagttttctattgatactttggaaatagaacgtcacaaagactatggttctgccttatatgaggttttgcaaggggaatctgatagtcaagtatccaggtattgacaactaattcctagtttgagttgatgttgatcattagcaatgctggtatttttgcaaaactgaactttgttttgtaacaaatagttttgtaaattttgatcatgggcagctccaaattatttgctctcgtgaatcatatacacacacatatatatatatatatatgtattctttatatttttgctacagtgccctactattcataataagtttctttagtctgagatattttcatgccttttaggccaagagatggcttgttggtttttggcaggttttttgatctatattttcaattgaagatctacaggttgtgtatggattgtttcacaagttgatgtttatattttcggtgtaacatgttgccttgattggtgaaaaagttaatctcgttgtcattttatttcaaaaactaaatgttaaggacattgtcattgctgtgtaatttcatgctgtaagagtgcctaatattgccatacgttgaccaactaccataatttgaaaagtgtctagacctaatacagtttgcaaaacattatagcaagcttggcaatagttttaactttagctctccctcaatttcatatttagtgtattgcacgctgggtgaacctataccagaaggttgcatgtgaggttttagtggtttcagaactatgcagatttttctgttacttgttttcattgtgttttagcatcttaccaatactagtttcacttgataaattttagaaattcatggagttctaatcagccaactacaaatgaagatgacaagtggtggcatttatatgataacatatggataattataagtgagatgaatggtaaggggccaagcaaaatgttaccgaaatcttcaccccaagtaggtccatcctttggccaaagagcacgtggcttggtggagtccttgaatattcctgctgcagaagttgctgcggttgttgtatcaggaggcattggcagtgcattaggtggaaaaccaaacaaaaatattgataaggccatgcttttacgaggagaaagatgcccaagaataatctttcgacttgtaatcatttacctctgcagatcttctctggaaagagcatcacgatgtgtacaacaggttattcaacttttgccatgtttgttagctgctgatgatgagcaaagcaagaacagattgcagttgttcatttggtattgtttcttatgcctcccgaacaagtttaaaattaccagatatgttttattatagttgccaacataatctatgatgtctcattctattcatcaaattctcttatgtaatgtaactttcaatcgacactggccaggtctttgcttgttgttcgttcacagtgcaaaacgttaaatgatggcgcccgttttcaagttgtatcacacttgattcgagaaactgtaaattgtggcaaatcagtgctagcatccaccattatgggaaaagatgactcagatgcaggcagcaatcttaaagaattgggatctattcacaatctaattcagaaggatcgagtgcttatagcggtgtgtctctcaaatattttagtgattcttaaagaatttaaaaattttctgaatacttttatcattttaaatgctgaaaaaagtggccaaattataaagaaagtgcaactaagtttagaagttctgccttgtaaggctaatgtcagattaaagaagagagactttatgttttctctcttttttttttttttttgaaagaagagaaagaggtcacttgtcttagactgacccctccccaaaaattattgaaagcctcacttgtggcggaggaaaaccgtggatacaaacattatatctctaaaacagaaagagacaactttgaaaactataccagaaccgaaatcaaaaaaccagtaaacagaagatcaataacccaaaaaaggtaataaatttaccacaaggctctccattctctacttaaatttaccacaaggctctccatattcgcctttctcttttttttttttttttttttttt

SEQ ID NO: 111103 - DNA, 10967 bp, Cannabis sativa
ttttaataactaatgtttaatataaaaaatttttagtaattacacagtgtaattacattccattctcatggaggctatgagaattggagagtgtaattggaaccctcaattattttcaattagacagtgccaaattatgtaattacgttcgacacaaatctaattacactccacttttaaaacgcatcctcatgtaaaaacaatttatccaaccgaacctggtggccgagtctcacccatctaaatcactcctaaaaactcgcctcttgtttatctgtttacaacttcccttaaccagaaatctcgagtgaagataaagaagatgatgatgcgggacgacgccgccaccaacaacgacaacgacaacgacaacaatctacccaacaccgaaaaatccgacttcgaccaagattcttaccttaatttcgatttcttctcgtctatgtccaaacccaaggttcagaatcttcacccaccgagttcctttttcttttcctagtgaattgagtaatgttatgttatttgaagataacacggaaagaattaactgttattttgggaatgtgaatgggtataaaggattattacaagatattggaagtgggttatgatgctacggacgatgcgattcgatcaaactacatacgccttgccctggtttgtcattttctttctcctaaattttacccactttaatgggttggttgccttttttttaaaaaaaaacatttactattatttttgtgctcgagtattgtgcagaaatggcacccggataagcagagagaccaggactgttccactttcagatttcaggaaataaacgaggcttatcaaggttgattatgtttattcttcatcatgtgtttgctggtctacaccggttgttaaggtttattatgtcattacatgcttcatttttatattgttgtagctgctactaggtaggataaaggaagaagcaaagtattaataacagtgacgtagtttttgaaagaagctgcatgtttactgggaacagcatctgtagaaattttgtaggtgctttgatacttagtttcagtacgttgcataacgatgatggcactgaattattggaactattttctctcatgtgatattcattcattcagtggccttttgagatccagagaggctttacactattgttgattttcctaatcctctatttcgtttagatcctttatagttcgtgcttatcatttatgaggagaatgcttctttgtgtcttggtcattttcatttgcactaaatacttgagctctttatttgtattaaaggatcttcttcaacatttgtagatttagtactatcatttcaaagccacctaatcaattctcactcaatattgagagcttaaaatccaggaggggtaacatcaaacaatatggcatgttttgctttccccagatctctgaagtttgagtccgtcctagatacctacatagcaatttttttagtttcttgctcttcaaatattgtaatgttgagaaatagagttgtcatcatcctactgcaggttcatggtgttgacattgttcagagcaacagaggattattcacctggtttaggacaggtgtcatacgtgtctttgtggtccaaactttagggagtaatcattagccatttcccaattctgttagtatattcccttttgtaatcaaccttgatttttgggtcatgccacctgtaacagagccgttgctcttatcatcttttgtaacaacatttctcatatataaaaggcaatgctcttgctcatttgaaaatgggctgagcaaatcatttctacacatattctctgaaatttaacttggtgtgagagccaattattgacatctgtcaatggctactccacaagaacaacaacatgtcgaaggaggatcttagaccccctctactgttagcaccaacaaaaatggtgcatcccaatctcagctcccaaacacgttttcccagcaacctacgaccctaaaccaaccattctctctaaaactggacagaaacaatttcactctatggaagactatggtgtccaccattgttcgtggacacaggttgcatgaatatcttaatggcactaatgtgcccactagaatttgttccagttactggtgaagctaaatacgaaggagagatggaaactaaccctgagtatgaacattggatcattaacgatcaactacccatgggttggctttacagctccatgaccgaaggtattgccactgaggttatgggatcaacttctgcagccggtctctggagagctttggaaagtctatatggagcgtactccaaatcaaagatggatgacacaaggtccttgatccagactgtacgtaaaggttcaacaccaatggggaaatatctacggcaaaagaaaaattgatttgacattctttctcttgtaggtgacccgtatctagaggcgcaccttgtagcaaatgttctatcaggcctggatgcagagtatctctcgattgtggttcaaatcgaagctagaccaagtacaacttggcaagagttgcaagacatccttttgagttttgacagtaaaatcgaaaggttgcagacactcaccatcaacaacaaacctaacgatcctgccaatcctcaagccaacgttgctgccaaaaacaactctggatccaacacaacaggatgtagttgtggctcaaacaatcacaacaatcataatcagtattcttgcaatggaggtcgtttttcaggcactcgtggcagtcctcggaggtttcgtggaagaggacgcaccaatactactcgaccaacttgccaagtctgtggcaaatatggtaattttgctgcagtttgctataatagatttgatgaaaatttcatggggtcagatccactccagacaagtggaggaatcaagtcatctcagatcaatcataatgccttcattgccagtactgaagttctagagagtgatgtgtggtttgctgacactggagccaacaaccacatcacctctgatggtgctgctctaaactagaaacaaccctatggtggtaaggaatttgttacagtgggtgatggaaccaaacatagcatatctctcattggtagtggtgttttagacaccaatgatgagaagcatttactgttgaaagaaatgctacttgttcctcaaattgctaaaaatttaattagtgtttccaaactcactaatgacaataatgtactaattgaatttcattctaatgttaaggcaactagaaggtggtgctttgataagtgcttaaagatggattatacaggctagaaacacccctacatcatccacctctcacaggttcaactcaaccaaaatccactaataaaaccaaccaaagtctgcttatctttctgctaattccaatgtaaaccagcttgaagctgatgaaaattctgtgtctaagttagatatgtggcacaggcgtttaggtcatccatcacctaggattttaaatcttgttttagtatcaagcaatgtaagaagatttaaaaatgaaatgcaaacatttcgtgatgcctgtcaatatagaaaattgcatgctctgcctcataaacagtcttccaactgtgccaaatatgtgcttgaacttgtgcacactgatttatgggggccaaccgccattgcatccattataaaccacaaatattacatacattttctagatgatcgtagcagatttgcttggttatatcctctggaaactaaatctgaagctcttaatgctttcatacaatttaaaaatttggtggaaaacaagtttgaaaagaaatttaaaagcctcagaactgattggggtggtgaataccaaccctttactgccttggttcatcaacatggcattgagtttcaacatccatgctctcatgattcagctcaaaatggtcgagcagagcgcaaacacaggcacattgttgaaatgggcctcacttttcttgctcaagctcaaatgccactcaaatattggagtgatgcatttgacattgctgtctatctcattaatagactacctactcccatcttaggccataaatcacttgatgaagttctttacaatcaaaaaccagattatgccttcctcaagacatttggtgttgcatgttttctatgtatacgcccataccaaacacacaagtttcagtttcactcactgaaatatgttaatttaggatacaacaactcccacaaaggctacaaatggcctactcacacaggtcgtgtcaacatatccaggaatattgtttttaatgagcttgagttcccttttaaaaaaggttttctcaacaactatcaaactcctcaacctattataattcatagctcatcatggtctagtcttcctgttccctcatttgagactactgatttctctcaatttggttctgttgatcctactgctacaacatcctctgaagcatcaccaaggtctccacaggttcactcaccttttgttggctcttattttgctaacaacagtcatgtttcaggttagacaggggaggaatatggccattttgatgatcagtttgagtttggacctactcatgactttatcatcgaaactgccactgagcatgagcttgaaacagtcattgctacatcaggttctgaaccagatctggagccacaaccaatactagcaactgctttacaacccacacatcctatggttacttgtgggaaagcaggcatattcaaactaaaaacctacctcaattcatccaaagcatcatcatcctttgctgaaccagaatctgttgaacaagcacacccaggttggaagggtgcaatggatacataagtaattgctctccagaaaaatcgtacctggattcttgtacttactgctgcctatcaaaatctatttggcaacaagtggatattcagaatcaaattgagagcagatgggaccattgaaaagttaaaagcgagattagttgcaaaaggatttcatcagagaccaggaatattatggtgagactttcagccctgtaattaaagcctcaactgtaaggattgttcttaccatagttgtttcaagaggttgggacataagacaattagatattaacaatgccttcttaaatgacaccttggaagaggaggtcttcatggttcaaccacaagattttgtggaaaaagggaaagaagattgggtttgcaaactgaacaagtctctttatggactgaaacaagctcttagagcttggtttgacaaactcaaaaacacactcattgagtggaattttcaaaattcaaaggctgatacttccctgtatttctacaaaactgagaaggttgttatacttgttcttatctatgttgatgacatagttgtaacaggaagtgactctaagttggtggctgaattcatctgcaaacttgacaagctgtttgctctgaaaggtcttggatctctacacttcttcctgaagtgttcagagatatcacaggcctatacctgacacaaacaaagtatattgaggatatattgaagaaagtcaacttgaataacctcaagccatgttccccacccatcattgttggtaaaccgatgtctataagtgaggatgagcctatgcaagatccttcaatttacagaagcattattggatctcttcaatacctttgccacacaagacttgacatagcctactctgtaaataagctaagtcagttcttgcaaagtccaacatcagtcaattggagtgttgtgaaaagagtgcgctgaggtatttaaagggaactaaaacactgggactgcacatcagctgcaacaacaaactcagcgtgactggtttttctgatgcagattgggcatcatgtcctgatgatagacgatcagttgcaggctattgtgtttatttgggtgagacattagtgtcttggtcatccaaaaagcaagttgttgtcatcaagcacggagtctgaatatagggctttggcccagttgcagctgaaatttcatgaatagaatctctactcaaagaacttaaattccctcttctattgccctctatcacatggtgtgacaacataagtgccagtgcacttggatccaatccagtgttccatgtcagaacaaaacatattgagattaatatttaattatgttcgtgacaaggtactacaaaaacaacttgaagtgaggcacatccctggctgatctattcaccaaaggactatcaaattctagattctcttttcttgtggacaaactcggggtgaagccttcaccctttcgtttcatttgaggggaggtgttgagaaatagcgttgtcatcatcctactgcagggtccatggtgttgatcatagttcagagcagcagaggattattcacctggtttaggacaggtgtcatacgtgtctttgtggtccaaattttagggagtaatcattagccatttcccaattctgttagtatattccctattgtaatcaaccttgatttttgggtcatgccacctgtaatagagccattgctcttattgtcttttgtaacaacatttctcatatataaaaggcaatgctctggctcatttggaaatgggctgagcaaatcatttcacatattctctgaaatttaactggtttaaggcaaggagtgcagttacattgagagcttatatttgtgaatgatgtaccctattttgtggataagactcataagagaggttctaaagacatgtagtaggcttcttgagagagcagtaaccacaattgaagagcatgctctttaagctacttggctcatcatatcaaaattaaatgataatatagagtgatcagcttagttatgaggatatgtttttcaatttgcagaactgcatgtatctatctgatacacaaataatgtatttcatatgtttggattatgcaagatgaatgaggtgccataatcattgtactcagttttcatctgctttgttgaatggttctgtcattttagtattcccaggctgtgaagttctgcaagaagttgagtttttatttttatttttttcaaattccttctggagaagggtcttaataccagagaatattaaactgaaacaatacaaagcatcgtgtttgaattcataggaatattatatgaactaacatgtcttgtttttaacttgtgaaacagttttgagtgatcctgtgaagaggttagaatatgacaagaatgaaatgcagtatgtctatgattacaacataattgtaagagtctcaattcctgagctgaaagcctcttcatatgccgatacacttgaggatggtcttctaatcttttcatttgttggttgcacctgcaggagtatctcaaccgttacaagggtcttatattgacgtgcaacggtcttggaataaagcattcagtctggtaaaaagagacggaccacaccacagagcatagagatgtcattttaggtagaattttgattagtgcgtcactgcatttcttcataatatctgttgaatctgcaactggtacaattgaggacaagggacccctgtgggggcttactgcaatactgcttatgcgcatcatgtataggtagacgcgaagatatcaccatcttgttgtgacatcttagctcgtgttagttaccctcatcttggaactgtcatttacttttctccttttgtttatgaaacggttgaagaggattttatttagccttacatctcctccctacatataaactgagtaacacctcccgattatataaaaagcaccggaattaggctattagctggttttaacacatcatatttttcactgttaattttaacggagaaaattgtatattacaattagtgcagtaaatacgggtcggatttttggacacgacacgagcacgaacgacacaaaaagatgtgttttggtacgacgcgttacgaaaaaatatgggtttaggcacgaaatggcacggtatcgtgaattagcacgacaccacacggaaaatatgggcttaagcactacacgatgagcctgaaaatataacacgtaagcacgaataaattaatttaaaagcacgacacattaaaaatttgataatttagtaataataacaatgataatattaatttatcaattaaaataatagtaatatttaaataataattataattatttttttatatgattgtgtaattatagagtaattaaaattatataatacacatatttatagtaattagttcattaattgtaataaaaaaaatatagagtacgaactttatccgtataagaaagtaagctggtcaatttaagaaaaataggccaacttgaatgatacaaatttgagtaggatgcgagactactgggcttgcagttcgtaaactattatataaaatttttaacacggtaatgtactaatttatattttttatggcacgatacaacatgattctactgcatgacctctattttgagaagttaaaaaaaaaaaaagtcagtttagtacgatagtacgataaacaattatttagagctctgattacaatgcactttaactacgacttaagtaaaatactgctaatgtatatatacttcatcctcccttgataatggcggcggtggtagtggtcggctcactatcagctgtttagaattgtattttctcttgtgaaagtattcttagtaggattgccactattatgtacaacatttcacacaaaaaaaagaaagaaaaaccctaccatattactgaggtaatctcagttctcactccgctacaatctacgctcagcttttcgttcttaattctaaaatagagttgatattcatggcactcctatcactctcaactaaatatatatatatatatatatatatatttatcataactacaacaatttttcttttttcacgattaaaatgattctgtttggagactgaaacaggtgctgctgataaagctaaaaattcattatgaggaatctattcatgaattggtggtttcatatcctcacattcatctcaattggttgatgttggtccctctctctccggcaaaggtacgcaaccccatatttttctacctttttccagtattgactaatgaatcttctctttgtggatttcgagagagcccgagaaggaaatcttgtataataaacttttttttttgaaaagaaagatggaagtatccatttacagctaaatcggacaaatgtatacctcaaagagtaaacttaataataataggctaatcaataggtggtgtttggctaaattttttaaaaattgagttaaaataaaaataaaaaattagaaaataaccaaaccttgtttcatctttcaaaattttctttttttgtctaatatattcttttcacattttctcttacataaactggtccgggattgggatctgggtctaagtttgagttcagtgcttgagttcgtagtccgaggtttggggctggggtttgggtttgggtccaggttcgagggctagggttggggtttggaatcgggtttagggtctaggtctgtgtttgggtctaggtccaggtttgggtctaggtccaggtttggtcgaggcccaagattgggaccaaggtcgaggtttggggtccaaatttggttgggtccagggttcgagggtcaaggtcgaggttggatttggatctggggctaggtccgaggtttgaggtttggggttcaggtccaaggttcggggctaggtttggagtggtcgaggtctgaggtgagtctagggtctggggtttggggtgcagggtttgggtctggctccaagcccaacttctggagtctgtgtcaaggttagggtagggttggattcatatcgaggtctgaaatattgaagttcttttttttagtaaaaagatttaaggatatttttagaaaatatttaccaaacacgttttgcatttgaaaactacaaaaattattttatattctcattttggaaaacagaaaataaagccaaacatccctaaattcttttctctttctttatttgtattgcatttacctaggtcaggtctccttttataatcaaaaccaaactagtgttttccaacctactgccttcccactaacgccagtgttgatgttttatgccttaaatctaacatattatatgtaacattataatttatcaatcaaagaaatcgaaagctttcttgacttagtcaaatacttggttcaaatttttgttttatgtttaatacttaaattctattaaattcagaagttatagttatttataattatagtgtcgtcatcatagtagaaaataattataattatatgtttcaaatattttaagttctatgactttatcagtgcagtggatttatactaacgtgataatcaataataaaatgtgttcacacttttggtaagcagtatatcttttccaagatattaagaaaaataaacctgtaattggatgtatagggttacatcgcgataggattgatattgaaaaatttaacatttctcataatcttaccgttacaactattctaagaaaaaatcacttagtttatcatagatcaattaaatttgaatcctgagatgattaagatttaagctaattatgatattttgtgttgtttgatttgttcgttacaagattaccttacgaactagccaatacttacattttggaaacttggtaatacaattgagtgagagtgttagtcatagatataaaaatctattgcttctatttttgtagaaataaaatgataattttatttgagcttattaatggataaatgataaagagttcatttcaataattataattagtttactaaaatatcatttatatatatttttttttatccaaaaaatatcatttatatatattaagggttctaaggataaaacatattgaaaggataaagcaataattttagttcttgctcagtgtaaaccatctatagatgatcattgatt

SEQ ID NO: 111104 - DNA, 2764 bp, Cannabis sativa
  modified_base (2709)..(2716): a, c, t, g, unknown or other
tggaaaaatagtgaaaagatagggtaaaaataaattaggaatgtttatttaggtgaaataaattaggaagataaaatagggtatttatgtgtaatatgtgcgagataaatgtggatttttggctttttttattgtaatttttggctgttatgtatcacatttaaatcaaccattttttcttctttttcttctgcaggacacttggcagactgggattgtaggaaggctgatggtattccatgtggcgtgcgctggttggttttaatagagctgactgggcgcccgcttggtggaaggaggaaggaggacaactgatctgggggtcccacacggtgctggcatgcggtagggattccaggctccacttcctttattcggggatgcatctcactcgccagtctgggccattggatgaagacgtggactgcttggattgagtgaaaattttggccgagagtggggctgcataaggactgatctgatttctttttttaaattgtgattttgacccactttacaattagaagaaggttgagtgtctcacggggagggtggtagcccttaatacgtttatctctcaatcgataaaaaatgtctgtaattttttgacatgctaagaggaaacaaagaatttctctagagtgaggactgtgaggaggacttcaggaaactcaaagagcacttggggaagccaccacaattagcaaaatcaaaaaaagagaaaagttatttctctatcgtggtgtgtgaaggcatatactcagtgtagcctttgtaaaagaagaaggaaggcagtaacaaccagttgattacgtaagtaaaatattagtggacgtcgagactcagtagcctaaaatggagaggttggcttatgcacttgtgatggcttccaggaaactaaacccatactatcatacctactccatagttgtgctgaccagccaccccctatgccaagtcctacaccagcctaaaacttcgggacgtcttctaaagtggacgatcgaactcaaccaatttaacatttcttatgtactgcggacagcgatcaatgggcaaatagttgtcgacatcatggtggaattcacttatcgacctaacaaagaaggaggtcatgaagtattggagggacatgctcaaaatagggaggggaggtaaagtttcatgtagatggggcgtcaaatgtcgcaggagctagggcatgagtggtgagggggtagaagatgtattgtgcagtgtgatttgggttcaaggcatcaaataatgtagctgaatatgaagctttgttggttggcctacgcttggaaaaggagttgaaattcaccaagcttgacatctttagtaattcccaactggttatgttccacgtcaagggggaataccaggctaaggggagtaagatgatggcatatataggtagggtgaaaagttatttggagcagctgcaacattatgctgtaaagcagataccccgagataataatgttaacactgacgcattggcaaagttggcatcaacaagggatatcaataccttagaatcaatacccgtggagtaccccaaaaggtcgaccattaaggaagagcaagtgtgcgtggtgactgatagagactcctggatggccccgtacctcagctacatccatgaagggaagctaccagcagataaaaaggaggccaagaggatagtgtataaggcaacccgttacatggagattgatggggtgttatacaagagacgattttttaccacctcctacgatgcattgataaaagagaaatacagaaagtcatatctgccatacacgagggagaatggagcaatcacgtaggatattattggccctccttagagaaggatgtcatggaatccagcaaaagatgtgacaagttctagaaacatgcaaacttcagctggcatccacccgctgaactcaccaacattactaaccccttgccttttgctatgtgggcgatggatctgataggagcactgccaacaggtagggtaggagtgaagtacgcaattgtaactgtggactcctacacaatgttggtggaagcagaactgttggttcatataaccgccaagcaagtagtctccttcgtcaacaagttcattatatgccggtttggagttccttacaaaatcatcacgaataatggtactcagttcagagacttagtaggagcatattgcgaggagacgggatataaagagaattttcagttgtggtgcactgctaggccaatggccatgtggaggccaccaacaaagtaattaagaaaaacctcaagaccaagctggaagaactcaagggggtgttggttgaggagctccctaatgtattgtgggtttatagaacaaccccccacactacgattatagaaaccccattctctttaacttacgggtgtgaggctgtactccccgtcgagatgcagataaactttaacaaggtccaaacatttgaagaaataaggaatgaggaggcactagcagagagcttggacaaactagaggaaaaaagggaaaaggctcagatgaaggtagccgtataccaacagagagcaaccaggtaccacaactccagggtgtgaatacatgccttccaagtcagacatctggtgttaaaggaaggtcctcctatataccaaagacctcgtagctgctggtttttctggcctaaataaaatccatttcaatannnnnnnntttactaattaataaatatcagaaatgattttatgttgcatggttcac

SEQ ID NO: 111105 - DNA, 3635 bp, Cannabis sativa
cgctcttccgatcgagagagagagagagaaattgtttcaaatgttaagggtatttttgggttaaaggaaattagaagtatagggtgtaaattttaaaaagggtggcatattaagagatcatgcaacacatttagggctagtttggcatagttgtgctatgaaaaaacaggtgcaactttgctgtgagaaaaagcagctgcagcaaaactgtggaaaaaagttgaactgagtgtttggtaaataataaattttaaagtaatgtgagttgttaagatctattataataataatgataatgttataatctaatttattataatcgcaaatgtgtagaaatttattttatataatattttattttaaatatatttttaatttttttcaaacataaatttatatgcatttgataaaaatagtttatagtattttatattatgttttatcaaatgtaaaaaaaattaaattctagattgatattgtttgttaatattaaaataaaatataaattgttttttaaaaaaaataagagatttaataattatttttttattataattaatttattttaaatgtttttatttttttaatatatataaaaaagttaatatggttttagtaaaaaaaatttattataatcttttaattaaaacagttttttctaaaaattaggttggagcaactttagcttttagttgtagcttctccaaaaattctttaaagaattattttttgattgcttaccaaacatatttttatcacagctttttttaaaaaaaattgtgccaaacgagcccttaaacatactttatcaaaatttccaaatgtatttattttcaaaatgaaatttatatgtgtataattatttgttatttgctcctcaaaattaatttattcacattttgcctcccgattttcattcctatcgattgcacatacatacaatgagttttattggaatgaaaaaactcttctactcatatgaaattttgtcgcttttatgtattaacttttgttggttgtcccttaaagaaaaaaagttaataagtggtttataagtttgctgaaaatctcccatgtttgaaagcgtttttcatattttattattgtgtgccaaactattaaaaaaaatggataggaaaaattaatgttgaacgcttcaactgaatttcttggaagatattctaataaattactgaattaataatgccattactattgcctttattgattggaaagtactcattctgacctaatttagcttcaaagctcatcaatagaaattaacttccgcttctagttatttattactctacataaagttaattaattgattaaatatattttttaaaagaaaaaaaccatggcctcataactcagtctacctaatttaatttcaaaaaaaaatatatattgcaaatataaatatatttacttacttatctagttatatttattaaattaattgttttttttttaaaaaaaaataagaagatagagagagtattatcaattctaataaacaagtaaaaaataaataaaactaatatgcaaccccatatctattttttttttaaaaaaaaatgtagctatttatttatattaagtgctcattagaatggtaaaatctacatgaattataatataaattccttttaatatataattttttaaatatatgtagacagagacatactaaaaataatataacaatataataaatacacaaataaattgtttttaaaatatgattaatttcgaagcatatttataatggaaagagaaattgcagtaagctgaaacgcattgtcgtttctcttagtcaaaggcgaaacgacgtggtttttgcttttgttctttgaattatcattttccttaaacccatcttcacacgtcgtcgaagcatcgatcactgaactcaacccaatattggcgtcgtcgtatctcttcgccttgtaatctttcacagccaatttgatcgtcgacaccgcatcactgtaaagctccatacaatcgttcaaacaagccttcacataaggatccaatttagtagtagtgttggtgatagtattattattattattcatcttcttgtttttatcatcgcggagaaggtgtttgatgaaatgccgagtagaagtaacgttgttttttgtcaatcttatcgagaccagacccagttgccggagatcggtggtttggttgctgtcgggggaggaattgaaggagcttgtacagaagttgtacctgatatttgggtcggtgtcggaacactttttgcaggtgtctttgatgagatttgaggaggaggaggaagaagatgaaagggagagaaggaatattgtgaggagagggaaaatatgagttctcatgatgaaatattcaacaagaaaacaaaaattggtttgcactttggattagtactagcttataattcatgatatatgaggggcttttatatatacaagatttagatggtattttggggtattatttattcttttataatgtaattatgtaagtttccttattttattctttaaaaaaaaaagtaattagaattttttttttcaaactttagtatgtactaaattatgttttttgaaattttaagaccgttaaaaaaatttcctgaattgttgaaattattaatttaagaacttttatttaattttagtaagaaaattctagtatgaatgaaagttaaaagggcataattgggtatatgaggtatgatttggaagatattaaagtctgagcagcatgatttagtacataaacaatcatcaaattagtaaaattgaatgaaaaaaattttaaatctaacaatttaaattttttttaatgaatgaaaaagttcagagagtataatataatacatgttaaaatttaagcgacaaaaatactaatttattttaaaaatatatatatatatatatatatagaatttattataaataagtagtcatataaatacaaaacgtgatcaaattatttaagaaatgtaataagaccaattccttcaattaagtataaaaatgttgtaggaccacctttgtaatgataatgagtaagcttagcttctaaattaattatatttcatcataagaaatacttaagtcaaagaaattgtttttttgtgaatgaaaaagtttctacattgcttttatttttatttttttaaatatatattttaaatatgttatatatattatatattttttaatacacttaatattgtatttgaatgtctaaatatagaaattgaactttgattgaaatactattatgctcttagaacccacacccatcaaatatatattgaatatatactcgatcaataaaagcgaacctacaaaattgaagcacaatgacttttaagggcgaagtaactatgtaattattaagccataattataatattttagtaattatatcatattttaaaataaaatgtatattttatattaagtgataattacatgtaaagttttaatattttacttagcaaaatagcataagaaaataatatttgtttagtaattaatatttacaatgaaacgtttttagtaattacacagtgtaattacacttaggtggcgtttggttggaggtattgaaatggaatggaatggaaa

SEQ ID NO: 111106 - DNA, 3578 bp, Cannabis sativa
taggttgctccgttagttgctatatgattttccctgtgaaattttgtaaaaaaaaaaaaaaaagaaaactattttgaagtgtaaaaatgaaaaaatatccttaattaaattagtaaggttgtttaagatagttttttgggtaaaaattgaagatacaaagtaaataaaataattgaaatttggtcacattgtaaaaaaacaaaaaagtacactttttttttagatgtaaattgcaatgctaagctggtcaagtataagaacctgtcaccaagcagtggccgatcccatttttattttcagtgggaagacaattttttaataaaattaataattaataactcaacaaatatttaaagctttataatattcttgtgaaaaaaataataaatattacaataaacgtaaaatttcatctttgtactttgtcatacatacggtcaagaagaaattttatattcatgatctacgattttaatttggctatcaaaaaggcacttaataaaattaaaactaacgaattttgtattccaattacatactagctaaactataaaattaatcttttagtgtgtgtttcttttcttttcttcttctttttctttttcactgttactcaaagatgagtattaattgtttgcacaacggtaagtcaatgtttaatggttataaaagaaattaataaataaataaaaaaaaacagagagagtacatttcataacaaacaaatcttgatcgcataacaaacgttatagctatttaaaactatttgtaaattttttaaaaacttctatataatttacagtaacggaaataaagtttaaacggttatttattataagaaaaataatcgcgcgtacaataaaatatataaatcttatttttagcattatgaattatttaaaattttctaaaaatttataaatagtcttaaattaaaaaacatcgttactctgttttattaaattgctttgctgcatatgcgggtgcagctatcacttggtgttccattccatcactacttaagaagggttacaacttatttcaataattaacttttaattattctgtggtaataaaatagagtggattattaatattgaactcaccttcatctgatttcgccaactcaaccacttctgtttgtattatactttttttcatctccttccccatataagtgacatgcaacaaagtaacaaactaagttggttaacacttatgatataacatattataattataattagttaacgattctctataatttttattaaattaaaataaatagaattaaatattaaattatattaataacgatattatatctcataaaggtattggccactctcttaattaattggtacggtaatagtgtaacatttcaatttttatcaacgaaagcaaaattggaagtatctaaaaagctctttctccttcttttcaattatatatataaatatatatatatatacatcttcacttgtaacgctttctttctccatcttctctgctgatctttagtattattgatcggttcttattccgttgtagattacaatatttattagtctgaaaaatacacacacatatatataatattaaatggaaaagcttacggtatcatcagggttaaaggagctgtttttgacaatgtttctttataatttctcatccttcatgacaattccaattattcctgatattattttctctgcactttgtcctggaaaacaccaatgcactcttgccatttatcttactgggtttcaacatgcggtactaattctatgtcatcagcttctcaatctcaataatgataataataattagatttaattcatcattttctttctgtctttcttatttcttgatcacttacctaagaatttattgtataaaaattatcatttactaatttagtttagtttagtaaatcaagctcttttatcatttctatgaattttatcacctcttactctactaattaattttttttaattgaactctttagtataatgcatgcattttattttattataattgagttttcttttcttttcattctatttttcgttgatgaacttgaatatctttaattgtgagtacttgaattgatttttgtcaatttgtttcgataatggcatactattaggtgacgtttaattgagaggaataaaactataagaataaaaatgaaaataaaaattagaataggcataggaatgaaagggattcaacttttttcatcttgttgaaatgttctttttttctatcagaaaattaaatagttattctactaaaatgatgggaaaatccttttagaatgactattttaatactttaaaataaaaccaaacaaaaaaattaaataatttttttttctttttttattctattttatgtcattacttccaactaaattaacgccatcttattcttgtaaaagtctacatattttgtttttctgtctgggaaaaagtattctcacccaatgcattagttgtttgttggctttgttgttattttaatttgtactaattaagtgccacacttatggatgattcttatataaatacatatttataagtctaaaatgaccagtccttaattaatttccatcttgcccatttaacaacacatataatgtggtttggtgcagattatagggctaggaactctggtgatgactcctttcgtagggaaactttctgacaagtatggaaggaaagctttgcttaccataccacttacctttactggcattccattaggtacatatttctctaaataatattgcttaatgctctaatttatagttttaaagtatatatttatatataaatgaattctatgtaacattgttaattagtttaatttcttttgataattatgtatcttatagtttttagaatcttttataaatttttaaaaaattttaaataatttatagtgttaaaataaattttaaacaactacttactacatacaaaaaaacaataataagtacaataaaatattcacttataagtgtttacaatgtacattattataaaatataataataattaaaaaaattagaatcagcgtaaggtattattttatcgttataatctaagatattattacttaattcaaaagaatgaaaatggatttcataatattatggaatcaatcatattgtcataacaattgacttttagtttaccatatattgaagcttattatatctataagttataataattaattaatattaaatacaagtgtaattgtggttacaggcatattagcatacagcaggaccaaaagtttcttctacctctactacgtcttcaagactctcattgctatggtttgtgaaggcagtgtccactgcctcgccttcgcctatttggtaatacttttttttccttttgttaacaaatcaaatcaaattcactcttttctttactttttttttatttatccccttaaaaaataagcgaattttctttcacggtttttcaaaaaataacacgaaaacaacataaaattaacaagaaaactacataaaaacaacatgaaaataacatcaaaat

SEQ ID NO: 111107 - DNA, 6326 bp, Cannabis sativa
  modified_base (45)..(49): a, c, t, g, unknown or other
  modified_base (139)..(148): a, c, t, g, unknown or other
  modified_base (235)..(243): a, c, t, g, unknown or other
aataatttacaatataaaatgtaatgttcaaatagtctattttannnnngtataaaataaaatagtcatgcgtgcaacacactgtttgaacgtaattttcactgtgttaaattctttcgaatttcttaaaattttgcannnnnnnnnnaataactataacgtacatgaccataagaaaaaatttgattaaaaaattatttcggacgctaaaacagataggggtgcatcaatatannnnnnnnnaggagatgcattataaaattttcctaacttttttatttttttcaaaactattattttcatcatattttattggttttgtacataaaggagagtgagtattatcacaattcttcatcagtttgtttgtgtatttttgatgtgttatgtttatttgtgtttatttatatttttaagtgtataaatagttggagattttaatgagtattggagaatcagtgaatatcgtttcttttattatttaattgttatagcgaatttttacttttttaaaatttaatttattttttataagttaaattcttacctcatttatctttttttttttttgtgttttgtaggttggttatttattcttcgaagcagaacaattcacaaattgcagaagatgtaaacttattggttacttcatgtcattgatgcaaaagaattagcaataatggcagtattggattggtctcacatattgttcttcctctttgttgtgtggagtctatttgtgtagctttggcttatgcttttcattagcgctttctcttttgtaatgacttagttttttagatatttttgctagtttactttccagttttcctgagacatctctagttcatgttcgtttctcatgaattagttgtgcatgcatttaggatggatggtgaattagcttagattaatgtttatctatcttttcttattaatatgtattaaactctggttcaaattaatatgagtttaatttaaaaaaaaaaaaaaaaagaaaaaagaaagatagatcatcatgtaataatttttttacatttaataggattggtggagttttttttttttttttttttttctttttaagaaaggattggtgtggagtttgaatgggttttgttagaaaggatatttttagtttttagaatattatttcaacatgtatatttaaatatatttcattgttgtggttatcatatatttacgaaaaaaaaaaagaaatacaagcaacttgaatacacgaccataagttggaatcaacaagaaacaaatttgtaaagatatttatttctccttccattttataccccaaatgattttctttctctcggtcaaactaaaagttttaggctgaggaatagatcatgaggctacctcttatctattttctatttaaaaaaaaggatatttttattagcattgttatagattatcacatatttacgaaaaaaaatacaagctactctaatacatgaccacaagtcggaatcaacaagagacaaatttgtaaatgtgaaacaataattcgttgaaattaatcagcacaaaaactaggaattcaatagctcgtcattatttggaaatgtaattataaacctattattggccccaaataaacttaaaagagttcttatttttgaatcatgactagtgatgcaccaagggcttttctatttgcaatgggcacacccattttagtgtacttacaggtagataaaatgtaattattataactttctattgttgcttaaaaaccaactgtatatgtagctcttatcattcgaagattacaacaccattgtacaaattaaaaacagaactatacgaaagaatttcatgttctagaagatggatggtttgaggttgaaaccaatagaaaatagtttctatttcatgtttccccttagctcagccaatcctttccctgcagtctcaatctaactaacaaagaccacactgaaatatcagctacccaaaaagtcactactatctagaatttaattttctttgccgtcataactggactcaaccatctaaacagtatcatggaactcaaaaaatccattgttactgttgttgttgttcatatatctgcatgtaagtctcggagagagcaaccatttgaggaagcgtttcttcaacatgcagatcctgcatggcgtacctacaaaatttgatgcaatattttaaaatctagcagttgttaatgcccacattaaaacaaattaatgagaattaccatgattcttccgactttctctggacaaataccctgtaagaaccctcaccaggctttccatcatgaacaatattggcaattaaatcatattttgagcgtaatctctcgttttctttaggtgttggcaaggggatgtaatccttcagttcaaggttctttacgggaaagttaactgcaatggaaataatcaattagcaccagaaggtacacaagaagcctaaagtcttgtcagtacagccccttgtaaagtatgtcttcaatgacgtatagtctcacctaatgtaggattcttctcaacaaagaaattgttttttgtaaatctccgcatgtgtagaatgatatattgtggtaatctggtaacccgatacctcattcttgctatgcgaggtcggactacttcagtgatcatctcaccatcaaatttcttcagaatgttgaacagagggacctatgaacaaaatggaattcagtgtttatttgagaaaataaaaaagaaccagatacattagactcgtcatatttcaaatgtggtaatttaaaaaaaaaaaaaaaaaatcatgatgatggaaaaaacataacggcttattaaaatgcctctcacactgaaacaattctaagatctgaatgcagtgtgtaccttaaaaatatctaaatttcaggacttaaactaatttacaagtttgaagattttgtttcccctttcaagtgacactttgaaacagagagatgaaggtgaatttcttcaaattaatgtgaagagcatgcatattatggttccatattttaaaagtgcttttttttatcctggcttaaatcaaataattttttttttactttaatccttactgtcagtctcagaacttatattcaaagcctttattttactatttcaccaaaaagcaaaaaccctaatacctgtggtataatatttttctccatcacatcttggaaaagaggaggtggtggcaaatccagtccaagcattaagaatggcattctgtaagtttctgtgaaaatgccattgtgctgagtaacaccatcaagctcctcaccatcttctttcttttcagtaatagatttgttaggagtctccttcacaacctccagttctccctaacagcataggtaatcttagatgaatcttgactgaatcataaaagcaagccgcaatatggattacgacagaatatgaagaagaaaacatgcaaaaatggcaaagtcagaatagagattgaacctgaaagcaatcataaatgatactgctatttttctttgaatttctaagatctgaatgcagtgtgttaagaagccatgacataaattcaactggatccgactgagctcctatcctaaaacgctttttactggctttcataactgcctgcagaaactcgtgtgggctcacctacagattaaaagttaaaaactataaacttcatattcaagaatcatagattcaatctttaatgagactcttaagtcttcacaaacctgtcctttgaagtttcttgtatgccaaatctttcgtgttagctcaccatatcggtgaacaagaggcgatttacagtgttgataattctcaggaatgaggaaaaagtttcttaaaggagttactctcatcagtgactgaattgtaacattcacaaaatcagtttccttaatattattaagcccaacctgaaatttaaaaaattgagaaaccacaagaaaactgagaaaatggtccagcactaacattcttgggaagcaacacacaataacaacaacaagaatgcttgctaatagcacaaaatgagtaccattccaggaagataatcagaaccgtcaagtgcccttgaccacagcttatttttgtcaagttgttcaacttgttcgtgggtgaacctgcaattatcaatatattagttctgattatctatgcaattatgaaacttaagcagatgtctatacaataattttatctctaagaatcagttaaatacatcaagcaaccatggtaataacgcccttcaaactatatcaacatatgtgacagccaaaaagtataatataagctttttttattgtcttcgcgtaacatatatagcccatcaaagagaagttggcgacgaaaaccaaagaaaagaggagatgcaagtaaaatgtaggaactagaaacaaaacatagacacaccttggatttagaacatgccgaatatcatctaatgacggatcactaatctcatatccatcaggaaggcaatacaccttttctgtttgaagatttataaaaacatggtgtccggcttccagactgtgagtgtaagcatgagacttcctcccccttccttggtaatatttcccacaaaccaaacaggcgtagacattcaaattcgacagagaaacagagcaaaacttctcaaaatcaaaatccaaaacctgaccaggagttgaaaaattaacaaatatttatagacaatcaaaaaaagcaggccttaacaaaggctaagacatgttatatacctggcgattaacagtatccagatatgggcaatcccttctaatctcaatgtcacggcttctctttacctggcctccttgatcaagtggataatcatcatcatcatcatcatcatcttcctccacttctggaaccccattccgttttgtaagaccgttaacaggcggtcgattttcttcatcttcatcctcatcaccataattaaaaccgggaagaagagagttctcagaggcagctggaggacttgaggaagaaagggacgaacgggaaatcactttctgtcgttttggatcagaatcagaagccccatcctcgctgactaaaacagtatcagcctcgcgttctcttttagatttcatgtctttcacacagctaggttgatgccaatcactcaataatatgcaccaataaactgaagagtaagaacgaaatataagtttcaggaaaccctagaaaaaccctagcactcatctaatcatacaagttactaatttaatataatgaaaattggggataaaaagtcgaatgaaattacaaatactgcctccaagctatgagtgaacacccttttaatacacctggttgaaggagttttcacaaatgttggagttgtcttacaatcttccatctaacaataaccaaaatagataataataaactcagactatacagccagcatacaacacgcaaaattaatcctcagaaaacaacgacagagaattgagttgattcaatcatcaaccagcacacaacaaagattcaaccaacgacattgaattaagttgattcaatcgacacacaacatatgtacaaaaaaaaaaggaaaacaggtgcaacaaattagtaaaacatagaattacgttgattcaatcaacaaagaattgaattatgacaatatcatttctattttcgatgaatttgttaccgttggcggagactcaacaacattcgacatttaatcaacacagacagaatttgttggacacagataaaaaaatatatagcaacaaaggaaaaatagattgcctgactgacagggtggtcggcgactgaatgtgcagcaaggagactggagagcgggtcaggaggataaggcggcggagaggggacggcgggaaggagtgtgaccggagagagagtgccggggacagctgaaaacggagatgagtggaggtggagccgtgagaatgaatgagagaagtttgctttgagaccatgatgaagccctagattcagtattggacttgtacaaatgggcttgttttggggccgagagcaaatggtattttacaaactcttggaaaaaaagtcgtaataatttacaagagtaataaaatagagaataccaaataacactttgtaatgattttgtaacttgtaactcttttatttattgagtaaatattgtttacaaaacttttacatattagttacaatttgtaacttagtaagcaaatttgtaaacttgaatttaagatcggaagagcgtcgtgtagggaaagagtgtagatctcggtggtcgccgtatcattaaaaaaaaacaaaattttcagtgcaaaaacaactgcggccaattctaaatcatga

SEQ ID NO: 111108 - DNA, 4986 bp, Cannabis sativa
aaaataatttccaacatataaagcctgttagattacattgatagtggtatcaatatatgtagagttgtattagataccaataaatgtatgtttggctcaagtaataattgatgctatctcattgatacaactagagtaccgagtataggctaatattatggtcaatagtactatcgtacgaacattctagactcagtaccgcatgggacgcaaggataggattatggttgtctgtatgggcacctaattgtaatcattgttatatttttaactacaattatgcttttcttacagagtgtgttaactcacatttattatttacatgtgtaggtaagggcaaagctaagacttagtagcagtgagtgcgactggatgaagattgtacatgtcagggcagttaggcttggaatgtacggtatttgggacaacaggcagtattttgtatagtcactaggcaacaacttttgtatcgaatattttgtatcacagttgtaattattttaaacacggaatcccatttttataaaagttatttgttttcaatttaatagtaattaagtaaagttttaaattatcacgattttcaataaaattgtttattaaaaacggattgtacaggtaatataaaatcactataacacgcctaaccttgtagggtgttacaatgtcattgtcaaactatttcccataatgtgacataattttctatggcagcccaaactgacatataatgttctaactacaaagtcgaggaccttcttggaagttgttgtcgctagtggctgagcttcgatccacttagtgaaatagtcgactacgactttagtatattgtacacctctttttcccataggtagttgaccaatgaggtctattcccaatacagaaaaggaccaaggtgacatcataagtgtgagctcatttggtggtgctctcaggatctttgagaatctttggcacttgtcatatttcttgacataatccattgaatcctcgatcatgataggccaaaattacccttttctaagtatctcttggataggcttttcccctaacatgattgccgcagaagccttcatgcacttcgatcaataacctctcaaattctgtctcagcaacacaccttagaagcgacattgagaaatacattactccgtctaggattaaattccaagaagcattcctccttatttttctttcttcatttttatatttgggcaagactctagtctgtgggtatgtgctatgggtgtaatcgaggttagatggtcatccaacatgccaacctcttttggaatagtaattcttcattcttttaagaactgtatgggcaccaagttttccttctcagtcaaggtgcttcttgctagatgggcgagtgcatcggcttttgcattttcttccctgtgaacttgccttatagtatagcctttgaaccgacttaatgagtcttgaatttttctcaaataggctatcattctttcgccttaggctgtatactcacctaagacttgatttataaccagttaagtgtcattgtacatgtctagatggtcgtctcgtactttgtgtgctagcctgaggcaaacaatcaaaacttcatatttagcctcattgttggaggctttgaaagtgaacttgattggcccgtgtagctgttgtccccaagtgtaatgagggcagtgcctgcaccggacagatggtcagtgtagcttccgccaacatgcaacctctaggttgaatctttgtgctcttgcttctactcttgctctcgcttcttctttagctcttacatttttcctaaatcttgagagattttaggagatatgcccgtacattcaaccacaaagtcggcgagatcttggccttttattgccattctttattggtatgtgatctcaaattggccaagctcgaaggcccacttaagtagtcagtaggatgcttcaggtttctctaacacttggtcataacgactagtcaatgtagacctttatttggtgagcttggaagtctggccttagctttcttgattctaagagcaagtagtatgtctgcttctccatgagtgggtatcaactttcaatgtcaataagccttttgcttacataataaactagattctagatgccatcttcttctcttattaggactgcactcacaacatattttatgacaaccaagtatatgcctaattcttcattgtccagaggttttgataggagagggggctgagctaattggcttttttagctcttcaaatgctctttcacactcttatatccattcaaatgttttgtttcctctaagtatgttaaagaaatggacacacttatttgttgattttgacacgaatctacttaacgttacaatgcatccagtcaggccttgtacttcttttaattttgttggtgacttcgtatccaaaagagctaagatcttgtctaagtttgcttctattctcgtggcatttactatgaagctaagaaatttgcctaagcctactccgaacaaacacttgagggggttgagcttcatattgtaagatcggaggatcttaaagcattcttgtagatcctcaacgtgcccctaacctttttcaattagatcaacatgtcgtccacataaacatccatgttacgaataatgagatctttgaacatcttattgacaagtctctgatagatggcccctgcatttttcagtctgaaaggtatgaccttatagctttacattcctaggtctgtcacgaaacttgtatgttcttggtctagtgggtgtatttttatttgattgtaacctaaataagcatccataaagcttaggaccttaagaccagttgtagaatctactagctgatcgatcctttaaagcgagagatagtcccatcgacatgccttattcaagtcagtgaaatctatgtacaccttccacttattgtttggtttgggtaccaacacaaggttggatacccaaagtagttagaaaggtttgatgatgaggtcattggtgcttagcctttccacatcatccttcagagcttgcgcgcactccttattcaataacctctttttctattatacaagttaaaggtttagatctatagttagtgcctgagtcattacaggagggtatattcatcatgtcttcatgtgaccatgcaaagaggtcaaggttttcccttagaaattttatcaaagttcattttatttttcgtactaaacccttcccaatcttcaatctcttgttcagaagagttgggtcaatctccacttcttccaattcatccataagtctaaagctttctacacgacccccaaagcaaggatctatgtttgcctccccgctttgggcaggacttcatggccctttgccagtctcttggtcagagcgcttggtaggcatcttctctttcttggcttaagacaaagctaggctgtaacaatgttaggaagactattgatctccccttaggaatcccaccccataccttgttggaaactttaggcataggaggtagattgatgttgccgctttcaggtcatataaggctagctagcctatcattgcattaaaggctgacgacccatcgattactactaattgagccataatgttccttgttgtgggactttctttgactgtcaggggcagtcagatgtaacctaagggtgcgaggccttggccaaaaaagccatacataatttgtgtacatggtactagctttgttaatttgagccccatttttttgtaggattacttaaaaaggatgttggaggaggccacgttattaaccatgcacctagcaactatcatgttccctatttatgcagttataaataaaggttcattgtgagggaacctgacctgagtagaaactccctctataaaggagatggcaggctcttcaaacttgagttatttggagtgtctctctttaacaatgaggatgttggttttttgctcgtgatggagagtctgagcataacgctccctagctttgcttatttttcttactatgtgggttctgccaattatgacccaggtgacctgtcactggtggtggcatcaggtcccaattttggaaagcttctgcctgagtttggttactttgcacataacgatgcaagtggggattatttttccttatggggaatttaatatccttttccaaatgtagacactcgtttgtgtcatggccaaagtcattgtgaaatcgacagaatttggacatgtccctcttgttgatatccttttcgattgaaggatgcttcttgtatgggacaacaacttaattgagtggccatctaaatggtctcagtagtctcggttaggagggtgaaggatgtgtacttctcctccttttccttttagttctgtggtgtagggaaagtattgtacttaccgctagaggcctagccagcattacttctacttgcttgtatcttacgcaggtcttgggcttgcatggcaccctgagactgcctgctattgacctgccctcttgtctgggcttatcagatagcttcctcaagctttataaagctatcagctcgctttaggaactctttcatattgtttgttgagatcatcctgatatctttccaaaagtcactcaatggaagaattccccccagtacggctgtataacgaccttcttctgttatttgacattagtagcctcaaccataaacctttgaatgtattctttcaaaggtttatcttgtctttgctttacctcgacaaggtcttctagttatgatggtatctgcctcgaggatgagaattctgtgtctcaagaaaattcattccaagaattgaatctccctaatgccagcataaaataccattgctgggctattttagataaattttctaggaagatacgtcattgataactctatggtatagagttaatttttatgcttttaaactaaagtattgtgagaagagtagtgaaagtgtgtttattttgcttaattttaa

SEQ ID NO: 111109 - DNA, 2376 bp, Cannabis sativa
aatttataaatcaaacaagtgatctcatgaaccaaataacacattaaataagtaatgaaataaatctgtttctttattgatgtttactgagtttttcgacaactaaatatttctagagcttaagaaggtaataattgagtaaatagtgaaataacaaacaatagattttgacgtggttcaggcattaattatccttatccacaagtctattttattaggctccttggttgccaactgtttatacaaataaaggtacaatggactaagactccttcccgtcgtgttcctcttaataaagaagaagcttagtcggaatattctacagttaatagtagggttacagacatatgtttgtttggaatcatgaagaatgggtcttcgatccaaaaagaaaggtcctcctctcttgtgctttgtttggggtatttataggccaacttcatgtatacactaccttggatggatcttcattggggcaagatatagttgttggattggtaggtagcttttttcccatatggcatttaagggtgtcagatcgtactgaataaacaggctaggccttggacgcctgtcactttagggcttctcttatttgaatttctcttatccctagctgttggattattttgtcaggtactcaaagacacacatgctctatactatggtgtgtcgtgggagacaacctctaacgtcatacctgaacaagcctagtccttaggtccatagactgacatgtatgggtgaagcttctacgggttaagagcataactcggttccctgtgtttcagaatgccttggcccctttgggaaatccatgctcctcgtggaggttgattgccttaactcttggaaggcaaggggatttcggctcacgaatcccctttgtgtggctagcagttagggaactcccctacacagagactttttccacgaggtggatgcctttccttcctagagcaccaattgggagattagggcagctaatgactattcagccttccttgattagaatccacacatcatgcttacaaaaatgcggataacatttacccccaagctttcagggcgtaacatagtcaaggagcttggagtatcttcccctaagtggtttcaaacatatgagatttatgatgaactttttgttgtattacgtcatcagctgccaactaaagtttcattattcagaagttatgattacttctattttcttgtcagggctttaaatattgacttttttagttttgcacgcatgctgggtgcgtgtgttgtgggatactcaaaaattgcggtgattggatttgagccaactttccatttgcttagtgctttttgtgatgcatgcaatgatggaagctgactgttgggaggtaagataccctctcagcttcctacttatccaagcttcagatgtcccttgggcaaacgagtcaaactgttcacttcttgtggaaggtgcctcctctagatacccattaaataccctcagcaattgtttcactcctttcattcttcccatctatcaaaccagagttcttgagttccaatttttctcccgtcttgcaaaactttatcgatacctctatagtcggacactaattcctccggcaaggacactgcactaagatcaccagcctcacatttctcttgacaatgggtaagttttcttttttttatatatacttgttgtaaagtttttgagggagttatgagggtgcattttctttaggaactctagttccatatctgttgcctctaagaattttgtggtcgtgtgatgaccatttcttgcctttgcactgacttatggcaggtacatcaagtatgctatgcagagaactctttcttccaaagcgacaggcggcagttctaccaggaagaagcagaggcttgaggtgtctgttctaggaataggggcccacccctagtaccatgatcctccattgaggcttggccagcctcggtcttctcattcttcagccctggcaaggatccccccatggggtacacctttcctaggaaggttgttcctttcggccctctcgacatgcaaaaggagagggaagcaaacagggccctaaaggggcggttggaggccaaaagactaaaagttcacaggagggtggtcgtgctgtcggcggtccgtaaggccaaaatctcagatgggatgcatgtttttccacctacagggccgaccgtggaagttaatgccttctagaagtggctgacctacaaggtggggagagaggctgcaccttttactgccgagcttttggaccaagtggccgggagcgcctctattgtgaaaaattgtatacgcaagtgtacgcaatcgtaacaagtaataaagtgataaatcgagtatcgtctccacag

SEQ ID NO: 111110 - DNA, 4411 bp, Cannabis sativa
gtatgccgcttgcacgagacgtggtccaaacctccaagagacgttgtggtgcgccttggccacgagtctcaacacgagatgacacaagtagtcattcgtgggctagtttgcagacgcgcatgggacggatgtaccatgctggaaagagatagagatctaacatgtgctgctagtttggtggtttgtctcgagggcctgccaacatgcattgaggcatggcgccttgagaatcagtccactttgagtcaaaaagaccacttttgattgaattatggaagattagtgagaaaaaaataaccacaatcttaaaaagaatgttatagagtccaacattcataatatgtaaaaactaaataccatatataaaatgtatggactattctcaatatcaattggtgtctagtatctccttagtgtcataacactgttagtataattaaatattaagtctcatatagtttaagaaaatcataagaccgccaactaaaaaaaatgttagaaaccggtgccaatagcactaccctgcatattacaattctaataatatgaaggaaagtaaatttaatcaagaattaataaaccccaaaagagagaaaacatcttaatagcaaaatgcacgggaacctaacacgtcatttcctcgaataatgatataatatttattcaaacaattggaggaaagcaaaaacagcaacagatggttgtcttttaaaaatgaaaggtaacaaacaacaactgagtagagagcaaacaaaaacaggctgatatttatctaagcaaaacatataagcaggtggttgagaaagaaaatattggcacatgatccacaatcctccaaagcttagacacttcagttaaaatccgagattttagttctcatagatctcatcaccttcttcttcttcttcatattcaccttcctcatcagcagtggcgtcctggtactgttgatactcagcgaccaaatcattcatgttactctctgcctctgtgaactccatctcgtccattccttctcctgtgtaccaatgcaaaaaggccttgcgacggaacatagctgtgaactgctcgctcaccctcctgaacatctcctggatcgatgttgagttaccaacaaaggtagacgccattttaagccccaatggtggaatatcacaaacacttgatttcacgttgtttgggatccactcaacaaagtaagatgagttcttattttgcacattgatcatctgttcatccacctctttagtactcatcttacccctgaacatagccgaggcagtcaggtatcggccatggcgagggtcagctgcgcacatcatgttcttggcatcccacatttgctgagtaagctctggcacagtgagggagatgtactgttgggatccacgagaagtcagaggtgcaaaccccaccatgaagaagtgaagtcgcgggaatggaatcaaattaacagccagcttacgaaggtccgagttgagttgcccagggaacctcaggcagcaagttacaccactcatagttgcagatatcaaatggttcaagtcgccaactgcaaattgggagaaacagcaaaatcagacactgtgaagattgtcatgctaaatggtgttacagttaatggaagaagtacacacaaattaatacttacaacttggtgtgctgagttttagagtcctgaagcaaatatcataaagtgcttcattatcaagaaccatgcactcatcagcgttttcaaccagttgatgcaccgagagggtggcattgtatggttccacaactgtgtcagagacctttggagaagggaaaactgagaatgtgagcatcattctgtctggatattcctctctgatctttgatatgagaagtgttcccataccagaaccagtccctcctccaagtgagtgacatacctgaaaacctgatccaaagcaagaaagggtttaataacattaatgatgataataataaataaaagcaacgatctttactatccataataagaaaggatgtactgagaatcaaaaggctattacattctattatccaattgacattatatacttctatctcaaaatgttccgagctttttgtgtcgttgatattattcagtgtcgtcacaattaaagactaaattgtagtacaaataaattatttccatgagtaaagaactagtaaagtcactgtagaggacatgccggcgaaacaggaccaatcaatcctggccctgggtttgatcaattttattcactgccatgtacattggttaaaatattaatattaaaaatatgtcggtgcgtatatatatacccggaatggttgggccatcaaataatgacagaaaacggatattaaaatattttatttgtttgtaaaaattaaaaaaatatattatatatcttgaaagatagtataagattctatgatgactgtcaccacgccagacaaaaatggggcctgcaaacaactcagccggcatgtattatatgattatgtgtctctaaccccaatccaaatccagaaacaaaataagcgttaagcctagtctccaagtttacataccagcacactgacaaagcaacaaatgatttttacctaccattaaagtaactagatcttatatttttatactaaagagtgaagacacagtcaaaaaaaaaatacaataaatgtgtagcatggagtactgtcttataaattaatgtcgcatcatcaggccttatattacttaatactactttgacaaattcaacacggactatagaaaagaaaaatatgtacacaacaaatcttaccgtggtaagatgcaatgcacatgtgagataacagatccaagtatcaaacactgataaagagctgaagaaacagtagtacaaacataaagaaagaaacatatcaactaactttgaggttacattatctattgagatcggatttactgctctgtaacaggcacaaaaaacaaagaacctgcccatttcgatctcatcaaggtcaataatatagcttatgaagacccattactatatctatcccatccaattatttaagtcacgactaagatccaatccaacaaaacaaagctaaagacgtattctttataaacaaaagcaaatcagttcaaataacgcataaatggtgctcatagtttttttttttttacataaaacatagcagaaaaaacagaactgcgaactctataagtctaaattttgctaaaatgcctcaaatctatagattaattttgtcacatgcagcatcgcgttagtataatattcaattgcaagtaatttagaacaaaaaaatatatgaaaaggtaaagagaaaatattaattacttaaaatttacaaatcacatcaaatatttgtttccacaaatcaaaccaatcgaataagttatctacacattaaactaatccttttaataagtcgatactcttaaaaataagattctaatgcgccaaactactcaaactagattcctataatcacacaaatgaacggatccaactaaaaaaaatctcagatccaacattaccttgaagacagtcacagttttcagcctctttacgaacaacatcaagtaccgaatcgatcaactcagcgccttcggtgtagtgacctttggcccaattgtttccagcaccggactggccgaaaacgaagttatcagggcgaaagatctgtccataaggacccgatctgatgctatccatagttccaggttcgagatccataagaacagcccgaggaacgtaccttcctccagaagcctcattgtagtagacattaatcctctccaactgaagatcagcagcaccatcgctctggtacctcccggtagggtctacaccatgctcgttacagattacttcccagaacttggaaccgatttggttaccacattgacctccttgaatatgcaagatttccctcattgtcgaagataacgattcaaaggtttagggttcagagagaaaatctgtgaagagaggcggagaaatgaagaagagagaagagaaatataagaagtgtgagagtttgatggtgggagggagatgccgaggttaagattgtaataacctaacctagagcgggatatttttaaagcatttctttttatttaaatttttaattaatttcattaatataatactccccactaaattgatacaaccccttattattttgtcatttatattgtcatttataaaaaaaaaaaaaaaaaaaattaatctagtctatttttataataatatatgttatagttatttaaaacacagtgtaaatttttaagaaatttaagtaccgtttggtaatatttttttaatcagttttttgtttttaaaagtagaaaagtgaaaatattttttaaaaacatgttctataaaactatttttacttttcaatt

SEQ ID NO: 111111 - DNA, 12122 bp, Cannabis sativa
  modified_base (36)..(71): a, c, t, g, unknown or other
atatagttttacataaaaatattgtataaaatacannnnnnnnnnnnnnnnnnnnnnnnnnnnnnnnnnnncgttccaaacgagcccttaagaaatattgttaactaatcgtgaagcaacatctataaaaatgttagacattactagtgcccaataacaatactcataataaaataattattttcatgtttggcaaaatgcgaggttaacactaccccggattggaatagaagtaacctcgttcagtgtttggctagaataccattatccaagttgagacacaactcagttgtaaatccccaaatatataagagcaaagttcaacactttcaactcctcagccctacactgttacccagaccgagagcgatagagaagagagagtgagtgaactcgtgagctttttccttacactgactcagttcatttcccacctccgacggtctctaatttctggtgagtctttctttctttacttcttgatttctggtttttttttgatgttttattttaatttgattttctcatcaattaaacgcagatcaagagttcaccctaagtttcttgcattttataattctattaagataattttcattgaatttattcggtttctgaagttttaattgttttgattcttcgtacgtgtttcacttggcattgttgatttttgttaagggtagggttggtttgataatgacattgggatcggctgattgttttgttttttctttcgaaattgatggagttgtttctttttgatttgttctatataacacaatgtggtgctatggtgcataaacttaggtgtattatcaaatttggattcagtcatagtcccgtttggtttagcttctataagctcttagggctgtttggataaagaatgaagaatcattttttaataaaataatttacataatttttaataattttttttttctttataatgatattcaaacaatttgaaaagtaatttttattagaaaaaagatttccatataataattctaagcttatacttattttatacttctggctataaggaaaagtaaaagtttaaacaaacagagcctttatattttatgtaaagaatatataatgagagctgttgttattgattggtacacttctttctttttttctccagcttgttatattgagatattgacatttgctgaatttggcgggcagcacgtagttgtatagttgtgcagctatggcgagtttggctttaaccagtatactggaaaaggtatatttttgagttgtgaacaatgattttgtgcaattaccatgttgtcttttgtgatagatgattgagttttaaacttgtatacagatgacgggcaaagataaagattacagatacatggcaacttctgatctcttgaatgaattgaacagagataatttcaaagctgatactgatttagaggttaagttgtcaaacatcatcattcagcagcttgatgatgttgccggcgatgtatctgggttggctgtgaagtggtacaatgttttctctgtatatccactttacattgttgtagctgttattgaattatttgaaactaaatggaaaatgctatctaaatttgctcacattttcgtgtgttcttgtagtcttgctccattggtgaagaaggtcagcgaagcacgagttgtggaaatgaccaataaactttgtgagaaattgttgaatggaaaggatcaacatcgtgacattgcaagcatagctttaaagactattgttgccgaaattgctactcaatctcttgcacaatctattctagtttcaattttgcgacagttgattaaagggattactggcactgtgagctttcttactcattcttctatatgggaatttagtttataaagtcattctgtagtagatgttttgtatgattactgggctattatttacttagttcatcctttacacatcttctcttgttaattctatcgtgttttctttttcccgactaaaaagaaatgcttgttaaggcttcttactaatcacttactgcacttattttgtacagggtacaagcacagagataaaatgtgaatgtcttgacattttatgcgatgtcctgcataaatttggaaatcttatggcaactgaccatgagctgctgttaggggcacttttgtcccagttgagctctaatcaagccagtgtcagaaaaaaaactgttgcatgtattggtaagatcaatgtaatactttatgctatagttgattgttttctgaactcttcatttaataatatttgctaagtgttgtttgttttctcatttgaagtttgtttttctaagtcttgttttgactagaagctccactggttgtaatggaattataatatacaataaactcagggggtgtttggtgttggtttttgtttacacgggaatgtgagcaagggaatcacatgtgggggcatgtgaaactcaagtttacaaaattattcactttacccactaaatgtttgtgggccccactacatccccacctaaaaaaatacactaaacaaaggatttaattcaaatgcccccacatcctaacacttatttccataacaaacgcccccttagtttcttttccaaaaaagagttttaacttatgatctttttctttcagcatctcttgcttcaagcttgtccgatgatttgttagcgaaggcaacagttcaagttgttcagaacttgagaaataaaggtgcaaaatcagaaatgacccgcacaaacattcagatgattggtgctctaaggtgagtgtcaaaatgtttattttctgtcttctaaatatcttttcacgttccgtgtttcttattgtttaaaattcaaaattttcttttgctgatgagttcttgtatgtgcttcagtcgggctgttgggtatcggtttggaccccatctttctgacactgtccctgttctgatcaattactgcacgagtgcatcagagaatgatgaggaacttcgggagtacagcttgcaggtacatgaattatttttcctttatttttcttttggtgctcttttgttttattgttaatgtttacaacactttgcacttttttttttttttgctgaatatttttacatgccaatgctgaacattcgttgtattatttattctggactattttgactgcaggcacttgaaagttttcttctgaggtgccccagggatatttcatcctactgtgatgaaattcttcatcttaatctggactacttaagttatgatcctaacttcactgataacatggaagaggatacagataacgatagtcttgaagaagaagaagacgagtatgtcctaaatctgtctttgagggtaattcacgactcttaatcaatatatctttttaacggttggtgtttaatattttgtagtgagagtgcaaacgagtatactgatgatgaagatgtcagctggaaagttagaagagctgctgctaaatgcttagcggcattaattgtatctcgtcctgagatgcttgcaaaattgtatgaggaggtattgttgtgcttgcttttgatacctgtatttctataaagttgtaatatagattttatttatttatttattccttttaattttgcttcatggatcttgcattaaatattttatctatgcttcgtcaggcctgcccaaaattgattgagagatttaaggagagggaggaaaatgtcaaggcaagtcccattgttctctatgtgcataattgtttttcatttttttaccttttttgtagtgtgtttgtgggctggttatcttatatttctctgctgcagatggacgtatttaatacattcattgaactgttgcgtcaaactggaaatgttacaaaagggcagattgacatcaatgaattaaggcaagcttctttatttatttatatgtttgtacttgacccagattgtatgtatgtatgtatttatttattattattgtttctacatatcctcaaaattccgcaaccttacttttagctcttttccttatcctttttgatatgtgcatgggtttgtgttgttttttggcaaattatgggggactaatgttttttttggtcaaattgaataatatcatatatttgaattttgcacatctaattctactcacatatatcttttttaaacatagcaacactaacaagccataacatgagattttcatggtgcaaagcgcagtgtttataacaagctacccacatatactctctccccactcttgaccccctctcagtaggccccattcataatattgcttgtaaatgtaataagctgtggaaaaagatgtattcttttggcacatttcatcggtttcttcagttacctctcattggtttcctattgatggactagtatcaatgcttaaattcatttatgtgcagtccaagatggttgctgaagcaagaggtgccaaagattatcaagtctataaacaggcaactgcgtgaaaagtctattaaaacaaaggtagagatttctcatgtcgattttttatgcatttgtttcagacctgttttttaagcattacattttaccttggcaggttggtgcattttctgttttgaaagaacttgttgttgtcttgccagattgcctggcagatcacattggatccctcattccaggaattgaaaaggctttgaatgtaagtacaatgttgaagcagagatttcaatctatcttctgatatttataatattacatctggtgttaatattttttcccatcccctatgttgttttcaatgatcatatacaggacaaatcttctacctcaaacttgaagatagaagctcttattttcacaagattggtcttggcttcacattttccgtctgttttccatcctcatgtcaaggtaaacatcagtgcccttcttagttagtgcagggtggagaacacaatcagcagaatttgatgtatggatatagatatgcatgaaacctagaaaagtagatgttcttattttttccttttaaatcagtatataaatatatatatatatatatatattgttatgtgttgtcattttttatgatctttggttgcaaaacctcagtaaactaacttggttgatgtgtcaaagagatttttcaaattttcttttaaaggactaacttatttactgtacaaaatattactgttttttcttcccttctgtgcatgaattacattcaactatggttttgtccatattaaattttgatcttaaatatttttcatataagacatgttattttcttgcttcttgtatctttgcttcttttttgtaatgggatgttgcactctttaagaatattgtttattgcatttttcttctctcttttattttacagtggaatgctataaatactctgtttaaggaatttgctttattttgcaattttgtttacttcagtgatgtttttctattttattttattttgcaggctctttctagtcctgttttatcagctgtaggtgagcgttattacaaagtgacagctgaagcattaagagtatgcggggaactcgttcgtgttgttcgccctaacattgaagtgagtttaattggtactctgtaagactccaggatcttgtgcgtctgttgtttaattgtgtacatgatgttttgatgtaggggaatggttttgactttaaaccttatgttcgcccactctatgatgccataatgtcacgtttgactaatcaagatcaagatcaggtcagtagtattcctgtttaagaaatatttcagaggatttactgcgactcacattttgtgcttatccaggaggtcaaggagtgtgctatcacttgcatgggactcgttgtttcaacatttggtgataacctgaaagcagaattaccttcatgccttcctgtgcttgttgataggatgggtaatgagataaccagactaactgctgtgaaggtgggtgtatgtttatttgttttatgcaatacccacaagttctttggctttatttttttttttttgggaaacaccaaattcccactagctttatgttagtacacatttgctcatcgttttacttccaggcatttgctgtgattgctgcttctccgttgcaaatagacctttcgtgtgttttggagcaagtaataactgaactgactgcattcttaagaaaggtaagagagcttgtaacttattcttatgaatagatcaatatataatcatattattactaccatgaccatagtacatattttttgttcaaatttctgaacttcacttctcttgctaaataggctaatcgggctttaaggcaggcaacattagggacccttaattccctcatagttgcttatggcgataaaattgcttcccctgcgtatgaggttatcattgtggaactctctactctgataaggtttcaacctactctaccttttttatttgattttttatttttgcttatccaatctcatttaagtttatccagacgtggctctaatatttcattgatttctcagtgattcagacttgcatatgacggctcttgctttggaactctgctgcaccttaatgtctgacaagagatcaagtttggttattggtacggctgttagacataaagttcttcctcaagcattaacattgatcaaaagctcattgcttcaaggacatgccctgctggtactttgcatgtgcactttgctgttaaatctcgatctagatattttgcatgtttaaagacttattttttaaatactgcaggctctgcaaaacttctttgctgctttggtctattctgcgaacacaagttttgatgccttgcttgaatcccttctttcaagtgctaaaccatccccccaagctggtggtgttgcaaagcaagctttgtattcaattgcccaatgcgtggctgttctttgccttgctgcaggtgacaaaaaatattcatctacagtaaaaatgcttacagaaattctcaaagatgacagcagttccaactccgtaagcatccttaggatatcttcactgtacatttcacttttataaacaaagaaataaatttgagtttgctttcgatatcatatttcaggcgaagcagcacctttctttattgtgtctgggggagattggcagaaggaaagatctaagctctcatccacatatagaaaacatagttatcgagtcatttcaatcaccttttgaagagataaagtctgcagcttcgtatgctcttggcaatattgctgttggtaatctatccaagtacttaccttttattttggatcagattgacaatcagcagaagaaacagtatctattgcttcattccttaaaggaggtatgatatcttgcaccatacgtctagggaaggtcctgttgttattttctgagaactctcttggattaatttctagtttactattattgcaggtcatagttaggcaatctgtagataaatcagaattccaagattctagtgttgagaagattcttaagttactatttaatcactgtgaaagtgatgaagagggtgttcgtaacgttgtagctgagtgtctgggtaaaattgctcttattgaacctgcaaaactggttcctgcactcaaggtatcaacagacttttgtacattaatgtttaattaatgcatgataaaattattagaccggttgctaatattcagtcaccatctatatttctgaagatccgaacaactagtccagctgcattcactagggctacagttgtcattgcggtgaaatattcagtagttgagcgcccagagaagatagacgacattatataccctgagatctcatcgttcttgatgcttattaaagatgatgatcgggtaagtcttgcatttttaattaaacattcctcctctcctcatctgtggatagttggttttagatttgactgatttgatatgaattctttggcagcatgttaggcgtgcagctgttttggctttgagtacatttgctcacaataagccaaaccttatcaaggggcttctccctgagttgctgccacttctctatgatcaaacagttgttaaggtaaattaaagttctgtaatttgtggcatgtctactagacattgttcgactctgatattattgttcttaaaaactctgtgcagcaagaattgataaggacagttgatcttggtccatttaagcacattgtggatgatggccttgagttaagaaaggctgcttttgaatgtgtggacacattgttggacagctgtctagatcaagtgaatccatcatctttcattgttccttaccttagatctggtcttgatggtgagtacttaatataaaagatatgtttttattagtcttcgtattactacgatcttgaattgattcaaatttctggcattctgtgcagatcactatgatgttaaaatgccttgccatctgattctttcaaagctttcagaaaaatgcccatcagcggttctggcaggttggtaattagatgatcatgttaattcttcgattcagcatcctgcaaatttatgactcgtatactattcattgcaatttcagttctcgactctttggtggaccctcttcaaaaaaccattaatttcaagccaaaacaagatgctgtcaagcaagaagtagaccgtaatgaagacatgattcgcagcgcccttagagctattgcttccttgaatcgaataaggtttgccccgaaccgaaattagtctaaaaagcattcaccgctaatttattactatgccatcaaatgccaataacccttctgatgatgtaaattcatgttattctgcagtggtggagactgcagccttaggttcaaaaacctaacaaatgaaataaccaagtcaccaaccctttccgaaaagtacaattcaatccgaaatgaatgagacggcaaacagacactccccgagccccctttcccttggctgttgcataggagtttcactgtaaaaagtgatggaattttattaccaaacaccacctatttttgaatttagagaaccgtaaggcatttcgctgtgagtgcttgttgttgattgatgcacctgtaaagcggcttaaaggtttaaaaattgagggttatatagaaaagtgaagtcatggccattctaatctcttgtatagttagtttcaaaccacatccccaaactctctttacttatagtttgggttgaagaaaaatgcaatatatgagtttgcatttcattgcaaaagttggactagacaatgttttgtttgtttgttgataggtatttcttgtggatttataaatagtttatttaatttagaattttttggaaagtacttgaatatttaaatgatcaaaagatttttgaatttcatagccaaagatcaatttttatttttttacttgtgtacaaaatttataacattaacttttcttcaaaatatttattataaaaatataagacctaatttacaccatcgaactaaaaatgtgagcaaaaatatagggaaaatgaattagttactactacttttttccaactacaaagtaaactctgttgatattcatttctcttcaaactctacatcgatgatctcaggtcctgattttgatgatgtgttgttgcctctgctatttcccgaaaagaagtccccaataccaccgccaccactgcccccgccgccgccaccgccacttttgggctgccacactgtgtttccgcagctagtgcaacgtatcacttgattcttgtaaccagcaaattgtctcttacaagctgggcaagatccctgtccaacaagtaaagcaatattttactaccaaatttgtacaactacactttatgaagccaatttgcttagtaacaattcaaactaaaatgaaactaaagaatcaagagaagaaatccaaagtttaagaatggatacatattgatatgattacctttataacaagactattggcaaatgttccaatgagaagaggaccagcaaatggtaatacccatgttgcaaatatcaaaaaccggaagagccatcctgataatgcgaaccaaatgaagaaaattgtctgcaaaatcatcaaaaaggccatcaattcatatttcatttgccataactgaaaaccccaccatttatttttatactataaaatgttcaaattatacatgcacagctcttgacactgtgtatgtatttttgacttagagaagtccaattactccactaaatttcaatcatgccaagaccaaaagcataaactttttgagctttgtatcactaaattatgataaaatgttgctatgataatccccaatacttaaaaaaaaaaatcagcacaataatcattcatggcagtgtaaagtttacgatacaaaaaaaattcaacacaataatcatttgtcatacacagctcttggcacaaaatttccaaaaccagaaaagtttatcactttgtaactctacaatattcatttggcataactaaaaaccaaagcattgatttttgactataaatggttcaattatatacatacatttacatatagctcctgacactaaatttctacaatcccaaaacaaaacccagaaaagttatgatcattacattactaaattgtaaaatcttatcacatacacaatttatatagtgattaaatgttgctataatttgcaataatcatcaagttcatatgccataactaacagccagaacatagaattttgactatagagaagtccaattactaaatttctatcatcccaacaccaaaagcataaaatttttgtactttgaatcaccaaattgatgattatcttatcttataaagacaattcacagcggttgtaaagtttttaatggaaacttatcatacacacaattcagtgatcaaaatgttgctataatttgcaataattgtcatatatacacaaccagaacatagatttttttgactatagagaagtccaattactccactgaatttcaatcatcccaagaccaaaaaaagcataatttttttgagctttgtgtcactaaattataattacattatcttactcttataaacacaattcagtgattagatgttgctataataagccccaatactaaaaaatcagcacaataatcattcatggcagttgtaaagtttttaatggaaacttacagcacaaccccttcctaatggagtatccaaaaaatcagacaactgcttcctgtactgtacggacaaaagcaaaccaatcaacgaattaaaaattaaaactttacgaaattaatcactcttaaaaaaaattcacaaattcacaaaccctaggcaagtttctgctaaaatccactgaaaaagctcgccaacgcgatccaatctcgagttctctatcaatttcccgggctcgtgaatacgcagattgagcgacggagctcaggcggcgagagacatcgtaccgacggtcgaggcgttcggcggtcttcttagtctcgaagaggaatcgctcaaagccatcattggcagtacgccaggcgtctctccaggcttctccggaggccatgcgtttagcgaagccatcgaaatcgttgcgacggaaggcttggacgacgaggaagttagaaggtgagtttgaggagtagttgaagtggttgggagtggtgcgggggaggaggaagtgggtttttagttttgggggaagtagaggattccatcggagagttgttgaggccataacaatggcggtgggtataggattgtacggctttctgagccacaacaactagttgaagaagaagaagaagaagaagagaggtttctaataagttctttttttgttatggtataccttcacccacccaagcaacaacctctctttctctctcctctcaattttattttttttaaaaaaataattaaaaatgagtagaattatctcatatacaatattttaatttctttttggctaattagaatttttgccctctgaactttgatatgtaccaaatgatgctcccttaaattttaaggtcgttgaaaatgtcccccgaactattgaaattattggatttaaggactttttccaaatttaggaaaaaagtctaacatggatgaaagtttaaggggcataattagtacatgtcaaaattcgagtggca

SEQ ID NO: 111112 - DNA, 1182 bp, Cannabis sativa
cccccccccccctttgaaagccttcgatttacaaatagtttttcgaaacttgtataagtcaccaaacttactttccaacattttgaagaatgatccatctttgtcataagcttcaaaaaaggaaaattgtggaaagtatttatgtttcatagctagtagaaagtaaggaacttgtatcagcatccaaacttgcgtagcccactaaagcttgattaaacaagcggaatttgcagattccaagacctcccaaagccttcgattggcaaatagttttccatttgacccaataaatcttcctcttgtcaccattagagcacctaccaaaattatctaacaatggatgtcagtttctcgcatgtagctacaagaagttgaaaaacactcataagataagttgggatagcttgaagaatggacttaattagaaccttctagccaccaaccaaaaagaaactttatttccaaccccaaactcgctacttaaccttctcacaaatcccctcaaaagttcgtttcttattcctacccacaacagttgggagctctaaatacttatcatgagtagcaatagaagtcaaacctaaaatattcaataccacatcacaattggcttgacccacattcgaaataaaggtgatagctgacttcttaaaaataatcttctgtccggatgcattctcatacattattagtaggcgcttaattgtgtcggtatccccagcatccgctctggcaaaatcaagctatcatgagcgaaaaacaagtgagtaactcgtgggccaaatctagaacaacgaagacccatcaactcagaataattctctacctacaaaatcagtgaggagagcacttcagcacaaaaaaaaaaataataattaaggggataagggacatccttgccataaatctctggtcggaagtacacgctcttttgggcgtccattgaccaagaaagcatactctggcgttgtaacacaatccataatcaattttatccaaccatctgtaaagctaaattgtctcatgatacactctagaaaccctcattcaactcgatcgtaagttttactcatatcaagttttagtgttgtaaatcttcatctctcattatatttgttgcaaaatttattactatgcaagtgcacactattagaatattttatttatggaaattattttcta

SEQ ID NO: 111113 - DNA, 5313 bp, Cannabis sativa
cggtttgttcgtctaaatggcattctctttactcgcacaaggtaattttctgtgaacaaaaaaagttgtaatttggttttcgttgtttaaacttctaacttggtaatcatagaaaaatcctggttctgttgcttggaagactgtcttattgttttgatccttgtattttttttttctctactttagcttggaaacatttgctgaagttctttcgttggtgagtggtggcatgcgcaagttgctgtcatctgggccagaagaagagcctacttttggtgcagatgctgttgagagtggacttatagttgtcaggcttgtggccattcttatattcacagttcacaatgtgaatagggaatctgagggtcagacatatgcagaaattctacaaaggaatcttcttctaatgaatgcatgcattgctgtttttgagttgatgagccacataatggaaagatgtgtgcagctgcatgatccttcttcaagtttcctcttacctggcattctagtttttgctgaatggttagcttgctgtccagatgttgcagctggtaataatgtggacgataaacatggtgctattagatcaaagttttggaacgtctttatatcatttttgaacaagctcttgtcatctggttcagtgtccatagatgatgatgaagatgatacttgctttaataacatgagtaggtatgaagaaggaaatactgaaaaccgcttggctttgtgggaggactttgagttgagaggttatgcgccacttattcctgctcaaacccttttagatttttccagaaaacattcatttggaagtgatggtcagaaagaaagaaaggcccgtatgaaaaggacttttgcagcagggaaggctcttgccagtgttgtcagggttgataaaaaagcaatcaggtttgattcaaggctaaagaagtttgttattggtgctgatcctgaaattatggatgacatggtacatgcattttcaggcgttccgaatagggataataatctaggacaagaaaatcaagctgctgacaaagctacaaatatggcaatttcacagaccaacaggcaccttcttatagaaggagatgaggaggatgaagtaattgtcttcaagccaatagtggccgagaagcgatccgaagctgctgattctaattgggctacatatgatggtctgaagtctattcagaatgcttctgcaggtgatgtggcctttagtggtagttccatttcagcccttcctgataatatttaccatcagacagcttttgatggtcatcccctagcatctgtgcctgttagtaatgctgttccccaacattttcaaccagttcaaccttatgtatcaaaatggatgatgggagaagaagcttttcttgctaacaacttaaatggtttgagattaatggggaatggacatttagtaaaatctgaaatccaagaaaatcatcctcccatgccttcagttccagttcaacagtctttcaatgttactaatggcagtgctttttacaataacacaaaagcagctccagatactttaatcccatccatgcatgatatctttgcatcttctggagcaatcacaaatagtttttctgtaaagacatctgctgctacatccacaggtttgcgaaaaaatcccgtaagtcgtccgagcaggcatcttggcccccctcctggttttagccgtgttcttcctaagcacgtgaatgaatctgtttctggttctgatctggcaagtgaaagtcccatcatggatgactatagttggttagatggatatcaggtgcccttgtccacaaaaagttctggcctcaataattcaattaattatccttcaaacccacattctgtctccattagcaatggcttgtctggaactatgaacttccctttccctgggaaacaggttccaaccatgcaattccaatcagataagcaaaatggatggcaagatagctcaatgcttgacagtcttaaattacaacatgaacagcagctgcagcaacagcaacaacaagtcactaatgggaatcagcacctcaatccaccaccagagcaatatcaaggacagtctggctggaccggtcgttactttgtgtgatgtcaatacaggagtataaatggtgagttcatgttttctttgtagtcctctgatgtctgttgatcttatcaattacattttgcaatagccctgaccaatcctgttattattgttagggttctgagaattgttctggtaattactgcatccttttgctgccaattttaaactccaaatttgaagccttatcagtgttgaagttaatggaggtttggtggccttggcttcgtgcaggaagttgctagtacacaggttattcttgctttttccgttttcatgctcttttttaaatactctttttctccaacgtgttatggttatgtttgttttgcatgctgcctgttaggtgaaaataatatgctacaagatttttgctggactatagaaattgtcctctaagaccatctccaatggatggtgtaatttgagctaaatttgtctcaaaaaatgagtaaatgttatatttgacctaaattttacaatagtgctctagtgctccaatgcattagggataaaattaacttttttttttagaatggtgtaaaaaagtcaacaaaaacattaaatctttattgaaagtatataaattcttattaaatttataaataaaatgtaaaaagttataagttatactaagtagggaaagagtaaataaaaaggtaaatatttattgtggtgtaaatttggatcatactatattttgtgttaaatttgacacaacttctagtatgtgctaaatttggtctgcttagagttcacttttataaagatgagctaaaatattcttatgcaccacactataacattttattttctaagaatatattattttattgatttcttttgttgcctcagtataattgtatggaccagtgtttttctggttaaaattgtgatgtactggctatacttgaaaaattgattgggtatttttgcgggtaacattctaccatggattgcctttgttctcttctattattttgtgtcattatttttctggttgcatatctgaagtgcatctaacatctcatgttcatattagaagcaatatttctgggcccatatgcagatttctgttgcatatttatcatttaatgatcttacagtggtatctgatattttttcttcagtgggttcacagtttagttattttaaatttgactaactcaaggcaaggtgggtgagaatcaacacctatgagtattgatttgagattttttatgctctttagcgaataattaatcttttaatgtggatggcaatgcatgggctgcaatcaaataatttttatgctaatattacaccgtttcttgtgtttttgttttgtgtacagatttcattgagctttcatgctctcggaagggtgaagaaatacagagatctgaatcatgatgcgaaactcctaagaagtgtaagcatttgatctggggtgaattaaacgtgtttaatagtaatgccatccgttggttttggggctgatgtctccggcaatttggtggaataaaaatggtgtactcaccgttcctatctattaaactcttgaatcagtgttagctatcaaaattggtattgcgggcggttccttaggtggcaactgataatggttgggttaagctataccagagttttgtggcagaaagctttggggaaaagctgagtttggcttggttaatggaaactggtactaggtgtttagaaatgggataaaaattgtgatagtgacactgaaaaatggtaatatttggtgatgagtattttagtcgtggtatgtatatggtcgtcgttgtctcgcagtttaagacttgttttaaagctaaatcattagtgacgtctagtcaagtcgagtttcccaatcaaacattgcagttgtgaaaagatatattaaacattgcagttatgaaaaggcgcatgaaactgtcttgtgtttcttttctggccttttctttattatacttaataattgaagtttaaaaatcagtttcattattttcaaaatatatatttattcttctattgtttctgctgagtaacctccaaatgtgaattcaactcccataacaattgttagttcaacctactttgcaagagcatgaacctagatgttagaatcgaaggatccgaatcacgaaacagtccagacattgaaaaacatctaaaaattgaaaaaggcaaattacttgggaggaatcttcccattgctcgggtcagcacttgacaatcagtgaaaatatccgctgccgagatctgagaatccgccatcaactgaatatcagcaagccgacatggagttccccatgcaaaggattcctcacattttatttttgaagtactatttatctttgttggaatctggaataaagaaaattttaaatcttattaaacctaattttattagcaaactagtaaacaaaaccgtgtttcaggtattaataattaagttataaaaatatactaaatttgatatatatttcttaatagtataagtaactattttactaaatgatttcataattttttatgcagaaaaataaattaatattatagaaaaatttatcatataatttcttatctaaaaaaaaccaacaaagagatatcttcaaatgttatagtaaaataaaaaatagaggttggaaaattctcacacaaaatagagatctaaaaataaaacaattgataaatctatagaaaactcatcatactatttcaaaaatattgcaattcaaagctaatgtcatcaccgtatctcacttgtagttgacactacatttaaagtcactgtcgttattgtatcttatttgtagttgtcatcattgatcatatatatacttgtacttgagttaattaaatactgactttttatacttaagtgaatggttttgttataaatccttacttgtatatttctaagtgttttggtatgatgatgaatgttagagatattattacaatggaagaaaattaagatatatataactcaattataaaaatatacaaggacaataaaagagattgattaaatatatgttataatacacatatatatacactatatatatcgcatatatatatatatgaaacgtagaagagaagattataacacaggtaatataatacatatatatataataaaagaagaatatatatgtatatatactcacttacaatcttgagtctagattagtgaggatcaccatgac

SEQ ID NO: 111114 - DNA, 3609 bp, Cannabis sativa
tggactgcttcttgggtgtacaagactaagctctttgaaaatgtttctttctcagatttaatgagagaatggagagtgttgttgtaagattttcgcttatgctttatagtctcttcccctgtgaagtttccagttctttaaatgtatcctaggggagtgctcgctgtaatctcatccttgagaccttgtttaagtcttagaaggtggtgcactttgtaactacggttttcctccgccataagcgagggtttttatttatctcgagggtgggggccaatcttaatgattggtccctcctctcttttttcaaaaaaaattattaagagaaaaataggatctcttacatgaacgatacttagcaaaataaggtatattcttaatgctcccaatcacagttttgtgttttaaaacagaaacaaaattttattgatttaactatggaaaaaggatacggaccgaactgtctcgcaacattctagtgtaggatggctatatttcttggctgggatcaaactccatgtgaaaatacaaggatttagaggatcaaaaacaaaatgcaaagaaacaagatgtaaagacatactacttacaattgaaaatacagaatagctatcactagcgctacgcaatggcagacttaaactccttaggcagcatctaatttacccccataaaagaatagctatcactagtgctacaaaagcaaactaactatgtacacatttcaagagaagaaaagactctggatcacctacaagaatagcaatctgtgaatactttggaaacttcatgaaagtgtaaaattgtatggatacgtatgtctgacataagaagtataagagtcaaatatgtaatcttatagtctctatattttgatttctaaaccatttattcatttgaatagattaaaacgaaaactctcattaatacatacataccataaaatatttggaggataccattttaattgtatcatacagaccatggatcaaaactaagaagatgataggctttacgagattatataagaaataaaaatcaccaacaaaatccaatcatacatcaaccatatatttatattaaccatcattatatcaatttctaggattccgcaggtgtaaatgcattatgtctataaacagacaatggattaatcaaatccttctttcagcttttgtttacttttcccgtatggtatatggacctcgagaaaaattcttcaaaggcacaatctctacaaatttaagtagcattggaaaagatgtaaactccacaattccgcaacagaccaatcttcactgtatgtctcacaatttttcattttttttttttgaaacaaaactgccttgacagtggtatgtctcagaattgtagagtttgcagcttttgactataagctctgtcttctctgtctctctctttcacttttgtagagtttgcacttgcagcttttgacaataagctctccctctctctctctatagcttttaagttttgacaataagctatctctctcactctctttctctctcttgtatgtatatgaatatatctcctacaaatctcacaaactaaatttgcaaatttccagtccaaattcaaagtttgttatctacaatacgaaatatttccgaagaaaacaaatattcttacttgtaacgattaatacttccatattctgaacatatttttaaaaggctttcacttacctcaaaaaaaaaaaaaagtaaccctaaatcttaccataaattttaatttcaaatctataacccattccatgcaccattctctttatcaattactacatacaatcttcctaacaatgagaatttgaaaatgcaaattgcttcagtttctccgttcaatttctaacttttttttctcaaaaaggagtttgaaattgaagtccaactcaaatcagaaatactaactaaaacaaacaacgtaattgtaaagcgcaatgaatgaactctcaccttctatcaccgtgcccaaaccctcctcgaggacttcctctcctcccatcgtagcctcctctatcttctctcctggaacgcttatagggcggaggtggtgagcgtcgcggaggcgaatgcctacgatcgcgataaggtggcggaaggggactgccgcttccacgacgcttgtagtccctatctctttccctctccctgagaggtggaggcggtggagaccgattccgatcgtagtaatctccacggcgaccaggtggtcggtcgacgtccctatctctttcgtctctttcacgccttttcgagggccccggaaccaccgcaggcggaggcggagatgaagaatgtgtagtggaaggagcatgagcaggaggagcttccacggatttttccttggattcacggcggcggtccagcgagtcgaccgggatgttcatgacctccgccatggttggggatttggaactcctgtggccaaaccctagacagggttgaagtaatttgaggagtctgagaatatgaatgtagcaggggctcgctttttcttggtgatgaagccgcgattgctgttgactcaaggagtgaaagagaaagagaaatcagttcgggcaaagctcaactcgaatattttatatcgcactacctaactttcacactactttattttaggtttgtttttttaatgaagtgagcaaaaccaactactttaaaaaaaaaaaaaaaattaaaaaccctcccaactattattttgtttaaatttattttaaaattaaaaagaataatttaaatttataaaattattaataaatatataaataattcttctctttaattttttattttctcctaactttctctctctttcgcactctctctccttgagtcttcttcttccttctcagatccgagaagctcaaatctcatttccttccccacggcgactagtccaatagagaccaaactctcttccgcactctccctctccctcagcaactacctagcagcttgggcccaaattaataagaaaagaaaagcccgccccatttcaaccctaacagcttcatcttcttcttcatttgtcttagcaaagactagtcgcacgaccaaccaacactagtcacacttcttcttcttcattcatcctcattcccaattgcatagaaaaatcagattcttaattgaactttgggttgggagaagagagacaccatgaaaatttggctttgtatttaaatcagtttttgtaaaattataattcgtttcgagagagaatgacagtgacaaatcattggcgctctcctggccccaagtacacgaactcaaggtcgtcgttcatcctcgaccacccaccgccttcgcgtgtcccaacaatttctttagtaactttgaatgctctttcatgtttaaggttagctttgagcttattataattcacttgattcttggttttttttttcaaaattttgcatctgaagaagccttgcatttctagaaatttaagatgaggtttttgttttgattgtaaaatttcaacacttttggaataattgttaatgttgggttgatttcttgattttaatgaagcgtgggataaacaagaccttttttgtcgattttctcaattagttgataattg

SEQ ID NO: 111115 - DNA, 10663 bp, Cannabis sativa
atatatatatatatatactttatgtacatcaaatgaatgtgaaaataatattcttaaatggagaccacgatgaggagatttacatggaataactagaggtttttattctcaaaggacatgaacataaagtgtgtaaacttgtgaagtccttatagggactaaaacaagctccaaaaaaattgcatcataagtttgatcaagctattagattggatgggtttagacatactattgcagacaagctcttatacactaagacttgtggtgacttagtcattatagtatgcttatataacttatatagtgatgacatgttaattttgagtaaccaaataaaaggcataataaaaacaaaggggtctctctcttccactttcataataaaagatcttggagagattgataccattttgggtataaaagtgaaaacgaatagtgaaaattttctttacgtcaaagtcactacattgagaaagtgcatgacgaatttggttacctcactataaaagagtcaaatacaccattttattcaagttaaaacaatggtagagtcattgttcagcttgaatatgcaagtacattagggagcttaatgtacgatgctcattgtactagagcgaatattgcatattcggttagtaaacttagtaggtttactagcaacccaaatattgaggattggaaagctattaaaagggtcctagggtaccttaaaaggaacaagaagctaagccttcaatattcaagctttccaagtgtacttgaagggtatttcaacgcaagttggataccaagtgtgggagataatctctccacaaactggttgggtgtttatgatcaatggaggagcgatttcttggggatccaagaaacaaacatttatcacacactcaaccatggatgtcaagtttatagctctagtgaaaaccgaaaaagaggtcgagtggcttaaggatctcatggtgaaaatccttttttctttgaaaaaggtatcaatgatctcgatacattgtgattgtcaagccacgctagctagagactataatggaacatataatgggaagtttagacacataaatcgaagacataattatgtgagataattaattcaatatggaaatctcatatgtgagacttagtgagaacttagtagatccattcattcaccaaactgcttaagagagaagcaattagttctacatctagagggatgggattaaaactccttgaatataagttcaccatgatggtaacccagttataatcttgacaacttcaagtgaaagaatttacaattggtaagaacaagtcattggtggatagtttcaaaatacagttttaatcccatctaagatgatttgtgttggttgcaaccattgaggttaagcttaatgcttttaatgaagttcaattgtgcaaaaacaaaaactctaaaggtagcaaagatgatataagaacatcacttatgtgaacctagaggtggtgccgcctctcatgggagtggagtttttccccggaaggttcatgaattggatagagcacgtggccataatagtcttgagctagaaatagtgagaagtaacaaaaagtaaccaattggaagtttgtgaggcattactagttttattacacaggagtcgttggttcaatccctagtgaaccaatcactttgataaaactgtatagtgctttcactaaggtaaaatttaaatcaaaatatattttattttatgcaccaacactattgagttagcaaagagaggattacacttaaccaagtgggggaatgttgagattggttaagtgtaataataaaggttaaacacattgtggtgtttcacacctttgaaattttttacattatgagtatgtgaactttaaaataatgtaaaacataatcattaattatggttttaagtttaaattaacctcatagagtgtataaggttacccaagaagtttgtaattatttggagatatcgaagagaacattcacacagttattgtgtgcccaagtggcatattgccctggctaggcgacatgtctcttggaacatactgcatgggacatgcatttacgtaactaggatttgtcgaactgctccaggtgacatgtcacctactagtgggagacatgtcgcttgggagctaagacggaattacaaaaatgtaaaaaaaatagaacactgtcaaagtgctccaggcgacatatcacctgtgagataaaagctgatttttagcttttcattttattgcgtttttggctccaaatttaattccaagtgtcatgatccaattggttgagagccaggatgacttctacactatatataggatttatgagagttaaaatttgatgtacagactttctaactctctctttaaaaacctctctctctagttcgcaaggttactcattctttccaagaagtttatgaagaagtgcttgacttgcataaacttcacaaagctcgtgtatcccacttatccttactattgaagaagcttcaaccatcaatgggagggttaggaatagagatttcgaaaagcatttatgaaatgtgtcaagccttttgtttactaatttgggttatatctctctaaacctaatctttgtttttcaccctttataattgtgtttactttgtttctcctactattttgattcatattattgtcacattgtattatattggttgattcatatcatttaatccatcttagtgctccatatcttgtttcttgattatcaagatttatgttcatctgcattaatgtgaatcttaatcatcatcttggttcttaattttttaaaagaacatctccaaatcattgtaaattgattgtgtaaaatcatatatccccaatacctaattatcctcatcaagatgaaatgtacatatttagtacattcatcttggagaacactaaagaatagattatagaggtgtaagaagatcctagtgaatgtactaaatatgttaccagtgcttgttcttgactttgatctattagtgttggatgtgatgaatttctattggatctttagttgcatctattttatctttagttacatctataggatatccagtcccaaagaaagaagaaatgtcttggacatgtcaaacctcattgtgatgaacatttgttggatctccaattgcgtctaattgatcaccaattacatttgacggatctcaagtgcttacaaatttctaggaaggtaaatcacgataaattatggtcggaccttcatcgtgacttacagaggtagacttatgttgctcttttggcgtggaagattattgcacgaatggagcatgagtcatagttattgtcattaattgatagaatggatgaggtgaggcaagaatgagagaatgtatgcgaaagaaatttcgtgtttttgttgaagctttgacgaagcttcttggaaaaaaatcccaatctgagaaggtgttcttggatttttaaattatgttgggatgatctctagtgcccaaagaatgataaagattgtcttcttggacaggttgtttttgatggtagaaactcttcaactaacttctggccaaaaaatcatgattcgaactcaaaacttagaatgagggtgaagatgaaatgaaaatcaaaatattaatctatgttccaagccaaaatagagagaaaagtatctttgtgtttctttaagtttggtgttacaaaataattttccaatcccttctcatatctgagagtgaggtatttataggctctaatagcctgagatacatttgtggtcgcaggggacaagctgacatcctagagctgcgaggtgcaggtgtagaaagtggtcttgtgctttgtacctttgcctggtgtcaagtggtctcgagttgcataggtgatggccaatgtgtaacctcggtcaggatgtcaggaattttaggtgtggcaccttcactacttataccctcttcgcaacagaacttgtagaaggtgtggtcgtactcccttcggatgcacgcctcatcctttgcatgcatgcctcgtcctcacgatcatacctcatttgtctttgtcctcaacacttaggaagatttcactaagtatggttgtgtcatcgacaagagcattgttgagaaatttaaggtgcatggtgaccgagtggcctccatgtatggtggtcgagtgacttttattcatggtggccgagtggcctaccaagcatggtggttgagtgacttgctaagcatgttggccgagtgatttccatgcatggtggtcgagtcacctaccaagcatggtggccgagtggattccatgcatggtgaccaagtgactttccaagcatgttggtcgagtggcctaccaagcatggtggctgagtgacttgccaagcatgttggccgagtgacttccatgcatggtggtcgagtgacttgccaagcatggtggccgagtgacttccatgcatggtggtcgagtgacttgccaagcatggagaaataaaatccaaagaaagaagaaggtggttttaggaatcatcggagaagaaataatttgtgggtggacatcaaaagcatctggaacagaaagaaaaacattttgtggagggtctacgatagaggaagacacccgtagaggcttaatacaagtagcttgagtagtcaccattgaagatcttggaacaagaattgatttaggaattttgtgttgggattttcagggtttattacttctgatatcatattaggatatacaagattgatcttatttaatgtgtatcataagatactaatatgttatgaaaacaagagaatgagcacctttgatggagaataataacagagcaatatctagatgtaactaactacctatatgttataacaagaattggaataacaaaactatctaaccctaaactctaactcataatgttcagcaacaatggatgtaaattaagattcatatcacccgataaaaacaaaatgaaaacatacatgatagtgacatttgaaggaggatacaggctgcctgatagatttgaaaacaagttatgttgaagattcctgcaatagaacgatcaagtttatgcaagtagtaagaatgtaactactgtatcaagaaccaaagaaacacaatcttagattgcttttgaatgaaatagtactgtcgaaataagtttcaatcacatcttacacgctgagttttgtttcagtactgagaaaaatattcctccagaaagtagaaggaatggtaccattcaatgaattattctcaagtgacctgcaaagaaataaaactaagtcatataagggagttgatgaacgttttatttagataaaattatcatgtagttggtggaaagatgaacgaccacatgaaaatttttaaagaaaaaaaaaaaagagatcgatcttacaatctctggagtttaggaaagcctgtgaaactttcaggaatcggtccatcaagtttgttcttggataaatcactaaaaaaaattaaaatacacaaatgacttctttgttataaagtcagttagaaactgcaaatgtatattgtaagaataaatattcagaagatcagattcgtgcacagtgaagctaaaaagcttttcatgtaaatggatggatggggtatgagtgtgaaattgtgtgtgtgtgagagagagagaataaaacagaattatgcaaaagttatggagatcgatcatgacatacatagtggtgatattgtctgaaagcttgtttgttggtatacttccactgagttgatttgagctaagatctctatatcataaaaatatactaaagttactacaaaaagtcagagctagcaactagaaatcagagaaatgtcagcagataattaagtaccattattgataaattatgtgaaaatttagattcaaacatagaaagaaaactgggagaaacttttaattctgcaacaataagatttaaaacataagactcacaagtagaagagaccaggtacactactgaaatcaggaattcttccttgcaagttgcagttcctaagagtcctacataatttgcaccaatgttattctatcagtagaagaacttaccagtaaaacactaatacaaccaaccttgccccataacaaaatgaaatattttaataaatatatgtagagagagagagagaaagcttacagtttcaacaattgggacatatttgcataagaatcaggaatttcagtcccactaaagttattgttgttgacttgcctgtcatattatgtgaacggttttcagaacaattttacaaaacaaaattattaacttatgaatgatattttcagcatgagaaatacattaactaataccagcactgacatttttgtgtacacataaagaaaatctaagttcaaaaatgtaatgttgtacagaagattagaagaaggaacatacaagatcttcaaacttttcatcattgataattctggaggaagataccctgatagattgttgttatccaacaggctacaaagtgcaaacatattagaaacaaacaatgaaattttctatttagaactcactaaataaatcataaagggacagacaagttgtgtagactctgaatagatattgaactcacaaatgcaccaggctaggtaaattagatagctctggaggtatctggccgcttattgaattgttgttcatgtgactgtatatttagaaaaacttgtaaaatttcagctgacttaaactaaacaaacggataatatagtagttaagtctgattaatccactcacaagtgttggacattcggcatgtatgcaaatgatttaggaattggtcctgaaatacggtttatgtccagttgaaattttgttaacttactgagattacccagctcatctggcaaaggacctgatatttcatttccacttaagagtctgtatttaagaaaacaacatttagccacagtcctcaaaattaatgtataatttttcattgaacctctcattatttttcatgataaatactaggaaaatttaatgcctctatttaccctgtttaatctcagcatctcatttgaaaattaatgcttacttaatacttttttttaataaaaaacaattgtttagtgaaaacaggataaactcagaaaattacagtattgttacttgcaaccattaacaaaatgagagtagcagtgaacaacaaaagttaaacataaatatggaagatacatttaatgacccctggtaaataactatagacacacaaatagagaagaaactcataacattcaagtgtaaatacaatatattttagttaaagattgaaacattaacattcaagaaaaggagctgaagacatagttaccatttctacattgattgccacatgttaatatgttttacaatacaattatactacagtcaggtccatagacaggttagacttgtgtctaggcccacttagtttaagaataaaaaaaattattttcttttagaaataaatattttttttactgattataaaaaatttcacatttttttttctaaataagagccaaaaaaaaaatatattttttgtttctgaaaacagtcatactatagaccaaagatagcttaaacagaacaaacatcttttttataaaatgatttgcagttcaacttacagaagttttaaagaagtcatacttcctatctcctttggtatgctgccacttatattattccacataaaattcctataaagaaaagaagcaaaaatgaatatcaaacttagccccacttgttttatatcagattacataatataatgaattagaaactaaatatatagtccataagagcttggtttcaatctgaaatactcacaatatagtcatgttcttgaactggccaagctcgggggctaaggttccagataaattcatatttagcaaccgtctgcatatatattattggagacagatgaacgtttcccagagattggtgaaaaaagaaaaaaaaaaaaccaattaactattgagcaagattcataagacttcacaaattaaccaaatataaaagaaagaaagaaagaaagaaagaaaatgttaatatttaaggtggagagaagggcagggaaatggaaaaggttaaacatagaaataataaacttacaattctttgacatggtaataaccatcataggtagtgttggtgcagaatagccctgtccaaagtgaggtacatggatctttttttctccagttcttaagtctgccaagtggatcaatgagttgacgatggactgcttttaaagcattcactgcgataaatatacatatagaaaaaaaaaataggaaatatgtttgtgtcatttactaacaaacataagcctcattgaatgcatatacgaaattgaagctataaaacaaaataatgatcatcattcatcaccttccaaaggatgtgtaatttgtccataaacaagtagagtacaacaacatgaaatccaaataagaagaggtccaaatatgcaaattctcagccttgccatgaaaaccagcatcgacaaattaatatcttagagttgttattatgttagattgatagtttttcatttataaacgaaggatatgaaatggaaagttaagtgacatcaaatggaggatctggtcagattatttgcaagtggctcattaatttctcaagtctttcatgcctatttgagattgagaactggtataatatttaaaaatgaccatagtggccaatatttctacttcatttcatcacgtcacaatgaaaaagtaaaagtacatagatttatacaaagacagacgaatgaatgcacgcccttgagacctcaagttacgtaccatttgtgatgtgtctgaataagtcatgacatataagttttcagtaaaaaatgtcatgacatataagttgaaaaataattttttattaattttattgaattatttggttagttggaagattttaacttcgactacttttacaggaaaaaaaaattggatatttaattgagaaattatagcaaatgacctcgtagtactatgtaagtaaatgttgttattttaaaacttgtaaggaaataatctttttacaatatttattatttatattgttttttgccacataaaaagattaatatttttttttttaaaattagaaccaaattacctaaaagttatagtatatttatattagttttgttaatttttttttttttaaaaaaaattatgtcaatttctttaatttttttgtaagttgttgtggattgtggtatataaatttttttttatcaaaaacaaagaatacttcattaatctcaaaccaatacaaccactaatcgaaacagcaaccaaaaagctgcaatactcctagcaacagggacaaaaaaggcctgtactagttacataataatttctgtatgtacatccctttttcccttgtcaagtttctactttttacagtttgaattctatacttcatattacatttaatctcattaacaatcactaaactcgaattggtatatccctccaagtagcatttattctagttcaaccatatgttgtaacacactgctgccattatcagtacattgattctttgcactgcccctatttttttcaaactcaaccaattgatccaatccaacccgagaaatgcaaaggtcaagctctccatcccatcaatctaaaaatctgcttgttcacactttgagacagtaaacaaaagaaataaagatgctcatgggactcatttgcaataccacaaatggactcatttgcataaccacaaactggacacagcatcgagtccaaagacaagtgaaatttcagcaagttatctcgagtcaaaagttgagaatttactacttgccaaagacaaaatctatgcttaggcatgttcaaagtactccaaatagccttgtaatagttcactttactctgagctaatgtgctattataaagcatagcagagttgaatctacacgtaccacctacagcaacaatttccatcttagtaagtttttgtctcaattgatacaatttacaccaataccaactcgtgtcgggtttgagatcataggaccaaaaagaagtgttctttaagtaaatgattttaatccacttaactcaaagaatatcttttttctctgagatgggccaaataaacttcgaaagaatagctttgtttcatttgattccttccttaaaaccaactccaccatatagtttcggcaagcaaaccttatcccaagaggcaacatgtaacttgcttctattttcattggttccccataaaaaacctctacaaagccttttaattttttttttttgtgacactgtgaggaaggatgaagatgctcatccaataattttgaagcccaaacaatacataacggatcaattggattctccccgcatatgaaagatgtctgctggtctaggagtgaagacgttgctgaatttttttgataatgataccacattctttagttttccacttagtaggcgtaaaaggaactcccagataacgaaggggataagagccttctgataacttcaagactcctagaatttctgtcttctcattactttgaaccccccttaaaaataagggtaaattgcggcataaatacctaatgtttccaattttatacacttaaataccta

SEQ ID NO: 111116 - DNA, 13810 bp, Cannabis sativa
attcttgtgagtagatctaagatcctgctaaaataatttccaacaattacaaccttgaaagtccttttgatatcgagcaaggattgttaacattagcggagaggggtagtcatgcaagcatattgattagcttatggttgcgactaggcgttagatggttgtgactatgggctaaagatgggaattttgagcagttttataatttctccattcgaacatatctgcattattttctatataaggatttcgtattttagaagcacaatactcaaaaattaaccctagaactaaaagaggcagcaaaggaagcaattatggcgacctagagcgagatcaccaactagttctttctttttcctttttatttctttatgttaatttatgttttaagaattattatgaatgtgaacgtgagtgttatgaactaaattcccaatttagggatataatgaaggttagatgatttttttcaatttagttaatgagattattagtttttctgccctatattgcgtgatttgttcttatttgtttttaattacatagtttagactgaccatcttaaatgtgatttatggtcctaatatgaaatttgagaagtgaatatcagcaatagtctaataggacaaacataaattttgatgtaaaacgagagtatttacatagcttatgtgatttttaaattctgaattcaatgccagttatatgttaatttacttcagaggtgcaaatggatatgatatgatttaagaccttaatgatttgagaagagttagtgttattttgataatcggtcatcaccaaaagagagataattaataattatcattaacaattgggaaactgaactaactggattcatattcataaatattcatccataattaattacactttaattgctattttcctgctttttaattttcagttatttaatttttcaacatttttattgattttaccaaatagaaacataaatttaatttagtggtactcaataacaattccctgtggatcgacctcacttgtgtgagtttaagacgacaatagatttcgtatacttgcatagctgtttacaatttgcataacagagatataggtgcagcagtttcctcagaagcatgtacagtaggcacaatattattaatatttaggggagatgtaagaaaggatgtagtaggagacatgtgcattgaggaagaatgtacctgttgtgatgttgcaagttgaagtgctggaaaatcttcctcatttaaagccacatttcttgctatgtataccccgccaacttgatcttcacataaatagcccttgtgatgcagtgaataaccaactagaatgcatttttcagatctcattgagagtttatgactgttgtatggtctcaagtgtaagtagcaagtgcacccaaagggcttgagcattgtgcagtcagggaccttgtaaaataggaattcatagggggatatttctccaagaactcgagtaggtaacctattaatgagatacacaacatgctgaaaggcaagccaccaataagataaagataaaccaacttgtgccaatagagtaagtccagtttctgtaatgtggaaatgttttctttcagcacgaccattttgttaatggtcataaaggcatggatgttggaaatggactccatgttgagttagaaaagatgctagagacctatactcaccactccaatctgattgaacaaatttaattggtagatcaaattacttttcaacaaatgttttgaattgcataaaagtgttataggcttgggattttgaggataggggaaatttccatctgtacctactaaaatcatctaagaagtgaatatagtacctatgaccttccttaaatggtgtatgagaggatccccacaaatcactgaggaccaattcaagagaccgagaggctcgagactcaaagattgaataaggaagtttgtggtttttacctttttttgtaggcctcacaaaaccttcattcttttaaatttcttggaatattgagtgtagctaagatttaaggtgttggatgttttagttttgagtgtcaagactgacattagatttttgagcaagaaaaagtgcagagtcattaacaattagaaatttgaaaatatcatctttgtttatagaagaatcagtacaagggtgagaggttatattaacaacactcttattacattaagaggaaatgtaaatggaagattttataggatcttgagagtttgaactatgagaaatagaagatgactctgacttggactgctttgtaacaagatgacactcgagcttgacattgaaagatgaaaggaactgtaagacagcatgtacaagccatttttaagcctccccttgagtagtactctccttgtgattttatccttaacaaaacaacatttggagtgaaattctaagaaaatattattatcatctgttagcttagagacactaataagatttttagtgatggtatgaactttaaggatattatttagatgtagagatgaactagaggaagggagagaatagttaccaacatgacttatgggaagtcgttttccatttccaaatgtaagatattagaagctgattagggaatttcagattcgaggtgttcaatgccctaggttatttgttttttagctcctgtatcaacataccagccataatcatccacaaattctggtagagctgaactagagttgagatttgatttgaagtagtttttccttcaattgactgacaaatctttgttccagggcatgccaagcatcgaaggaggagttgtattgggctaatgatccaataatcaattctgacattgaagattgaagtcagctaagtaatggttgatcttttcgtttccatgttgtaaattttggattggtgacaccattgacaggcgttcgaatgggagaaactccagtgaggaggatgtcatcgaggccgtgatcgatgatagtggggatcacttgtaatttccacggaagagagtttgttcgatccagtcgaactgtgagagacgaattcaaaaaattatgaaaaggattccattgctgtattggcggagtttgagcaaataatggttgagcagtaggttcaaggtgacagggatccattaacgacgttggttaagagtttcttgataccatgtaagctaagaacttatctatgcaaatctaaaaggactcaagagaagaactgaatcacaagacttgcaaaagttaagcaagccttgaatgaggattattatttatagagactgagatgcagagttggttacatagtgaagaaagaagaaggaaataacagaaaataacaaccaaaacaagtggcaaaactaactgacttcagcaactaactattttcaactaactctttacactggctatttatagagtatgcttttgtactagttcctctttttacatattgtgctactgtatctatataatttgtttatcgaattcaaaatcaaagcttcatttccttgctattgttaataatttggtttgatctttttttcagtgtgctcgatagataatttaaaggcgatttgtataatatctcaacaatttttttagtataaactagaattaagaatcaacagtcctcaaatgatacactatagtttgtgtttaaatatgaaaaacatttatcgaaaaaaaaaataatgtcagatgttgtaccagggagaaatgatccactttgatgattctgtgcccaagaaaatctgacaaaaatcaaatgaaaaattaataaattaaacagagtataataacttcaacacttcattaagttattgaatcccaaaagaaaagtagtatttgacaggatataaaccatcaatctacaactcatataaaagttatttattctataaacaaatcttattcatcaaaaaatgaacattgaacaataacaatttttttctttcaaaaaaaaaaaataacaatttatacttatagccaatgtgattataaaatctaatcattaaaaacaatctatatgttttttatcattgaatacgtacatgacacctccaccagctggaccagctgctttgaatagagacatagcagccatggatatgccatttgcagcacctctttgactttggtccttcaaatattggtattaaaaagttagaaaaaagaaaaaaaaaatagaactggcttaactttgaaatgtcatattaaacaaacaaaatttcatacataacaaatataagacagaataattaccacagctttgttttgtagcagaaacaatcctgttgtaatgcatacctaacaaggtataaaaaacaaaaggaccttaagtcacatttgatatagcaaaaattgcattagtattatatgcaatgaactgaaaatacttgtatgtatatattatacttacagatattacaatctttatcacagatgcaagattaattaataccatgagtgtagctccagatagttttgctataaaaggataacttgataggactgctattgtgatgaccttagcaagaaaataacaaaaattagagaataagttacataacatgacatgagtcaataataactggttatagataaatgatgtttgagacatactgctccaattcgacacaccattataggtcccaaagtcctctcaatgggtgggtaacaaaataattgaaacagaagcataccaactcctacaaaatgataaaggaatattagccttttaagaggaataatatacaagtgtgtgcatatatataaataagaacaaaattgtaagtatagttttctttatatctcctgctaagacttttatgaacacatagtatatacataaaattatatgtcctctaagtttttttccccctaatgatcctaaataaatctaacttgttattattgttattcttttttatgatatggttactttgattatcaagcatagaatccccaactcaaagatttgatgcaagggaaaaagatagtgatattaaaatacatacaaaatggtttactaaaaatatagttgtgtacctgaaattgcaagaacttcaccaacttgtccacttgaatagcttagtcctccatacttcttaggactcacagcccataatggaaaaatctaaatagtagattgtttcaaaagaagtaattagatattgaataaaaaaaaagtagcaaattattttttttaaaaaaaaaaaattgcttacctctgaataagccatgtcatgaagttgaaaaacacaatatagaataatagatgacattagaggccaattcttgtaaagactctgttttggaggagtagggcacttttcctcatcttgatccaaattttcgttttgatcagattcatgattagagctcatgtcttttagactacatgattgtttattctcttcatcttttttagtatgaaagtgaagtgtttcctgtaaccacgctcataagacattgaagatactttctataataaatattattactttgcacataatagcagttttaacagttagcgatttttttgattttcagttctaccggtttcggttccgatgatgttcgataggttagtttgaacgattttttcgattttttgaattttatgctcaaccctaattttcaccactactctaaacacataagacataatattgctatctagtaggttatggccttaaggtaatatttgtgataagtgtgaaacactatatatattagaccatttatatttatcaatatttgaaagatcaataatctcaattatattagaccatttatatttatcaatatgtgaaagatcaataatctcaatgcaattacattaacaagaaaagttagttattttcttattactatttttgagaagttacatttgctctttagattaaatagacagaaaaataaagaactaaagtagaatgagcaatttatcataccggcatccaacgacatacaatagttacacccaaagcaaatattgatatcaacaagcaaggtaaaaagtatgggaacctgttatttaataagattcatcaaataaaaaagtgaatatagatcatgagtaataaatagacatgtaacttagatgtcatattcttacctcccaaacagagactttttggaaaatagttttgggaacttctctgcaggctataatttaaattcattagaaaaaataaaaaaataaaaaatatataaactaatgtagaaaaaaaaatgcatcaacaaaaaaattgcaaatccatgcacatcttagtttctatatgatagcacatcactttaaactttggttttattttctaccttttaaaatgattttctgtacatagtattattaactattgttcaaagtaatatatgatcagaaaaagtttttttagtgcccgagtggggttctctgaggcggttactctggttttctgggttttgatttttctgcatcttcttccccatctcgtccatcttctccaccttgcccatgaactctcttaacttcccactctccaagtatacacgatatgctgctcttaccagtctacggacgaatttgaaatatgtttcatctatatatattcatcatctcacaatctatgatttgtacctacacttcttattttcattctcaatcactcactcttatatggactcaataattagcgtgatgaataccactctatctttgtctgagaaggagagagatgttcataccctttctgaaactgatctccaagattctgatgccccaccgaaatttttcttagtggccagatgcttatcttctgttaatccccaaacttttattaagaagatgggagaattctggagtaacaaatgtcgatttgatgttgtggtttctgagatgcatatggatctttttttgctaactatggcttgtgcaggtgacaaatacagagtaatctcgggtgaaccttggcattttttcaatcacctcattctccttcactccccagcatctctgcaatctgtcaagaaagaggatctattcaaggctcacttttgggttcaaactcatagacttcctttcttaagtaagtccagggctttggctaggaaagttggtgaatgggtaggagagtttgttgaagtttatgaggattctttacatgaaggttggggttcttttctgcgcacccgagtcttaattgatattactcaacctttgatgcgaggcaagatggtgactctgccaaaggtccaagatgaacactgacttgagtttcggtatgagaatctccctactttctgcttccattatggcattctgggtcaccgtttcgataagtgcaaggcatttctggaattggttgataatggtaaggatcctgacttgccatatggtcctcaaatgattggagataaacttcctaaggccggttatgacaggtatcgtaatgatttttcgaaagtaaatgcctatccttttctcacccgtttggccaagaaaactattgcctctactcttcctgcactttatactaaccccaacatagccataggtgcaatcccacaacctaagcctcttactcttgcagaatcaaacatgccagatcaatcgaatgtacccaacaacaaccaaagtcctgaaatgccattaccatttccttcatatataccaacagctttccattcagctagtagttccacaaatcccattcccacacatgtacctactatcccagttcatttgccactcaaaaactccctgaatactgagtccattgcacactatccctcccatcccattttaccaaagccttctgacagcagccctgttttggtaaataaaggcaaagcaattatgacaagtgatgagtctattgagttgggtgattatggtaaaagtttcaagagacaaattgatcccgaaaacctacgcagtgttcttaaaagatgtcgaggcaacaaaagggataacattgatacggaggagataattattcagcatgtttctcgttcttcacaggattcagctgaaaacaatcctgcgatttcagcggaggttgcacaccagcagccccgcccgcagccatgaaaattataagttggaatgccaggggcttgggaaacctttcggcattcaggcatcttaagctgctggttaaggagcagcgtcctgatttgctttttattatggaaactaagcttaaatgtaattctttagatcgtattcgtcactctttgaaatttaacaatggacttgaagtcccaagggttggtttaaaagggggtttgttgttattatggatgacaaatgttgatgtaaccttgaactcctattcaatgaatcactttgatgcttttgtgttgtatgagaatggttgtcgtttccactttactgctttttatggtgctccggaatctcatttacgaactaatacttggaatctattgagaagttttgctactccttcgaacaattttccttggttagttcttggtgattttaatgagttgttgtcaaatgaagataaagatgggggttctctgagaagtgaaaaacttatgaatgacttcaagcaagctattgatttttgtaatcttattacaatcccttatactggagatcggtatacatggactaataagcactataatgggactttggtcaaagagaggctagatagagggtttcataacggtgtatggacagacttctttgtcgattctcctctttctcatttagatttataccattccgatcatcgtgcaattgcatataatgtttctctgccacaacaaatgtccatttcgactacaagacaccatagatttcgttttgagcaattttggctcaaagattcagattgtcgtggtattattgaagtttccaacatgtaacaacttccaacctgtttcttctctgctgcaaaatattgcagattgttcaactgcactccagaattggcatgtctcaaaatatggccaaatgggccgtgacatagcagcagcccataaacactcatctcaattacacaacagtaatgaccggtcgctgcaacactttcagacagtcgaggatgcagataaaatattggatgatttgttggaaaaagaggagctttattggcaccaaagagctagagttaattggttgcaaagtggagattctaatacaaaattctttcatgcccgagcaaaatcaaggaatgccactaacagaattaaatccctaaatactgatgttggtggggttatacatggtgatgaggacattgctaatgaagttacttcttatttctcagaattgttcacttctaatggtgttgatattgaagctttgaatatggtattgtccactatccaatcggctattacacctgaaatgaatgctattctgctgcaaccttttactgcttctgatgttgaaaatgctcttcattcaatggcacctgataaatccccaggagtggatggtatgtctgcgatgttcttccaaaaacattgggatattgttggttcacttgtaacccaaagtgtccttcaaattcttaatgatggtgcggacatgacatgtattaattcagctctgattacgttaattccgaaagtagaccagcctaaatttgtgagggaattcagacctattagtttgtgtactgtgatttacaagttagtctccaaagctattgcggttagatttaaagaagcgctgccttttgttatttctcagcatcaaagcgctttccttcctaaccgcttaataactgataatgtgctcttggcttttgaacttgtccattgtttgaagaacaaaaagagaggccggttggggtattcggcactcaaactggatatgagtaaggcctttgatcgagtagagtggttttttctgcgccaggttatgacgaagatggggtttgatattaattgggtgaatcttgttatgaaatgtgttacaacagccacgctttctttcaatatcaatggggctatcaaaggttcagttgttccacagaggggtcttagacaaggtgatccactatcaccttatttatttttgatttgctcagaaggtctttcatctttaatgaaaaatgagaaaagtttgggtcagctaaagggattatcaattgctcgacgtgctcctgcagtgtctcatcttctatttgtagatgatagtttgttattttgccatgtcactaaagaatcttgtcaagccattcgaagagttcttgatctttatcaccgagcatcggggcaacttctcaacatggagaaaacggtcatgtctttttcacctaacacaagtcaagctactaaagatcgtttcaaccatgttttgggtatgcctatttgtgatttacatgaaaaatatttgggtcttccatcatatgctggtcgagataaaaaggagctttttagtggaatcaaagaccgtatatggaaattaatgaacacatggcatgccaagcttttttctattggaggtcgggaaattctcttaaaagcagtggttcaatctattccgacatatgcgatgagttgctttagtcttcccaagaagttttgtaatcaattggaatcaatgatggctaacttttggtggggttctaatgcaaaccattcgaagattcattggaagaagtggaaattcttatgttcttctaaagttgatggcggtatgggttttcgttccttcatccattttaaccaagctctactcgctaagcaggcttggcgaattttcaatgatccctcttctcttttagctagagttcttcaagctaggtactttaaggatggtaatttcctttcagcaaaaaatggggtattgccttctcttacttggcagagtatctgtgatggaaaagagctattgttaaaaggactgagatggaaaatagggaatgggcaaagtgtgagatgtgttaaagatccttggctcccgggaaacactacttttactccttattactatgggggggatcctctgttcacggtggctcattatattactaatgaaagacaatgggatttgagaattctggaagatcattttgggactattgatattgaacgcattctctctataccgcttgctccctctcctagagaggacatgctagtctggcaccactccgatacaggctattacacagtgaaatcgggctaccacttagcggctagtttagaaactatggaggccgaatccccttcatcatctaatcgtcaatggtggaatcgcttctgggctctaagactacctaagaaagtcaagatttttgcatggcgtttcattaatgatgctcttccgacggctgccaacttgatgcaccgtaagatctcgacttcctcagcttgttcactctatttatgtgcttgggaatctgttggccatgctattttttgttgtactcgtgctaaagctgtgtggaagatttcaaagtgccaagttcagatgcctaacatcggtaaccttaaaggctttgatattttctcctattttgctaatgtaaataaggacgctgatttggagagaattatatgtattatgtggtgtatttggattgagcaaaataaggagattcatgggtctaagcctaagattgcggaggtgatttgtagctattcggacacatatcttgctcaatatcactcggctactgctgctgccattcaaccgcatgcatctgctgcaacaaattgcagcaaccagtcggttcatacctcccatcaaaagaccattccgaaatggcagccacctggaaaagacatgtataaattgaatattgatgctgctattgattcaaagggtgctattattggagtaggggctcttattcgaactgatgcaggtgatgtagttgctggactctccaaagtttgcaaaggctgttgctcaccaaaggaaatggaagctttggctatgttttacggtttgcaatgggcattgatgcacaactttccactcaatttcattgaaatcgattctctcttattgtctaatgctctccattgtttatcttctactaagtgtataactcctttttatgatttggtagaggatattaattatcttatgtccttttttcctagagtaaaggtatctcatgttaaaagagatgctaaccaagcggctcatggcttagctaagtttgctcttcgattggacaaagatatggtttggttaggtgaaattccatccccaatcgtttttgtagttgttgctgattcttctcattaataataacagatgtttctcaaaaaaaaaaaaaaaagtaatatatgatcaatatttcaaaaacaaaaataagtagtaatatatgacctccaacataaaataagaaaactaacctgtgcaagaaaacctccaagggcaggaccaattaataatccaattccccaagcagtgctaatctgaaaattaagttattctttctcttatatattcacaacaactaatcactactaattatgtagtgtaaaacaaattaaagagaagacatatcttactattgacattcccaaagcttgattttttgtattgcagatttctaaaacatatgcctgaaaaatatacttttagttattcatatataataagtcaatagaatagattaaacatgatgaattaaaactataacttaagataagttctcaaacttgttctatgatgaaatcaaattaatcatttaatccacattaaaacaaaatgtgtaccctcaatggtcctaatgttccgcacaaacttccaagtaaaaatcttgttgaaactgccatccaaaattttgtactaagtccaaaaagggtgttgaaaattatcctgaaaaagaatatatttgttaaaaccatgatcaaaggagagataaagagaaggaaagttgatagaaaggtgattgatcaatctttaatatgaacaaaaatcataggtaatcagctgataaatgtactgacactgcaattgtgctaaaaatcatagctggtttccgaccatatcgatcagctatcattccccaaaaaatggaagtcagaaatcttccaaacatgaatgcagatccttcaaagaataaaaaatatcataattaatagtaatgtcgaagaatatcatttgcattgaaactataaaattaattttagtttgctaggaaggtaactttagtgaccttctaaggtgcacttcgtttccaacatctcaaaaattatttgaattttatttttaatgcattaaatttttttaatttttttaaaaatttacagaattttttaaataattaagttatatacttttatataaaataaaattatttaaatatcgaaaataaccatataatataatatataatttttttaaaaaaaaaattgtgaaaagtatataatttgttataaccatataattcttttttttataatatatattgtgaaaagtatttttttttaaaaaaaataaccatataatattttatatcatcaatctatttataaattatttaataattctaatattaattaatttatataccaaaaaaaaatagatataaatttttttaactaaaatgaaaatttttaatgaatatttttaattgttaaaaaaataaaataaaggaatttttgtctaaatttatgttgcattctttgaaaaagattaaaattaaatttactaattaccacacataatgatgtaatattaatctttggacaaactaggagcatcttcaaggagacaccaaattttggtgttacactatcaccaaatttggtgtcaaaaattatttctactccaaccacaacaccaaaaattacactaaaaaaaatattctttattattat

SEQ ID NO: 111117 - DNA, 9089 bp, Cannabis sativa
  modified_base (27)..(47): a, c, t, g, unknown or other
  modified_base (8980)..(8990): a, c, t, g, unknown or other
acttagggtgttaataaacatacttgnnnnnnnnnnnnnnnnnnnnntaaaataaattccaacattatcaatgattgactgattattatttgaaacgattattgatctcttttctacaggttctcgattatttatcaacactgcttcccattattgtaattttttgttatttttgttatgcttattcagttgtttgtattttgtatcgatatccaggattacttgtgtttttggttgtattgtatgatggagcctgaagtgttgagggattttattgggtgtataaaagcgaaagaagtttggcgttaatagttgaaactggcacaaccctataaaaaatgtgcaacattttgtatgaagagttggaggttgatacattggagtatgatttgaaattggagatttgttcgttgtacataaaagaccaatttgttccgccagaggttattaagaaacaatgtcaactaagagtgttcttagagatgacggcgaccatatcaaacatagactttatacctacaaaacaataagatcaaaaataaaattgtattagttgatgagcatttattcatatcaataataacaaaaatcttaactttttttttttacaaaactagttaagaactataacttgtcaagaacatttcgatattatgttgataatccattgataaacttagctaaaaaattctcaatcatatcaatagcctatcaacaactgtcgataattaatcgatatttaagttagaatcaataaaaaaagaaaattacaatttccttgctatgattcaactgtcgagaatatttcaataatagctaaacttaatgactatcaccctcatcgacaaactgtcgataatcaatcgatattcacctgagaatcaattaaaaaccaaaattacaattttttttcaatcctttatcgatagagaacctattgacaacatatcgataacttgtcgacaacagctaaccttaatgaccatcaccaaaagctaaatcttatcgataacctgtcgagaatctttcgataaatcatcgagaacatacatcattttctttttttttttcagccaccaccacactagatcgaaaaaaataccatatccaccatataaaatcgaccacaaattaaaaaacaaaatcatcaaaacaaagtgtatttcaacacaaataatatataatcgctctaaatcaaccacaaaaaaataactaacaaactttttttttttgaactatctttctaaagaatgagataggtccaacgagacgataggcgaattggacgagagacgggctctgacggcagaggaacgagcttggatgggtcctttgcgcgagtggacgagtccttcgtacaaggagaaggatcagcaaaggacggagaaagattttcgaaggagaaggatggagaatcttggactgataggaccttcgtgcattcgggtctttcgttctttgcgcaggtgggcagagtggggtcggatggtggtcgttctttgctcgggtgggcagtgggggctaaaaggtatggtggcagatgttagggctatagagagagattgaatttatttaggttcttttaagttttgaaaaaaaaaaataataaaaatattttagataaagttgacagttaataggatggtattgtataaaatatttaagagaatattttttaaattaaaattatttttaaatatagtaaataaaatttcccttataacacgtgaataataattttaaatttaatgactaaatacctaaatttcaaaatatataacttaaagtattattatcatcacttacttatttacactacaaattacttttttttttaaaactcctaaccaatcaagaattctcatgtggatcccacctttcaagttttcaaaaatataaaactgtgttttcaagttctaaaccagccccattttcaggactttcaacgcaaaaataaataaacagaaccattacatactatcatttacaattttcatattatttttttttattacttatgttaaaaagaaaaggcttatattagtcttaaaagaacaaatcgaattcttcattgaattgttcatctgtccctatccttgaatttgttgaatctttgagctactcactcttcttcaacagacttaaagccaccccagcactgagacttgtagctacaaaaccgagcgacatctcggtagatatatgaaaccctgtaagaaaagcttatgatagttcggttattggattaaatggaagattatagagtggaacaataatgagagtgactgctattactaaagtacccaccgaagaaatccaggatcattttacatccgataaagccgagaacaacaccaattgagggctgaaacagtgaaatcagggaattaaatagtaaaattcagtgaagaatatttctaaaacttattctaaatatagaaatctatgtcattgggtagtaaaaattgctatagctccgtaagttttgatgaaccctctttgacaccatccccagtctacactctaatctagtctacattgttctagctataatttccaaattgtctaagtcaatgatacgaagcatgtgtaatatatataacctattaataaaaatattctctagcacattctttcactagacaaagaagcaataggtctgtgtaatgcattatatgggggtgtaatgactagcagaaagaatcagcaactaacaaatttgggctaagaaatcaagtcatacctgtaaatacaccaaatctgacatgccctcagatattagtgtgtagagcgaccttaaacctgtatttcccaaatatatcgttaattagattatctacagcacatagccatatgcatgtaatactcatattagaccaaaattatgcactttaatgccatagaatcagtttaggaacaactggcccgcatgatacaataacttcagaaaagaaatgtagatgagagcacatcagatcctagactttaatgctatagattcagtttttggaacaattggtccattgatgcaataacttcaaaaaagaaatgtagatgagagcacatcagatcctagtatctggtgcaatcaatcatcctatacatatattataatttacaaagaaataaacacatacatatacgcatctaggacagtttccatagcaagaattacctaggatggcaaaaatattagaagtgtacactatgaaaggatcccgtgtacaaccgaatacagctggtatagagtcaacctaaatgaaaataagacatgacatcaatagccataaatgtaaatttggtcataataaaaggtatactacatttctggaataattgttgggtgaagaacctactgcaaatgcaatatcactgagctcgattactgctactgtgagaagtaaaggtgtggcctgcccaaaatgtttgagacctgttagaaatgaaattgaaaataatataaagcgttaaatcttggttttatgagaggacgaaaatgcatctagttgatccatcagtcacatttcaagataacaaaactttcttttgagatgaagaacatagagatggatcaaaaaatttattattattgttattatttgctatgagagtcttaagagtttgaaataactgtattttctgcaagctaaacatgtaattaaagctttaattctaaatcttgacaagatctcataaaaagactaaccttccatacaccatcctgagcagtaataaatcgattaccatcataactagctgcaagagttcaataaaaaatatttatatatattagattacaacagattaagttcattctcaaaaaaaaaaaaaaagtagtcaaaataagttaaattctattaacacattcatttctttaatctaccattaaaagttaagaaacaactagctattacaagaaaggggaaaagatttggagaaaaacagaggaaagttttattgatctcaagagagaaaagtacaggaaagagccaatatatagctcgagaaatacaaaggaatgaaaaaccagtaacagaaaaatataacaaccttataacagaaaaccaactaactaatgacagctgacttttcctaactaacaaaacagaacaacaattaacactagctaaactgcaagtagcaaaagatcaattatatatgcttctagtttttattttttttttcagaaaaataaaaataaaaaagccatctaatggtgcttttcaattctcattgaagtgtaaaataacaacacttttccatctaaattaatggaaagccagtgatatggaatgattcaacagaaggcaaacagacaatgagatacaataatacctgtaacagggataaccttctggcatgtcttcactataaagttgtcagataggtcagtgtcatcttcttcagtagcaaatagctatccaaacataataaaattttgtgtcatcacactttagctagaatgatttgcataaaacatcatgagcagacattttacatcaagaggtatcacaaaatacacacacaagcgtgcacatttatatgtatatgtgtgtgtgagtgtgtgcatattagtgtgatgacaaataaaaccacctaacatgttgaaatcaggaatcagtttctctttcaaattgaaattgaaattggttttcaaacacagaactgggacggctatgaataattcttcccacagaactaactgaatgaatctaaaaaggtatatctactggtgtttacatgtggtggcatatccattctatgatcttgcctctaaagatatctgctatatttgtctgtgtgtccatttagaaaccccagagagaaacagaaggttactttggtggtttaaggttcaagttctttctaagtacttgcatagcgtttgctataataatctgttcctcaaatattataggattaggcgaagaaaccaaaacattcttcacccaaataaagataaattcaaatagttaactaacctccttaattcaaaattcaattataatccagtgatgaaaaataaaatcaataaagaacagctacatattttttaaagagaatttcaccttgaaagatgagaaaagtagtatgccagctagtagaaggtttactgcttcatacctctagaacaaaagcaaaggaaagagatttaggaaaagcacaaccacaaaagctactaaaccaatgcacaaaaaacatgatctttacctgaagtgttgctgtaccaagaagtattattgtcaaacgaaagaccactgcaccaacaatgccataagaaagtacctgattctgtattccaccatttaagcatattgttacctcacgatggcatagatacattaatgcaataataacacctaaacaatctgaatgtatggaacctatgtaggcctcccaataggatatcttgaataattagaagtatgagacacacctgatacatgcttggcactttgaagtacttgaaaatcagaacaaagacaaacagattatcaactgacaagctttgctctaatatatacctgagaacagtttggtcgtcagataatgaacatacaagaacagaacttgcagaaaccataaacaaaatcaacgaaagggcagctcaattagtagctgtttgacgtcctaatatggttacatactcttgttgatttaaacaaaaagtgatgaaatgattcagcatacccagtgaaaaactcggttgccttttctcctccttcctttaaccctaaagcaatgccaaatgctaccgccgcgctgacctaaagtaattaatgaaaactaaacgcatcttaatattgtaaggaaagaattaataaaagcttaagcaccacaattggaaacaaattgggaagtacttacccacaaggccacatttctaacagaagaaacaaatctttcatcttgcttagttttctctgaacaaattattgaaggagtagtgcgagagatatcaacatcgctaatatctgcataatcatgatagatagtccttacaatcaaataccatattattacaaaccgccaagatacgggaaaaaataaataaatgacactcaattaaactagtgaaacattcttagaaagcttagcttcaaggaaaacaccacatataaataaatcgccttaagataactaaaagtcaaatatcactacaaataatgaagaatacaatattttttatgcagaaatatcgctaaattaaagtatatttttagctctaacatcaaaatcaagctaagactgacctgaagctgaggtagacaaatcgtcttggtgctcagttcgtctggagcaagaaaccagtgaagattgaaaacgaacagtacgaaaatctgaaattcaaacaaatgttcagactcagctcaaagtctgccactaacagaaggagagagagaaagttcaaattgagagatggaaacctgtacggatgaggcgaggaatgtgaggaaaggcatagccataggagatgaagctcgaggattgagaaggcacaggaagcctaagaaggaaggtgggaatgggagaatagtggagtctgttgtagacgacggccatggatgctcggaattggtggaaaattcaaaagaagggatggccttcttctgatcttatgattcttatcctttttttttttatatatgttttcctttctattttattctcggatttttatttatttatttttgtttgtttatcggtgcacaactcgttaagacatctccaaccgatctctaaaacacaaatatagtgtagtttcaccctatatttactatactaggacattaaaactatactcataaataattttatttaccgtgtcctaccaaatttagtgggacactgtaaacaacactattttttaaacaaaaaaaaaaaataataattaaataataattttaagtagaaaaactaaataattatatatatttagtattaaaatattcttattatattaataaaataataaaatagtaaagaataaaaattttgttataattttcagtgttgtggttagaattgaaaaaaaaaattagtgttgaaataataattttttggtgttgatttaacaccaaatttaggtttctctattggagaagcccttactgataggagtgtgcagaaagtcatccaattcaattacaaccgaccgatccaatcctaatcaatccaatagaatcgaatatccaatcataattagatcaaatcggatgtaaattttaaaaatccaatagaatcggatcagttgttggatgggacattcgatccaatgaataaccgaccaaaccgatccaattatcatccaatggtcatccaattatatttatatatttttaaaatacttttataattttatatatttaatatattttatttaaaatatattaattgatttaatatacatttaatacatgagattaattgaagtttttatttttactagattttgatctctaaaaaagtagagcgttgtctgcccttaatgtatgctctgtgacaattagtgtagtcatttctttttaattgtatgagatctaattctatatacatgaatttaactactcccgcctctatctttttaaactttcctactgtaaagtgagaatttttggttttttctaggtttactttcctccttcttacccttcgattgccttaccttctactgccaccatggaatccttcttaacagatgtgtcaaatgctcttactgaacgagaaaaatatgttgttagcatctccaatatatctatccctacctttaatgtgtctaatttccgtttactatgtcgtatttactcgaacaaaggatacaatcctaaacacttgaaaattttcatacttaagcactggattggaagatttcaggtgactatctcagactatgaaacggattcgtatatggttacatttggttgcgagggtgatatgaagagagtcttatttaaagaaccatgacattttcacaaccaacatatgattctctgtccattaagtgttctgtcaaaggtttctttcaactcatttaccattaatcccttttgggtccaagttaatagattgcctttcctcagcaaatctaaatctcttgctagagtcattggcaatctcattggcgatttcttagaagtccatgatgattccctaaatgaaggatggggtcctttcctaagaattcgggtgggaattgatgtttcaaagcctttgcttagaggtcaaatggttactttgccatggctgcaagatgagttgtggattgagtatcgatatgaaagaatgctagatttttgttactcatgtggtatcattggtcatttttttataagtgcgcacaatatctagagaaaatggatgaaggtttggatccagatctagaatatggcccgtggatggaaggagcaccactaccaaagtcttcatatgatcgctacaaacaggatttttctaaatctgggccatggccttttatcactcgtttggctagaaacactatctctcctattctcccacaccctactttgtctccagcctctccacattctacaacaattagggagaaggggaaacaagtttgtcaattctactcatattcaagaaggacatactaatcaagattcggcaatcatctttgttcaagcaaaggtgccaaatactgctagcaatacatccaagtgcatgatttccaatcaaagatgttacaaacacaataatcacaacattccataaagacaaaccaaccataccatcttcatcttcctctgggaaacaaaagataaatacagatccggacatcactcttccactattctgcaatgtgtcggattcaacacctattaacaacaaattagtgtgtcaaaccagcaaaacatcatttctatctactggactgtcaagtgtagatgcgtatcccctggatatctccctaacaagaaaatatcactctccatttctattggaatatgttttaccaggnnnnnnnnnnnctaacaagtatgtttttaacatcttaaatatgaatttctaaaacaatgaaaataaacacataaaaggtatgagaaactttacattggttgcagcggaat

SEQ ID NO: 111118 - DNA, 3427 bp, Cannabis sativa
  modified_base (3389)..(3391): a, c, t, g, unknown or other
tctagtcagcatcaatttatttattttggaagatgagaaaactcactactaaaagcagttttgccaaaggcaaataaggaaaataatttgcaattactagtcaaaatattcgtttgatgattgtgacacaaaatacatagttccctttctaattctaaaactggtggattgaattttccatttacacaatataatgaataatttttttaaaaaatttaatacttatcttcttctactataagaaacctgtaagtcagaacttcaagcttagttacggaatgaagctgtttcataaatattcagcttgaaaactaaactgacatttaagagcattaagaaaccatcaagatttagagagtaaaaaaaagttgatttatcaatggcaccacatccggcaactaatgccacacgcaaattgaagcatcttatagcctattgaattgctaaaagagtaaattatcttacttgaacttaatgtcctcccatttgacatcttcagcaggagtgaaaccctcaatggaaagtgaaaacctcttcacctcaggcattgaaggaagcttcaagagaccaaatcccatggccaacctcccgatttcaagttctttccacctgcattaaaataaacactttaaaataatcttaattcagagagagggggaaagagagagtatgagaagataggcacctgaaaatgtatgagcaattatgatttttatatccacaaacaaaagaaacaaatgctctcactcccttttccatgacatcacggtcctttgttgctgcagatcgtatctaaacaaagttattaagcaaaaatatcaggaaagaacaaattacaaccaccgaacatttcaaaaaaaaaaaaaagaaaatctaaaacaattcataatttgataaatgcaaatgtcaggctatataataaagataagaatgatttgagttgacctgaggaataatatcagaagcatcttcagaaatttctctttcttgaagaggaatccttctcagacgtaggaattctacataagcttcctcctggaatgaaagaaaacaaccacgaaaaccatcatcattgaaatgacacccgtaaccctaagaacaaaattaaattttactcaaaagaatgaaccatttcaaatggatataggagcgaggaacatacctttggcaataagaaaacgattgaatttccttctctgcccatgcgagctgttcgtccaactctatgtacaaaaacattgggatcttgagggggatcatactgcaaaagcagaatgttgaaataaatgcatagatagatagatagccaatgcaatggaaatgaaattaatatgatagatgagttgcatgcccaacttagaagacaacgtaaacaaacataacctacagtatttgtgtacttatgaaatgaaattacctgaatcacaaaatcaacacctgggatgtccagcccacgtgctgcaacatcagtgcatagaagaataccactcgaaagtgatctaaaacgatccaaggctttctcccttgcaacctattggacacaaaagttacaaagaagaagaataaatgattagaagatgatgaatgtggaatttacttttgatcaagtattccaaactccaaaactttacttgcttcatatccccacatagtggaataagattgaaacccttgagaggagcaagacgcggaagaacaaggccccaatattgaacacaagcacaagtcatgaagtatctacaaaaggagtgtcgattagcatactagagtagttcattccccatcataataagaatacgcttgaacacttccatcaaacttacactataatcttttgactcttgttcttaacaagaagatccacaagctgtgatgattttttgtctgcttcacactccaagtactgcaggaaaaaaataaaggcatgtgggtgctgtaatttaccattatcattcaccaactacactccaagtttccaaaacacgatccagcatacctcaaggtgaagactggaaggtgttcttgaagatgcagcttgttccgatgatactgtaccatttgccggctttgtttcggcccgtacttcaactctcacaggatttctcatccctgccttggcaagctcttcaaccgcctcagtttgagttgctgaaaagaggccagttctacgaagcttgggtaagcgagatataattgcatttatctgcgtttggaatcccaaatccaatagcctatctgcctcatctagaattaaaacctgtgaaaagcaacaaaaaccatagcattttaaagcacatgtttcatactattgcagcataccacaacgcaatgccatcaacaaaacaaacacaaagttctcttcagaaatttaaatgacattgaaccaaacctacaaactaaattcaattctcctaaaaaatcaactacaaacaaagcgtacactacagcattcaattaaaaaggaataactaatcgcctattttgcatagctccttaacatatttagattaaaatctagaagttgaaccgaatgaataaacgaaaaagcacagaacttgggctgtagagaaaccaaatatatacctcaaagctcttatagtccaaaatttccattctttccataatatcgtttagtcttccaggagtgccaatcaacaagttagctccttcctcgtctatcattgtcatgtctgctttcacatcggttcccccaactaaaagtatggacttgaaattcgaaagcgtcgcaatgaatggctgcgcaactttatatatttgagacgctagttctcttgtgggagaaataattactcccattacctgcacaatccaaaccaaaaagagtgtattattctctgttatttttctcggcatccaaacagaggttaagaaacgagtagcggaataagacgaacctggtgaggttttggaggggtggaaacgcgacggataatctcgacgagtggaactacgaaggctagagtttttcctgagccggtggcggcgtctactgctacgtctttgaatttgcatagcaaagggattgtagcggcttgaactggagtgcagaactcgaaccctgtttgagataaggcttcgagaacggactcagagagctcgggcctgaggtcggaaaagcgggtctctgtcagcgcccggttaaggttttcggggtcggcgcccatggcaacacttcactgctctcttttggcggtaggttcagaggcagttagttttagggttttatttctgttttaaaaataaaactagattatatgtaaatttgggaaattctacaatgtatccacttaaaatagatacattgatatactcttatctgttttagcatctgaaataattttttaatcaaattttttctcatggtcatnnncgttatagttatttaagacatcccacaaaattttaa

SEQ ID NO: 111119 - DNA, 3322 bp, Cannabis sativa
aatgaataactgggctatgtcttttgtattttcaatcgactcccccaggtcattctttaggcattgaatataattacgccgtctccttgttaccgtactagccatgaagaatttcgttgaacggtccccgtcttttagccaggccactctcgacttttgccgccaaaagatttcttctcttcttaacccctcgtctagtctcgctctggcttcggagtgagcctcctcatcaagattctgggtctcttcaataatcttcagtttagcacgagcctcattgatttgtgtagtcaatctcctaaaatgtgatttattccatatatttgtatatcttaatatcaattaggcagtgattattcttctcgtatctcgaaacatcttaggcaatagtaatctagtggagagagttatttagccaaacaagaagagtctagtggagtttttcatatatgaataatatattgattttctttatggttttagaatgaaattcatcagggaatattagacaaaccaatcaaccacatataatttatgttatgcaacgtgtttgattaggttaagaaactatagattttcatggtgatttgtccacttccattaattctcatataatatatgttttttttccctgtcaataaaaaataaaaatgtaatatatagtataatattagagtagcatggagatttcctaatgaggttcttgtctagttcctattagtctttttattatttaatcccaaagggctgcttattttactttgtgattggaatgaaattatttatttatttaattattatacaaaatgcaactaatcaataattttggtgtagacgtataccataagagtagtgcaataaattacccccacaaaacttgattattaacaaagtagtctgtatgtatggtcataaatgacacaatttcagactttcagtagtactgcaagcacttataaagatgcagcaaagttatatatggctattatgagtatgtctaaaatggttgtatagcaatataataattgtacttaaaatagtgaaaatattctcaagtttattacagttgacttataaaacttagagccccaattctttaattgtataccatatctacaaacatttatcagaccatttaatttctttaatgtctaaatgcttttttgtatttggcctacaaattgtttgttataaatgtaataatagttctggcacatgcagtaaaaagcagatttataataataatatacatcacatgcattatattatgatgttcctttgaacacactatatatactctccatgtttgaaaacaaagtgggattattatatttgattactactttatcataataaactataatgaaaaataaacagaacaaattctgttctttcacacatatgccttaaaaaatctgaatgtgaattcaaattgaaaaaatgcaaaatcgctaagacattaatttggtggagtttttatcttttttcttagtactttccattttttatgtgccactaaaaaatgagtcacacaaaaacacaagtgcataatagtattttcttttaaaagattttcatatgtgaaaccctttggtatgatcagtgtgaatataaaattcattgaatatcctagagcaccaatgatgattcccactaaccccttgacctaaattagtgaaggagctaaattttttgccacaacaaccatcattcttgtgtcactctccacttgaatagtgagttccatctttttcttattatttcataattaatattataacgtatgatatttttttggacaaaccccacttaccaatttaatttctttctgtactgcattttttttttctttctttatctaaaaatctatggtcacactacgagtggagcgaaagattgaaacgcgttaagcccttactattggatggtgtcttatatgtcaaccttttcaactttagtaattaatttatatctcaatacttttttttattatttcttaagtttatttatttaattattttcctatactttacgtaaatgtataaatatgagggttaccctcttattttagaggaagcaaaacattttgtattagttttctctaagaagactttttgtattgctacatacataaatacatataaggaatattaattaactatggctgcagcaagaactctcatttctctacttgttattcttcttggtttttctcacctgttatgctctaatgctatcccacttacaagtaacttaacaattctcaccagcacttcttgtttcctttttcctcatatatatatatatatatcatttaaaataatcctaaaatattgtaaacttgtttcagggaatgaaagattgatgatgcaaaatggagttcaagctcatcttcctacagcaacaaataatctggtacgatcttaattataagtgtttgtaggactaaatctgaaaaatctctgaaaccaattataaatctattatatattatagaaggaaagttgcagttaataattctaaattgaacaattactatattacaggcaaaagctgagaatattgtttgggaggctgatgaaactattattccagaaagaatgggtgtggagcttcatgactatcctggttctggtgccaataatcgccacactccaaagccccaagggaaatgtgctgagtgttagtttagtcttctctatataatatataaatatatagtattggaatactgtgttatggtcagcaatttattgtaacaagatttttcttctttgtcactcaattaagttgattaagaagatgcatggcgcatagtaatatagtatggtatgagtgagagtagagatatatatagtaggtgaataatagtagccaaatatttagtagtatatataatggatacacatatacagctaggtatattggttactattattctttatacatatataaatattaatagtacgaaattaatatgtagttttatggctaattatatggctaatgaaggagagatggaaaacagttcccttggtgggacatttaatggttttaatcacttccttggacttaattaatgttgttctatatatatatgatcagtacgtatgagagctctatattcaaatatatacttaatttatccatattaatgcacgtttatatactatgtattaataagatgcatgttttgttcgaattgctattaatacttaattattaataataaaactaaatttaatacaattctttacatcaaaaatctaatttactcaatttattacaaaaaaatccatatacgcttacatcatcattttta

SEQ ID NO: 111120 - DNA, 9145 bp, Cannabis sativa
aattcttcaaaaaactgttttttactgtttgccaaacacaattttatcacagctttttcaaaaaaaaaacaacttttagcttttccaaaagctgtgccaaacaggccttcagtcttctataattagagctaagacagtatttagatcctaattttttggtattatatggttgatacaaagtaaaatttagtggagaacttgtgtatattctaaaattctaattcctctttttttaatactattgatttgtgtatttaatttattatagtctcgacgacataaaaattatgacattttattttacttaaattgataaccctataatatcttttttttaatgtttagttgactaaaaatttagtgaacaattttagttaattaattaattacaagattattaagttatataattgtttgaatgaagctaaaatgaaatccgtgacaaaagtaaaagcgttttcttaattaattattgattattgatattagatatgattgtttattatcaactaagagaatctaaataaattattattacatcaattatttttctttatccagccgacaaataaattgaaaaataattaatatatataggttaatgttatatacaatagatcgtataattaatttttttttaattaagttaatgttaactgtgtttaattttttaattaaataatgttttttattttttttttaaatagagtttgaaattttaattttttaatttttttttttagttattgaggctatagtgagtttttaatttttcaagttttattgttgtttcatccagctcgtgttgtttctcttctatttatgtaatttgtcaaaaactattatcctatgattaattagtataaccaacaacaacctaaaatcccaaaatcttgctgcttctaaggagctcgagaaagagacagagagagtttggagagagatgtttttcttgatttttctatttgtgatcaaatgagataaattctaaaattaaacattaaaatcagatttctaacataaaacaaatcaatatactaagtcactaaaagacaaaatctcattttggacaaaagaccattttgcctccacttatactataaagtctttaaacctcttaggggtaatttggtcatttttaagacttcgaatattcccgacatttctaatgtctatctaagttgccctgctactacaaaaatactaaaatgtgattcaagtagctaaacgtggcgttctaatgttaccggacacaaaacatgaacaacataaaatttcatatatagcataaataatacaccttgaattcaaataaatctttatgtattcataaatcataattaagctctaattgtccgccaatttccacataaaaactaagtggtctttacaattgtatataaattatctatttatttttataaaatgctcactacttaagatgtcatatctctttagtataattaaatatcaaatttaatataacataatttaataactagggactattacatgaaaaatacaaattgacactttatttacaaaaatatattcataaggtgtggacaacatttttactttttatgtgcttttaattaccaaaatacctcttacactatcacttacacaatcagacgatggttgatggaaggttgcatcagacgaaggtttcaatcatacgaaggttgttgggtggttgctgggtgattgaccaaaggtcgcatcgatgaaagtttcaatcagacgaaataactgttagcaaaatatatatgcaactgttatgaaacattaaaaatcaaaacagtattttcacgtacataactctatccacatgtctcttcatgatttaatatgaacaaattcaccattagaaatttggaacacaacgaaagtatactaggataaaatgttttactataatattgatgtaattttttgtggattatacttgagttggattcagatcaactttttgaaatatgcatttcatggatatgaaaattaaagtaatgacattagttttatggaaattaaactgaactttagtttcgtagtagtttttctacacttatttttttcatgaattcgaaacagctcttgttttgattgattctggtcgtcttctcatgtagattcgccgaaattaatgatggttctctttctagttgaattttcatttcgattgtgttgaatcctcagttgaaggtgtgtataaataatatttgtgtaaattttttttatttaagttttatatttatttatttagctaactaaaaatatttttgtcatttattcaaaaaaaaaatatttttataatattattatctttttaaaaaaatactgtaaataaatctaataactattataaaatatcactaattttttatacatgataataatcctagacgccactagtttttatattttgtatgcgttatattccaccaaaaataaaaaaattggagggtcgtcacattgcaatttcaatagggacaaaatcgtcattccaccacttcaacagtcgtcattcatcatgacagcgtgacccatgttatcattcccctcacaaccaagaaaacaaaacccaatcacaaccctccacgtacccacccgatcaaaacccttttaacggttacgatcaaacaacacgtgcgaaaccctactgtcatattgtaagtctgaccgcaccctacctaaaacccctcctctagaagcggcgcgtgcgaaattacacggctctgtcctggaaaagaacaaaacggagaaacataaaatttggagagaacagtaaagtcaaaccataaaagtcaaccaataggggtaaaatggtaaattcacaaaaataatatatttaataataaaattttgaaaatttaagcaaaataattaggagattaaataaaagtaattaaaagctgcttcgtcgtttataatgtttttttattttcgtagttcgtaaattggatttaataaagagttcaagtccgggtccgtagagagagacagaagactttttagagagagagagagataaaggagaagaagtagaggaaaaggttttttggttgagctggttttgttctgatcttcgtggttggtgctaaagaatttggatcttcttcttcttctttcacaaattcttgtacagattacgtctggccctttttctgcaatttttttggcagaatttgctggctaaacaccaagcttcgtttatctgatctcaggttagtgtactgtgttctaccatggcgaaaagggttttaaaaactagttttttagggtttactgagagcttttatagttggttagagcgtaaactctttacacctctgcggaaatttcaaaatgtttatcaatttttgttttgagcggatttttcgcgtggttgagaacctttttagcttctagagatctgtttttgttaatgggtaaaattttcttaattttaaatgttatttttttttttaaaaaaaaaggagaaaatttgaaggtctcagtcagttgtggaagattattttgttgtttactttgcgatttttggaacttttattttgtggttcaaaggaaaaatcttcatttgtttctaattttgttgtgtaaaatgctttttctggaaactaatatatcctagggtttcagtttgtgcactagcaggatttgaccagaaaggtctgatctttgtatggttggcaccgatctttgcaagccctagtggagaagtaatggatctttaattatgtcaaggcctagggcttagtcatttggcactattatttgggggcacttttcaggtttgttcccatctggccactttattctttcaatagtttatttcttagtatggtgctcactaaaaagatgccatatttagagttatcagcttttaatttctatctttgggtttagtttattagtttgccttgatggttaatttggttttaaatattttatgcttaattctatatttagctcgggctgttagttgcagtgttctctctctccctccctctctctcttgtgtttcgcttaaaggttgtattaaaaatggacaatttagattctgaaaaagaaaaaaaaaagttgtagaatccatttaaagatgtttctgactaaagtgtagagcttaagactactttagctccatgtgagaagctttcatttctgagaatctctttttcttgtctgtgcttttcgtcatttttcttcttatgtgtcttttacttgcttgattatcaaatgtttaaaatggaattttgaacatttatttgttttttgtagatgaacagtgcttaatggtcgctggtcactttttgaatagtggaatacaatttatgaaactctagtgaaggtacatcaatatctaacatctgggacaactagcgtttgtggagtagatgtcgtttcgcagcattgttcgtgatgttcgggatggttttggcagtctgtcaagacgaagttttgaggtaagattgcctggccatagtagggggaaatcacatggctcagtccatgaattgcatgagcagcctctgattattcagaacagccggtgggctagtcttccacccgaactattacgtgatgtgatcaaaagattagaggcaagtgaaagtacatggcctgctaggaagaatgttgtcgcatgttctggtgtttgcaggtcatggagggaaatttgcaaagaaattgttaaatgtcctgaattttctggcaagattacattcccagtctccttaaagcaggtgagagtcaccaatatgtatttaccacaatctcatatacatatacttgggctatcgggtaaagtaaattggtcattttttttttgtattttagtgattatctgctcaaattaaatgtatgctcacatgcatgacctattcattgcttggtgatgctctaatatttctgaatgacaactaacacgactttatcatttctcattttcagccagggtctcgggatggaactattcagtgttttataaagagggacaagtctaacctaacttaccaccttttcctttgccttagccctggtaagcttctactatatgattagttttgtttatactgtaattatattgagctcaaccaaatcttccttgttctttgatcgagggcgtagtaatagacaattgctgttagcctagcttgtcttctcataaattagttgaagaaaagtattttgagttgtatgaatgtaaaagtgtaatatcacagtgtctatggagaatttgatactggttgctttgtctagagactactgatttattagctttttaatttatgtttccaagaataatttatttatttgtttcctattgtattcccatttgatgagtgcactgcttttgcagctttgcttgttgaaaatggaaaatttcttctttgtgcaaagcgaacacgtcgaacaacatgcacagagtatgtgatctccatggacgcagataacatatcacgatcaagcagcacttacattggcaaactcaggtactgaattgtgacacacagttactgaccttggcgtttctattttttgaactctgtattatagattaagaagtattaagagtttggaatgcaggtctttgattccaatttgtgtttttctaaaaaaacactgaaattgagaaaactgctcgtcatatttgggtatattttcgctgttatttgatttggctgcatactcactttttttcttcccactatgtcagcccaatcttctagttttccacattgttgtaattacatggctaagtaattaatcagattacaaactttcccttaagcatgtaagcaatttcgcttaagtttttatacttactatgtataccaaaatcattttgtatatatgttcatttgagcacttttatacatgtttcccccacaacaacagtccaactcacacatatatattctatctaaatagagcagagctttctattcaaatcaactcatcttgttgtttcatccaacatgtcaaaatcagcttgtttgactggactgcatttgtagcattcgtttgacacttctctaacccttttcgaaatcattctttcaatgctaccaatgtctcatgatctgtttcttagccctgttttcttcgttcctataaaattttgaatttgattttggtttactgtttaaaaggtggtagaatgctcaacaacatatacattcttggatgtaaaatgatctgcctttttcttgtttcaggtctaactttctaggaacaaaattcattatttatgatacccaacctccctacaatattactcaactttccccacctggcagaagtcgtagattttactccaagaaagtttctccgaaggttcccacaggaagtttcaatattgcccaggtcacttatgagttaaatgtgcttggcactaggggtccacgaagaatgcattgtgttatgcattcaatcccttcctcatcccttgagcccggtggtgctgttccaggtcagcctgagcttgctcctcgctcccttgaggattcgttccgcagcatttccttctcaaaatcaattgaccactcaaatgagtttagcagtgctcgattctccgatattatcgggcctcgcgatgacgatgaggagggtaaggagagaccactggttcttcggaacaaagcaccaaggtggcatgagcagttgcagtgttggtgtcttaacttccggggaagagtgacagttgcctctgtcaagaactttcagctaattgctgcaacgcaggcagctgctggtgcaccaacaccatcacaaccaccaccagctcaatctgaccatgacaagattatacttcagttcggcaaggtagggaaggacatgtttactatggattacagatatccattatctgcatttcaggctttcgccatctgcttgagcagcttcgacaccaaattggcatgtgaatagaagagaaaaacgaaaaaagagatttacggtaagaaatagaagaaaaaagaaaaagaaacaaaaaaaaaagattagcttgaaatgtttctttctttctagggctctctatatagaatgttgttgttgttgttgctgttgtatcaagtcgccgtacaaactcatggtaggctaagaactccggcttttgaccggggagtgcagaaactatatcagtgcacaatggagggcatgagtcctcttctcttttatttttttcaaattttatttctttaatttttactttttggtttagtttgctttgattgattcccttgtcttgtctgtgtcatcttgttatttaacttttactgttatattttatgccttggaaagaacagattagacatggaaaaggggtagtaggcatcataatgtggattgtgactttggttaatctatccaatttagcaaattcttatctttttttctctctattattaatcaacaagtttcattttttgggaactcgaacttggactgatcactctagaagacagtaatcttgaatgctcttcacatgtgttcttttaccaactttagaaaatttatgcaaaaacagaccataaatgcattaaactcgagtagttgggttactgaaagtaccttccatattttgactgttcttcacacttgtaccaatagcggtatatttaactatttttgtctaacaattttatgtgaattttacaaattttgtttttgcaatttaatgcacgcattaatgtggtttcatttcatgttttttctgtagtttcgaaaaatgttaaaaatcaccagtagtatataacatgaccgccctatcttagaattaagtgttcggtctctcaccttagtgcctaatagaaatgctctggttttaatgcgttatctacagctcttccattagcttttgctgtcttttgaattaaatgggcttattactttattttaaatttttgtttttagcttgagggtggggaattatgcaccattagaagtctatgcatacaattcaaccaatactattatataaatatgtatatttaaaagagtattgttattaggcactattagtagtgtttagtattttctagacgtgtcactttctgattgactagcaatacttactaaaatttattacattaaattatatgggactagatatttagttagactaacaacgatgttgacacgtaaaaaagtgctaagcaccactagtgctctttagtatttctttatttaatatatatgagtcgaagttatgttttagaacattattattaagcactagtagtgttgttttataattggtcaatgatattctatacaagtattatattgaattatatgggatttcttatttaattataccaataacgatatcacattttaaaaagtgccatgtgactgtcttttttagcattttttttaatgttttaatactgtttattacttgtttttttatatgttgcttaaaaagaaataaattggaataaactacataatagtgggtattagattatgcaatatcttggcatattgctgtagattctacaaggataaaccattgttaatttgttcaatgataatatactatgtggcataatataatatacttgtaagtgactttattttatttattttgtccataccataatgcaaacaagatttcgtgtttagtgtgaagaaaacaattgcattgcatacatacaaattcccgttgacatatatgactgcctcttggattagaagaaagaagcttctctgattcagtagcacttccacatttttatattcttacaagtaagccgcccaattgaaaaggaatgcatcttgctcgatttatgttacattttattcaatttaatgtaaaaagtgggttataaaatttatgtataaatcgtccaattgaaaggaaaatgataacccgttcaaagggttggtccgttcaccactaatattttaaaaaagacaaataaatttttatattttaattaattgtaataataagattaatatatatagtttaaatttgaaattaaaaataattatcatgaaataaacataatagttttagcgcatatatatatactaggtaggagttacgtgccgaggcacgtaaatgttagttttagataaagtttattttttttttccttcttatttagattgtatgtgaaggtatgattatacg

SEQ ID NO: 111121 - DNA, 6098 bp, Cannabis sativa
atttggtgctacttctcttcatacattcacaatattcatcatcactatatgtaaataaccatacaaacaaaccaaaattcaatcttttcttttcttttctttattattattattgattgtttaattaattttaacttttttttttatgtgtatgtatttgtgtgggttaagtgtcaacttcatatacatgaatctcacacaatcataaattggatggacaacaaacaacaatggtgttggtgttgaattgagtgtgagttgataatgtggccacaaactgttgatgaaaatagaccaaacacaaaacaatataaataatccttttatgaattcaactaattaataagaaagaaaaatataacccatattttattttattaaaaaaaacataatggaaatgatgttacaatgtgggtactaatgcatttatgtaaaataaacaataatatggtaaaaaagcaaaactttattacttcatttgcccaaaaccaaaacctctgcatgttacttcctctctttctcttattcaattatcagaactatcctatattactctaaacaacgatattaatactataaaactattttcattttcatatttacgacaaactcttttaatatttataataattatatatatgatctaataaaaaaataacagcaaaatattttattgtaattaaatttatatatttttaattaaaaaataagataaataataattatttaatacgtaacacaataatatattatcacatattttgagttaaagtatgactaatttctttcactgtaaatatctcttttctttttctaattttttcagaaattaaataaataaatttacaagtgtttctttttccttctctattttctttttttctttttttatataaaaaaatataaatacagatcaatcacatttttgggttgtgtgtgtcttttggtagaagaatgcttgtcacctactccttttaagttcccaatctcccaaagctcaaacctttattacaattttagtgagagagaaaaagaaagctaaagaagaagagagagaaattctgagaagttacttgcttcctctgctctcttcttcttctgtaagtgagcaatggagagacacagatgcaagctctgtcatcgaagctttgcaaatggcagagctttaggtggtcatatgaaagctcacctagccacacttcctcttcctcccaaaaacccagaaccagcttcatcttcttcatctgatcctgatgcagatgacaacaagtctttagctttggcttatgggttaagagagaatcccaagaaaagtttccgtcttgcagatcccgagttctctttccccgccgccgataatggctccgtcgtcattcaagacagggaaagcgaaacagagtcaagaaacccaactcgacggcgatccaaacggaatcgtcgacccaatgccttgaaaagaatacccagttgggttgttgttgattcagtaccgttaactgagacggaaccggtgagttcggtttcagatacttcgccggaggaagatgttgctatgtgcttaatgatgctttctagggatgtttgggaacaagaagaacaggtaataaagactgtaactttaaaaaaatcaatgactgatgatgaagaagatgaagtgattgtgaaaaggttgaagagagttaataataacagtaacaatggtgttgcgaaacacaagtgtgatatgtgtaagaaagtgtttcgatctcaccaagcaatgtgtggtcataagaagatttgttcaatgaatgaaaatcaagaaaaagaaggtgttaaggataataaaatctttgaatgtccttattgttacaaagtttttgggtcaggacaagctcttggtggacacaagagatctcaccaactcaactcatcatcatcttctgcaactgcaactacaactacagcaactactgctaagcctatcatcatcatcactagtactagcaccaccaccaccaccactaccaatactactcttactgataactcagtaaagcacagacaccattctggtttgatagatctcaacttgcctgctccattggatgatgatgacttcagtgtcttatctgatgcttgattcatcaagatctgtttacaccaaaatcacaaatggggttctcttctcttctcttcttttcttttctcttatattctacccattgttgtctatagatcaaatgatcattgatcatcatcatttttttccttttttttttttggtttcctgagattacagttcttttcctgttttttttttctcaactatgatatgttttcaagtctcaattgttttacttacattagtagtattagtagtagtagtgttagtattagtagtactcacaaacaatacataatatctctatgtatgcaggtgagtgaataggatgagatcattagtattgaaaaatgaaaaatgtaagtcttttcaaattagtatatctcaattctgtgttctttcttttctttatttttgattaaaaaaaattgtatctttagttgttgttgctgttgttgtagcgtgaagcatagaatcaaatgatttgaagatgaacttatgaatatgaatagtaaatgagtaataatagaataaaatgactaaaatatcctcagtaaaagtaaagggggccaaaattgagtgaatggaggggtcttcttggttggtatatgctcccacaaaagatcccatctgccttgaaatgaacgatgtatccgggtaaaaggagttaccttctgcaattcttatggaagaatcagtcagactcaaactaatctaattcttattaaaaattaattaaaaccaatcaaagggtagtagtagtattagattagattagattagattagattatacatgtgatgtgtgatatgagatattattgttaagaaatgataccatctttctctcttttctgtgtcttgcctattcggttgcttttactttaaaaaatgtgtgaagaggacactctgtcttgtgtagttaaggttaaggattcaaaatgaaatgaaaacctctctctctttctctctctctctcaattgaactgacaccacagaggcatagctttctaccttacttgacagagaaaaagtaacaaagtaataaaatacaatagagccaaggatgtaagcaacaccaacaccaccatcaccattttccacctccctaattatgttccatttttgcttctgcctacccaaaaaaatttcttgtctctttgcactatcttttctttctttctttctttctttcccttttttatcagcattcattcagtgctaaatttcctctacttttttatttgattaatattatttcattgcttagtaatcttcagcaatcaatacaatatcttcttcttctcattactcacttttttttatctcatagttgtcaaggggtgtagtgtagaatatgttacactcactttttataataataataataataataataatggttatgccttttaaagccccttatataaatttttgttctttcttgtcttctcctctcttattttctttgatattaattgtcattgttgataacgtctcatagttaattttgattggcaaatgcataaagacaatagacttattagactcgtagtggggaaaaatagaggaaaaaagataaggcaaaaaggtaagaaaaataaaagataaaatgatgtagtaatagtaatatagtgtatagtatagggcaattatttaatgacattttagaattaagatgtggtcaatttcaaaccgttggatgagcatatattagttgacttttttgttagtgtgttttccttatcacaacaaattattatgttatctttttcttgtgatctaaccctccttcaccaactataaccatccttaataataataagaagaagagtggttttttttttccaaaaaaaaaaatagcctttatacaattttctagaggtttttctatataaaaacccgtaaattgaaaaaaattaaaaaataatatatgtagataatttactaaatttttattagtaaaataattttacaaaaatttttattagcaaaataattttttatggtcgcaaaaatgaccatgagttacactatgtaaccataaacgatcattatggtcttcttgtgattatagatttatattgtgcgaccatcataatcgcaaatttaataagattattttacaaattttaatatttaaaatagttagtttagcaaatttcaataataataataataatcaattgttgttttgttacttttaatgaattttggatatgagttagtgaaaaaatattgactaatattattatttggttatggaagaaacataccaaaagagagggagatggaaatggcagaaggacaactagtgttatatgctgtctgccaagccaactcaattgtattcaaacttagtttacttatttggaaaatgtacctatacaattcattttatatatactaattaagggataattaattataaaaaaataataaaaatttgtcttgatttatagagtgagagagagagacctcttttttggtaaaattttggattttgtgtctaagtagtaacccccaatcccatatatagacacatagtttaagtattttggtatgaagaagatttgactgactttaatggcatttttggtgtgtgtttattatgactaataacagaatatgaggagttattattgagtggcaaaatatagtgaataattaagactaaaaagggtgttgtaaatgagtcataatattagaaatgaaaacaatgggttagtatatataatccagaaattaggggttattattagtatataatagtaataatagagtaatagtagatacatgatagaacaagtaactagtagtaactagtaagtatgtaagtggaattgtggcatgccaaacaaaagaaaaaaacagtaatgatttagaagcaaatgcatgtgtttgtgtgtttatatgtttatgtatgtgtatttattattattatttttggatgatttgaccacttaacaaattaagtaatattgttattatgttatgtaaattgtaatatattgtaagagtcctatcctaattagaggttgttgatgctctctttatgactcactcactcacgagacttgcttcctttgcttttatgttttcaatctaaccaatcaatttattattatgattattatttcttttttaatcttatataaatatatttatagaaaaaagttgtgtgggacacttcacacttgataatatttcacatttattattttaatgttcaatatacttacatgaacattaagaattagtttaatttgaatgtaatttttttttaatatttaaagagtaaatactacataataggattagttgtttgatcaatagggaatataataggaatgaaaactagaattttatatgtttttggctacaatttgaaagacatttaattgtaaccaaaaatatccaaatattcgaatatttagtttaaatgcaaaataacaggatattgtttcctatttttatactttgaccaattcttttatcaattctctccccttaatctctcaactaattcttctcaatataacaagtgcataattacatgtgttaaattcataattatgtttaattatatcataattcctaatatgaactaattaaatcgtgttagtccgttattatattcacgatgaaacaatttcacatagtaaatataatatttaagaaagtgataagtgtaaataataaattttaccattagaatgaatcattatagttgatatttattccattatgtaaaacaaagatcaaataagaaaatcttagaaaaaatagtgattttcgatagtcaagttagtaaacaattaagatagattctcgtttaattaacctttatttaattgtatttggataagtccagtaagggaaaccattttttgtgcatagtttttttttaggagaaatgctaaagggcaccaatggtgcctagcaccttcctatgtgtcaatatcgctattagtacaactaagtatcgggtcccatat

SEQ ID NO: 111122 - DNA, 2417 bp, Cannabis sativa
  modified_base (2377)..(2387): a, c, t, g, unknown or other
gggaaaatgtgcatccctactcatgacatatagctgccttgcatcataggtttaataatttcataattttatttaatactcagcaaagctttaacattcatcttatctcttaccgacaaagactgatacagacaacaattataaacagaggcaaagaaatcgatggaaattggattttattttggccatttcattttatttaatctgatgatcagagataacatatatgaattcaatgtgataatttattatagatgataatttatttttacacattaataatgtgaaactaactttaatacatatttctcacatttgaagctgaaacgtgtaaatataacaaccttttaagagattacagagtcaaaacatatcacaaagaaattttttatagctcgtctttttagactgacaacattttaaacttacaacggatcacaaacaactctaataccgtattaaaataagatgcaaagaattctacctcaaaactaattagtaataagaataactcattcatctaatatattatatatgacaatttatttacacgcattaatagactaaaaaaaattaaataaaaagtgcacattgaacgtgtccctaattatattaaggtggtttcttgtccggttttaatatggagggcttccaccagcagcacataagtgaattaatttgcaacactcattatacttttttcgtaaaattcacagctcattttcatacacagcatatattagtgttcttatatcaatacaaaataatgaggatttatattgaatgtactatatatatcacaaacccaaaaatacaaataaaaaataaaaaataagacaaaaagataacccaaacaacctgtcctcctcacccacgcgaatcactgaatatggtcaaccgtgataccacaatttggttgtctatacatcaacttaggatattccaatttcacccacaaatcttcagaatccctacgattccagatcaaatttcctgttgcaaacaattacaacacatatatatagatatctatagagggaggagatccaggaaaataccatcaacgactcttggttaattaatggaacgagtttcactgatgcacttcaacttcagccgaaactttccacaggggttacagttcctatgagcataggcattttcccttgtccctcgtaacaaaaaatattttgcaggggtcaaatgaagaatctcgaagcagaaaagttccatcataaagcattcaaaaaagctcctctgaattgaacttgttccaggcttcctgtagccacatcaaaatatttcacatttagtaaaaagcaaggctgcagtaaatatatttccatcaaagagtcttttgtgtcccaaacaattgaaaaaacataggttacataatccgaacattttattgcattgtgtcaaacttagcaagtcatatgaaatttcttatgttatacaacgaataagtgaagatacatagaccagatattgataccaatacaaaaacaaaacaaaaattagaataacaattacaaataatgagaaaaaaaagagcaagttcttcatagcatctcttggaaaagtattgtgaagtgtgaacattgacaggattaaagataaacatgataaaagaaaacagcattttagtagcatgtgttattaattcataatattccgttgtaattggttgcataccttgaggaggtcaaaaactttttcagcaacatatttctgctgaagagtggcacctttttgttgcaccttatctgggtgaatacacaaagtggctttcctatatactttcttcactgatgcagcagtaatcatatcagtcaaagaaactggctgccaaccagactctggccagagcacctgatcatcacaaatggtacagtccaccacaacaggtcaaaattgatcaaaccatttcacataaataaaatacttttaagatacaaacggagaatttataattatttcctaccccacaattcatattacaagagattaatagcaacaaaattgaggaaactagacaattattgaataccaaggaatatttggaattgcaatcattgccttacaaaagagaaagaaatggaaagaataccttttgataacattagatatccgtaccatttaaaaattaaataagagaagaaatatataatgaaacacaatcgatggcaacagaaaagtttttaaataatcatactactagatttaatgaccaataaagttcaacaacaaaacaaaaatatcaccgatgctatatgtaacacatttcaatcagcagtatgagacataccttatcctaatatcctaaagaatggcatttctttgtttgtaattaatacaagggtaaataccattttgnnnnnnnnnnnttgcaaaagttacagattggaccctgtgtt

SEQ ID NO: 111123 - DNA, 2054 bp, Cannabis sativa
aattaaaaaataaaaatgttaccaaacggtaccataattaaactgaatttaattgcattacaacaaaaatgcatttagattttatgggatactatatatatccattatgccattcatatatccttgttcttttcttccttatattatttatgtcaaataattaatatatatctaagagtatttttgctgtgtcgttgtacatttatggtagtacctacgtacgtagctcctcctatatgattcgaagtttattatatattcatgatgatgaaccatgcatttatcaaaaatgatagatttcgttttaatgaatttaaaaaaaagttacatttgtcacgttgatttgtttttcttttttcaatgaattttaccctttggcttgcattcctgcaggtgtgatttataaagtcattaattaaaacagaaaatagtcagtttcttaagtaaaatgtatataaaaatataattaattaataccccaagtacatatatacctcttgatgacaagttaattatattgtattgtaactaatatatatgatacatttataaacgtacaagataaactaatctaacttattgagctacatcgatttatcaagtggtaatttaataatggatattgactttgtaacaaaattatattaatttaaggatatttacgaaaaattgagacattttcgtatatattgaataattattctataaaagttaggtttccccacttcagtataattagtaataagtaattacgtatgactaactttatttttgaggggatagagatagtgcaacttatttgaattaattaattatttaaaaaatataacactaactttaacatttatatattccaagctatccatttggaatcggtacggttttcaaattatatattatacctattatattatatgtattggattaaatgttaaaatatctagttatatatatatataagaacatatccacttattaatattataatcgattttgaaatgaagttacataattcttataatgtacgtgtatatatacataatatgaattatgtgttatgtcgtgctcgactcaaatatgaattatgtgttctgtactgtattttataaaaattgacctattatttattaattaatatatactattatatatattggcaaaaaaaattaatgtgagttttaagttgatttgtttgtgcttacgtatgatgtctttatatttttcgtgttatattatatcatgctaattttgcaacatcatatagtgttatgcccaaattaatattttttttgtaccaaattatattcgtgtctcttgaacatacaccgaccataacataccgtgtcaaaaaatctaacttctataaatatatataacatatacgtaggtgatgtatgtatatatacattgattagaatatcaaataatggtactattcatgatcgtcaagatattttataaaattctatctaatcaaatttaatcatcatgtcattcggacactcctttctttaatcacattatccaaactaatatagatgctgaaaggtgtgaaagatgccattaatttttgcaattctatatattaattgatctgtcctccaattaatcataaaaaatataaggagaaaatattcatattcgtttttgtgttttttttttttttatgaggaaagaaaatatttatactctaattattctatttttcatatgtatatataatttgagtaatatttactaaacacacaaaaattgcacttatcacattttcatcaattaagtaattagttacacgttaccggttatcgtgtgtatataatacaatttaagaaaatttcaatcatttagtcatatattatatatttattttacacatattaccacgttatatatacaattataataaatataagaataattacatacaaaatataaattgacattttatttaagctacttagtaattttttctcctgaactttgacatgtactaaattgtgcccctgaactttttttgccgttaaaaattctcctcgaactattgaaattgttaa

SEQ ID NO: 111124 - DNA, 4785 bp, Cannabis sativa
  modified_base (3895)..(3900): a, c, t, g, unknown or other
  modified_base (3938)..(3966): a, c, t, g, unknown or other
ttatcaaaggtggtaatatatctctaagatctacatatttatattgacaattctttcattggactcttcgttttagtaaagtaatctaaataaaaaaaaaacaccaaaacctcaaataaaattaaccatatgtgcctcttaggtaacattcacctagtataaacatatatgtgagacctatataattctcctataatttatactgatataaaatattatcagaaaatcacaagagttgtatatataattatatataaatatggtagtacatgattttcaaagtttgaaataatatgttacaagaatttatgtctggtgagtagattaacatatataaaaaatttaaagaccaacaaccctgtttatatatatatatatatatatatatatattagtataatttattagtattacaatattataactaactaataactttgggttcgaagtcatttccttttttttttcttgttttctcactcaccacttagcctcagtgctcctttgtttttatatatatatactaaggtaataatatatattgattaaagctagtaataattaatctgatcataatttataaaaaaatttgtttggtaggccgtattatattgtataatattatattatattgtattttataatttatagacatttaaatatataatattttaataatttaaaatttaacatactataattatataaaatatgatgtataatcatattcaatataataaaatacaattaaatacgaccggtccaaaatgaacaagttaattacctcgaatgcccgaataacaagttaattaagtacttttgtcacatggctagagttgaccacatcgccctttgtttttaaatcacccactcctgtcttattctaacccaaccgcaagcacattttcttcttttaagaactactttgtaatctatagcttttttattgacaaatatctaacctgtaatttaatatctatatactacgaattttagatcaataacactttctcccatatgttatagtaacaattaataatggcgacaataataatatgacggtataatttataatgattattgtttcaaaaaaaaaaacatgataatgataattaagcttaccactatcgatgataataaaacatatttctttagtttaattattgacaaataaatgcttaatagtagaggctaaaagaaactttagagagagaaattttattattattattatgattatttttatattaagaaaccatgtcatttccaaaaagagactctcgcttaagagagtcatgaattgcaatactggaggtggaagaggagaaattgtgatattgatgatgatgatgatcaggtgggctcatcatcatgagagtagtatcattgctattattttgacccgaaaaacaggatttatcgtagtacccaaagtaacatgggtccatctctaccggtgaagccgaccccctgcaaacgatgccgccactatcaactatggttgcctgatcatgctgcatctgaatgcatagaatctcggcctgggccaaggccagttgcatttgcagctccgaaacttggttttgtaggtacgatatggccccaacacacccgtaaactggatctctcattcttgcatttgcttcatacactaaactactcactgcatcagttctttgatcaaatggaagctcctgtatatatttatatttgtaattatattattttctgtaactatattatatactgtcatataaataataataatgataataaaaaaaaataactaactagttacctacctgtaacattttgctgacattgcttgcaccaaagaccttgtgcacaatggcaaatttgtggggatcttcagagggaaagtatggggcgaagatacagtctttggcgcaacgacgtctcagcaatttgcatgaagcgcagggtgaattcccacccatttcgtattgttattttgtttgaaagttatagctagggaaaaaggaaaagctgaataaatgtaaagggaattaattatgaggatgactaaatgagctgatcgaatatgtctatatatatacatgtataaaggtgagtagtggactatctcaacacttcattttaaaaactaacaggacgtgtgaggctatagtgtactagtattatatatcccatttgaaataataataataataaccactaaaaaaatactatttttagtgatacaacaatttttttaaactaaatttaatttttagttataataaaaaacaaaaaaattatttgtgactagacatagtatttagatataaattgtcactagttttattttagtcacagcaagtattgtgactaaaaatacatttaatcacaacaaattgtaatttttataattaagatttttagccacgatcttgttattgataatgtaagaataataatttataattaactcacagcattttcacttttaatcacaaattttattgtgattaaaagtaagatttttttataataaaaaataataataataataataatggaaaaatatataaataaaagtgtttgttatgtagtatttatgtttcatatataatcatcgaggtttgaaatgggatatattaattcttttgtcctttggtctgacaaaaccatattatattttatagatagatcaaaccaataggtcgtctacacctttttgttttgacgagaggaagtaattaaagcaactctaacaccagtataattgtgttagtttaacatgaaaataatgtaggctaggcttagcattattatattatttttccactcaaaccatcaacactagaagttacacaaaaataattttttaattaaatataatattttatattattatgttattaaaaatgataatatatatatttatatcctaattatatatatgaaataattcttaatgggactaaataaatttaactataaatattaatttttaaaatatcaagtcattagattttgatcccatggcgaataataaaataaaaatttaaatttctacgcttactaaattagagaaaatatcaaaaaatacatctttttacactatattaaaaataagtttatatgaaaaatatttaagtaaaacttaatatttttttatcatttttttgcccatttattttattattattttattttcagccgatggaataatctcagcccatataataaaaaaattaagaaatttttctaattaaatagaaaaattaagtataaaaactcaattttttttaatattacccatttatgggtaatacacgttaagaagtgttccatatatatatttgaaagcgataatattatataggaagaaaaaaccaattaataaatgaaaagcaaagttttagtgtgatatatatatatagtgcaccactaaatttgatggggtattataaacaatgctatgtataaaataggttttaaagttgggttgtgtagaagctaatcaagcatgaatttggtaaaaaccagcagcatgtataaccaagagagtacaactcatagcagaacaaagacagagaaatgcaagaaaagcttgactcattgaatgagcagctgagtttatttataggcaaagacatttacatcagttggttacaaacagttaagattgttaaaaaaataacagaaaacaattaacgaaactaactgtttattatctaataggttggaatgaatttagtgctaaatctatgcaaatcatggctaattataaattatcattattgtattgtgacttaaaagtttgtggctaaaaagtattagtcacaaaaattacaatttgttgtgacgtctaaatgtattaaatattgtgactaaaactaaattagtgacaacttgtaactaaatactnnnnnntagtcacaagtaatttttgttgtgattaaaagtcacannnnnnnnnnnnnnnnnnnnnnnnnnnnnaaaaagttgtcactaaaaataatagtttttggtagtgatgatacatgtggtgcttaatacctttatgagatgtaatatcactattggtttaatttaatatcaagctctacttattttaatttaataaagattttagagaatagttaactaattttaagatgttatgtcataagtgcttgacactttagtgtcccataacaatactcttgattttttttttattattattattattagtacactttttgtattttaataaaattctgctttatttgagtcaaattaaatttggacgagatagtactaattatttgtctcggtggatcttaattaggagtgtttgttaggtgagtttgagtttaaattgaaaggagtaaaatgagagatatataaaactaaatgtataagggttaacattattattattttaatttaaaaaatgattaccattatttgaaaagacaaacttaattagtttaagtataaccccgtaccaaaataacaaaattttcaacttaaattatttttcaaaaatttaattaaataaaaaattaagtatcttgaactaatcacctaaatttgaaaaataatccatttgaagttgatccaaaattaacaaattttcaacttaaaacaatatttaaagaatatctcaataactaattttctagaaaagctcaatttaattattaatttcaaaaatattcaaattcaagttgatccaaaattagttatttcaacttaaatatatttcaatgaaatattaaataattaagtatctagaagaatctaattagttataacttctttatttaatta

SEQ ID NO: 111125 - DNA, 3017 bp, Cannabis sativa
gatcttcgggggaatttctaacggccaaaaaaattcaaggggcacgatttagtacatgtcaaaattcggggggaaaaaattactaattaacctaaattaaaatcatcgagtgcttctacaatgcactctctatttgttcggcatcttgaaaaaatttgtagtctaatttttttttttatattcgttataattatttaaaatattttgtaagactttaagaaatttataataatttacaatatagaaagtagtgttctaataactattttacatgcatataatagactttttgaatcatgcttttagcgtgtttattttttttatttttataaaaaaatttacaaaatatcttaataattaactataacacaggattataataaacctaccctttatttgattcaaaatcatctctacactttgacaaagagtgggtgataaggctggaccaataacaaaggttggaagtaatgtcaccaagtcaattttgttttcctttgcaaattcccaagcagccttttctgccaatatttttgaaagagcataccaactctatcgaaaagaaataataaaaaaatatacatataaatttaacaccatccttaatggaagatacaactaattaagtgacaaaatattagcacaaaaatagataaattatatatttgatacattattttaattgtgttctaataatgtgtatgtaaatttatttaagaaaataaaattgggggaattttcatatttatggtttttaaagtataagttttcaattttttttttcaaaaataaattattttatggcattattatgtattttttttaaaaaaaaagttttataatacaagtaagataactggataccttaagagataactggtttatactaatttattgcaaaaatataaataaaaaatgattaattatttattttttgtaaatctggtactaattttagcacataatcatagaaataaaaaaaaattaaaatataatacacacaactaattatttagcacaacttaagaggatatgtaacatatataatgataaaatgtacagaaagagggacccaaaatttcacttttataaatgacaaaaatgagtaaaagggtaatgatataatatatataataatgtacaatatataaaatattacaaaattttatattatattatatgtaaaaatttctttaatttgtttttcctcctctaattcaaagaaaatcagtagtaggtataaattaagctaccccactttgactatgttgtcaataatgtaaagacattttctttagggtaataattgatgtacataccttcaactcctcacaatagagaggatctgaaaaccatgtttcatcaagaactacattagggttattcaaagattttccattatacataactgcagccatggaagatgttagaaccaccctcttcacacatctaaatttcacacatgatctcagaatgttaagtgttcccttcactgctggatcaagtagttctttctgagcacacacatatggagtatatataagaggtctgtaattcaataatattagattttgcacattgaggagtgctaattatatataaccacctattataacttcttagtcgacctttacgttcgaaatcacatattggaatatttttttcaaatttttttatggtggtgtattcgttatagttataatatctctctataaatttttgaaacaatccaaatatattacggggtaccgaaaataaagttcttgatattccagtttaccacacgtgttcaaaaaacttcaaacttattttcaacactgtaaactatttgaaatttttgaaaaatttacagagataatgttgtgagtataacgaacacctctataaaaaaaagttgaaaaaaaacattccagtatgtgttttcgagcacagaggttgactcaaagattgtagtaggaggttaacagtagaacttctcttcgcacattttgatttgatgaacaatatgaaaaaccgctaattatccataacgtatcacatcagtataatattatactttaagatacctaataacaatgctcgtatatatatttacctttgggtcagtagatgaaaacaaaacaggtgaagctgtgtgaaaaacaccttcacatccatcaaccacttcatcaaaagatccatcttctattaaatttgctttaattagatgaagtctttctttagctccatctaatgaaaccaagtgttctatcttctttgaatcatctacttcacccaatatatgtatatgttatagaattataactacaaataaaaactatattatataatctattagtgaaagaatatataaagaaaaaaaacatatatagactaacttgggttacgaatcgaggctttgacagtgtatccatgttgtaataagagtttcacaagccatgaagctatgaaacctgttgctccacttacacacactaccttatttccttcactactcattattttctcaatatcttaaaaactcacaactcaagagtactcaagacccttaccatagatcttttgctcttatatatatgcaattaaaaatatatatgggtatttttgatattttcaatacatatagataagtagaaagatagtgtttggtttaatagaatgtaattataatggtaatagtaatttttattttattatagaatcacacccaataggaacactaataatcacacttgctttggctcttaattagatgtgctggcaaccaatgtcgtatacttgttggatttctcttagggctgattttaaatgattttggttagttttacaaactttttaaataggcaaacttgttgcattgtcttaaagggacggacccaagatttttactttgtggcagcttatttatcataaaaaatacttatagttacattataatcacttttattaaatttatctaattttgtgggggcttttctattattttggcctataattattaaattaaaaaataattt

SEQ ID NO: 111126 - DNA, 7127 bp, Cannabis sativa
tcaattcagggtcctatttgtacagttttagaaaatacaatgttcattttattatttaacaaaacagagggtctaattgataacttttataaaacacaagatccaaaatgatatttatctaaatttaaagcgtaaaaataattttttttgtcggtaagtatttttgtaattttttttttaaaattttagcaatgtaaaatttttgttattaaattactcttaaaaaaggtgtctttctttcttctgtcatatatagcttgaaaaatataaaagaaaaagccctaagaaaattgtttgagtgggcattcgattcaaccctgttctgttctgtgctcaccattaccagcagccatggccttaaacaacggtctcagatccatcgccaagcagcttatcgcttcctcatccgaatccacccttttcctcaagcaaggtttaccctcttctttttccgtagtattatttattaaattatatgtcgttttgtttggttccaatgataggattacaaaggaatgctaaaattttgattttaaatctctccttgcccttttgattcagatcacttgtttgaatcttattaaagctttgaaatttcgggtttatttattatctgattgtttggaggggtggacttagggttaggttttgtcgatttagggtctatttggagatgttagggtatggattcttcgggggagttcaattgaagagattgtggtaatattttcaggaagcttagtgagctatgatgggtttgaaattcaaattttaaaaaattgtagaattgggtgtctaatggtggattcagattgtaaggaaaggtaagagaagaagcattaagatttaagagttttggtactgttatttgatataaattaactgaattttatataatttaagtgtaattagaaagattctgcaggaatgacgatctcagaaatgaatttagcagaattaagtgtaacataacatggatatgtcattttgctaattttctcgagtcatttgcataaagctattgtatattggcttcgttgaattaggagtttatgtcctttgtgatctcttttagtgtatttagcgtgtaagtatagctcattcggttgttgacattggaaacttgttaagattatgtttctgagaagttaggggagtgacttgttctgtggttggaaatctttcacagttgtaactgagtttcaagggttgcttgagcattggctattcattttcaaattctatgaagtttatttccttgctattgttgatcaaaattgttgttttagacgatacatatgtagaaattccaaattctttagaatgttttacatgtcgacagtaaatgcatatggaatttgttcagtcggtgtaattgtaatctatagtattcacttcttcttagaatgtgttttttcttttgcttggtgtatctttatatgttagatttggctttgatcccgtaaggatttcccctgtggcgaaaaatgtgctaactactactactcttcaagagaattttcataatttttgcgataaaatttctttgatattctttcctgcacaaaacaaatactaagtgtgtggactaaccacaataggctgcaatatttgtctgtggccaggtactagaagtcttcactcaaccggagtgaagagaatgggtggaggaggacacgggcatgacgattacgaatactaccttcatgcaaagcacatgtacaatttggacaggatgaagtatcagaaagtgaagatgcctcttgctgtctttactgcctttagcattggtgttttcgttccagtctacgctgttattttccagcaaaagaagaccgcctctgcttagattaattcttaaaaaaatgttcataataaggatgttaatggcatctgaattcctttctggtacacttttgtcgtcgcaatcattttgcagatttcatattttttctcggttttgttttcaaactctttgctgttaattgaacttacccttttgaaagcgcagtcattataatctttatcttaatttaatgggggctttaaactgtatgctcttaagaaatgggtgttggcatgatgctatatcaaatatcaattctggtttcagtcataatgttaaaaaaactactgcattgtgattcgtatagcaaattttggaagaaaaatcaacagaacacttgcggaataggggcctcaatggaagaagtgacccatagagcaactatactaatttccttatgaccaaatatacatgataaactcgaatgaaaagatatatatattgccttatgacctagataagtagggaaaataagaaaatgtaatggaactcataaaatatatatgtcataaagtacaacttataatttaatatatggtttagtttgtaattaataatattagagttagtccaacattgttaatgtgtgaaaataaattgtcatatataagatgaatggattactcttttcattgtcaattggttagtatcagaatcaggttatgatccgttctgcactgaaagtgccgccggtccaaaataaagacgagccaaactaaaaaactttcgccaattaattttgagctgaaatctcattatcttacctcaaattctaaaagacataaagtacaaagtactcattattaagatcgaaaacaaccaacaacttggaaaatccagaaaaacaagcctgagaagcaacaacaacatcaaccacgcaacacaattccacctgaatatacatgaaatattttaaaatcaatcatcaaaaccatatcagtaagataatatgatgaagctataggcatgtttcatcttcatgcttcacaaaagagtatataatatgtaattaaagacagatcaacaacaatttatacctgaaagatgagaggattgagaacaattagttgtataagggatctttaagcatgctttcaatgtgagaaacttgagggcagtcctcaatctcaacctttttcaaagaggctatgaggctaagtctttcgcgaggtattgtcaactcggggcatagcttgatcgaaattgtcttaagcgatttgacattgctgatccaacttggaatttccttcaaactatcacagcgccatatgtggagttgctgcagattagtcactttctgaagtttttgaagctgattatgtatgtcagaaatatgatctaatgtcacagaacggaggcttggaagagactgccatatgtttggatcacctgtggacatatccatggcaatgatatgtagtgtcttcaatttagagagaggaacaactgtgaaagtagtagttgatgatgatgcttgaaattcagatgttttctcttcttttgcagctgccatagtctgattgaaaggcccccaacaagtgtttttcagtactaattcttctaaacatgggaacaaaggcatggaagtgagacatgggcaatcctcaacaaccaatttggaaagacaagtaaatgtagcattttgatcacctgcatttttccaccattcctttagttttggcaaattagtaagccgaagctctttcaaggtcgaaaatgatgatgatgttgttgttgttgttgttgattcatccacaatgtattcaagctccatcaactcatctaataccaatacttgaagatttggcaaccggttcagtggtggtaggcagtgacagcggttgcatctcgataaagataatttcacaagcttttgaagcaatggaagccaattcggaaacttactaccaccataagcagatatagacagttctctgagattttgatgtggcttaagatcttctagtgccttttcacaatcattttcattgatggaagagttaatgtcccaaatcaagattaaagataaaagatcttctttttcatacaagtttgcttttgctgtcttatcatctttgggaaatctcaaatttttaatcttgagcttgcctcccaagtcatttagagcacctagttcatcaagcttaccacttttctttgagatagaactgctgctaatgccattactcagcaacacaaactctgataatcttcgaagttgaaatagttgatgcagtccatgtggcatgttagtcaaagaataacatgactaattttcaagatttcttagccttcttaacttggtaatgcttctaggcaatgattggagattactgcaatgattgagtttcaaagtctgcagttctcttaacatacaaatagaacttggcaataacttgatattcacattttgagaaagatcaagataatggagattcttcaactcaccaatagaatttggtaagactttaattccagaattatgcaaatccaacatccttaaccacttgagtttcagaatcacatcacagattgactcacttgatcttccatcaatttcccatcgaaattgcctaggcaaaatcaaactctgaatctgtttcgatttagctaatgaaattggaatctgccaggctgaatctaaatgaaaatcgaacgacacgtggcgaagatgatgatgtttgctgtcaaatttgtcctcctttaaacctaaggtagcacaatcattctcagccacttttcttgcaagatcatgcattaaattctgcaacttgcattgttttatgtttcccaactcatctttcttagtttcttgaaagaaagatcttcttagtaaatccataaaatactcatatcctaatttctcaacatcttgtctccattcaataaacccctgagacatccacaaagatatgagtgtgtccacatcaaattcataatctttaggaaaaagtgcacagtaaccaaaacatttcttcaatggagttggcaaatgatcatagctcaaatgaagagttgctaaaacatctgattctttttctattacctttgaaagctccttatcatagaaagattgccattctgttttaggatctttagaaaacattatgcttcctattgtccttatgatgagtggaactcccccacactttttcactatagcttttccaattttgataatttcagggtctgttggatgctctctttgcacaaaagccactttcaggaatagtaaccaagacttttcttcaagaagtatctgcaactcatgttgatgcttcatacctgtaatttctgcaactcttttactatgtgtagttacaataattctgctcccatatgcaccatctgataacaagtatattaactcattccatttgagttcatcttcattccacaaatcatcaagaacgagtagataccgcttttctcttatttcttggcgaagtagaattacagattgctcaaagccaagttcttcaaagtaattacttgttatggattgagtaatcctttctacaattgcttttacatcaaaggcatcagttacacacacccagatcttgagatcgaaatggcattcgattttcttgtcattgaagatgagttgggcaagtgttgtttttcctaatccaccactccccacaatatggatgaccattactttttcatgattctctttcaacagctctgctatgatttcttgtttctcttcatctctcccaacaaccatatcttgaggtacaaaagactgagtttgcctccaccccgaattcgcaactctgatctcttgagcatttggaaaaaccagacctttatacctcttaacctcttcattaatcatttctacatcattgaatttcacccatggaagaaggttgtaaacatcataacgcagaataagcgagattacacgtagtgataaaggaactccttcacatttcgcaacaatctctcttcctattacctccaattttcccaaatccttctcatctttatctaacaaagcttgtcttttgaaaacaacccaagaatcttcttcactcaaacaatccaaactgtaagacttaacagaaccagaaccagttcgccttattaagtcgtaaaccttttcactacaagtggttaataaaacacaagtacctttagcacaaccctttaacatgtcttttaagccaacccaattaagaggaatctcatcaaccatatcatccatcacaatcaagcatctttttccacttattgctcttcttaattccttctgcaatcgatccattggaggattacaattataagttggtacaccttcaccttcaacaagtctcatgacaatctttgtactattacagttagcatcatcacccatgaaaacccatctataaagctcaaacttttcttgaatctgatcatcattataaacaatccgagcaagtgttgtttttcctattcctggaacacccataacaagaatcaccctaaaatcatcatcatcatcatcatcatctagtacaagtttgattatctctgttttgtcatcatttctccctataatatcctcttctttacaatgatctaaatactgagtttcgtgaagtttatgaaacgtttcatgatttcttatttttataacaatctcatgaactgttgctgtgactgccttgaacaagtcgagtttgtaatcgtgattgaaatgaaatgggcttgaacttaaggaggagaatgagaagaaagtgagaacctttttggatgaagacattattttatcacgtttactacaacccaccacaacctgcatttccactaccaaattcatgatacgtgcaagtggggtttcaaggctgagaagtaatctttcaaaatcatggctttgaacccataagagagcttcttgacgaagtagagcttggacaaaagaaacatcttttttcagacgtgacaactcttctgcaacaacagcaacagtgcccttctgcaatgttaacacctcaaagtttaagagatgcaaatgaagcaattcatctgcaagggacaacaagtatccatgatgagccatgataaaatagcattaattgctttgttattgatacttagcaattcatatatgagaagctaagacaatagctactagctagctatttcctccaaagtgttcccttcactagttaatgagaaatgctaaagggcaccagtgtggtgcctagcaccctcttatgtgttaatatcgctattggtcaaactaagtatcgagtcccacataatttaatataatagcttttaagaa

SEQ ID NO: 111127 - DNA, 3993 bp, Cannabis sativa
gtatttttgccaccaaaaataaacattaggtatttaagtgtataaaatcgaaaacattaagtatttatgccgcaatttacccttttattttttatcaaacttttacattaatcattaattttttttaatatttttcaatattttttaaggtatatatatttttaataaattataaaattctattgataacaatcagctaaaataatagtttaccattcaatcgagacatctccccagttggagactcgaccaagattagaattaaaaaaacgagtcaaataattagccgcctaattcccagatcgtttaacaaaaaaattcaaaataaaatcatatgaaaaaaggttgtataatcactgttaaccttaagaacacacatattcagtttcatccactattcagaagacacaacaatagaaattgttgcagtaggttcattcaacctcgtagtttgagcactcaattattgtacaaggtacgtaactgcactactaacaagtcctttagtcatagagaacttgttattctcaaccactaacatagatttgatggcaagtcatcaaagaacaaaaaaaaactaacaacgagacaaaacatgcaaatcaaaatcatatcacacagacaagactagtttttccacctgagttgagcgtttagagcctctcgatcttgctatcgaagctcagaagaatgtcttagagctcttgccatgtggttttggctctagcttcgatttgaaccactatcgacaaatactcagcatcaagccctgacagcatattgacaacaagatgtgcctcagggtaaggatctccagcaatggctaacatgtctgcccaatttttcttctgtctgagatactcagtcatgggtgtagacccttttctaactgtttggatcaaggtgcgggtgtcatccatcttggacttcgaataagcaccatataaactttccaaggcaggccacaactccccggatgaggctgagcccataacctcagtggcaatgctctctgtcatggagctgtaaagccatcctaagagcaactggtcatttattattcagtgctcaaactcagggttaacaacgacttcaacgcgaccagtttcatctggttcaccaagaggtagaaactctggtgggcactcttttgcgcctgtgagatacccatgtagtctatgtccacggacgatggcagacaccatggtcttccatagggtgtagttgtttcgatcaagcttaagggagaatggttggttgagggttgtgagttgatttgggtatggattagtgttttgggaagaggaggctccatttctagtaggctgagttccctggattgcagaagcaccttctgtgctaacagaaggagtattttcatcaccaggagttgccatggcagaggcgtagagttggctctgataccaagttaaaataacagaggaaaagttttgatgaaaatgagctcaattcaatcgcgagctgctatgttctatttatagtgaatatggatattacagatacaaggaagggaagagccaacggctcttttacagttgtcaaataaaatgaatccctagagaatattctagtcctaccaacttttccaatgattgcacacggtacaaaatcctaacagaattattcagggaatcaaatcttcctttgtttcagtgtgctgcagtacactgcagaatagtagaccctcacagttaacacatcatcaccattctatgtttgcctatttctcaataaaggcttgccgctgtttgttaactgcattccatgtcgttaaagtgtgaggaagtaaccatagggaattgccactaggtgtaaaagacttcgaacggataagaacgccaatgaatgacgatgacgacgcaagtgagccacgaaaagaaacatcgataactctagcattgtgtttctagagagagaactatccaaaggtttcttcgtaatattcttctcttacaaaacaaaacttagaggacacaatttgttatgcgtttaaagttaagctactaaaattgtatacgttgtgtccctaaaaataagagaaaaaaaattattgtagactctttaaaatagatgttttggttatttaggaccattagtaatgattagaagccctcggcttactcaagataaacgacatgtcgttgcatgaacgataatagtaatgattgggtggcacatgagagggtgagggtcatggcaacccacttgcggattgcaggtctcaaacatggcacgccttgtggagcaggtatcccatgtgctgcttacgtgtcattctagacggtcatccacgtgtctcagaaggacgaaagagctgtcaacagatggggtaggttagcggtaactattattacaaaagaaagacccaattatttgttagagagatactcgacaacctccttttttttctttgtttcccttattaacactctctctcctttggagtatgagaagagttcgtctatgtgtatccacaaaaaagaaaatattatatccgtacatgtatcattattattttgataattttgacatgtattaaattatatttttattaaaaaaaattagccgttaaaaattctttataaattattaaaattattaaatttaagggcttttatctaattttaataaaaaaaatctaatataaatcaaagttcagagaacataatatttagtaaatattaaagtctgaaaagcataatttaatacatggacaatcaacgaactagaaaaaatgattgaaattggataaaaaaatttaaatctaacaatctcaataatttaataaaaattttaatacatgtcaaagttcaaaatcaaaaatcctaattaactttacttttaatactaaatatactaacacaaatgctaaaacttattggggcatgttactcaagcccaatcgtaaaatatgtgtgaaataagataaaattttaatgttgtttaattactgttaaatcaatagcgttggtattttggtgtagcagtaaattttttaaaacagtttcaaagttctatcctctatgaatgcatatattttttttaaaaaaatagagattgaaacctcttagcttaaaataatattttctcttactgcactaaattatattttattatgtattcttattatttcatactcataattttgttgttcacaatttcgataactaaaatcatacacctaacttatcttacattagagctgatcctattattactattcaaagtattatataattaatattagcataaaaataatttaatttaacaactaatatacattattgcgaactaactagttagactgcacaccatgacattaaacactagtgcccaataataaaattttgctgtatatatgattttatatgagatttatgttaaataatacaaacattacctagaagcacagtgcaaaaaataaaaaaaaaatatgaaattagatatatattttatacaaattaatatttataatttaataaaaaattaaaaaaataataatattattatttaaagaaatttcaaaatattttatcatcactaatatctctcatttatatattgataatacaaacacacagaggcactacaaaacaataatgcttttattttattcatcaaatcataatcttctcactcacatgaaaactgaagttgaaaaatatttttcttttcttatacattattaaatttatcttcagatgaaatttcatttaaatatacaattttttttatgagtattgtacattaaattattctcacacacttagatttatattttttgtaaaaagatgtgtaggtttgtggaaagatttggccataattttgattagagaataataaaaattatcataaagtggtatggataaaattggtataatgattaaaaaaaaaataaacataatagattttaaaagagaaagtacaaattaaaagaagtatatgtataatttttttagggttaatttcaca

SEQ ID NO: 111128 - DNA, 5172 bp, Cannabis sativa
  modified_base (872)..(873): a, c, t, g, unknown or other
  modified_base (2028)..(2032): a, c, t, g, unknown or other
taatttaagccatttgattaaatcaatggctataaatcattatacctatcaataggtaaaaattgcaatacctattgtattagctcccattatattaataatttaaagtaaaaaagattgtcaaaaaaaaaaatgtctaaaagattataaaaatttacagagaaattaatatgtataataactaaaaatataatcacaaaactaaaaaaaataaacacaggccctattagcataggcggacctaggggtgttgagggagggctaaagcccaccctgagatttgaaattatattaatatacaatatttgttttcatatatatatatatagtagttaaatagaataattggttaaaatgctttaaatttacatgggagactatgttttgaatcccattgtcccttttttctatgtgtatttactttttatttattagaaaaaaaaatgaagtataaggttcaaattaggttcaaacttatgaccactacaataggaggatgttgctaaaccatcattccacttaaatttagctatttatttattgttttgaattatattaaatgtataactaagcccaccctaaaatctaatcttgggtccgccacctattagggcagatagtatcatctctatcctcgccccattaaaaattcgagaatataaaattatctattctcctgtcccgttttccatttagctaggtaggaaattgtcgccccgataggggcggatacccataggtagaggtgggcatcatccaatccaatctaattcaaccgaaccgatccaattcaatccaattacaaaaaattggatattcaattacaattggattggatgcctaaaaattggattctaattggattagatcgnntattggatgtcaatctcaaaatcaaattaaaaaccgatccaatccaattacatttatatatatattaaaaaattatttatatgatacaaaatattaaaaaatataatatatatatttattagattttcttatgttgaatttgtaacacttgattgttttgtgtatttattttcatgatgttttgttctattttattacttaaaaatattattgttttaattatttaaaacttttggctacattacacttgtaagaatagtatctttatgaaatattaaacttaaataaaaggtgatacttaatttttacgtattttttttcttcatatttttaagttaatattaaaacttaggtgtgtatcctattaaaaaatcgatccaatccaattagtaattggattggattggattggatcagatgataattttccaaatccaatttctaatttgattggattagacgagaaaaaaatagttagattgaatcggatgcttacccctactcataaggcctataacactagtaaaaattccattcacagtgagaagtctattcaaattgcaattcatgatagtaatgaaataaatgtgcaccaaaatttagagttttcaaccaattatagctcaaaatataagactatatattaaatcactcattgatatttaattagaggttaaattaataattaatgatgtaataagttgtgaaataatattatttcacgcatgccccttagcaatttgtagcacaaattataatacaataaatttattattattatttttcttttttagtaaccaaagtacaccaaaacattaaacttgcttataccatatgcagaaaagtgaataaccaaactaccaaataaactttgctatataagagcaacaataatacaccaaaatttagccacatataagatattctttgcacataatactctagttatatcgatagctagttttatcgatattatactaataacggtatcagtacttaaaatatgcatccaaacattacacatagtaacgtgtcaattttcatggaatacttgttagtctttcgactttcggtcttcttctctgggaattagttcccggagagattgatgcctttctcttgttcatcaccattatattattattattattattnnnnntattattattattattattggtagagttgtcaaggttttggattggaacgatgtcgttttgtgcaaaatggtggttaataatggtttgagaagaagagtgattatgatcaagtattatagatttgagtaggtaatgctcaagcttctttaaatctgataattgaactggttttaatagaaattcttctgctccttcttctaaacacctataaataatattcattaattatcattatattatctaattaatcacatttatatgtataaaataaaattaattaattgaaaagagaaaattacttgttgattctagaaggttcattctctgatgacattactacaactggtacatctttccaataagattcctgtaattaataacaatataagaatatataaaaatttgaatatgagttgccaatcattctttttttttaaaaaaaaataattttgaaaaattacaaatttattaataataaaattgaaacattaagaaaaaagcatattataaacttttttttttttaaagaaatcctttatttttttaataatctttttcttagtatagagagctttctttctctccatgtaaataaatatgaaaaacttcttaggttgagcattatttttactcttattgtaaaaagacactttctttttctttctttttgtttttggaaagaaagacattttctattttcagcatgtaaaaaagttatacctaatttcttttaaaaaatttacataataaaccgaaaatttgaaaaataaaaattacaaaaatatgttaacacaattttttttattattatttttatacttttaaaaataataaactgtttttttggttatattatagtttattcagttatattataattttcatgaagttatttttttagttattttataattgttgtgatgttaaaattttaccaatgtatttttgtaaataaaatttttaagttgtaaaattgtaaataaaatattataaaaaaagttttttttttttgaaaatttttcaattctttttatataataaatatacattataattttatttataaaatttaaaataatttacaatactaaaaataatatttacataattaattgtatacatatatatttttagtttatatgtatactacaactaaatataatacggtaaattatttaaaattttacaaaaataagttaaatatctattataactatgatatacgcatcataacaaaacagtgagatataatttctttctgatgacaaaaacataaaacactcctaaattgataaagacaaattaaggtaatataatcttacctgaaaacatccttataaatatatattaaacaaaattaataaaacaataaaaggaaaatgttttgagggattgatgcacatgtaactttttgtaaatttatattgagtaatgttagagatacacttaaattatacataatttttatacatagtaaattagtaatatgtatttaattttacccatatataagtttaagtgagaaccctattattttaattgtataattgagatcaaatacacattagtatattaatttttttattctatttttgtataatatctcacgaaaaactcattttttttacctcatatatttatattacgctacataagtgtgtatttatctatattttttatatatcatttaaaaattatttatgttaatatattttattattttttttaaaataaataaatataataatattacacacacatataatgtaaaaagttttgaaaaaaataatataatatttatagctcaataaatttctacatgtagttaaacgttatttatgaactaaatcattgagttaatatagctcattaatttgatggagcactattttttacctcttagctaattttttttaactattaactattttacttcatttattgtgtagtaaataactaataataataaatataccttgaggcgtttaagtaaatcatatccggtcattccgggcatacaatagtccgtcatgatcaagttgacttttgatcccatctgtattatatccatccacataatttattaattaatacataagttaaacaattagttagttaattaattaattctaaaatataattaattaacaaacaaattaagattcctaatgccaactttttgacaattgaaacatcagtgtagtcaaactaaacattatcataaataatatcatgattaatgatgagaaatacaaaaatgaagagatttcttacaacttaagatatatatattgttcaatatatatatatatatatatatatttatatgtatctagatcattaagtactactactagtgtagattaattagggtagttcaactataattaattaagataacattgtgagctatgtcaagattagtactatatatatagttacatttatatatatatattattacaatattttcgattatagtaccatatattattgttgtcacacatgacaagatctttaaatcttttgagtttcatattcttataagaaaatacaataattagatgtaagacatcaatatatatatattttagtttatattaaatatttgaactatatatagttttttttttttttaattcattatatttatatttaagattcaactatacttaaaaaagatggtatatattacatattttaatttattgcttcttaattcatattaaatatatatgtaattttcaacatagttatttgtataatctttttttttaaagcattgttaatttgtatttttaaaagttggggagcattaatttttcaaaattttctttgtccttttatttacttatttttttcaatccagaagctgagtctctatttttttgtttgtaaattttatataattacaattttaattactcaacttatatgtgtaagttatttatttttttctcaacaaaaatcacttaccaattagcttattgataaattaactattaattaaaataactaataattagcttttttcctcaatatctattctatataaaatgtgattatataacagaattcttgatttatgagaaactattgggtgacttttttttaaataaaaataaataaattattagat

SEQ ID NO: 111129 - DNA, 5364 bp, Cannabis sativa
ttttttttttttttttttgtaggagattttgatttgattttgatttttgttagggtctgaatgatactcatgtgtaacaagggtattgctgataactcaattgatcagcaacaccatcaccagtctggttacttgatggacagtttttctagtacaacaaactcagtttctaattctccacctggtttgagctctggttccaatgatgaaacccctcgtgttaagttcctttgtagttttttgggaagtatattgcctcgtcctcaagatgggaagctcaggtatgttgggggagagacgagaatcgttagtgtgcctagagatatttgttttgatgagttgatgaacaggatgagggagctttatgatggggcttcggttttgaagtaccaacaacctgatgaagatcttgatgctcttgtgtctgttgtgaatgatgatgatgttactaacatgatggaagagtatgataagttgggttctggggatggtttcactaggctaaggatttttctttttgggatttctgaccaagattctttgtctcactatgatggggatgagagggatagtgagaggaggtatgtagatgcgttgaacaatttgaatgatggatctgattttaggaggcaactgcagcctgattcgcctgtgatgagtcctgttgatgatttacatttagctgaacagtactttaattcaatgaatttcgaaggaagtgggcataaccagaggaattatgagatgtcaatgccgcagtataatttgcatcgccttaaaattccccatatgggatcaggacaacaccatcaacccatgagccagaggtatagcgaaatggaagccccttggagtccggcatactattctcccagacatcatggacatgatccaagaacaatggcagattttccttcctctccctcttctgcacgtttccatgtaccgttttcagagttacctgataagagctctgatagattgcccgaagaatatcggcaacaactgaatcaccaacctgcttatgatcaccatcctcaatattctgagagtgctggatggctgcctggtggagtccactcgggtgaaaagtcagcttttcctggtaatctttttaatggacccaatgttactgaaggaagtagtatttgtgagcattgccgtatgagtttccaaagaaatattgaccatcccaacatgggaaacggacttcactctctttctaatccatgtgcagagtgcccaccgaacagggaagcttttatgatgaatgcagatgcaaagttgcaacatggaatttacacacccgaactgaataatgaccaccggtctttatacaatgaaactcaaaatcatgatagggcggcggcatggcttctgcatcaaaatttgaatgcccgggctgaggaagcaagatcacatgtttctggatctgtaagagtgaacgatcattttgctgtagacggtggcatgaattttcctcttagtcacagtaatatggtcgatggtcgacctgtgccttcaaattatattcatcaccgaggaggaaatgaaatgggaattgaagcttttcatgaccaacctgtggctggtgcatctcacatgcacgttcctcctcctgaagaaagtggagttcgatatggaaatattcctttaccatttgcaggagataatcttcatccaactcatggacatgtatctggacatccagtatggagaaatatgcagaacccagctcctatcgctcaaacttatgaagcaggcaattcaatgccacaagtaaatggtaaagttaatgcaggacttccaaggggtccatgggaaggtagtccaaggatctgttttggggtggataatcagaatccttgggttgactcctcaaagtatcaggctttcgatggtaaagctgtccctgattatgcctttggtcaggcttcaaggttaagttctaacgcactttgtcaggaaaaccaacaagctattcccctagatcctgtacgaaccacacccatagatcttgtacggaccacacccgatatgatcaacttatctaatccagtggaaccttctctagcacccctgatatcaaatgggaaaggtgtagctgaagatcaaaacgaagaaatgcatgtagaaaaggttgaaaactctgatcagcatgagactttaaattcagaggcagttaaagttggtgacagtaattgtgtgagtgtgcctcctgaagtagcatattcaatctgttcaaagcctgcagtcgagaatggtaatgccgtcaaacaagtggagaatgtagtaaagctttcagttgacaaactgagtttcttgcctgagttgattgcatctgcgaaggaagcagcattagaaggggtcaaggatgtgaaatcacgagttgaagaaaattcagatcttgaaaagaatgacttgataactgaagaagtgaattctgataaattagattcagcggtaatgcatactatattgatttaattttttgacatttgtatgatcataagttcctcatcttatgcatgttaattggttaagatgatgcaccacttattttcctttaaaatcctatttgttatgcagaatgctcacgctgatgtagagttggattctgataacgatactatagacacctctagaatcgagcccacgaaagctgaggcagaggctattgcaaaaggattgcaggttcataatcgccatcttctttatatcatagttctttccctagtaatgtacttatttcttttccttcgtttctaaaacattattggttctttgtttagactataaagaatgatgatctggaagagatccgtgagttaggctctggaacatatggggctgtttatcatgggaaatggaggggctctgatgtagcaataaagagaataaaggccagctgtttttctgggagaccatctgaaagagagcgattggtaatgtctctattttgataatcccaaacgctctttagtaattgtgttataccgaggtgttgattaggagtttgtttttttaagtatctgacaatatgtaatttactctgttataccataccgcagattggcgatttctggaaggaggctttgatattgagttcacttcatcatccaaatgtagtttctttctatggaatcgtccgtgatggtcctgatggttctttggcaacattaacagagtttatggttaatggatctctgaaacagttcttgcagaagaaggacaggtaattatcatgtcatgacatatgaagtttagaatgaattactttagtctttggtttagaactgtatcaatacttcagaccctgattgattgcgacacccattgtgctatcatacagaacaattgacaggcgtaagagactcatcatagctatggatgctgcattcgggatggagtatttgcatgggaagaatattgtgcattttgatttgaaatgtgaaaatctcttggtaaatatgagagatcctcagcgccccgtctgcaaggtatgttgtattggatactatcgatgtagtttagggatgcactttattgtttattatcatgtagtagttaccatttacaattggaaccgtttaaattactattcttgatggtgattttggagatattttccgttaatctattttcagaaatattttcaattgcaactgttttctgtaatatacactaaatgctggtaaaagttttatccaggacttgatagaatatgaatctaacatggttggttttttactattttagattggagatttgggcttgtcaaaggtaaaacagcataccttagtctctggaggtattcgtggaactttaccctggatggctcctgagcttcttagtgggaaaagtaacatggttacggagaaggtaaatattatcggcttttctgatacggagactcttttaagttattacctacaatggttcatgacctttaatttgtgaaattttgatttgtttaggatattttatgtatttttttattttctacaatgcagattgatgtttactcatttggcattgtgatgtgggaattgcttactggtgaggaaccttattcaggcttgcattctgcttcgataattggtaagcatattaaatttttttaaaaccttaaaaggcatgtttgagcaccattttttatttttctttttggtttaatacaaaattgtgctggatggtgattttgcattctatgtgtacattatgttgattctcaattgttcttttcctactctcctataaaacatgaaatacctatacgtgggcattataatatggtttaccgaacatggtcataatttttttattttcctcgccactctcgctttgttttttgggatattatgaaatatgctcaatcttatgccttagtgtttgcacagcctttgggctcaaaatgtttgcacatctcaatttagctttgtaaattttgtttatttataggctctttcaaggatggcatagggatagttattattaaaacagaacttttatcatctattcctagtccttccaaattgttgttttactttaatatatgctaccttttcttgtaagagatcttgcgaattatcattgttacactcagttgcagtaaactgctacatgtgacaggaaaataagatttagacaactagacatgttgagaagttaaacatagttatagaaaattaattagtcttagcatagtaggtgatgaatcggtttatgttgaactcaacatggttgacctgtagaacttttcttattactcgtaaaattgatagaacaagttgatcaagtatgtaatcctgattcatcaatgtatttgcaggaggaatcgtgaacaactcattacgtccacagattccatcgtggtgtgatcccgaatggaaggctttaatggaggcttgttggtcatctgatcccacacagagaccgtcgtttacagaaatctcacagaagctgaggaacatggctgctgcaatgaatttgaaatagttttcaatctcgacgcagtcatcttacttactactccctctcatcggtcgcgaaaaataaagagaagcatagaactctctcagcttaaaaagccaccactgtttctatgtatatggaaggctctaataatacatattattccatggttttatctcctttcaaaatattttgtattagttaaacaaaaaaaagaacaaaaaaaaaatggtaactttctttattgggagtgctcctattatatgcactcactactagaaattacccggaagacgaaaacaaaccagcgacgaacacgaacacgatcgaaatgtgagttcgagttttcgttaatcttaaactatcttatttttcatgacatgattattg

SEQ ID NO: 111130 - DNA, 1762 bp, Cannabis sativa
aaaaaaaaaaaaatctattttaaggtaaaaataaaaataaaaaaaaaaaactcatttttttttttctaattatagtgtactaaaatatagcaatatattattttttagcactccactaaaaatgctccaagtttcaactctgtgtatgggtacaaaaaaaagcacatggattacatgcatacatatcttaaggtgttcaacatcataatgtgacataataatttataataatttatgatttttttatattatttatttaattaatgtatataaaatttaatacaaaattacactaatattatatcatctttatgatggtcttagcatttctctaaaattaaagttggtcatttataatgttttttaaaggggaaaaaaaaaacctagagaaaacttatatatgggctttcggatcacctcaagagattcctcataatttgggtattactatataattagatcatcaaccgcacacatgtatatattatatcatttgaccatttttatattgacgaattttagtgcattcagattagaatatatattggctgcttatatatgtgagtgacagcaattataatgaatgaaaacaaagtacatgccagtgcaacatcaaaagtaactaatcatcacatgggcaaagaatgtttagcacttatatatatatgatatcagcctcgttatacattaatttttattatatacttttgaaaaatccttgtcaataggccttagtaagtaatttaattaggtcagtttgaaaagatgcatttacaagttgcagatatacataagaaggaatatataagtacctatctataacacaataaattagatatatatagatcgatatgtataaatatatatatatgttgtacgggtttgggttggatcatgaaattgagagcatcatcatgagtatatttagatcgactcaattttttgtggttttatggatatgtattcttaggaatgaataccctccttaaatagaaatggtgtaggatatatgttaagtactctgccatattattaaattaattatatgtcatcactttacaattaattaatttattacttttaaattaataattactatcccaatagtatatatagtttttatgatcatatgaacaaacactacataaaatatttattttagtcacaataaaacttgtaattaaaaataaaaaaaattatgattaattataaattagtaatatgttgtaactaaaaggcccgtagtaaaaaatattaatcacaaaaactacaatttgttatgactaaatatatttttagtcataatacttgttgtgattaaaactaattaaattaatgacaacttaatctaaagactatgttttagtcacaagtaacattttgttgtaactaaaagtcacatttagtcacaaaaaatagtattgtgactaaaaagatgttactaaaagtaacagttttttataatacaaatttatgtgtatgggactggtagggaaagatgttcttttctctattataacttatatatagatttacaagtagagtacctatatatatatatgaataaccctactttaattgaattcaatgattaaaatatatctaaaatgacatttattagtatataatatatgatatatcatatatatatctttatatattaaaagtgcctatctaacggcatttcttggtttaacagaatatacttaaaaaataaaagaatattctgttaaatttaacgtttgatctcccgttaataaat

SEQ ID NO: 111131 - DNA, 6332 bp, Cannabis sativa
  modified_base (3054)..(3056): a, c, t, g, unknown or other
agatcaaataagtccctcatctgacggctgtcgtacatcacggaatgcattccgtgaaagtacaatcaccaaacaaaatcatatccctaaaaatataaccatcgaaacctcttccattaaattataaaacatgtaaaaattaaaaaaaatgaaaaatgaaagaaaaaaatatttatttccttaacacggtacgtgtttacacgcgcataaaggcaagtggggatgcaacgtgagttatatgagcagaggagctctattcgttttaaggaagaaagaaaaagaaaaatagtgctccgagaaaggaaatttgggattttgacaacaatgaaacagaataagattaccccaaaaccctgaagtggaagcggatttattatcccaatttcacctaaacaaataaaaaataggataaggagagaaatataatattaaataaatataaaaagaaaaactaaccacttgaattgaaaccacaaaaccatttgtgaatcaatcaatcagaaccattatgtctctctctctctttctatgtcatctctcacacaatcccaaaatttataaaggcatctacatatctgacaatacaatacccaaaaccaaaactcgttttaattcattccttttttgtttttaattttcttttctcttccaaacaaaacatattaatattaccatcactcctcaccaaattattttttaaacaaattcaaaatctaaatttaaaaaagaatagagaaatgagtgagagagagactgttctttcatttgttcctactagtaatagtactcgtagcactagaagtagatattattttcctttaattccaaaatcaaaaccaaaaacaaaaccaaaatctacacgaccgattttccaaaactcaactcaaacccaactcagttactcaccaccaccaccacctgcttttgttttttttttcttcttcttaattttttaagctttgaaatttatttgttattatttcaaatctcaccgcacatctcaatcaatcacgcaaactcgcagacactctctcttcaatttaatgttttatttatttttttgattctttgtagagagagaaagagtattgtttttttttatgaaaagtctttgctgttgatattagagagagaaagtctggatttttacaatttatattcatttcatttgcattcattcattcgtctctttattactttttttgcttttctcgtcatacacacgaaaagaaaaggggccactactgcggaagaaccctagttctggagtgaaggagggattgaagctttgttttcttgcgattgagatcagataagtgaaggttttgattttcctgagctacttgcaatggaggtttctggttcggaagcaggagagaagaagaagccgcctgagggaggagagaacaagaccaagcgaaagatgaagacggcttcgcaattggagattctagaaaaaacttatgcaggttttgcttttctctgaaatattttgtgtttgattctgtgagaatgtgctcttaggttctgtatttttatttttcatatttgagagttcaaatgtggagtgaatttaagttactttattttgctttcttttttagcggaggcgtacccgtcggagtcgctaagagctgagctatctgtaaaactggggctttctgatcggcaattgcagatgtggttttgtcacaggaggttaaaggacaagaaggccacgccggctaagcggctgcggggacaggagtcctcacctgctcgccgtgctggggaggatgaagtagcagtgggtggcttgggcaatgaacacgcccctgggtcgggttcgaggcacgggcatgttgcagagcctcggagaggtgctcctcggcattgggcgggtggttctagacctggaggcagcgaaatgcaggtgatggcaaagaggtattatgaatcacagcagactattgccgaacttcgagctattgcctttgtggaggcgcagttaggggagccactgagagaagatgggcctattctggggatggactttgatacattgccaccggatgcttttggcgcacccattggtatcttctacactcctattgtttatatgatttcgagcttaagtgtgaatattaagttcgatgaaaaatttaggagaggataagaacgagataatgctattgggacttttgtgttgggtcgtttcgctatataattatggcttaataaaaaataatggtcctggagatagtaagcaacaatacaattgaaatttttacaatcccccagaaaaaaatgcaatggtttttaatgtagccaattataaatgcgaaccaagcactttgggtgcatcatgcatagccccttgtgtctttctaaattagaaactcaagaaaggagaagcatttggcgcctttttttttcctaatatatataatgttgaccaccatcagtcagttattttgcaaaattaggaaaagataagcactcttccatgtgtaacttttagcttatagtttttcagggaatctgacatgatttctttcttttaaattatggacgtgctgttttgaatttcctctgatgaaaaacggtttctacatcttgttttgtggtttgccctttctctcctacgtacagtctcttagttgtaggtcatcttgtttaatcccttctactattttctgctgcatctaaaatgttttgaaatgcttccgattccgaactatgctgtcataatatcttgtttcttatcctctttagcttttagaaaaagagccttctgaattagcacggtagtgttaacacttgcttgcatgtatatgttaaccttaccttaattgtggttgagtgctgattacctctcgacatgtttctggagcagcaacggttgggcaacacaagcaatctcgtcgttcttatgatgctaaagtatatgagcgttctgatgctaaaccaattaaggttagaagctttttgtttctttattttaagtgcatggcatgatatgaatgatacaattggttgtgacttgtgatcgtcatctctctctctctctctctnnntctctctctctctctctcctgctaataattgttgatttccccacgcacctctatgctattgacgtgtgatgttacctgatttgtattcagcaattgtgcataatgaagtttgtttctttttcttttactgaattcctttcttatcatgccgtattcataattgtgatttaaaaaagttttcatcgtaatcaaggatcattatacatttgttctagtcactcaatgatttactcaatcaatttaccagcaaattgcgttggcttttgtatcaaccctttgttgatttcgtttacagttttatatattatgtaaatttttttctccccatacaaaagagcaaaaaataattgcaaaagcaatcaccttatgttgttaattaatcgttagggtactggaagggctgtccttgaatatcaattcatcccagagaagccaactgttaagactgaggcatatgacaaacttacccattcttatcactatggttcgtctgctgagggtcctactgccaagactccattgttatctgctgggcacccatacacgcctggcaatgagcacttatcttctggatatggatttcaaggtgagatgaatgctctaaaaccttttgcctcagcaaggcaagcagtcacattttgccatatgccttgggatatgattaatgttagtccggagatctcagtagttaatactattatacttttacagatgcttattttggtactcatccgattagtcaactggaaaatccatatacagcatctgagaggagattgaccattgaggaggatgctttacgaaatgaaaggaggcgcaaggtatttgtttcactatatatatattttgtcttttgaccctggatgttatttgtatcattttgcttgttgtttgtagagtgaagaggcaagagtagccagggaggttgaagcccaggagaaaaggataagaaaagaacttgagaaacaagatattttgaggcggaaggttggattataatcatagtactctattttatcctgtaccttgtcttaaactattcttactgtttttgtatttagagagaagagcaattaaggaaagatctggagagacaagaccgtgagaggcggaaggaagaagaaagactattgcgtgagaagcagagagaggaggagagattccagagggagcaaaggcgtgaactggaacggagagaaaaattcttgcaaaaggagtccatgagagtatgaatatatatgtcaatatattgcagttttgttttttgggtacaggctggttatttttatgtttgctatgtactcaggcagagaaaatgaagcaaagagaagaattacgtagagaaagagaagcagcaaggctgaaggctgctaatgagagagcaattgctcgcaaaattgctaaagaatcaatggaactcattgatgatgaaagattggaactgatggagttggctgcatcaagcaaggggctgccttccatagtttcccttgattacgaaactttacagaatcttgagttatataaaggtacatttccttggcatactttactacacaattttttactgagctttaaaaagtttcattttgtagttctttctatcgtgataaaaaatgatacatcttacagcactgttttgcttctgagatcttttatgtagaaaaatttatttctcttaatacctacatttatttctttttaaaataacctttcaaatcattgaggggttgaccacaatctatgcagcctctcttgatgcacttcatgactattgtttagaaaaagaaaaagtctgtttcctgctctgaatatattgacgacttggaagttgcagcccttgtctcgtttctttttttttttcccgtctattatccttttttgcttggctcatgcaatttaattatattctttaaccaaagggcatctttttattcagacatgagaattgcttttccgccaaagtctgttcatttgaaaaagccttttgcagttcaaccatggacagattctgaggacaacattggaaatcttctaatggtgagttggataatttatcccctcttattgttatggttaggatggtattatcatttacattgatggaagtgtgtaattattgcacttgcatgcaaggcattatgtgatttctttgaaagtaatttttttcaatgcatattttgtgcaagttatatcattgggtatccttctaagatcattagttattctaggtgtggaggtttttgattacgtttgcagatgttcttggactttggccttttactctggatgaatttgttcaagcttttcatgattatgtaagtttgacgactctgtttttaaattgacttttttttttcttccttcctgattgtaggagactgttttacatattttttagaagggttgttttataagtcaattatttttgaggttagaccaaagtgaagtttcttcatttaatttgatggtgttatgttatcttgagtttatgccaggatccaaggttgttgggtgagatacacgtttctctattgaaatcaattattaaagatattgaagatgttgtaagaacaccatctacagggttgggagcaaatcaaacaactgctgccaacccagtaggcggtcatccactaattgtagaaggggtaagccaaggctgttgttactgctgcagttttccttttaaagtttcactttgggtgatctgatatccatttttctcatgttgaatgattgaccaggcatatgcctggggttttgatattcgaagctggcaaaaccacttaaatccactgacatggcctgaaatattgcgacaatttgctttatctgcgggatttggaccacaactgaagaaaaggaatgtcgagccatcatatcttcgtgacaactatgaagtattcttcttctctagctctggttaacattcaaagagtgctgctgtagtgctgtataatttaccttattcagatatttaagtaattttgttaagattattttcacattttgcatttgttattttcatgctcctcagaacaaattcatctacacgcctttatttttcgtgtgtggataaatctgttctcggtgttgctttcttttggtgaatgtaactactaatgatgtgtagcttgggttagaacaccatatacactttctcatggaagcaatgtatttttcctatattttgttatttataatttaatagctctcattttaacagttgatatggaactagcgtgggtcctttgctttttttttttttttttt

SEQ ID NO: 111132 - DNA, 1558 bp, Cannabis sativa
  modified_base (1450)..(1455): a, c, t, g, unknown or other
attgctcagtcaaataacacactacttttcagaaaaacagtttttcagaaaaactgagccttcccttttctattccttggcagaacctctctctctctctctctcttttcttcaaaccctagaataggaacccaccaaccaccaccaccatagaacccaccaaccaccaccacgaaacgcgaaacccataaccaccaccacaaaacccaccaactaccaccatggaatccaatcacagtcgagaatccagtagtggagttgtggaagacaaatggagattgtgaagctcagtgttcggaatcgtttgttgtctgttgtcatggcttgggcttcgtccttgagaggtcttcgtcttcaacgtttcaattttgtagggttttaaatgtaaccctaataatattgtttctttttattttctatgtttttactggttattgttaagggttacattgatggttgacaaccaccgtgtatggtggagctccgacaagcttaggcagtagctacatgtatttctttaattatttttttttattaatttatatatataaaggtatgccgactgttataaacagtcaactatactgctcaacgtccttgacgattttttaccgtcgcctattctacccacttcttcgatggttgaatatgcaacggttttagagactgacgagaacactttacctaactgtttaaaatagtcggaaaaactcaattttttaattttttaatagtgtgtcaatggtaaggaagtttaattgaagaaggtcaatactaaggacaaccttgcacacatgtttaccaaagtggtgacagtgggtaattttaaagcaaaggtgaatttgtactgattggttgaagttcctatgctcaatacatttaatactgatatgccacgtaagccaagtgatggttaataccgttgctcttcgaagctcaactccttctaccaagctataaaaggatgttgagacaccaaaccttgaatgacactacttagatttctctttctctctatttatctaaaactaagttattggagcaaagttcagctcaagaatcgatgtaccattggtgtttttcacaccattaaactttgtaattaaaaatcaaagagcaaaaaaatcctaagccatcaatagttattttctccctgagtcaaactaagtttattttgtcaaattttatatattaatctttgctacaattcatttcttttagttggtgaatctattaataataagttgttctgtgtttgtggtgtgtatgtttcgaatcacaacataatatatatatatatatattattatataaaaatatatatattatatattatatcatacatgtatataaaaatttagaaaaatttataatacacaccacattaaaagtttgttttggtacatttcactactacaaaaatcccctcactacaaaaaatcttactttnnnnnncaacaaaatttatgactaaaaagtgaaaaaattgtgactaattataaattatgattcttaggttgtgactaaaaggtcggtggctaaaaatattagtcacaaa

SEQ ID NO: 111133 - DNA, 4662 bp, Cannabis sativa
aaaaaaaaggtatagtttttttagggttttaattattggtttataaatcaaattttttgattttctaagcataaaaaatcaaatttccctactgttattcaaaaaaaaaaagagttctagtagactttggggacccataccatattattctttaaaataaaatattgaaaatattgtacgtttaccctaaaaaaaaacattgtacgttgttttcatgctcaaattaattttgagattatgggtgtattttaaagtaattgtgtaattattaagtagtataattattaaagtggtaattacatggtctactaattatattatattttaaatacaatatatatatatttagatataaggtgataattatatatgaactcttaatatcttatttggtaaaatagttagtaattatacgaaaaactaatattttttagtagttaatatttaaaataaaaaattttagtaattagaactcttcaattacctataattacataattacaattgaaaagtgtaattgtacccctcaattacttttaattatataattacagttaattatatagtgaaacaaatatattaaattatataattatttctgactatattacatataaatccaattagacaatgagtttctaaacgtgactattatattaattcaattgctaccaaaaggtttaattaattatatacgtaagtgattgaataatgtatttgtgtcatcttagccctttaattaaaatgaaaaaaaaattgagagattaattaattacttgcttctctttttgaatgtgtcaatataaaataaaataaaataaaccccaatttgaatgaatatgacttgtgctttcgtacttataagttgtattctacgtaagtaacacaagtcactgtatgcgtcagtcgatcttttattttttcctaaaaaagacaattaaatgatgtttgaaattaaatagtaaagatttttgctaaacctttttttcactataaatgttgaaatttggtcacacatttgtagataataattacactatatacgtctagcctaataattcaaaactttttagttattatttttttttaatttgcggtataaataattaaatttaactctcaattgtaaatatttaaatttaattttttgcggtaataatacctagttataattctgaaacttccctagatacatgtatgttaaatgttaagtaaattgttacgtggcaattcctgattagttcaagtcaattaaatttttattttttgaaaaaattagtttaaatataccaataagaaaatgacactttgatataatgacttaacatttaataactaggtacttataaagttccaaaaatataacttaagtattattatcgcaaaaaattaaacttagatatttatttgtactgagagttaaatttaaatattaataccgcaaattactctattatttattaataatttgctatttaggaacatttattttttttagttttaaaaaataaattttagatttcaaattatttgaaatctacagtcatatatatcaagaaaaagtaactgtgttaattacatgctaagtagtgtaaattagtgtaactattttaaaatggagaattaaaaatttaaaaacaaaaaaatcatttcaaaatttattttaacatttttttaattataatctatttgcattttcaatcattaatattttgggaccgaacctcggcccagacccaaactagatcttggccccaaattcgaacctaaacttgactttggccctgagcccgaaccagaaccttggctccaactcaaattcaaaccatggccatgggcctcgaactcgaactcaaacccgtccctaacacccaaactcggattcggacccaaactcgatcctagccccaaacccagaccaaaactcagcattagtcccgaacccgaaccaggatcctggcccaaacctaaacccagaccttggtccttgaacccaaactcagacccgaccatggccccgaacccgaacccgtaaaaaaaataattataaaatgtattttttattttttgtttttaaaattaaataaaagtagttggaacataatttttttaaaacaattaaaaaaaacaaagtagttgtagaacacttacttttattttagtcaccaaaaaaattaaaaaataaaagtactagcaaatactggcagaaccagccgaatattctagtggggcaaaaaaaatttctttcttataaagagtattacttaaattttattggaaaaatataaattttgtggaaataaaataaaaattataaaagaataaaagctaaaaatataaattttatgtgggatgcaaattagaaatatatttatgtggttaaaaataaaaatatgtaaagatataaatataaaaaaattatttttatggatcaaaatataaaacacttaaaaatttatacataaaatttattttgtaaaaaaatgagcaaaagtaaatgaccccgcatgccttcttgcctccgcctctaacaaaggccatctaaattaaaatgcaagtatatgtattttttgtttttaaatgaaataacatcttcattgaattagcattctgaatacaaaagagtgaaaaaattagaagagattttatgcccaagaatgctaagaccagatagatatcgagcgtgcctagcaacatagtgggcaactcaatttgttgatcgtctaacaaaatgtaaatgaacatttggtagagaggacaaaagaattttacaataataatcaaaccaaagacagaagacactaactgactagaacgaatagcttgaataacgagcatagtatcagtctcaatctccacaccttttcactgcttgtttttgatccaacttagagcttctttgatacccatggcttcaacaactttagctgggtaaagacctccatggtactcagccttaatgtgtataggtctagcaaggttgtcacgaatcacaaccttaaagccatgtgagttttccttcttgaacaaggctgcgtcgacattgatcttgatattatccatgactggcttagtccaaagctcaatttgatcatatatgtttccaagaaacatagatgataaggacgatttgtcttgagcttttctctagtgaccaagagtggtagttgccaatacaagaacctcgtcaacaaaggaagaaatctgtttccatactttcttatttctagctttccacaaggctcatcacaccataactgatttgcaaaccatttcgttggttgttattgaaaacaacttttcaaaccaagagccaaacatgagaggagagttagtgttaaatacaccaaatttcagccaacacgcagtagcaaaagccaaaagggcattcgagaagagcatgtgaagtgttttcagcccaagaaaggcaagtagaatagagattggagatactcacatgttttgtgacaagattgagacaagtaggcaagcatttagtcactgttccccaaagaaaattcttaacctttagtggaatcttaagctgccacaagtttttctagaactcaaagtttttcactgtaggttgtgcatgcagcagccgatatgcacttcgaacagagaaactaccacagttatctccaaaccaggaccaatagtcatttttagcgttcaaactcaatggaattccaagaataaggttagcatctcgagagttaaacatgtcacgaactaagtcaaagtcccagctacataaaccattagaaaataatgaaaccacctgctggttttgtaacccaggattagaagaaattacaaacggattaactttgttcgagagccaagagtggttcaagatgctagtggttgaacatcatcctaaagaatgtcgagccccgagttttaccaaattttgagcactccaaatacttcgccaaacgaagcttggaatacgatctaactcagcgatgagaaaatcagagtgagaaaaatattgtgctttgtagactcgacttacaagggtattaggattacataacaatcgccaaacttgcttagcaagcatcgtaagattaaactcattcaaatgcctgaatccacctcctggatgtttatgagtggccatacgatctcaagacatccatatgatgtcatttcctttgcttgaactcgttcaccaccaaaatcgagctattagcttttctatttcttgacaagtaccagtagggattaaaaagacactcatggcataagttggaagcgattgaactatagttttaaggagaatttctttacctgcccgaaaaaggaatttaccatgccaactatttaagcgattggtaaccttatttttgaggaaattaagaatagaattcttattacaactaataatattaagcaagtctaaatagagattactatctgtagcttccatcatgccaagttttgtgtaaatattgttacgaagagaatgatccgtgtaagtatatgtattaattattgaaaaatgggtgaaatttttttaacaaccaaattgtaattggtacgtactaggttttggaagattttgttccatcatattaatggaaaaaaaaaaaggaaatttacatggtatactaatttttgttatttttttacaaaaatattgtcaggcggtatttt

SEQ ID NO: 111134 - DNA, 1062 bp, Cannabis sativa
cagcgtcggtagcgaatttcacgaaaaccgacacggaaagggcttaaaaaccgcctctaaagggggtttttgtagtagtgtcaaattatactttcttaaaatatacaaaggaataatgttgattggatttaaattaatattcttctagaaattatatatttatatatatatatatattatttgttgtgacatggccgagaataatagtttgttatttttcatgatgtgagaatattgtacatatagatcaactagtactatactctacgatcgattcccatttgtacatgtaaatttcttaagatatagttaaacgaaaataataatttttctgtcacatgatcacatcaatcattttttattagacttgataaataaaaactacaaatttatatatatatatatatgcatataatatattttcttttttgtatgtactgtattgagaagaaatattcgtattcctttggcataactattggcagcaacataatcatgtgtggtgtggtgtagtggtaggaaaattttttggttaggttaaaagtttgaatcccattaaagtctctcattaagaaggattatgtttaactttttggaaggctaactttatgtaagtagtacaattagagtctctcatgaggtacatactgataccgatgatctaaataaaataaaataaggtataaaatatttatagctaacaggtgattatcaaaattatcaaaactattaaaaaagtgaaaaagatatgaactacataactttttttatattattaataaaaaataaataattaaaccattggcagcggcataatgtgtcatgcacattacgtacattaatatacctcggaatattgaaattcgaagtctagcttattagcccatattgtcaaatcatggcctgagctttttcagatttatttatttatattaatatcattgtgaataaatacttctgaccatggaacatgataactaggggtgtacatcaaactgcttaaaccgcccgtactgcaaaaaaaaatacggtttgaaattcttcgcggtgcggttgcggttt

SEQ ID NO: 111135 - DNA, 6268 bp, Cannabis sativa
tctctttcctagcaaaattttttagttttctttctaccgtagctttttattttatctccactttttaattggggtataagaattttttgttttgtttcatcttgaaattcccaattaaattcttaattcttattttttttttcttctcaaacttagttttttcttttatatagtttttggttggagcatatgggttttttttttttattttgttttatcataaaattttatttattaatgtgttgatgaattatctcatagattagtgcaacatcaaccaacaccatattcaacattgaaaattgttcatattttaaatttaagttttttttttttttttttgaaaggaaaatcaacttcattaaccttcaaaatcagctaccaagtgaggtagcacaacagttgggacattccccaaactgaacatacgattagggtaacaaatagaagctctagcaagactatgagctaccatattggttgaccgttttacaaaacataacgagacatttctcaactctttcagtacacatctacagtcacgaattacaataccaaaacaagataacatttatacatgactgcgaatcgcttttacaacagtaagacagtcggtttcaagaaagacatgctgccagtttttattcttgagccaactcaaagcctccctcatacttaacgcctcagcaaatgttgggtccaacttttcattgtaaatttttgtgaagccttccagaaacatccccttatcatctagggtaacaactcccattcccgtccgagcctcaacttcaaatatcgctcaatgttaatcttaacactattaacaggtggacaagtccaatgctccgcaccatgacccttttgaagatcagggcaaggtgtttctatttgaaaattttgagcatctctccattggttaagatagttcttcgctgaagcaacaatatccaaagcactaacctttttcttcttccaaacggtctcatttctgacgttccaaatagccctgcagagagtggctattaaacctcttttatcaggctccaaccgctcaaatatatccttcaaccaaactagaaagttgtgaccatgtagcagatgtgtgcatgtgcccactctgtcccaacaacatttaatctactgacaagtgactaaacaatggaatatagtctcctcctccacattgcagataggacacgacatttacaaccacccttttggttaaaagttgacacatggtaggaagacagttagtacctgctcgccatatcatatttttaacctttggtggaatcttcaaagcccaaagccgcttccaaaacctcgtgatagactcttcattagtcacacctttttcttgttgtactaacgtgtaagcacttttaacagtgtagagccctgaagtctccaaataccagataatttgatcagtttcatgagtcacttgtaaaggcactttgtgatcaaattcctatctcgctcatcaaacatatcctccaaaatctccatatcccatccaccaccctcttctctaaaaagattgttgactatagccccttctaatcctgggtgagacgacatcaccataggattttcttcatccggcaaccatggttcgcccaaaacggagatagaaagaccatcacccaccctccatcgaacccccttcctgacaatggattgagcctcccaaatacttctccacacaaaacttgggttatttcccaattgagtagtgagaaagctttcatttggaaaatacctagctttatagacacggccagccaaagataatggttttgtgagaaggcgccacccttggttacccaaaagagctagattgaagtctcgaaggttgcgaaaacccattccacccactgatttctgctggcacatacgctcccatgacatccagtgtatgcctttttttatcaccaggtgaagtgttccactagaagtgcgccatctggctttcaatgtctcgactaatctcaagaggcataagaaaaacactcatggcaatgtttggtaatgattgagccactgtttaataaggacctctttcccagcacgagaaaggatttttgcatcccacccttgaagcttcttcctaacctgatccttgagatatcccaaaactgttgacttgttcctccccaacgtactcggcaaccctaaatacaaactattctcatctgcttgtctcatctgtaagagagtgttgatttgttgtttcatagctgcttgggtattggtactgtaaaagatggaggacttgttgagattgaccttttgacccgaagcaacttcaaatctgtggagcaactctcaaactctcatggcttcttcaatagttgctttacaatacagatagttatcattagcaaagagcatatgcgagattcttggtgctctattttcccccttgcaaccatggatccaccctttcgattcatacttctgaagcaaagctgataaaccttctgcacaaaggataaagatataaggagataacggatccccctggcgaattcctcggcttggtactacaggccccatttctcgacccccatgaaccaccttgtaactagcagacgagacacacttaagcattaaattcatccgattggttccaaacccaagctttgaaagtactgccttcaagaagttccactcaatacggtcatacgctttactcatatcaagcttgagagccatgaaaccatcccttcctttttgcttctgcttcaagtaatgcaagacatcaaaagacaccataatgttattcgagatgagacgacccggaataaaagcactctgagtttccgctactatgttgttcatcaacggcttcatacggttagccattaccttcatgatgatcttgtaaagcacattcgcttcacaacaacccgatgcaaactcccccatggtaaagaactgttgtactagatggacaacttccttgctaacaattccccaacatttttgataaaaagtttgcgtcatcccattagggccaggacttttatctggatgcatataaaaaacgactttctttacctcctcctcagacacttgttggttcaattcttcattcatatggtctgatacccttgtctgtatacattctatcacctcatcaaagtctgctccagaatccaaaaaaagagaattatagtattgcacaatgacttcctccaacccgtgaccccattccacccaatccccattattgttcctcaattttgtgatacgattatgaattcttctattactcgctgctctatgaaaatacttactattttgatcacctcctttaagccaaaattgcatagatctctgcttccaaaaggcttctttctgatcaagaatcgtaaacaaattcttcttcacatcactgtacttggaaactgacaattcatctctcttattcttcagcaacttcaactctgcccgacactttttaattcttttattgaagttaccagtgatttctttcccccaagccgccaaagcaattgcacaagaattaatctttgcaaaaatgtcattgttattgtcatcattccaacagctctttacaatttcatagcacaaaggatctttcaaccaagcattctcaaacttgaaaatgtaattttgaacaaaaacaggaggacactccatttccagaaaaattggactatggtctgaaggtgaagattctaagttgattaaacaagtttgaggaaaagtaggatactagtttgctgaaactaaagctctgtccaaccttatctccacccatatctgtgtacctcgtcccctctcccatgtatatcagtggcccaatagctccatatctgtcaacccgcacctctccaccatttgcctgaaatcgtccagcagccattgagggtaaccacggcctcctcgctggtcactttgatgtaaaatattattcaaatctcctataacgcaccatggttcaggagaagcatccacaagtgactgcaaaagttcccatgtattacgcctgagatttctattcggctcaccatagattccgatgagtctctaatgctttccttcttcaacttcaatcgagaaatcgatatggtttcgtgagtatcccactacccgaccctcttcagcctttttccaaaacagaacaagccctccactatatccttgggcctcgaccacaaatgttccttcaaagcccaatagacggcccacaaaattagctctatttttaccacatttagtttcatataagaacacaaaattgggtttcttttgagaaatcatctcttttaggaattgaacaatctgttggttcccaagcccatgacaattccaactcaagacattcagaattgagtgcgggcttgggaaccaacacccgcaccagataagttttttgggcccacatttacattttgtattgagacttgatcgtgtgagtcatcaaccaaatcttttgacagcattttccttcttttattttccaacaccaacaattcattctcctcattactttcggtttgacccaggttattaccatttatagaaaaatccattccacttaccacattatgcatattggccttacttccatcaatgattagtggagatcgtatcccattatctcttaactgatttacataactcatcaaatcatccattaattgctccccattataattgttcaccactgatttgtccctttcacactggctgccggagctactgcttcctactgctcgcccttctcggagccatttggctccaatagaatgttgtcgacgtcttcggggttctgctttcatctcgaagctataatttttcgtgatcaggtgtggtggagtagtaaagataacatcacaaaacttctctgaatgtcccaaaatacaacaaatgaaacagaatgcggagaggtcttcatacttaaaatgggcataacaatctggttcgttcttcacctgtaatttcttctttcgtttcagcggttgatcaacttgaattgtgactctaactctgagataatctctccaaagtcccatgaaattattcatatcggattcaacaaaggtgccaatgtaatttcctaattgctttaccactatttcagacatgaagcctgtctttaatccatgtaactgtacctagaaatcaattttatttagcaccactgacttgggatcgtcaccttctttcaatcgagcaaagatcaatggaactctatcaaaggtccacgggctgccttctatcaccctctctatgtctatttcatgatagaactgaaataaatatagattgggatctaactccttcacagtcatgcctcttccaggtctccacaacgaagccatttttgtgttgcatcgccataaaatctagagatctatcagttaaaaatctcccaacaaggcaccaccgaaaatcaaattctggggtatcaataccaacattatcaaataataagccttcttcctcctcatcttctgccaatgagatgttaccatagtttctcctcatactttcatccatgattagagactcaaaaaaacaggggaatgagattgaacagaacaaataactagcaaacaaataagacttttatgaatcaacaatataaaaactcatgtcatacgtcagaaactaaaccaaatatcataatttatatttgtttatttaatttatacgaaataatttatacaaatcttccttattaatatataatacatctgactctaactctacatatatttgagagagaggttgaatttgtagtaaatttaagtttttatttgggtggacaacgaattgcacaaaattcaacaaattattatgttaagtatttggttctatcaaacaaataaaggtaacattcacattgatagaaacaattttggacctatataatttgctaaaaaaattaacaattaatcttattattatttcttttatgactaaaatattccatttgctagaataattgagtgtcatataataatttttttttttctgatttatgtgatgtatgaatatttaagtagtactttagtaatatcatcttcttttctaaatggtaatactttaccacaaatttcccttaaactacttttatagcatcatgagtacttttatctatgtggaaagagagagcattacaaaatcactaattaaagtagtaaaatttgtgaagggaaatttacatggtatactaacttttgttatttttttataaaaatactgccggacggtattttttactttt

SEQ ID NO: 111136 - DNA, 7354 bp, Cannabis sativa
  modified_base (7292)..(7301): a, c, t, g, unknown or other
tttagagaaaatttatttattaaaactcaaaccaatttttcatcaccttcacttttgatggtgttgtgagcatttggctgagctgcaccacttgctggtggcggtggcactgcgtccgccaccatgctcgtgcttgcagacgagtcattaaagctagaatcagtccctattataatctggctcgtgaaggtactgacatcactgaatttccagtcacccaagtaaccaggccttgaaatttcagtactcacatcactatctcctaagatcattgccaccactcttgacatagatggacgcattgttggtgatgtttgagtacataatagagctactctaatcattcttttcacttcttcctcattgaattctgatagttttgaatctgccagttcgatttcgtggccttgttcatgcaaattccaagcctagcaagcatgaaacaatgataaaaacatgtatcaaaagatcaaaatctaataagaaaaactataaagaatagctcattataatttgattttcagtacccattcaagaaggtacattctttcttcatctaaagaagagtcagaatttggtcttccactaataagctctagagccacaactccaaaggcaaagatatcggttttctctgttaagtgaccgcgcatggcgtattctggtgcaagataaccgctgcaatttcatccaaaagatttcagttaaaatccattagcaacaaaacaaggctatgttgtcatcatgaagattttacttacattgttccagcaattcgtgtacttatatgagtatgtttatcatcataaagtttagctaaaccgaaatctgatattttggggatgagatcagagtcaagaagaatgttgcttgacttgacatctctgtgtacaattctaatccgtgattcttcatgaagataagctagacctcttgctacccctatgcagatttcgaaacgtgttgaccaatccagccttaagctaccattcactgataaatgacatgatttaaggctctcattataatgtgtaccaaatgcttgtatttgtgaaaacagcaacaaaattgttatttacttaccgaataatgctttatcaagactcttgttttctaggtactcataaacaagaagtcttttctctccctcaatacaacatccatacaatttgacgaggttacgatgttgcacagcagatattgtggcgatttcagcaacgaattggctctttccttgatgagaagtcacagacagttgcttcactgcaataactcttccatcttcaagtgttccctattgagttataagaaaatttgtataagaggaagggaaaaatctttactttgaccaatgagcaattgtgtcatcaacaaatgacaaaccttgtagacaggtccaaatcctccttctcccaacttattaacagaattgaaatcattggtagctgtcttcagttcattatagctgaaagtgaatggtttaacatccattcccaagaactctgcaaagcaattatcagtcaatagtgaagtagttcttgaatgttggaatgtgttagaaagtctcagattgataatgtgtgaaacttaataccatatgtatataagatccatgggctatttctttcattgctaattggttttgagattaaactacatgcatctactacacctattttatctactttctcaaccacatttacacattcttaacatggtatcaatctaaaaagaagaaccgaaaagtacccttgtcatgagggagatgttagaaagtcccacattgataatgtataatgtatgaaaacataataccatatataagatgcacgagctacttctctagttgtcaattgattttgagataaaactttatcggatcatacacactattctaatttctcaaccatacacttcaaaattccaagatcgaaccatgttaccttcattcatttgagctctcctccttcgtcgagcaatgtataaagccactaacacacagaaaatgcttaaaacagccaatccaacaacaactcccgcaacaatcagaccagtatggtacttctttttagtgcttagagatgtgttactaactgtggatgtaaaatatgtatcaaaacaataataatggtcaactaaaccataatcatatttcctttgaacaaagaaactaagaatatccacacaatatgatgtacttactagtgcttggagatatgttgctcacagtgggtataaaatctgtatcaaaacaataataatattcttatgtttcctataaacatagaatttaaaaaaattccacagcatattattcttacctggggtggcactgattgctgaaatggatggcccaaaagtacctggagcaggtatacaacaagttccttttccagcccaaaataggtgaacttcaatgtagttctgtgaaacatgaacagaaaactctttctctactgctctaaaagagagaccaccagcctccttttttatgtcaaaatcatgtaaaactcgatttccctgaaatatacacacaaacagttacagttaggaaaagggtaacaaaaatttcacttgataattcttttttgcaagaacactacttgtatgtaggtagacaatacctggatataaatatcaaaaacgcgcctgccaacacttctccaagtgccagaattatcgaaagcaatttctgcaaactggagtttgacagtgtagttaccattttcaagtcccaaaccatagtatctcaatgatgaagcagaaagccttactgtgtggaatagtacttcatctaaagtatttttgaattgagatactatagtacttatgtagctagaattaatgttgtttgcgaaaattccaacattactttctgcccatcttttgctgctggtgacataatgtgtagctgcacctaaagcctcatcatccttttcatactcaattccatctaaagattttagttcaataccgccagagttaaccccgaagctagaatctgtacaccattgaaattctttacttacaaaaacataaaggacaagttaccaattagagatatttcataacattttcttggtgttatgatatacatacatgtgggatcgcctagaccgcaagagaaactcttttggagacagttcaaccccgaaagaagaagactgaagagaacaaagaataattttaaacaaaagaagaacataacatattgagcaacaaatgcaactaagaacaaaaatgagaaaagagttacctgttgtttaagttatctaatgtaaagttgttgccaactaagttactgcaatttttttgtagcacaaagagttattcaaatgtggtattagtagagagaaattcaatcattaattctctaaatgttaatgcatacatgtgtagattcctttgattgttgacccaagaaggaatgctcccaactagattattgtatgataaatcactgcaataaaagcatagtacatgaaactcaatttcagagtctttatcataaatgttgcaaaacatatcagacatattaacttacatattgagaagagatgtacttgtttttcgaggcaaggttccgtttaggctattatttccgagaaacctaattaaagaagcaaaatcacagataaaaagtagttcttgaggaattacatatgttacaaaagaaaatagagaaaattgaagatgttttacagataagagagtgaactaatgttgaaaagcgagttgggaatctgtccatttaacttgttgaagcttaaatctctgcaaacagaaaatgcaatgagtgaatatagaaagttgatagtgcaaattggatagttttgagttccttaatgagcttacagttgttgtaactgtctgaggtttcccatataggatggaatcgaaccagtaatgttgttattcctaagaactctacaagttgtaataaatagttaatacattatgtttcaaaacaagggaaaagatatgtttgaattagattacttacaatgtacttagcaacttcatgttcttgataaatgcaagagaagtactcgcattagatatttcacttaactgcctacatataattcatactcatgattgttagctttaaaacttttcatataaatatgaaagtaagattattaagtatggcggtactcacaagtctgttaaagaagttagatttgcgagtgttgatggtataggtccttcaaaagagtttccttgaagcctcctaaagaaacataaacaaagaactaacaattgttaatattgtgatatattaagtaatgtcatcaacatactaagaacttctcaatttgacttacaaggtattaagatttttccaatttcctatgaacttaggtatctttcctgtgaattcattgtccgatgctcgcctgtagaaagttaaagatttcattaaaagaagaataatcttgtagctctttttatgcagggttggtcttaggctaatttggaccccagtgaaaaagtgtagttgttgggatttgaactctaaggtaaccgcctccttcgtctcacctcaggttggccctatttttatgtaatagtagtgtgtctataaatgatgcacaacacaagttagaagaattaaacaatttacaatgtttccaagctttgaagctttgcaaatgttgaaggtatctctccactaactccagcactatcaatgaaactgtcaaatgagtttgaaatgcagtcaataaggacttcattaaattctttaacagataaacaaagggaagaaaagagattcaatgttacaaacttacagatgttgtaatttaatcaaattccctaattcaggtggcagaggaccagaaaagttgtttgatgaaaaggacctatatatatacacacataaaaagaaattatttcaaaaaattcccaagaatatatatgactgaattagaaagaattttaacttacaaaatcaatagctcagtaagtagtcctaattcctttggtacttcccctgagagtgcatttatgcctaagctcctagtattatatatataagccaaaaataaatcaacaatgaataatcttgaattagtttcaagcttaagttttaggtaagtaggcttacaagtactgcatcttagtgaggtttccaattgatggagaaagagtgcctgtcaagaaattttggcccaaattcctacagatagttaatgaaataaaccaattaaccaagttaagtcatggccagttttcatgtgaaaagatgattagaagtataagaggtcaaataataaactcatacagattagaaaggaatgacagactccatagctcttctggaattgtaccagcaacatttgacaccttcctgtgaacagattttcatcaccaaaatttcaaaagtaaataatatataaaaagcttttaaatgtgaaaggatgttgccctgtttacatctttcatatattcaaaattaggctttatgattatttcatgtatacatggttgaattgagaattttaatccaaagtaatctaaggaattttacacaaagcacctacaatagcacttttttttttttttttgagaaatttacatattatatttggtaaacttttacatttttaccttaaattttttttttaatatatttttgcagtgatcatcaaaacaagaagaaaatcacacgaaaataacagaaaaataacgtaaaaaataatatataaataacaaaaaattaacaacaaaataacaaacgtacaatataaaaatacatcaaaagatcatcttttctgtaaataaaatcttaaaacttataaaaatatttaaaattccatacaaccatatttttataattctttttttttacatttttacgaactattattttttcaatttttttttcagaaaaaaaccaatgtttattttagaacaaccaaacaataatagtctgtattttggtaaaaaaaaatatagatccgtgtaaacttttgtcagagtttatgaaataatctcattaatctaactatgtaattgatcataactgtgatttttatcacacttattaagagtatatactaatttcatgaaccaactacccttaagttgaaacttttaaatatgaaatgtaagtacataagtgcatttatatatatagtagacatacagttgagttatgtggcaaagtgagccatttttgaaagaacaatcacatttgataaaagggttgaaagtgagaacattgaaatcagtagagtcaatggctgctccactacatggatcctcacttgtattccattcaccctttattttccattgcttaaacatactattcaaagctctcactgcatatgtaatccaaatataaaaatcatcacaacataatatattatatatatacaataaaggcttcaactttgcataatatatataccttcagagggatgagtagttggttgagttgcattattattctgggcacttattctaaaaggagcaagaacaaaaatacaagaaactattacaaagaaattagtaagagtagatgatgatgaagctcttgacattatatcaacttaattagtttttcttctttctaaacttaagctaaagttaataatgcctgaaaattttgaatggtatatagagtctaatgtttttcaggcattaattaatagaagtagtagtaataataataataagttttggatccatttttgaatggtggactggccagggcaagttgacaacaagattcaaagtttattgtatataaataggaaaaattacatcaaaaaaaaaataataaagaaattaattaattacttatttgtcatataaagtttaatattatacctaaattttaataataaataacaaatatttataatttattctcaacctaattatactcatgttattttaactgaaatatactttttaaaaaatataatatacattttcttctttattattagataaataaagtgttaaaatttattaattgaacgtaaacaattattaataatttttttggttactaattgatatttctatttttttgttatcttgtttttagctatgaaaaaatctttaaaagttatcaaaatatctttttttcttcataattagctagtattattccacacagtacacttttgttgtatagtgatatgtattgaacattattcaataatgcatgctggtttttacagtcatccaaaatagtttgtcatgatatgaaattttttattattataaagagtgatatgatattttataagggtgcgtttggaagtaactgnnnnnnnnnnaggtagggtaattattagggtggtaattacacagtgtagtaattacactatat

SEQ ID NO: 111137 - DNA, 5116 bp, Cannabis sativa
agagagagagagagagagcttcacgtgtaggaagctttagggagcataagggaggacttgtagagaccctttattgcttgtcgaatggcttaggttttgagagtgaactaataccctttatataggtagggcttacaaaagatcctaattcaaataggtaaagatctccacttaaaatagggatattaacatattttatctattaattaagttacaaaaaaaggataactaaattcctagaaaatcggacaaatatctcgagagaaaacccttattttcgtgggttgttgggcctgtctcacaatttttcttagctattcagaatcgtctacaaaatttggtcggccaaacttattttgtagggcctcgccggcctatgctctcccatggctaaccaggtattgttccaatagcctcggtatgtgcctgccagctttctatgtgtttgtcagccgttctatgtgcgtgaaagtcttggtatgtgcctgctagccttggtatgtgcctgccagcctttgtatgtgcctgccagccttcctatcttctttttacagctttccttgcaaaggtcagacctccttagtgaaaaaggcctttctcggtcagtcagacacattttgggctggccagcttgtgctcaaactctggccgacctataagctttctttggtcagctcacacacttcccttagccgaccagacatggttgttcaaggtcttgacggtctgcttaactcctttctcttattgcttgattgctttagaaccttgatggcaaacatgttgtgtaaggagactttgtcctgttattaataagttgtatcacacgtgtcctcaatcttgactgtgtggacatgccaggttaagtagacaaaatttgagataacatacttcacataaaagtaatcacaaagacacacaaactcaccaagaaataacagaacaactattctttacaaaagaaacattttcttctacatatataagaaattaaggagtagaagagtttggccttttactactagtttaggtgatatttatagggataaatgacacccaaaaccaagctcaaaggtctaaatacatagagaaaccaagctcaaaggtctaaatacatcgagaatcattgattagtttccttacaaaaattcattaaaatgacaaaattctgtttgaacagatatgaaaaatatacaaccgaaactcagatctatgcaaacataatcctgatttacctagtcagcattgtcaatctatactccattaaagccaaatacatcccgcgaattctcattggacatcacgaatctcagttggtgagattaatgcagatcataaaagaaataaaatatactaattacaatgaaatactatataaagatatatagtatttattttataataaatcattttattctttccatataaaaccacaacctgagtaagaacatatactaaaataataaatctctgggttcgtgttttacaagcaaggaaacaatcaaggcataaatgaaaaatatttttaaaaagtaaagtcctaacctattcaaatagcttgtcaatctcttggagtatatgcaaatgatatacaaagtttttgaaaaaaaaaatgagaccaaaaaattcaaactaaataaataaaatttctataaatataatatcaagatattatatatacttctatagaaaaattaatttatttattatcataaaagaattaactaatttaaaaaaaaaatacaccaaaacaaatgtctcagttttattttaaaaatattacacataattaattttattatttttaccaaatatattaactaaggactttacttactataaattattaaaaaatttctaaaaaattaataaattatttaaaataattataacatatgctattatcataagaaaaaaagattaatttttttttttaatatcaaaacatataaaatttactattttctatacatgttgagatacatataaagtaaattcaactcacccaccaccaccacctgtcaaatatccaaagatttcaggttttcatctcaaccttagaatgattgtgcaatgctgaacccaccaggttaggtagatacacacaagtatataaatacatattataatcagtattcaattatatgcctttttcattattattactattaatattattaaattatttcattgatgactttaagcacccccttttgaatttatcatatacttatatctggatacatatatagatttcgataagataatactcaaacttgtctatttttactcactcattcattaattcatcatcaaattaatgaatacataatgattttggtactgacttagacacacacttatagctcttttgttgctcattaagcaaagccacacctaacctaatcttcacaaaaagctcccacatcccaacccacaactggtcatgccataactcatacttaaaagaaacaaatctgattatgtaataaatgtttgaacataccaatatctgtttctgaaattttatgagattgagaattattattatttactatatatacatattcaaatgtctacagatatcctaataggctaataataatatcatattcctatattagtacttggtcgtcacgtacatttaagtaaacagtccaactcatataatatctcacctagctgtcccactattttatatttaacaatttattattgaataaaataataataaacactaataaaatatcaaacttcatctagaatttgagaaacatattcaattcataagctaaattagtattctttggtttttattttatttattttatatatatataaaggtccttgactttgtcattgcaaactgccaaaattgtttacaaaaagaaagaacttaattatgttgctacttgcttatagttaggaagtagagattctaaatacattttctctaaactatcacttttggcttgtcatttgtttcaagaaaataatagcaataaataaaataagatacgatccattatataaatatatagttacaaaaatggaatataaagaaagttgtgcagacagcgtgcatggaattaatggaagaactaataagtatatctctgactctttatatgtttcttttctagcttctgtatatcttattattatctaattattaatttaaataataatattaaaaatagatttacttcaattttataatattttttaaatatataaaatttaattcaaatttaaaattaaacttatatacaaaaatatttacctataattttattaatatttttaaataattatgttgtattttaataaataataaaataaagaattaaatttaaatattttaagtaaaataattaatagatttataaaaaaaaataattaattaatttaacctttaattcaaatttaaatttatataaaaatatatattttatttaattggtatttttaaataattaaatttaaatatttaagtaaaataataataaaatttttaaaataacaattaattaattaattaattaatttgacagtattttttaactaattaataattaattttaagtgaatagaaaaataataaaattgttaaaccaacaacttttattcaatagaaatgaatgatgtgataatatataatatatgatttaatacaagtataatatatataatgtagaattttgtgaagcgaaacttcgcagttttgaccaaataataataacaacaaggtttagatgggaacagctattccctcctttgtattattatatcgaatactttatatatgaagatgcttgcccattaagcaacaacgaatcatttactctctctctctctctcaacttatatataaatatatattttctatattaccatatttgatatatgacatatcacctctctctctctctctgtgcaaaaaagttgaaggagtcgccagccgcagttgtgagccacttccacagttgctgggtacccttttggccttttacatcttcaaacttcaaaaataaaagaaatctttttctttttctttcttcttttgaattttagtgtactgattctttcaattcttaccaaatacaaacaaagtttcattcttttgtactttctgtgtgtatcttggcttaaagctcagatgttttgtatttttggctgtggaactacttgttcaataactatgcttagccttattgtacttgaacgcatgtgttgtcttgtctgaaatgagatattaaaacaaaacaagggtgttgtgttgagcctaaagatatacatatgcctgcaaaaccaagtcaaccttttttttttctcttttcagcaaaaaaaaaaaaaaagaaaaaatttggctctgtgttttttaccttttaactttagtacttacaggcctgcttctagattatattatgatgtcggattctttaaccatttgatttgaaatataaacacaccccatttccattcgtgctcaatcaaaagactttttggtcattaataatctgtgttctcctttgctacttgtttgtgcagttggatattggggctaagagtgttttgagccatggcagtagagaatggccaagagggtgaggccagctcctccaaaacccagatagaagaagacacagctttgaactctaccaagagtaataaaaataataataataatgaagaaaaggaacaagagtcagagaagagcaaagtaccagatgagaaaattccctttcacaagctcttctcctttgcagataccactgatatctttttgatgattgctggtactttgggtgccattggtaatggattgggtctgccagttatgaccattctattcggagagatgatcaattcttttgggaacaaccaaaccagcaaagatgttgttgatattgtttctaaggtaagaaaaatgattttgattcatgtattcactttcattcatctttgtatgtctgtttataacaccttggttctgcccaaaatatcaggtctgtctaaaatttgtgtacttgggtgtggcgactcttgtggcagcatttctccgtaagtagtaaagtagtagtagtactctctctctctctctctctctctctct

SEQ ID NO: 111138 - DNA, 8529 bp, Cannabis sativa
aaagtattaccaaacgtcacttaatttttttttttttttttaattttgcattcaaacaacaacattgctttattgcatcattttggacttccaaaaatctactttcgatgtataagccataacttaaggccgtcatttttttatttatgtatttatttatttattttttttttttgtgattagaacatttcacttctatttcactatctaaattgtatcttttcggtatcgtttttgtctttaaaaatcaactttttaggaccataagccactttgagtctccaaaattaagtttttatgagattattgcaaattatcatttttatgcaaaattttgctgattttaaattttaaatgaaaatatgcgaacaaaataataaatcatgtataatgtgcttgaattatataaattagtaagtatcgtataacttttttttttgagtttaaattttagattttatatacttttataaatttaattatacaaaatacagtatttactccattacaatcctatcacgaatttagatttgatatcttaatcattaaaacattattttgtatggattaatcatgaaaacattaaaaggaatgtgatgtaaatatgtgtcgtgtcgtgtcgtgttataaaaaatatgggttgtgtcatattatgctatataaaaaaaatatgagttatgtcatatcgtactattttttaaaagtaggtctagcacggcctatagaacttgtatttttgtattgtgctcgaatttataccaagttttacttgagccgtcttattttcttataaatgctcaaatttgtactctatttttacacattttatttttacaattaataagataattactaacttgtatgtattttttatagcttcaattattttttatatacttttttagtaatattttgcagataatcaaataaaaatagcattagaattattaaaatttgactatttactaacaaacactcattttttagtaatatccacaatttccttcaaaatttggaactatttagcctaccttgatttgccctagcatcttgaatcaacttataaacactcttcacagtattacatccagacctttccttttcccaaaactacgaatcctccaaataattctcacagaaaggaatacataaaattagtgttgcatctcgatcattgaaaaggttcctgaccaccttctcatccggtcatcccatttaaaccgtcctgaaactataaagctcaccaccttcttgttgattagtgttggatgatgagaagtaacccaagaatcatcaagtagccatgcaccctccaaaatcccaacatcaacatccaacccaccctcctctgaaggccacttaattaaactttgagtctccaaaatgctcctccaaatagaatttggattggcactcatgagaatattacctagctttgtagatttgggcaacaagagaattcaaccttgtaagtaaccgataagcttgtttccccaataatgctaagttaaaatccctcagatgtcgaaaccctatcccacctttcaacttatgagcactcaatcgatcccaactcatccattaaatatccttaagactccgagttcgatgaagatttccaccaatacttgttcatcagacaaactaattgcaaaattaggaagcgactgagcagccatctttagaagcacctccttaccaacttttgaaggaaacttagcgtcccaactttgtatattcttttgaactctttctatcaaaaaaccaagaactactgatttattttgtcccataatattaggtatacctaaatacatacaattatcctcgacttcttgcatttgtaagcaaatactcatattattattattactattatcaaatcataaggtttttaacgtgctatgttatttgggtttgtcgtgtcgtgtcgtgcttaagttcatattttgtatatcgtgtcgtgtcgtgttaatttatagtatcatgttgtgtttgtgcttatattttttttttgtttttggtcgtgctcatatctcttgaattcgtgtcatgttcaaaaaaatccaacctatatttacaacactacaaacaacacggtgaggaggacataagaagaatgggtgagattttgacttttgagggttcctttaatggctgtgggtagagaaaaggagaggacaaagacggttggttgaatgggagggacacttttgacaactcatacagaaacacattttcaaaaaaaaaaaaaaaaaactaaagaccttgtttccaatacaatttagcatatattttttttttttgaaacaatttagcatattattttaattgtggatagtaggatgtcaaatttcccaattctagtagataacaaaataaaaataaagaaaaaaatgtgttacacactcttaaaaggaattttgtcatccacactaaataccgaaataaaaagaaaatctactgaatcactgattttaaaaagtgtgtaattacttacccaaaattaaaaaagaaaaaaaaatcaaggagaaacgttgtccaagaagattttttgtagtcttttcagactcttctgttctgtcaagtggactgaaaatgatgaaattttatcatcgtaataaatgttaaaagaagagtgtgtgtaccccttacctaaaccgtaccacctctatcagagcaataaatacataaattttcacaatgtgaattaaaaagttgggtccgacattttaatgttgaaaagaaaaactgagatttcagtcttacattacaaagtgccagtttttgggctaaaactaaaagcaaaaagggaatggacaattcagctgctaattaaacccacggctttgtatgttaagttaaatttcattattgtaaaagaggtctatgttcattcatgcttcctcccaaccaaacatagctcacatgaagatatcaaactcatggggcataaagtcttcactaggtctgtagtatttgtctggagagtacaagcttaagtttgacacttgactggtatacaggcaggcaaatctctcaacctgcaccaaatgcaacaacaataaaatcaaccaccccaccacccccaaaaaatatctcctaataaatatatattatgtatttcataatgtctcaataaacattaaaaactgagttacagtaaagaggttatataatatcatacctgatgtgcaaaacgagagttctgatagcccgtcttcatgagttgtccccagacagtatggaactgtgaaaaaaggccaaaagaaacaacaatttaaactctaaaacttaatctcagataaatttaacgaaaactgtcatatgggatggataaaatctctaccttgtgatgattttcccgttgagcttgttgatgacttaaacgcacttgctctctttcagactgttacgttaatggaaacaaaatttaaggaagtcaacaaacccatccgacataaggttctaaacattcaaaaaaaggtaatttttcaattgttcttttctttatatgatgtgctgagttagatgagaaagtaattattgttggaaaatggcctaacctctaaaacatctagctcagaagttaattttcgcttctcttcttcattgatatcgtcaaatctgaaacgcagaatcaaacttgaatgtaaatattttgtttttaagtgaacaataaagtataatggcattatggataaatacttacttgagagaccatttcaaatgatgaattttgtcttcaatgagatcacgatgattccttaacaatcgaagttcctgcataaactacgtcaatagatgtttgtctttaacccaaacaaatcaaagaatgtcagctcatgtttgctaactatatttaaaactttactgaaagattttaataaccaaaagttctattagacaccttgcgggtatctctcaatttccaaagtagttcaacctcctgctctagctctggaacaacaagcattgtcctccaccctacacataatggcaaatgtgagaaaacagagagcagcattcttaaaatgtatattaggcacattaatcacaaatgtgcatccaagacatgaaatagagcagcaatcctagttcattcatgtatgtatacataaatgtaccaagaactttcttgcttcgtaggatatctccgtagatatgatccccaacatagagaacctattgaaaagatacaagttaaaaagtaaatgaacaaattaaaaaacacaaactgtacaaaacattttgaaattcttactgaacaaacagttctaaccatacatatacttcaatctagtaaacatatagaagaaacaattcacctgagagcttgactcaattgtaagtaatttatgcagatggccaacattgcctccctgaacagtagaccgacaggaataaagacattagaaaacttcaaaatagcaaatgcacgtcatcgatttagaatttgtaaatattggtagcctcaattaaaattaagaagggtgtgggataatcgaaccatacctaacctgaaaaggatgttatctgaccacatttcaagtaattgagtataataccattggaactctttttattttattttcattaaaagatgaatatatagggtaatgatacattctggaatattagaaatgctgttatatatcatttaaaaatggaaattagttacctggaaaactctacatgacttgttcggtcccttcactgaaaagctaggtgaagtgtctcccacctttttcatgcataataaaaagtaatcaataaaattgagaaaaaaaaaaagagctaaaacagaaggataagtttatccaaaattcacatcttgcaactaacctgaggcataggagagccattatcagtattgagtagcatcccagacacgggttcaacttcaaacaagtttgcacgactatcatcatgaaagaatcccggctttgcactgcatagacaattgattaaaaatgaactattaatatacacagaaaaatgaattatcctaagccacagatgcatgattgaagtaaaatcacattatgttttcccaaatgttacatggtctaatagttccagaatcaaaagagaacagtacctgccagtgatgacaacatcaaagtattgaagccaatcaaagttgcattttctaattccatccattgttcgggctccacagagaaaattcatcacaatgtttgtatagtcccacaaactgtaagttatgcaatttaaagaatatccaatcaataatattaccatatttgaagtagattgaccaagaaaaataaaaaaagaagctcaatacctgtttgtcaccaagaatgtagctcgaccagaatctctgagcattttgagcatgggcactatcgaagtatcttcattgatatacctagtaagcaggaccaaaagcaggtgtcacaatcacagatgctcactgtcaatttttatagggtatctttttcagattaaatggtggttgtagtacttgagaagaaaaaggcccagttaaccaacttcactttacccaatactgtagcaccaccatacaattgaatagtttatttaatgagtcataatctgataattcaaaacaaaccagtgaacagaccttttaggatcctttgcaaccatttgctttaaagttccatcacgatgacacagatcaactgctgctcgaacatctctatacatgcgagcataactggaggacataaaacataaattacagacaaaatcatggccagaatcatatattactaactgacatgctgcaccctccttaaaaagaaatagtctgtcatgttcttactctgtagtgtcgggaacttttccaggattattgtcacgaaagtcaaccaattgcgcaaataaataggcttcagctagcgaaaaaagggtatcaatgagagcatagtcaggctcatcaaaagcatcccttgtaagagtacttccataaatactaactttatcttctttggacaattctttaaatccatggtaggctactttcacatacttgtgacgatccatctgcacaattttgagacatgagactcaagctaaagaagcatacttaaaacaaaaatagaaagatcaaatcaaacaaatgatgccaacctttaagatgttgcctcttttcttatcaagaaccaaacctcttaccatgtacttccaatcaaatgaccaattcagcaactgcaaaagccatttgagcttaatcaacccattacacgtaatggtcagactcaaacaacaaaaaacagaggaaactaacctcgcgtgggtatcctaaatcatacaccaacttcttgatagtgccttcataagcaagggactcaaaagtttccggcttgtattgtgctaaagtgtaatccatatcaaatccaacagctacaatattcttcatattcagtgatctgttacaaaagatttgctttccaattacgtcaagtttacgccccccttccggtgaagaccatatgcatggctcttgaccaccactactgcaatccgtgttcctaagacgaggtgatttcatgtcacttacaatagtcccgtgactttcctccattggataaccagaatgcaatagtttgattcctgataaatttcagaataaggatcaatatattagctcaaacagtggaaaggaatgacaaaaacgaaatgtttaagaaagccaaaagcatttaatgaaaacatcacacgatacatttcaagcctataagtaagccaacataatacgtcacgtaacaatcccaacaaaacgagtgctcctaatctttaaaatagacttctcatcagaccgtttagtaaagaaactagaaatgaaatcccaaaccaccattttactaaagaactaagaaacgaagtttgaaaacaagaagaagaagaagaaaaaaaactccccaaaaacaccttaacgaacttacctgggcaccacgttaagttcccactctaacaatcttcacagctaagctccaaaaaacacctaaaaatccaacactacattaaaagaaaaaaaaataaaggttgttcctttaacagtcatctactcaatatcaaaacccaaacccacaaccattcttttctacctgaccccagtaatgactcctaaaacttcccaagaaaacccacaaacaacagtttcttacacagcaaaacaagaacaaaacaagcaatagtgatattctttctaaagttaaaatcggcagacactaacctccgaaacaaatccctcttctctttccgtgaaaagaatccgatgaagtgaaagctcgagaaacgagtcgtatacgagaagaaaaagcgggaggaaaaacgtcaggagaaaacaaagagaagcaaaaggaaacgggcttcttgggaattcgcatgttgggattaaataggcatttggggagaataggaagagacaataaggtgggtagtggaaatggtggtagtagtagtactagtgagagggaatcggattccgaaataatggcagtgccaatgagactggtacaagttggcaatgaggttggaaatgcggaaccagagaacatctaatttatacaattacaatagctagtaagtagtactaattccgattattccatcccaaagttgggattatcggataagagaattgaattcctcccccaatcagattcagagcgactcgataatcgattccccttttcttcctaatattagtactgatgcaaaagccatttggatttggagagttggttgtttccgttttttctcggggaggaacctgaaacgtcgtcgtggcatcctcacttcgtaattgaggctggaattaaagatgctgtgccacgtgtccacctcaaataagtatgcaatgccacccagctgaagagtttttttttttggtttatattaaatgacttacttactctacttcaaaagaaaaaatatgacttacttactcatcgtgagcgtcccttacacgtgccggagacgagtggtgtgtgtggactgtgcccttataaaacacgtgctctctatttctagcttttctttattttcgcttttgttgagaatctccttttttgagtttctttttagtgaaagaggaattagtaaaaaattaattagggaaaaaagaatactttttctttttaatctgtgatttcaaaaatatatattggacggtatctttcttataaaatttgaaaaagtttggaatagtactttacagtgtcaacaagtttaaatttgttaaaccgtccaagtggaatattaataaattaaagataaatattgtaagtgttaatggactcagaatttttatcttgttagagcttatttattataaataaatatttatacttatattataattatttttattaatttatttaattttgtatagattttttagtatttagtctataattattaaactaaaaattttacattgaattttttaaaagataatacttttattagtaggtctatagctccatattaataagggttatttttaataagggaaatttacatggtgtacta

SEQ ID NO: 111139 - DNA, 6064 bp, Cannabis sativa
  modified_base (1372)..(1392): a, c, t, g, unknown or other
ggtggcgcagttggctagcgcgtaggtctcatagctactgagtgatcctgaggtcgagagttcgagcctctctcaccccattctcttttctttcacacaacttttcattttaaaaaattttccgcaattgattttttttttcctttgctggaatcctcaattgaaaaggaattttggtaattataataatataaaaactaataataaacttttgtctcaataataaagtagtaggataaatgaagttggttgaaacaaatggtttctttcgagatgtaaagtactacgagtcatgttgatctttgcttctcattgttgttgaaaatggagatggaagctctcgtcccagcaaagtcatcaaagttatgccttctagttattgatcttctgtatattcatctttttttaaaagttctacagattcatcatacttattggtcttctacagatgcatcctacttactgttcttcaatttgtctaaccctatatagtgacaccacataatataccaggttttgttcatcaaaatcaaatacacacttgcacactaatttaatcgaggccatcatataagcccaaggttatttattttttacattttttacacaagaggggtattatttaatcttgatcaacttattgctacttaaatttgtttattttttctttgtacatattataaatttaaatttatgtggattaagctcctatattttgtattattctgttcctcttattaaatgttcacctagaacaacacttatcttggaatgtagataatgtagctcatacattagctttagtgtaagttcgtgcataacgtattggcccgacccgtatttattcttgctttttaaaaaatgagtcgtgccacaagaaagtatgagtcttgtcgtgttgtgctaacatttttaaagggtaagcctggcacggctcataagcctaatattttcatgtcgtgcttcactcgtgctggcccctatttcttaaataggtcagttcattttcatatcttggcttaaatttgtgctttttacctttttatatttttttttacaattactaaattatatgtatatttcaaagctttagttatattaattttgaacaatattttataaataatcatataaaaaaaactattaacattataagaatataaatatttccttataaatactcaaatttttatatcacactataaataaattaatatataattttaatttgtgacttttttatttttacacttcaaaatcgtttttttttttttgtatttttacggaattctacatagaaatccctattaaactagcgctacaacctaaattgcaacaaaaaatcgtacaaaaacccctattgcaactagcnnnnnnnnnnnnnnnnnnnnncaaaccgtaaatttgaaaaaaagttaaaaaaatcagtatatgaagtaattccccttttaattttttatgttttaataattttaattgtagaattataatatacagtattatatttacgttttattattatcttaatttatttataattgataaattcatatcttattattattaataataaattataaaattttttaatatgtcgtgttatgtttttcgagccaatctattcatgcttacgtattgtgtctttcgtatttctcatgtcgtatcgtgcttaaggacacatattttttgtgctgtgtcgtaccaatttataacatcgtatcgtgccgtgtcgtacccaagcccgtatttttttttgtacctaatcatgctcgtaccttccggactctagccgatttcgtgtcatgttaaaaaacccgacccatatttacaacactagttttcattactctattttttatgtaattttggattgtacaaaccgtgagaattcttttcttcatctttgttttgctccctcttttatactggataaaaaaaatgctttatttaaagaagagatctagcataacatgaaatattcacaaagaaattgtccatacattttaatccaggacctaaaaactccatcttcatttatcaacaaagatgataatttaattatttgtttacgaaaccaaatagataactatatgcagacaatggtagattatttttatttggataaaagaattttcagccatccctctttcattcttagaaacggcctagcttttcgactaagcggttctctatttcaattctcttcttcatgaacgaggcatacttggaagccagttgttggtctccagcagtagcagaaagtttgcagctgagagatgtattttccgacttgtctttgtacatgagtgtgatgggcacaaaagtacctttattgttgcatagccaaccatgagcggctcttaatgcagctcctaatgaagctgaatctgttcaagtaaaacaaatgactcaataaccaaaataatttggacacttgatgcattacttgctaatcacaagtaattcaatatgaaaactatatatgttttgctaacctggtctttgaactgtgtggacatcacaaccaaaaatggaagcaattgagttgaggatgctatgatttgccgatgcacccccagttgctattattcgtttaggagaaggcataccgaatctttctgcatgagcacgcattgacaggaactgaccctcaattaatgccctcacctgaaaatatgttgaatgtttcacatagaactcgggtcttaatctgtgtttagttaaatgacgattagttctttaagaataaaattaggaacctcggaaggaggatcaaattcctcaacttcgcgttcaaccaaaccttccagagtgtcaccattgaagttttcaagtatgtatcgatgaaagccaactgaaggataataaaaaatggcaaacaattgagatacatacatcactttagagaaaaagaaatgtaacatatgcatgatcatattacattgtataaaagagaacaatacacttaaaccattttccttctccaattacaattgagtggaagctgtttcataatgatatattcagtgccttgcacttttatttggaatgaatgcattaaaccaaaccaaaacaaacctgggagtggtggaaggatttcatgctccttatagtagaaaccaatctttccacctggatgcataaaaccactaatcagaaaaagtacaaattttaatagttttaacttgcattaaaagattgcttttcacaaaccattcagtggtggtgtctgctgcaggaatgaattgaaagtatcccaagatttttccgcatagcaatttcgaacatctaaaattaagatatggatcaaagcagagtgtcactaaacaaaacccaagaaccaattggaatatgcaggagggatcaattgatactgaagcaataccttcacgagttaaagatccattcttgtagaccaacattaccatgtatccttttgtgtcaacgggattagggaacacgtggccttctaatctaggttgaggatcatccgtaatcccaaagacctgaaaaacaaagatgacaaagttcacaatgtctgatttctactaactcaagttgcaactacactcgacactactgagcaaaactccatataaaggtcttttatttattatgaactatgctctgagagatgacacatatttcaaccaaaattctaatgtcgaattagaatacacatacagaaagaagtctttccattttaacttacagtgtcacttgtgccaagactgattgccagatcccctggggtatttatggtcaaacctgcatggttaaaatgcatttaagaaatgaattcaatgcatactatcatgtcatacaatgacatgactaaaaaaaataatgtataaaagcaggtgggatatgaagaagaaacatcatgcaccagcaaggctgttagggttgtctcctgaccactgaatgaccaggcaattcttgttgaaggagaacctgaaaacagatcattttaattcaggatatcatataagagcagagtataaagttaatagctgacaagatagagggagtatgctcatataagagcatagtataaagttaatagcaggcaagtaaagggagcatggctcatataaaagcagagtataagtggtctgctaggggagaatcctttattaagatagatagtacatccttcctgtcatatgtaatataaaaatttgatatttacatatataaacaaacatttacatagaacatatgaacgatgaccgacaattcgaggttttaatgcatcccaaatcatgtaattccccaatatcagagtaattagagaacttcatatactgtctgttgagccaatcagaaatccaaaatagcaaatgaagagaaaagacaactagaaaattgaaaattaagcaaaacaaaggaagttctagaccttccatctaaaaagataagtgaaataactaagtacctctctacaaaatagggagcaatgttaccagctgttgcatgggcaggggccagctttccaagtttttgctccaaaccaggagcagtggcctgtaattacaccaccaaaaaggagttaaaatagagaaggagaggatccattataaaacatatagataaatgaaaagacgagaaaacaaaacaaaacaaacctccaaagctatggaagaccacttcctttgttttaaatccatcaggttcatccctgcaccatcagtttcatcaatacaagcatattctccaatgagaagagatgccatgaaagagctaacaagggagatcctttcagtgttgtgataaatttctggctgagtctcaaatatcttcctaatctgggggccagtaaatctctcatatgcccgcgaaccggtaagttgagatagctccaaagctcctccaacagctttctctatatttctacattgtactgtggtactgctgtccatccatataggtgattccttaatagaaaatgcatcaccaagctgttccaccaatggcttcgttggatccaatgatgataaaattgaagagcttccattcttccaatacacactaccatgttgctgcccacttccagagacagcaacaattttcttaagatctaaactcgatttcgaaagtttattgagtatgatatcaagagcttccacccacatcaaagtgggtgaaacgattcttccattgatggatgagtctctataaacaccatctttagttttgtaatgggtcaaatcagaatcaaaatgtaccagctctgaagccactatattaagattggaatctagcacggttgccttcaaagacctgatcaaattatacaattttttcaattaattaattcagatcactgtattgactacaaacccatattggaaatttttaatcctaatatgaagatcacatatttcaaaccctcattggaaaaatcatggcaaaactacatgaattgaactgggctattaatcaaaaaagaggaaaaattcaaacttactgagtggagctatcaaatcccagaaagtaagagtcattggggagagagaaatccgccattggattgatcaataccaaagcttgataataatcacgctaatctctgccaatagaaactgaactaatttcacttgtcaattggaatgttcttaagtatatataaataaaaaaataattaaaattaaaaatatcccgtgaataaaggatttgtagctttgaatttcggtttataaatggttggataaggattagaattaattttaaaatatagaaaagatttgtttgaattgaggaaataaaaatacgtataaataaatggatagaaaagctggaaacctcgactgcttcgaatatcaagatacggatggagcaaaattacctctccccagttcttgtcccactcctgtcccaaccagtaatattttgccacctcaactaaattacacctacacatttaacaaatctctctaaaactaactgagtttccatgtttttaatttaataatttttttttaataaaaaaaatatcacgactttatctctctttctctgctatcaatacatttcctttctttttttttcaacaatgggaaca

SEQ ID NO: 111140 - DNA, 2608 bp, Cannabis sativa
tatcccttcatttcaaaacttttttctctctctctctctctctcatgaggccaatcataagccgaaagccccgaggcatcatggagagttctctctttttttttgtatgagactatggtctctcttatatgaattcaataaagcttccctccaacaaactcacagccaactcacccaccaaaaagacacaagttacccctaccccgtttgtccagccctccttctagtgtagtcgtataagaggcttagcaatcctatcacattttgagttgtaagcctcaaaatagactatggttttgagtgccaaaaacatgtcttacaaacatagttctaagtttaaagcctttttgcatgctcttgacaagtttttactctattgatacttcctacttactttatgattagcgacatctgtaggcagatctatattcaaaaatgatttttttggaaatgtatggttcttgacctccaccaaaattgcatcgatgattggtaaacaagccttagcagagagtgtgaagtcatcattatggcttttacctgcaaccctgcaagtcaagtatccaaatacaagtttcattgtttcctctatttttgttagtaataaaaatcaagactaacaaagaaggtttgtcaaaaacgtgtgaaatattgaatttcaatgaaaaaatctgatgcaagaataaattctcagtgacgacatctatataaccattcacatatttgcacctaccaatcataagatacagagatagaaggtacaccattaaagaaagcttcccgagctccaccgactgtaccagagtaaacactacagtacagttaacagaagaaacccagctattagtttaaaaccacaaacaagccaacaaattcagtaagaacacattggtggaataggttgggtaaatagctagaacaaatacaaaatgaacacgtcatcaagtgtgtttagctaactcaagcaagatcaattttgagaataaatacatccccaattaagcattagttcaaaattactgatagtcaatcagttaaaatttctctgcagtgtctttcttaaggctaatctgtagtcttttaagagtgaaaattcactcgttaggaagtgaacaggttttccagacaagctatacaatcatatacttgggaaagcctacactaggattgcttccactccgcttcaactaattcagcaacattattccatactatactctttactgtataatgaacagttgttagatgaaatattacgcacatgtgataaccgcagttgttacccatgttaatgccgctgatcacctgtgtcgatgcaaatatgcaaatcagtgaccattaaaagaaaattaactacacactccagtcacctggaaattaaatgttaagagttctttaacactactaaaaggatcaaacttttgccaggttatgggaaatattcatactttcttgtcacagcagcttaaaaaggatcatacttttgttttagaaggtaaaaagttgcatcaattttaagcaaagtattttaagattaaacagatatgaagaaaacaatgaactggtaaattagtaaaataccagatcaggaattgaaggaaataatgctttcgagaggccaattgaagaacaatctgcaggagttcctgaacataaaaagatgcatgaaacatgaaaattttccttggaaaacaaacaaacaaacaaacaaatcctgcccatgaaactagcaaaattttaacaatcgcggcttcaaaaatattaagcataacacatgaaaaaagaaaacgacaaccattaattatatgagtaatttaatgtaataaattaaagacaggtctttcgaggcaaaccagagactgcaaaggcagtggttccttcaatttctactttgttaacagcaagtgggtggcgccaagtgatgctgtgactaacagctgacttttcactgtaaacacattcgagtcatttctaatcaaacaatactagattaagaaaactacacccttatctcatcaaacaattctattgtagactgaaaacgaatacaaaacgatcaagaataaatatattagctgaatgatagtgaaattgaaatacgtacgagtcaggggcgcagacttgaacaatgtagcgagaagttgagaccagaacctgaaccaaagctcgtaggcccggcgcgtcgatcccgtcgtcgttggtgaccatgatcgtgggtctgtattccatctccgacgtatttggaagaagaataatgggttagcaaaccaaaaaaataagaaagagagataaaagcgaaaaaagaggagagggttcaagtttctcaagccttattattatagctttacttctagtaattatttttttttaacatacctctagtaattattagaatactctaattaggtagtgtttggtttgtggtaattacctctagtaattaaagttgctaatagaggtggccaatatccaatccaatctaattgaaccgaacagatccaattcaatctaattacaaaagattggatattcaattataattgaattggatctgatgttaaaagttagattctaattgaattgtatcgattattggatgtcaatctca

SEQ ID NO: 111141 - DNA, 3431 bp, Cannabis sativa
  modified_base (3393)..(3405): a, c, t, g, unknown or other
atggatcaatcaggtacacatactcaattatcatatactactattgtgttctatgttatatacaaatagatcttgggttaattgttaatttatctaacataagaaagtcttatttttccactctgtgacctctgtcaatctatatgattctatgtgggtcaatcaaacattttatacaagttcattgataataatactgagatgttcaaaatccaaatcgttatagatcagatgacataagtgaaataatgaaaatgaagaaaataactaaaaatgtggtgacgacaaaatttgtctaaaagaaatgtcgttttttatgttcaaaactcaacaaatcatcaaacagaagaggaactaaagagatgcaaattatatatatgtatatatatatataaatatattgttctttttttgaacaatgaactaaattttattgaaaaaaatcagcgttcagtacatcgaaaaggaaagaaggaaaatcctccatccaaactagctcatcatcgcgtgcacagctaatttataagcaacagttcactggagaaaatattcaccataataatatatatattgttatgtaaggttaatttctgattagacatggatttagatatttttagaggtggagagagaaacccaaattaattaagcttagcttattaaacttgcacgcctcaaaacgtatttacgttcacacattaaataagtttctttttatcttgaaaaaatttgaggcctttgcatgaacttgcaagccacgcatcgtagctttggcttcccactttcttcactttttatgttttgtcactttatgaacaatcaaaacatggttatttccaaaaatatgggtttttgattggtctattaatgcactcgactgatctgattacatatattaaggagtgtaactgtaacatattaaatgacaaagtatacgacttacaaatcatgtatggtccttggcttttataaaataaggtcctttcgtagatttatcaattattaatgtgtatatataaataacattacattacatatatgcttctttattgataagtatagtagtaaagagagagagagcagagatatatagaagaaatggaaaagtggaatagagggttggggcatcttttcatgaccatcttcctccataactactcagcatttatggtgattcctgccattacagatgttactatgtctgcactttgtccaggaagagatgagtgctctattgctatttaccttactgggtttcagcaagcggtacgtaattctccaacccaactctgctaatttttcaccatttatcatacattattatatgtaatgttaatttctccaattaagtataatgctatatacatttgtggctctaattaattttgttctctcactatatattctgaaattatattttgtcttattatgcccctttgatcattttaagaatgattacatatatatatttatatatcatgcattgttatcatacatactgctctgcattctgatcatttcccttattaaaatgctctgcttttgcagctcatcatgttttcatttgattttcagacacgctctagattgtacaattttgttttactccataatatattattccaaacttgagttaataatcctcctgagaaaagtcctaatgtattactgtcatgtttttcaatcgaagctctccattattattattaaaagtgagttcagaacaaatcaactagtgttgattctagttagttttgtgagacatcagggccagtcggtaggcgagtccgcctcaggccccgaactcttagggccccaaaataataataaaaaaatttatcagcatatcggtaaaatattacataataaaaaaaaatataataaaaattagttagagtagtggtaaagagagttattttaagttaagagctcaaaagattaatcaatctctacttttttatattttttaaaaatactcaatagaatgattgaaccttagaattcttattgtcttaatattaattaaactagttatatagggagtcttgagctccatataccttaagattgccactcacatacataattatatatatccgctatatatttgaagtacattgcttcattcttggggtaaaggaataatcatatatgctttctttaccttaattagacgcaaagctaagctagtaaatatccaagtttgaaacccaaaaatcgaccgtttatccaatcaaactttggaacagagcaaagtaagtgagtgtgtggtaattacacacacacaaacaccaaacacacttagctagtgtgtatgtatctagatcatattttccccctgatatataaattaaacgaggaagtttccttttcagattttcatcacgggaatgatttaaggggggtttcatttgagattttagaggatgaaaacaaaattaccaaacaacccaagggggccacaaactcacaatataacaatctcagttaagctaactggcaaaacctctctctttcttaccaccttcccaattctcactgcatgccaattcctccctttgtcatttttcttgtttcctttcctgtctcataaaatgggaatgggattacatcaactttcgttatttaagactttgtttatgtaatacgaatctcgcttattacataaactagtttctattcatgtagttgtaacattacatcacacctttacttttgtcttttaatagtttttttttcttctcaaaaaagaactaaatatcaccattaattattcaactttgttattttttttttggctaattaaaaattttaatctatgaactttgacaagtattaatcatgtatctgaacttttttggacgttaaaaattctccttgaattatcgagattgttgtatttaaagacttttgtactatttcattcaattttactaattcgataattgtctatgtactaaatcatactctttaaactttgatatctaccaaatcacgccactcgaattttgacatgtatcaaatcatgtcccttgaattttcatccatgttagacttctcttactaaaattagacgaaagttcttaaatctaacaatcttaatagttcaaaaaaaaattttaacaatcttaaaagttcaaaggacatgatttgatatatgtcaaagtgctaattaacttttttttttaaaataattttgggaacttatgttaataagttgtttttaaatatttcttgactcccaatatcaaatgtggacaagtttataaaagaattacttactcaacgatttttggaaaattatttaaaagaaaattaacttataatgtggattaattaaaggggaattacctcatatactattttttttaaacttttttttttcaaatttannnnnnnnnnnnntaaagtggttgcagcgctaattgcaa

SEQ ID NO: 111142 - DNA, 4214 bp, Cannabis sativa
ttgttagaagagtatccaaatccacctccccttcctccatctcttccaccatagctggaatcactgcgtcccccacgcccaccatcccgaccaccagaaccccaccgtctaaacctgttcatcccaccaccacgtgaggccaagtcacgaatttctggagggactctctggttggccccttccaacactttgatgagatctgaagcatacttggcatcttggtcaccaaagaatgtataggccagtccactagcacctgcccttccagtccttccaatcctatgaacataatcctccactcccgttgggaagtcatagttaataaccaccctggagagaaaaaagaacaatgtagtgagtgacaccatcctcccctttctggataaaaaggtatggctaaaggaaggtgtgatgtgaaaaaaataacagcactgttttatttccatctgtgtcaatgagagaggacaaagagaaacatgcatgaagcattttctaacataaatacgggttataacccgagaaagccaaacctgatgtccttaatgtctaatcctctagctgcaacatcagtggctacaagcactggagtcctaccacttctaaattgattcaagacaaaatccctctcgctctgagatttgtccccgtgaatggcagcagctccaaactggcgtgtaaggttacgagaaagttgatcgcacatctttttggttgagcaaaaaataatgacctttgatcctgggtcttgagagcgcagtatctgttccaatcttctgtgtttatcaagcggtgccagtaattcaatatgctgcaatttcaaaaaaatagaagaattcattgaaaggatccagccaaaaattacattatatatgtgtgtataaaagggaagaagtacagcatgttcaagagtcaacacctgtgtgattgacttgtttgcaacaagctcatcaacattgccaatgttaacttgtacaggattaacaagtagatctgctgcaatcttccgaacctctttcggccatgttgcggtgtacattagagtctggcggcgagtaggcacctccttcacaattttccgtatttgaggttcaaaacccatgtcaagcattcgatcagcctcatcaagcacaaggtaagaaacttgatggagactgatccttctcatctcaagaatatcattcaagcggccaggcgtggctacaactatgtctgctcctctgtctatatctctcagttggggacctttaggggctcctccatacaaacactagcagagcaaaatataagcatgtgaaaatgcaagtaatggaacaccaagacagcacatgtcataagagctaaataaataacttgaagtgaaatataatgggaaaacaaaacgaaaacagaagataatcataatgatgtaaacaaaactgacaaaaaacataacttattcatccctaccaaaaacacatctaatttatgtttgacctcgtcagtcagaaaagcaaaatgaacacttagcaacagagaaatgatgcattgctcaaagaatttattaaaactacagcagaaagacattttttagaaagaaatagaaagttatctaataaaagcactgaagacactggtcatataatttttagatgatacatgctaaaactacaacagaaattgcataccacacatgctatccttgatgtctttgaaaacttcacagcttcatcttgtatctgtgtagccaactccctagtgggtgataatatcagtacagtaggacctaatcgagcatcattgtgacagcgcttaagatgcataaaccctggatacaagtaacccaaggttttccctgatccagttttagcaatagccacaatatctctgctttgaagagcaacaggccatgattgagcctgaattggggttggggcagaaaaccctgcgttgtgtacctggaaaaatcaaaagtccaccagctccaataagcagttatactggtagcaagatgtctgatctacttatttctttttttttttcgtctctcactctctctttttgactcagtaaataatgtcagaagaagcatcatcccccattggcaggtcaccattgcttgcagatgcaagcaggagtaggaggaagcctcttctttcattgggactgtggggcagactaaatcatcacaccaatggaagtctccgccacaaacttaggtgattcggaaagcccttcaatagaattggtccaccaaacaagggcgctccaaattaaacgtagggccctcccaaaaagggggcagcacagcgtacgacattagctcctcccaggagcaaacatcgcacctgcgacaaaaaaaaaagagaggtacagatctaaaatgaattaacaagtatgaaactctacattggacctctagcattgacagaactttcacaagtaacattttggttacataccctagcaaacttacaggatttcctagccacccttgaagaataaagacaaaattaacaaatgaaaaacaaaaatcggatacctctctaagcatctcagatggaaaaccagcagcttcaaatgatgtaaaaggtgctggcacattatcaccctgaaaaaaaaataaaagataaaaaaaaaatgagagttacttgtatatgtataatataaacggcccagcacaatacactaacataaaggattataaaatatagcatagaaaaagaaagcatataaacagtgcaatccctctcagctcctgcatggattgttaatggttcgaggaagcaccaaaaaaacatagataatccaactaattcacatgtaaatgaaacaatccacttatatacaccagtcacaagaattgaaatggaagcaaataattcaactgagagaaaaagcatgacatagataactaaaaagggttttgttaaaactcacagaaacagatatttcatgccggtgacgataagcctcaggagacaaaccacttcccccatctgatgttccctgtcctctagaaggtcctccaggtccagtacttagtgtcccatttggagtggtggcagaagatacagttccacctctagcagcaaattgagatgaagtacttccaccgcgtgtctaatacaagcaaaatacaacattttttaaaaataaaaaagaaactaaggaatttaaaatagagaaaggaaaaaaaccaagcttaacacaagttctcaaatccttttgaataagtcgcagttgtacaactcaaaagttgaaagactatcatgtagcaatcacctcatggctaatacaacttgttacaattgattgataaagaaacacaattgattgatttattgtagttcaaaaagcaaactagaaaacttttgaaacaaagcctccaaagaaaaaacagacccagattaaaaccatataggtgatgtagcttaagtcagaagaagcagctttgacatgcaaataacataacatgcacaaacaaaaataaaaataaaaccgaggaaaccgcagctgcgacaaaactgagtgtgacagaaacaggtcactaaagcgtgaaatcaaaagactcccataactgcatatggagcaaatattgaagaaacacaaagagaataagctatacctgctgactccttacatcaaatcttgacgaatcattgttacccctatcatagttatccttgtcctcattagaactagcacccaaacgtggtccctgagaagattgttgaacgtgcacggaagaacttaaaggcgttgaagctgacttctgagatggagcggatcccacggaagaacctaaagccgttgaagctgacttctgagaagaagcggatcctattggcctgtcatattgggtcacattggtctccgggttccaaaaataaagatatccagttttaccatcaataagtcctttccaaggcttgggaagacttggatcttccggagcatatctggggcctgaagaagcagcaacagcagccatggcaacgaaaaacaaacaacagactcctacagaaaacaagtacgaaaaaaaaaaaactgaatttatattttgcactaaaagtcaatcccaaagaacctcccaccaaccaaaaagaaaaaaaaaacaagcatacttgaatacactagcttgaacaatcgcttcgctagattgcgcttacgaatttgtagtgagtaaacttactcctacctcaaaaaaaaaaaaaaaaaaccatggctattggcta

SEQ ID NO: 111143 - DNA, 1939 bp, Cannabis sativa
  modified_base (315)..(322): a, c, t, g, unknown or other
  modified_base (1718)..(1719): a, c, t, g, unknown or other
  modified_base (1888)..(1906): a, c, t, g, unknown or other
aatacagtggtgactacaaatgagatacggtgatgatagttgttttaaaattatatgatgaattttctatagatttattattttctttctgttttacatctctattgtgtaagaaatatttagtttctaattttcttcactataatgtatattttttaaaaaaatttctaattctttatttatataagaaattgtatgataatttttttattctttagagttttctatatagatttattattttttaataagcatatttttccttaaaaaaatacacaaaaataaatttaaaattatttgatactaattttattnnnnnnnnaatatttatataattatttaaccgtcgtacgcaaagcgcggcctgtttcctagtttcattaataaacataatgaataaattaaagtaagtaaggttgccactaatttataacaatttatgtggcttttaagatgtacccacgtgcccattgaataaaaattaaattggtattggaacgtacctatacaatgatctgagaggactttaagaaatggttgtaagtcaagcatttgagaggatcaagacctcccagaaccaagatcaagacctcccagaacctacatcacttatgctcattctcattcctcgtcacgtagtttgaaggaacactactacaaactgtactttcgatatcgattttaacctgacacttatacttttagtgtcggtttataaaactgacacctattccagtcataacaagtcaaatttttaatgtcagttctaaaccgatactattgagttttagtgtcattttataaccgagtatccatatatatttttttgttagtgttagtttaaaaccgacacctttaagttttgatatcgttttataaccgagacctaaagttttataatgccagttataaattgacacttaaaagggagctaacaaattaaaaaattactaaaaatcaacaaaaccaaaagaacttaaaaatatgataaaaatattatttagaataaatcaaaataaatttattcattacatttaggatttcttattggacaaattttgtcatcattcaattcacattagattatttagaagatttactatttgacaatgagagagaacaagttatgctcccgtactttactaaagaaaaaatttgcatgctattaccaggctaactctgaaactttaggaaaaacagtggaccatctgagtattccaccactccaattccttttcacaattttggggaccaactgagtcacctctttggtatcccttgaagtatcatcgttgtctgatctttagaagcgaacgacactgacctttctggatttcttgctagaatctgcattaaagacattagaagcaaagtattatcaatctgcgaatagcttgattgacagaagctcaccatcacttttttataattgtcagatcttcaggcttaaagacattataagaaaaggtaccaatactatatattattaactgtcttagtgtgtaactttaaaagcaaaaacctcaagttgtaaagcctcttattcatatcaagaatggttacaaacattccaagcaattgaagatgtaagagctcagtttgtgagggtcaaaaagtattatattgtatgtcaaaaaaaaaataaaattaaatcgaatatatacaataactgaaccctgtcgtcccctctctgtctctatctatatctctatcatttnntctctcttcaaacacaaacccaaaagaaaacccacaaagctccacaaccaccactctccggcgacccacctccggcctccgaccacccccacacgccgggcaaattggaagcccaactgccggcgacctcaccccccaagcggcgctgcttctctcgccgccgttagcnnnnnnnnnnnnnnnnnnntttggggtttcaaactttgaacggattttccgg

SEQ ID NO: 111144 - DNA, 2362 bp, Cannabis sativa
tgtcgctgatcgtgtttttaggagtaatgattttactcctgatgttcgtgatgtaatcatgaaagaagtttattaataaagcttcctttattttcaaaaaaactcttataatattttattatacttatgtcattttaattaatcactttactaatttttagttgccaaaactaaattagtcataaataattatatatttattttaagaatgtcacatttcattttttttaagtcacattatagttttaaactttttttataattatatttttttaatcaatttttttaattatattaaattaataaaaattataatttttttttgtttttaaaatagtacaaatttttaatttaattacaacataaatatttaaaactaaatattaaatattttgataattattattaaatattattatttaattatattactttatcaatataataatatttaattataatttagataatcatatatctaaatataatgtttaaagtgagattagttttgttttattttttaaagcattagattatttatttttaacaatatttggtttggtaggcgaatcatcaaagagaattaattagtggtatgacttttgtttggtcctattatccgtgatgagtaggtataatataggagtttttacaaaaatactcgattttgggtaaaaatttacaattttactatcatatagaattttctacaaaaatattatatttttataaaataaccgtaaaataacaaaatataacaattaaaacaacagttgaacaactaaaaaataaaatgtggaacaattaatagtgaaaacttaacacaatacacagtatttttgaaaaaaaattcgccatatacagtaaaaaagttaaaaacctcagtatgtggtgtaaaacttctatattataatattcatatatatacatttatatgtataaatttattacaattgtatatatatttatagtatattgaccatatttgatgtgtgtattctattaaacttttgtaagagaatttataataatctatgtattatgcggtagtaattttttaaaactgtaaacaaaataaatgtgatatttaaaaatgaaaataaagttatttataaattagtgaagtgatttggttaatggcataagtgtaataaaatgataatattataactaaatattaagtaaaaatgaacattgtttaataattgacacttaccgtaaaaataaagagagtgtaaaataaagtcttcttagagctactcattgaattatttttttgaataagagaaatatttttaatcaattctagtttaaatatgttgcattcaagaccatggtattataatgcaattccctaattagaacaaactattaaatgccctacaaatagaatattttttaaattctctaccttaaaaaaatcctaaatatatatatataaaaaatttataaagtgatttgaattacaaaaaggcaaatgtcgacgtagaaggacatccaaccaataagtcaattttttagccaaaaggtatataaaatcagaatgtgaattgtagcaaaacaaagtgacttatataaggctaaattatctaaaaatttagacaaaaccacttgataccattcccaaaaggcacacagtctaaatgaataatttaaacaaacttatcaaataaatagataaagtataaagttgattagcccactttacaaacaaaatgttaagaaaaatgtccaactatttttctttttgacaagaaataaaaatttgcaagaaaaatttatcttttaaaactccttgaataaaatagtgtccccttaatcgaaattaatatgtttagtcaaacttttagtagggctgagcatcggtcgacttggttggtttttctgtataaaaaactacatttttaattttcggtttaggttggtgcaatctgaaaactgactgaccaatccaaaaatttccttagaacagaccgatgtaaatcacgatttagtcggttcaaaccgcctaaaacagaactttgttgttttttttgaatctataaaaataagaattttcttatttgctgtcaatttctttaatagaaattttattggattgctcgcaatcgagattttacaatgagatgtttaatctgtagatggttgagctatgtgaagtcggttataagttatggcaatactagttaatgtagtatcatcgacattcaaaaaaaaaaagttaatgcagtataatatagtaactaaaaaactatttaaggtactttgcacatgttatatgtgttagaaaaattaatataaaccccaagatcaatttgtatataacatagaacacaataataagatataataattaggtatg

SEQ ID NO: 111145 - DNA, 13706 bp, Cannabis sativa
  modified_base (4217)..(4219): a, c, t, g, unknown or other
  modified_base (5484)..(5489): a, c, t, g, unknown or other
  modified_base (7613)..(7622): a, c, t, g, unknown or other
  modified_base (7697)..(7703): a, c, t, g, unknown or other
attgcaactagcgctgcaaccacactttagaaactcaaatcgtaaatttgaaaaaaaaaagttaaaaaaacagtatatggaataattccccaaaagaatatttatttttaaagcaataaattgatatcaattcaaagtgagctatatttttaaataatgaaaagaatatttaattgaataaatgctattgtattgtgattaatttatatataaaaaaaaaagaatatttaacaataaattatttaaataaaattaaactaaatgacaaaaaaaaaaaaagatatttcgacctcaaatgtttagcctcaacacatcacatacataaaaactccaccaccatttcaactcaatgagtcacactaaaagattaaatacattaaaagaaaaatagattatatatatatagataattatgtaattatagagcatatttgaacacttttattaagtctatttttatgttattttagagtatatttttaaggatatttttagtagtttttatttgttattgtttaggtttacgcttgttttcttcttgtttaagactttaatagttaggtacatcatatgagttgaaatgagagaaaatgtactaaataagatgaattttatagatttatcatagattttgaagttgtaagataaaatgagtgaaaactctaagttttggatgctcaacatgcttcgtttgtgatcaaaaatcaagtctgaaactttaagctaattttttactatgatctgttcactttttaaaaaaaacgttgtgaaggaaagttctagatctatctttcagctttccaaaatattttgaatcgtccaatttcaagctgtatcgagaaagtcatgaccaacatacaatcaatcgtcgtagcaggaatttaaaaaaacattaatcttgtaaaaaaaaaataaataaggtaagtcacaacatggaatagagcattgcagcccgcctcccttcaacaagaaaaaagttaggtttttgagcctagtttcaatttttaagaggagacttgaagggggacgacttgggaggccaaaaacacactgtggagcatcccaattcactctcaagagtttttcttcctatttcttttgaattctaagtttattttgattattgtttatgtttgagatgtcgattatgaacgaaatctctttttaagattgttatgtgaatcacttgaattgttttttatgaaattagataattacattaataagtaaaataaataatggttgataatcataataattgtaatttttctcattattatttctctaaatttgtattgtttgcttaattttatttatttgtctcaaacatttcaattaatcaaataaaaataaaaagttaattaatttgtaattggtaatcaatctttcttagaacgatactctattttatcatcacttgattcaattgcgtatacttacgtattaattttaacaaacaactgtatatgtacacaatttaataacaaagtacaatattgtgtgtaactaaagagaaacaaagtaatacccgcttagagtcttgttattattagaagattaatgatcatgttagagtagtgacaaaacatgattgtaatagtgattacgatcaatggagttattaagcgtagaacatcgttgccatagacaatgatatgaaaaaaaaaaagaaagttataaaaagttggaattttctattgtataaagctaaaaatatttggagcgattttagaatgttaaatcaatatcttttcttaaattgtatatatataaatataaatattaattgtcactgaacaacttatgataaaatcattcttttattaattaatttaataacttacttacaaaaaattatacatcaactaatacataaaataaaacatttaatgtttatttaataattactacaataaaaattcattaacattattggtacttaatactacgataaaaatttataccaataaaaattcatttattagcgtcatcttataatatattaaacaccactactacttaataataaacaaaaattcattaacgtcatcttaggcaccactggtgcttaatcctaaccctctttcaaaatcccaagctagtaaaatccttgaattttagcaccgcttatatccaattttagatttgaggccgaatcaatctaactactgaattaactagaacaaaagcaagattatataaggtaatttcgtctaaaccatttttaatcacctttacttgagaagtttttactcaaaacatatggagtttttcattattataccttccaaaatctttcttttgaccattcaattcaaggccaaagcaaatacaataacggtttacaaaaataaatactacaaattcgtccatgaaatgaaacctgaagaactgaactggtttcatttgactagctctacttctacgaagttcacaagaaagaaagcatataaattttttaacatggcctcataaccctattcaaccacagccagtaagtcactctctttgcagaaacaatgctttgagtttgatcccaaatccacctgattgatacacaaaacaacctcattaatattaaaaaccaatatcaagaacaatctattattagcaagagctaaatttcactgagtctacttgactatatttcacttggatatgcaagtgtgtatactttgtctaaggatacacaatttttgaatacttatacgtgttgaaattcataatcttcagaatttattgagcttgtagctattcattggtatgggaatatagcaatatttagacacttgggattgcagctaaaataacctcatctaagatattgcttttgatttaatactaaaaatgacagaaatcatagtaagaaaacagtaatgatgtcttgaacttgaactataaaggacaccatttgaaagcttcaatttctttaagtaattagtactatttacctcaaaagcatttatgtctgagaaaagaacctgcataagaacaaccattcactccatcaaaatttgagccaatactcttcagtataggaatttatcacactggttaatgttttaaatactcaccttcaaaccagctttcacttccccaacgtcactaccaacagaaagaacctgagacaattgcaacaatgatcgtcaaaaatactctaagatacttatttatttctagagatccttaaagcttttgtactccacaaagacaagagaaacccatggcaggtccctttagagacatgctattcgagctgtgtatactttgctaagaaaaagaaagatttgcttattgaactattaatgagacttgagaccagagatatattaatgggttcgagtatttgattttgtatatctaataaaaaagaagtttatgtttcaattttatcataaaaatcaaatattttctttacaaactaagtatactatactaaacctgaaaaacaaaatataataagtcaaaacgcattcataaaacagtacaaagtgttgggatttctcttacttcacccataagataacgctcaaatttgacagctgatttgggcagtagaactccaccagctgatttctgttgaaagaaaaaacaattggttatggaattgaactatacacgtagggaagcctttccaaaatgtagaaatatgtaaatattatggcatttgatgcatttgatatagaatagcataacaaaaactaactcgaaaagcaccctcattctatttttctctacttttaaccttgccaatgtttacatcaactcccgaaaaagtcctataggctatagacatacctctcaaaagccacacaacaccaatttataacaaatagtaagtcatatcataaaaaaatgcaatatgtttcagcaagagaactagagccattatattttctagtaattcatcttaaaccaccaaaaagatggtatcaggtttcagaactatatttctgtaggtaataacataaaacataaaaataataatattgtttgaaactgactacagggcaaactaacatagtgacatgaaaccttacaaaaaaaacacagtggcatgaaaatacacaactaaaagttttacagggttgaaatccacctttttattttcttctactaatttcttattagtttctaaacttatagaataattaggagattatctaaagcaccatctcgagaatatttcaaccattcatttcaatatatatatatannnatattttttttaaaaaaaaaaccctcttaaataaacacaaatcatgtagcaagcaaggtacactatgagtattccataatttaatacgacacctcaatgtttaacattcaaaattattaaacttaggaacaattggcactaagaatgagagagaaagtaatcaatatacctcaggaagctcctcaagacgaacaaggactctatcagcttgtggaacaacctgcaacccacgaattacaatcacattataaacaaaacccacttcaattttcacccaaaaaagatcgacaaaccaaaatttcatcccaattaccatttaaacataattggtctgacattatacaatacacacacacgcaaaaacagaacttttatggataaaatagaaatggatagagtaaacacacacctttgtaggttcccatgtcttcgaaatggcacacactctgagtgagtttcttcgcatgcctaaagaaaaccgtgaatatgaatacatatatagaaatatatacaaagaaagaaaaaaaaaaaagcatataccgaggcagaattagaaaaaagagcttgaagttacctggaagaagcttgtggttagagagggaagaagagttggggttggggttgcataggaagggtttggggatagtgaggaaagcggacgccatggattaggttgaggtagctgaaagtaaagatagagagagagataagaaagcaaaggtttttgagtttgggtttagttttggattttggagtctccgtagggaagtgttgagtgttaaaactattcgcacgtgtgagataaggtagcacgtgacgggtccgatagttctagacagttcctttcccctctcgactcttttaactagggttgatataaaaatagtggaatttacataccatactttttttaaaaaaaaaaaatatatatctataccgtgataatttttacatttatactagttttatttctttttttagtgtgtttttttattgaatttttaattatatatctttatttattaagatatgagtttataaatataaataaatttaattttttcttcaaaaaatattagtttatttaaattatttattaaatttttaataattttagtttgattttttaaaatatgtgtttataaataaaataaagtttaaaaatatattttaagaataatttaaggtttttatagtgaaattaatatttttatcagatttttaataaatttatttttttttaaattaatagaatattataattnnnnnnattaattttttttaataaaaaggaacagaattctatattgatcaaagttcaggggtaaaaatactacttttttacggtaaaaggaacggaacttaacaaaaagggcataattatgtaaatgttatattttaggggaatatttaacaagccgtatattttagggggtaaaattaggtagtaccgaaagtttcgagggcaaaaatactaattattcaaaaaaattattttcttctctctctcttcttattcttcttcttcgtttttcttctaacggtgagttggtttttttcttttgagttagtctccatatattgttttttttttctctttttctctttttcatttttttttcctcttctctctttttttattttttttttctcacactaaatttttttctatatatatataataagtgtacacttttatatcattttcaatatttttttcactctcacaatttttattttaaaaaaaaaaatacaaacacttagtctatatttttttttctctcttttacattttcttactactcacactcaaactacttcatactatttttcttcaattacttacattttataatagggttccctatggagtggtggacattaaaggcgagaaatgagagacttttaaaatcaatggtcagcggttaaagctctacttgggtggtcaatataatcaaggcaaattcgctatcctcttggcgccgctttaaaagaggaattttagtctgactaaatgacgtaaacgacagcgctcttgagaggcaacccaaatttttaatctttgttttagaattctatcaagacactcatgataatttctatgttttatttagttatttttattttgaaaaaaagaagaaaaaaatatgtaacccgtaaaaatcatgaaaactaatcaaaagtataattttcggagtgtcagggcactacgagttccatgttgaggtgctagattggccattttagacagagaaggagggtctgcgaaaaagggggcacgggccgcaacactacaatgtagcgtcgtgacccctgtaacatcagaaaaaaaaaatattttaaaagctcggaattaggacatgggtcgcgacactacaagtgagtgtcacggcccttgaacggcaaaattgggcagaagagcttttaaatcgaccccaaaccattttttttattcttcttcttcttctactcctccatgcctacacaaccctaaaactaccataaccaccatattccttcctaaaatctcaaatttcttcacccaaaacactccctaaactttcttaaccataacccattatcaatttcttcatccattcctaaaatttcacaaaatttaaccaatttttcaagaaaaaaaaccctagaatttgaaatagattggggtccttggaaattcttgcaatttcttagtggatgagcatggaatcaatcatctcaatggtttcaagatacatgtaagtgattttagtcgtttctctttgaagtttttgaattatttagtgtaaggtgtggttggaaggaagatattgggtattattgtgaaatctttgaaatttagtgtaaggtttgtggattgttttggattgaagttggtgtttgtagtgaattgtgaatttgtggaaagttaaaattgtaggggaggtgctgcccaatttttctgagatattgttcagaagaaattgtgttttttttggcttgatcttattaatcccgtatagctaaccgagcctgaagacctgagcaaggttcgtcgtaccgaaacccaaacccacaacaaaacccaccactaaaccaacctccatgaaaatttgttaatgatgaggcgattgatagttataagaaaaattagaagtgggatgattagaaaacgggggtttgaattccaggatgagccttactctcgtgataggggttatgagataattcagggaagaaattgtttgaagaaatgggtaaaagttttgtgcattcgagtttgtacaagaagctaattttagcatggtgtgtgagttttttttccaactatcctttctggaacgacaatactgaggtgaatgttcgaggagtttgagtcctagtgagcatttattggaaattattttaccaagannnnnnnnnnctaacatgtatgtttgattattaattataatctaacaccctaaatatgaatttcttaaaacaatgaaataaacannnnnnnagtttagaaaaccttacattgataacaacagaataatatgtctcattccactcagatctctaacccttattcctctctaagttaatgaagggtaagaacctaacttcccatctaaaaaagatgagtgtttgaaataccttggcttgaggatacgacttaatagagaattatgattggaaaagatcaaccatgcttgcttggccaataaagcttcgttgaaatgaacaaaaattttaaatcccattccaccttcaactttcgattgacaaagagctttccatgttttccagtttattccaggggatgaagaattagacctcgagttggcggataagagatttagatagacaaaagcagctcatagcgtatgttggaattgattgagcaaccgctttgagaagaacttctttgcctctaatggaaaataactgttcttgccaagcagagaggatgttccacaatttctctttaatttcaccaaacaaaacttttttatttcttccagaataagatggcagccccaaatatctctcatgacatggcttgatcggcatttgcaatatctggtgaaggtttctttggatagctggtgtagtgttctgcgagaaggaaaggacagattttttagcatttaaactttgtcctgaagctctaccgtaaaaatcaagagatcgcttaattgccatagctgatcgttggttagcacggcaaagcactagaccgtcatccacaacaaataagtgagacaccgtaggggcaccacgtgcaactcttaatccttgaagattacccagttgttcttcatgttgaaatagccatgaaagtccttcgacacatataataaaaaggtagggtgacaatggatcaccttggcggattccacgggtaggcataacttgtccttgtatgttgccattaattgagaaagagtaagtgacagtactgatgcaacaaagaatgagattcacgactgtagaatcaaatcccatagcagtcataatatattgaagaaaataccattcaaccctgtcaaatgctttactcatgtttaacttaatggttgcataaccttctttcccttgtttcaaatgtttcagagaatgcaggagttcaaaagctactaacacattgtctgtgattagacaagattgaagaaaagcactttacaattctaagataaccaaagagaggtaaggcttcaaacacaatacaatgacttttgaagccagcttataaagcacattgcaaaggctgataggtcgcaattgagacacagaagttggattcttcgttttaggaatcaaagttattaaggtgttattgaaacaagaaggatccccaccttcgttaagcacttccaggatagcttttgtaaccaattctccaacaatatgttaatatttttgtaatttcaaaatttttaaaaatagttttttctttcaagaatgagtatgaaattaagggaaaaaataagaaaaaaaactccaataattatattatttttttaaaaaatcactaaaatatattggactaggatttctttattgggctcttatttaaatttagatggtatttttaaaaatcagttaaataatatgtgtattttgataacaaaaacttcttttatgggctttggactagataagttctgagcgcaggcctagtctatcttagcccgattaaacaaataaataaacaataatactcatataacaaccttgaaagttggatttatctaaaaaaaaaaaaaaaaccttgaaagttggaaaaagaaaattagaaaaggtaagatggtcattcttatgaccttaaataatttgcgtttttttttctaaaaattattgtgctttttttagaaaaaaaaacgcttataatagagttttgtgatttattaaatttgacatgataattaataaatcctttgaacgaactcatgtgcaattttgtaattatgactaaacattttaacggttgtttttttttccattatcggcgattaacaagtacaatttggcgttgtgactcttaagtttgaattatgtgtcgtttcgaggtcaactaattgtcgtttatgctatttctgtgtgagaattgagaaaagggaaaggctacaaaaattccatttttccaaggtgttgaaatcaatcagctccaataatccatttttgttttctttttttttttgaaaaaaaaaaaaatcagctccattttttaaggaaaagaattccaaagagacaactcacaacggctgtcgggaccacccaccacccatttttttgtccttaaactctgcaacacttgtaatcactactaacccacttttcctccatacactctttttccctggaaatttttctccaattcctttcccacttgaaaatcacattaaaataacaaaaccctttccttaactcttggtttctttcccttttccttatcaaagatcctttttttcccttttactggtcattgcatttgggttgtgagttgttttggtgtacaatgttgaagaaactttcttgcttttgttggttccttctttctcaacttttgctagcggctctagtttgctccaaggaccatggtaatctttgaagtttagactttctctctctttacattatattgtagcttcttaaactttctttttctcaaaatacttaagtttgtttcactgttcttacaatttttttaaatgagttgtttatgacatttatgttatatgtgtctttgtttctttttggtgaattatatgtgttaatgttaaatacaagcattactttgtgctctgaacttcatagatgtgctgcactaaaagaactagttgagtagttagaaatagaatgataatgattgaactaaatacagactacccaactactctaaccttttaaatcaagaaattttagcacttttcgtctaacttagttgttaaattagtataactcagctcaatgagctctcactaatttagaaccaaagaaagatacttgaagaaagaaaaagagaagttaagtatttgagtgaaaaatctcttatatttttctaaattgtacagaggcttttatacaaaaaaactaccaaactgacagcccctcgaaaacctagaagtgaaacatcttcaattctaattttgtttctaaattcttcaaactgtggctttggtttaggtttcagcaatctggtcttgctgtgttggcacttttttcacttcattttccttctgcgcaacttctctctaacaatgtataagtctggtcctagcatggaagatggggttagccataagcattattttactgagattattacaccaaacagttgtaatgttaaaaagagacaccttcaattcataaaataaagatgtaaccaagtcaactctgaggctacatttgccaatcttctatactcggcttcatatagtatgttgcgttttggattgtgaaccaactaggttagaaccgaagaagatagaaaagcccgatgttgatattctattatctaggtgtgaagccttattagcatctcagaattcttttcacagaattccaaagaacttgcaaaggattttgcataagaaatttccttgtttacactcaagttttttttgggtctagtgattataacatgctacaatgctcgaacaatcgacctatacattagaacactctcaactggatcactgccatatgctgataatctttgaccaattgtcataggagtataggagtagatttagaaactgctttttagatttgcaaagtatatccttaatatatttagtttgatacagtaaattcatctttggtgtgagtaattggaaccttagaaagtagttgagtttttcgaaatccttgagagcaaaagcaaagttaaaggcagaaatcaaatgtgtaattacactcctagcactccctctaacaatgatatcatccacatatacaagtacaaatgatagactttagactttctcttagcaggtacaccataagaatagaataagtttgctagagggtttgatgttagagtgtagctggggtatagggtacaccataagaatagaataaatagagggaaggagttcattttgggggaatggaattatttggtaaagggttgtaacccaagtgagagagaacagggctctcaaattccctggattattttcagtatattttcttcttcctatcttgaacacccacacccactcacactcaatatcttttttcctccctattgagtgtcaaatcacaagtcatcagtcatggctgccttaaattgttttcttgctgtaatgtatctaccacagattcaggttctatggtagccacaaagatctaaggtttggagtgtaataccagccatttatcataatatgtgtatttgtgtttgattataaaaagaaaatgtgaaagaattttgcaattttttttttcttttttaagctaatacagtcatatctatatgtattttgaattagcctcatatacataataagtaggtatacttctcttcatcagtgacaatgtgatgacaattctgaactttaccacctttcatttcctcaagtcaccacttaaagctcttatttaacatgtacaaggatcccttaaaagggaaagaaaatcaaataataatgacaaaataaaactctttactacaccctaaaaatatggaatcaataaattacaatagttaacttacagctacacaagaataatactaaaaatagaatgaatttcctacacttctgttttccatgctagtttttttaatatcctatattctccatagtgtgatcctatctaattgttcaagtatcaatatgaaagaagaatgctaatcatcactattaatgctgttttatatgctctttctttcatacaacctattgttatttactctcaaagaacataaaacaagaatcataatcctttccttgttcttttcaaatggtcatatatatttgcatttgggattgtaattatattctgacattaagttgttacatgctgcttgttccacagggaaccctgcaaacgacattgtcaacctaatcaacgacaaccgaacatctcataagctttccatactaaatgatagtccaggactcggttgtatggccttgcaatatgctgaattatgcaagaccaactgcacagccaacaataccatagactgcaaaccatcagaagatgacttcactgaaatattcgctccaaactgcggtgttgagctaccaacttttggcaccattactggccgcatagttggttgtcaatcaaagtatctcgagccaccattagccttttcacacgttctagccaaagacaagaaggctgtatctgttcttcaaaataaatctcattgggaggtaggagtaggcatggttggagtccataaagggcctttcttctggtgtgttctgttcagcagcgggcgaacaaactccacatttgtacttgaaaatcgcggtttggggattaaacaaaagaaaggttgttacagtggaagcagcctcccatgcagttcaggccttaagttggctccttatccaagtaatgttatgattatgagcttgcttgtttatcaactacaacagttatactccaatgtattcttagcaatgtaaaaaaaaaccgaaactcacaagacaatgtccaaaaattttgtcacatgttttattgaaacttttatatttgttgagcaaccaaaattgagtttatctgtaatgttatttaaattcttgcaagtctggaaaatggtcaacaagacaacaattatatcaactttagagtttaaccaagtattgcttcttttgtttaaagattcctccataacaaagaaatgattacaactgcaagtaataaattaactcgaaaagatactcttaaaagaaaggggttttttcatttttatatttttaaacagtttttttttttgcattttacggaattctacatagaaactcctagcgctgtaacctaaattgcaacaaaaaat

SEQ ID NO: 111146 - DNA, 3746 bp, Cannabis sativa
attctcatctttccccatcaagagagaaaattagaaaactctaagtcttgttttcttggaagatcattatccaaaaacaccccaaagattagctctacaagatggattaagatcatcactatctatggattaaggtacacttctactatttgagtgtttttctttgaatcaacaaaggtattctttagatttatgtttttcatacttataattatatgtaatatgtttatctatagaattgaatcttgttattgcatattttatgagtgatgaaaaactctaacattatagagtttcattagtaggcctagagttcagaattatatttcaggccaataagaaaattttgcgacaaattcagctacaataattatgactaataactataagagcactggtcgaatctagcatatcgacattaagaatttagtcataaaaaggcgtgataagtggtcattaagcacgcaaattgaattggatgatcgcatatctttgactaaaggcatgtcgcaacacaaattcaaggattgtaaagtaaatatgggattctgttaccccatatgcagtatttatttgtacaactaaaattatgcaatgaaactctacttttgatattttctcatatatatgtgcatcttaatttaatatgagaaaattatcgtaagaggactagaataaacataaggtttagggtttatttacttaagtacattcccacattaaatacattgttatataatgaatatatcgtaatacatggaagataattcgacatataatgaggacctatcactatgatatatatatatatatatcatgtaatgaggaacgttggattttaagtggtaaattaatttaaatactgaccaagtaggagagtgttagaatattttttatatggtaacaaatcaaatattttatttggtttgttttataaaatataattaattatttactaattaattaaaatattctaattatggtcagatttaattactaaatatttcaattactcgatttaattttcagaattaatcgtcaaaatatttagacaattaattatggcagagaccttgatggtaggtctcacctatataaatatagggtctcggtccccgagctcactactcattttgtgaaaaacagtaaatccatctaaagagagtagaaagagcttagaagtccgattacccacactaatcagtttctttttcgtttgcaaatcaacatttgtgtgggattgaagctcaaaaaaattcaatggctggaggtatttcgattattattcatagtgagtatatgtttgattaattctgcattttatacatgatcatatatgcttcatttcatatatataaatttctaacaagtcttcctcttcaaaatctatgtttaagttatatttttacaattttgttgttgttttgaatagatttaatgatgccttaatgtatttttttgggtttcataaaataattaaatgtagtatttttagttttttacatgagctcactgagcttgacaagagcaagcttaccaaaatctcatcgatagaggacattacatatgttacgggtgggttcaccaagagcttacccagctcactaagcttgacaagacctcacgatagagtatttaatagattagggcgggctggctaatagcattgagctcactaggctcgacaaaagttcagtgagttcttgttgagcctggtgagcacatgtcgagctcactaagcttaacaagagctcacgatagagtatttaatagattagggcaggctcgctaatagcattgagctcactaggcttgacaaaagctcaataagttcttgttgagcatggtaagctcatgtcgagctcagtgagctcttaaggaacccaaacctatgaaatacttcattagtgagctcttttgtcgagtgcctagtgagcttagtgagctcttggcgaactcacccctaaccttaagacatactttaatagtgagctcttggtgggctttggtagtcgagctcagacctaaaaaaaatcaaaaatcttagatcttaaaaaaaaatgacatcattagatctattcaaaatactaaaaaaaaaaatattaaaagagcctacccaaacataatttttgaagaggatgttgggatgatttggtggctgggggcgaaggagtgttctgattggctttgggattgtgaccttgcttttgtgtgagataatgaaagggaaagcttgagttagcaattaagaatttgagaagttataaggctattttggttgagcatataaatataagaaagatatatattcttatatagtataaaagtaagagattgtttcttgaaaaaaaaaaaaaaaaaagtgagagattgttttgaatcagtaggtgttcactaaccataaaaactcaaattttccttttatgttgactacatcattcctcctaccaataactacaaccccgctctctttttaccattactatcacgatggcaccacattgatgatgttatcacctccatcactattgcagtactaatttattttcttttatgttgtaattactcaaatttaaaccacaaagaatattcatttaaaacattaatggaaaggtttttgaacatatctaatttctttgtttgtttttttttttttttatttgaaatggaaacatcttatctgtgttaataggataaagtttcatcctattgtgagtatagtctcgcaatgcatacccaatttcatgctgttgggtctttgtggtaccaaaatgaatacatacccaatttcatgctattgggtctttgtggtaccaaaatgatgcatgtttcctaattgcactaagtatacatacatgtaataaacatacttatgcaagagaacgtaacagaatcacaatgtaggatccacatacgtatgcaagcataaaatagttctcctccgctccatttgtataaacacggttataatgtgcgacaacgacaactacgattaaagtgtacacctaattaagcctagtcatttacgatgagagacttaaaatttttactttgtgaaggctaattataaaaacatatatctatctagttccaataaatattataattacttttaataaatttatttaattttgtaaagattttattattataaaacatatttgtgaagactttttactattttggtgtttgatttcaaacaaattaaaataaaataacaaactaaagcataatttttttctcaattgcggtgcctaaatgagagtctgtcacgatcctccataacccacaagattaggtaaattaatccatggacgcttgacaatgcaattaggagtacttatatatgttaaaactttcataaaagaattattatattcaaacataattaatataaaaatttcatttgtatataaaggagtgactcaatcttcgaataaacttaatcacaatcgtgtgaagtagagaaacaagttttgttgaactactataattctcatgtctctttgttattattattgctattgtgatttcattcatgagttctcaagactttaagcggatactcgcatatattattacttttgagtattcttgaccggtttccttgattatttacgatattgtgtcttgtctaaattcctctaataatattatatatgatttagggtgattctacaatgcaccccttaaaatagatgtattgatgcaccattaacttgtttcggcatttagaagaatttttt

SEQ ID NO: 111147 - DNA, 1855 bp, Cannabis sativa
  modified_base (839)..(845): a, c, t, g, unknown or other
gttttataaaaataaattttttaaaaacaaaaattttactttcattttatgattaaaaaaataaaaaacaaaagtgttatcaaacgatacctaagcttcttaatttgtaggtgtgattaatatttatttatttaagttttagccctcaaaattttatttaataaaacttatgatcatttttttccaacgataactgtatgtgatcactttgatacgtacctaactaattatattatattatgtatatatatttattaaaacaataataattatgatacagttaaattatatacagtgtaattaatttcaaccacacaattaaaaatgatgtttcatatataattatttacgataaaaattaaatttttatatataaatttagttatttaacaatttttattagtttaatagaatattttaaaaatatattttgttaaatttaatgttgttatagtagaattaattttataaatatataaaaaatattgatattatttattgctcattaatttaaatatatataaatattaattaatattatattgtatattaatttaaatatatataaatatgaatattattttttttaaaataattaaacttatgcttatttaaattaatttaaatatatataaatataaatatattattttattgttgttttaatattggggtatgttgatcaattttgatattctgaaactttatattcattttttcttttaaaaaaactttatatattgtttttttaaaaaaataaaaaattaataagtagtttcttataatttataaaattttaaattaaattacataaaaaattaaaaatataataataatannnnnnntaataataataataataatcttgtatatataagtgtgtatataaacaaaatgtctaatcttttgggtgttacccttaataaaaatttatatcagaaaaataatttggacccaaaaaatatgaagaataagagtaattgtgttgattaattttttgcagaattgttaattaattaattagtaagataataaatatatatttattataaaaggagtgtacgtagctagttaagtatatatactattcgatcgttaattaatttgtttctaatcctagaattgataaaacctaacctactatatagtgatgaaacatcaaatcagatataaatatgtatatatatatatatagctaggttataaatataaaataatatatgaaccgtgaaaaatattcagtaaagtcatgtgataatatataaataaagagagggagaggtatatatatgtctctttaattattattatatatatctatatataaatatatgtgtttaaattctgtatcgatcagagaccatcccaactgaaatctgttttttagccaattaatttatataacaaaaattatatggggatcgacaaatttttctaattcatcatatcatctatatatattgtcagatccatatacgtgttgttctacatatacatgtgaatatttacgtatatgcatatgtatacgtgtcggtactatagtatgatatatacaatattatttttattttaatatatatatttaaagtgtattattatgacatatatggggtgaagaattaataccaaagtcgatttttttttagcaacgaatatttcattaaacataattaggtaatacatcttgaataattagaatatgaaaatgaaaaccatacaagtcatcataaacaggctatgaattaggcacgttttaagaaaaatttgataacaaaacaacttatgtttcataattagggctcgtttaatacgttgtattaagtcgtattttattgtattatattgaattagatta

SEQ ID NO: 111148 - DNA, 6985 bp, Cannabis sativa
  modified_base (6946)..(6951): a, c, t, g, unknown or other
tctctctctctctctctcaagaactgcaacgacgagctcatccatgatcaccgcctgtaagccattgttctttaccactcagtatttctcatcacttttcttttgttttggcttttcattgattttcagctactgtaatctactttcctttatttggttttgtacaacatcactctcggatctcgtttgtaacactgattctctattctctgtgtatcggtttcgtttccagctagagaagtaaatttcaatttaccattctatgtttgtataaaatcatagtcatgatcagggtttcatctgaattcgatttatgatatctaattttgatcattgttgatgaagttctaattaagaaaatcatgaatgttgtgagatatttctatgaacaaccgattggtatcgtaaaaattaccactattcttttcgtgatattcgttagaattaagtaaatgtgggttgcagctgataaatatttttgagtatatgtctgcatatttatgcttcgtgttctattcttttggaaggggttttcatattttatgtaagaacggaaaactatcctaattcaagggaaaatgagatcacagaatgcttttgtttttagcccctttgttcttcagagacaatatcgggtttcggaactagctagctcctttttcattttactgaattttgatcctactcttcaggttagagccccatcgtgaatcttggtttcacctccccagctgaattgcaaggatgggggttgagtttgactcacaacagttgcgagatgtaagtaggagcaaacaatggtttattagtattatttgattcgccgccaagggcttctttactcattttagtactttcatacgtgcttgctgactatgctggattcattgcaattcaaatcaaatttgactatgtttaagaaattgcaggaacaaatgaaccattactggagtttaggaagtaataatcatccatcgagccagtccagaaagatatcaattgggattttggtagattcattacagaatagtgcttcaaaggatggagatattgcaaagccgaatgctgaaagggttaagtatgcttctgatgcaaggaagtctgcaaaaggaaaaagcaagatcgaggaaactacaactccccagaaaactaaacagactgaagcaatagagcccccaaaatccccatggattaacacaagaaacttcttcccaaaagcaacaaccaattctgcgactattctttgctcagaacgaatatctaattcaccagccagtaaaaagttcaatggggtcacatatgaaaggaagggaaggagggacggatccagagagagagagccggagtttacctttgcaactatggcagatgtttcgaaatcagataaagaggtgatcgagaacaaagcgaatgcaaatggaaaaactgaaaatctacgactgaagctccaggagatactgggagctgtttcaacccctaatgagcagtctcccaagtctccaactcccgatttaggtgtcaatcgtataaatcaagagcaagcattagatgaaatgggtgatccagttgataaccatgtacagagtcctgagaaaagagaaccgacatttgataagataggtggtacactgtccaagcctggacagagtcgtgaaaacagagaacagacatctgataaggcgggtgatacatccaagtttagacagaatcgtgaaaatagagcacagacatctgataagatatgtgataccgtatccaagccgagaaagagtcgtgaaagcaaagaacatgcatatgataagataggtgatgcactatccaagcctagacagaattcggatacaatagaaactgattctgactctgattatagggtcaagagacctgtgactcgttcttccacaaggaagagggctccagccaaggcgcaaactagaactaaaaagagtggtcagctttctggttgcaaactgaaacaacaagaaaagaacatttcctattgtgaagataaaattcccagaagattaagtaatgctggaggtagttcctccatgtttgcacaaaagaaaagtgatcagaagagtttcagagttgagccacgtactttatttcacgaaaagaatatagcagataagattcaagaagtatcacataggagtgaaacatcaccacctgctttaaaaacatcttcacttggtaaattcagagattacaatggttttgaacctgagaaagaagaagactatcttcgagtgaagaagaatatctcaaacaattttcctctaagagataacagagacaatcagtatgggaatttcgagaatccagataacagagatcaacacaaagaaattggtacgccctccatgaagcgccaagaaaacagtggtagcccagctgtaaggaatgttgtaaacaaagacattggtacgccctccatgaagcgccaagaaaacagtggtagcccagctgtaaggaatgttgtaaacaacctaaaagatgggtttcgaagtccaacatttggaattaatacacctctatcaagttcttccctcagctcaatgcccaattcagagaaaatgggagaagttcgtagcttcagggttttgcaaaataaactatttaactgttctgacgatgcacagatagaaccttcagtatccttgattaatgtaatgttcctactaagatatgatgcttaagggttcctgtttttagtttgaggcttcgttttctggctttctgtatttccttattgaacttcaggttagtgcagagaagcttaagggttttcccaccagaagagcatcaactaaagcgaaagagaagtatgtagaaactcctctctctgaatcatctgatgatacacgcccgccgagctctgaagaaggttcaccgattaatgataaatttgaccgtatgtttcttgcagatgcttgttttaattgtatcacaatgaacgctacaattaaatatgtatttgtgtactttgaatcttatacattttatcaaaataaattagcttgtcatgttctttaattcacctccctggtgctaacatgcgaagaagagaacgtatgagaactttgatgttttgttaaaacataaaaaagttgggtttatcataggagttatcccaaacactgcagtcttttgcaatgccttttcatcttgtaaacctctgttatagtatctgcatctcgtcattgttgtttacatgtgaagcttgagactcaagggtcttcaaagatcgactctgaagtttgtgtgtgatcaggttcacttatgaaagagttgaacggagttcagttcaatttgagctcaagccttgtataactgcccaatgagtacttaatacattagtaattatcttgtgcaggttgcagagaaagaaactcattgcttccagaaaaaagtactgctaaaagaatgaagttcttgtttcgttcagctgaaaagcttcgtagcgttgaaactaatgttcaattagatgatgtcattactagatcaccctctattaaaggtcaatttttatgtatttgtatattcggtttccccatttttattttttgctggttacctgttaccacatacaaatggcaacaattcatcccatgttggcacaaattgacagggaggggagaaactagttggacaccggaacgacagcacgaccaagaggacggactagctaggttttattttctttctgccaacttgataagagatatctaataagatttatacatatacatatattaaaaatatatatttgcttttgttgtttctttttacaatatttcagggctcttgaatcgtttgcattggagttacaaaaacttaaaagcaaaatcaaatcagtaactagcaagaaatcatccgaaattctgatgtctgttgtagaagatatccatttgcgtttgcacaatgtggagtctcagattcaaacagatatgtaagtactttcaagtgcatcttcatagcgaaagacgatgatttcttaagtatgctcttaatgatttttcagggggaagctgaaaagcgttagtacgttaaaaagaaaacggatggatacaaaatttgaaggtaaactaacttgatctagtctttcatcatcttctagcaagtatggttttgatttggttgccgcactatttaatgatccagtatcagttttagaagctctctcttgggttgaaaataatgtttctgatatataggcgaaggacaaagttctgcagggttgactgcaattttaagaaaagtggtaaatgtcacttggtatagtggtgtggtgatgttccctacagaccttttcaactaattaaaagttacttagaaattaacatgtatagttgggggattcatgtcggcttcagagaatatttgaatatgtaaatgacccatccatgtagcatcatagttcattcttactgtttcccacgtcccaccacacctaaaaagatttcgtattataggccggattcatacactataaaagtagaatgttaaaattttgtgctttttatttttcacccttaaaagaaattaaatgaataaaataaaactttatgccttttgagctagtgaggtgaatttggaaattaactggagatttcttttccccttaaaaaagaaagaaaaaagttgagataccttcactttagttggtagaggaccacggttttaaggtgcccccttacaaaagtgatctcagaatcccttgtatatgctgtattaattatttaaatttcgttgtcacttgtcagtgcaattagagaatcagttttgtgtgacttaatagatgagattttcccccttgttgaaacacataacaaggttcttaacttctattttgcagagcaacaagaaaaattgcaattgatttatgaaaggttcaaggaacagatcaatcaacatctgcaggactgcaaaagctcatttgatgggctggaaacagatcatctacagttgaaagaaaccatggagaagcgaagtatgtcaactttcatttctttatgcttgcatatttactcatagccaaatttgtgtctataagctcgagcggatgattcaatgaatttctggttagaagtgcagctagcatggtatcaattatgtagtgtatgtatgatagtttgagatggatgtacaaaatttagtcttgttgaatactttagcatccattttttatagggttgtactattttgaggtggcgtataagaatggtaatggtacatttgctaaaagctcatatgcaagtagacatgatatcacttctttgtgctttatgcagtaaggggtacctaaatttcctctaggaaatagtactctccaagatgacaaattataatttagtatgtctactcacctacgttaatgtgagcttttactgattaagataaaatctttcccatctaagcacagaggaaatgttcgcctttccttttcctataaagaattttgaagccatcccatccatgacgtttttgactttcatttaagtctgtcactggaacactatagtatagtctgcatttcattgcttgtaataccgtattgtaaactaattttatactgaattctggtactgtttttctatttacagaaatatcacatcgaaagcttatgttgcaagtagaagaggcaatccagaccctattaaatgatgctgaaaggaaaatcacggccacccacgaggcaagttttttttttccctttaaatttagtacaccttgctctgtgaagaagtcaagtaattagatatttgcaatctcataacatgttataattccaattaaatgcagtttgggcgggaaaagatgcttcagttgaaacagattgtagctttgtgtttgcaagaggggatcctttagtaggtgggcataaatatcgtctatctgtacagataagtggtaacgaagaagatgggacaacgaaactctcttcatctcttgtttgtttgtgattatagtgaatgtaaaaaacttgatcgtttgctggacatggcccacaaagtaaaattggaatcttattgttctttatggtgttgatatgcacttatttgtctggaacgaggagagttacaattgcaggtcaggcaggcaggcaggcagatggataagattgcttcattccattataggacttgtttgttcatctcgacctcatattaaacagtggtatatttagtgcatacgtagtagcttagttagagtaaaaagaccctttctttgattgtttagtccatacctattacctcacgagtgttgtagtgttggactgtcaacatagggatggatggcattgattggtcccctacttatccaatcttaggttgtgaaattgaaaggaaagaacacattctctatatctagcagctaataataataataataataataatgacttatttactgttgttagtatagaataaatgtaaatttttttctttctaaaagcttgggtcgttgtcaacttattgtctgttagttgaactgaagtagaggaagagtagggttaaagggacagaaaaatgcaagatcacctgaatgacacgggagagacacgtgaaggagagctattttttcttggtccttgggttttgggtctcttcccacgattgggactgctatttgatatgtggggcctccacatgtcccacaattttctaatttgcattcaaaattaattttatttaattaagaaagatactacacttttctacctaaatataagagtagagcaacacttttaaattacgtaaaaatttataatacacctccccaaatcgttatttttatataccttttatttccttggcatctaattcttaatcttcttcatttcttttcataattttgtatgtatactatttataattttttaaaaacttctaaacaatacaatgccgaaaataaaatatagagtttttttttttttttnnnnnnaaagaaagtatgttattcaaatcaaatcaaatca

SEQ ID NO: 111149 - DNA, 1667 bp, Cannabis sativa
agatttactcatatttttaaggatttaattatatatttagtctattattattatcaatagtgactttccattctttttaattaataattatttattatcaatagtgatatgatatttattacgaattagtaagttacaaatattgtataaataaccatcattttttcactaagagtctacctatattatatttttgtttacattgatttttctcattttccaaaagtaaaattttggcacgaaatgtatgggatgtcttttgcattaattcattggagttttttgtttcctttctttgtcatcattatgatccatttctaagtactcccatgcaagtaaaattctttctttctttggttatatatatattaatattatacataatgttcaatagttatatatctacatgatctatagtattggaatgatttctctatctttattttaggctattaaaataatatttttgatgagagaaaaaaagttagaaaggtctctcacatgtagtttgtaatgcattaaaatgatcatttttttaacaaaacaaaactaagaagaagaagaatttttgggtcgatgactaaccaaccccgattcaaaaagcttggcgcaaggtgagggcggagtgtgaaaggccacattcagagcggggcagttgagggacgaagtagagcatggtaggaaaaattagtttttttcagtatttttttttattttctatatgtattttaatttttttaattattttttttccttttttcatctcccttaattaatattaaatctgtgatatgtattttttttagggaacctataatatatacttaataactataaaatgtttttttttctttggtaccgataatcgttcctactattatttggtatttaagtacaattacaataaaagaaaaaaaaaaagtattgttggatacaaattacaattttagtataaacttcttcctcataattaaaaaaatatatttccaattctaagcattacaacattatattatatatatgcattatataataaaagtgtattttttttattttgtagtatttttaatttaattttttttaatactaacttaatagtctaataccaaatttatactcattaattaaataaaaatagcaaaattagtaataataattgtaataaaagcatgcatacattatttaaatttttatattcattatctatctatataaatataatgctattatgcctgtgacgtagcggtctcattaaatttttttaaaattttcttgctctctcatttttttaattttgttagacttttgttaatacttttttttatttaatactaactattaataccaagcaactgaaaaaatagtaacatatatgtcttttcatatatacattaaaacttatttagaaaaaaaaaattcaaccaatgaaattgaaagataagaaattttaagaggcaaatataatgaattttaatagaaaaattgtggtaattaatttagtttttatttggcttttatttaataccaagcaactaaaaaaagagtaatatatatgtcttttcattatactaggtgaatgtacgtgccaagccacgtattgctagtttcatttaagattttagtctttttaagattttgaatatattttatttttaaagattacaaat

SEQ ID NO: 111150 - DNA, 2639 bp, Cannabis sativa
  modified_base (33)..(53): a, c, t, g, unknown or other
tgttagaatttttttactaagattagacaaaannnnnnnnnnnnnnnnnnnnnaatagttcaaggggaatttttaatggccaaaaaatttcaggagcacgatttaattagtacatatcaaagttcagggagaaaaattactaattagccctaatatttttaggtctatctctattctatctaattatatattagacgttaaattttgtcaaccgattcaattaaattaattttagtcattcgaactaatccaacacccattgaatgtaattcatttatacttattggattagtttagatttgtctaatattttagacttaatcgtttttaaatcgaatcagtttcatctaatactttagatttaatatttttttagattgaatgtgattaaaaaatgaaactgaaattctaatcttaagtttcatgcacatatatattttaagtttaataatataaaatttaattatttatctaaactaaatgaacatgctaattagttcaattagatgttagattgtattgaattttttgacaacaccacattcaacattcgatcttgttcaattggatatccaaaaataactatgatccaatccaatcataagtagggttggaatttcatattatcgcgtcgtgttcgtgtcgacacatttatgatacaacacaattaaggtaaacacgaacacgacacatttattatacgtgtcaaaacctcaatcaagaacacgacacgtttattaaacgtgttgaaacctcaaacacgaacacggcacgcttaattagtaggtcacatgacacaaacacgtcatgatacaataacacgattatgatgtgattaacattataaatacaaaaaaaaaaaaattgagcttttttataaaatatatgaagattaattcgtgttatcgtgtcaacataattatgacacgacacaattactaaatgtgtcgacacgacacgacacgattattaagcatgtcaaaaaatcaaacacgaacgtgtcacccaaattcatttatttcatgtcattttcgagttgtgtcgttgtgtcatgacccatattgccagccctaatcataagtggatatcaaatgtttgagggtcaggtgtgattggattagattaatttatgcacatgattagttgtatttactttttgtactaatatacatattaaaatgttattgtacattagatcacaatgttaaatattacaacaaatataatattttatcatgttataagattctttgattcacttgttaaagtctcaccgatatgatacttacgaattttgtgttagatgtagacatgatcgaatattggttcctttcggtgttaattctcaaactgaaaaaattgtgcacaaatttagattcaatctaaattactaaaaataattactaaaaaataattttataattactaaaaatgcaatttaatatttgtaatggagtaataataaaatcaataaataagataaattaattgatgagactcaataaattatctaatttattagagtttagtactatagtttcattgtccccaattaaagcaccattttataacacaaagggaatgaatgtcaaaaaataaagtgttagctcagtttttagttaacaacacaaagtcaaataaataataatatgattgattattataacaagaacaaatatatattaagcaaatgacatcaaagttttatagaggtttcggtctaatttttttagtaataacctactctccatttcgttgtattttatataaagtattcaaaattcaatggacctgagccaaatgagtttctcaaatactttctagaattcttacagtaatttttgcagcatatatgtttgaatacagagaatcgaatcttattttatgtgtaatgggttagtgtttattggtaaaaacataatatttcccataaattttaagtcaaatgggatcatttaaggcctaatcttcagaaatttgagagttgatctcgcatatcccattttgactacatcatttactcggcatggtcgagctatgatatatttgttaattgacaaatatataataaagattaaaatgtgatatattatagattaatatatattatatgttagagattgtattatataatatttaatataataatatacataaaagttataatatatgagaagttacaaatttgaaagtagattataacctaaagattataattgataatatgtaattaagtaagttattacatatgaaaattatgaagtcaatgagataagttactagctgttagaaactggtacaccactcatttatattatttatttaagagttggaacgttgggaattaatgtagctcggagaggagttacaaaactcaaaattgagttgtttggaaactgttgttttatggttgttttaatcacttggagctagttttggaataacgtccatgaatgtgcataaatttattaagcatatttctatctttctttcccttacttttttttattcttttagacacctattaaagtactagaaatagtcatgaggtgaaggaaattcgattttctaaagtgatcctcaaacactattgtaaagcccacttagttaatttggaaattagcagttgtttatgatta

SEQ ID NO: 111151 - DNA, 7409 bp, Cannabis sativa
aatatttaaaattctgtaaaatcgtatttttgtaatttttttgttgtttttatatttttggaaaataatccaaaaaaaaaaaataatagggtaacacaatgtaatataatatataatttttaaatggagagattcaattaagattttataactgttaattacccaattattttcatcaaatgtaaaactagctcattccaaaacaaattacttattaataacctataatatttattaatagtatataatgaattacttaagtattagtcaatctgtagactaaggaaattaatcatgtaattctaataatatataattgaattaatcatatagaagaagtgaccgtgttcaatattcccaattaatataattagtaacgtaattacacttataattaatttaataatcacacattcatatatatacctatatacccaatgcatcaattcaatgcatgtggtccaaatattggcatatatataaatactatatatatatatatatatattacaaattgtagtcactctcatgcatgcctagacaatgatctatcagtcaaatgttatcacatgtacaaaaattaacactacatatatatatggtcgcaattaattaactaattgataagttatatgtagatatatatatagtaattaattgttttataaatatatattatggggtgggttaatactaatattataaaatgatgagtagcttaattccaatcgaaatttgttctagaaccaattaagaaaattataaagttttggtacatacattgtattgtagatacgtatacgtatatgctaaattaacatcatcatcataatcataagaatatatataaattaaggcaacttaattaattgatgtgtgtgtaatatttataggattttgtaaagctaattatatacaaagttataataagtcatgaggttatattataatgtatagggctggcaaaacaggtcaggcacaataatacgattcgaaatctacactaaaattaatggtttggatttatcttaaatggttcagattgtattcgggttgattcgatcaatacgaaacttactagttaatgatctatttaaaattattttaatattttataataggtcataaatagatcataaacgcgttattagttgacatgtttaagcaaaattaatatgtttataaataaattatacggatcgtgttgtgtaaacccatctataaacaggttgtattcgaattgagcatatatataagtctcaacacgacacgaattgggcccgtaaacacaaattgcatgcaacccctacattaatgatcccaaatacatgtacgtacactgaaaacaaaaagtttataattaattatagttaatattttattttaaaaactaattttataccatgcatagatacataattttagtggtggaaaacgaagatatttaaaaattaattacacatagacaaaaataaattgtagcgatcgatcgatcactttaatcatgtgtggataagtacagaaaaaagcccaccactatataataagatactaaaggagtagtacgtatgagtatcacacacacacaaatatattataatataaacaccacactcacaatattaccaaaagaaataaagaaaagaaaagaaaagaaaaggaggtatatatacatagccactcaagttggttgatcatgaatgaaaagtactactaatcttctcatatgaatgatcatttcatcatcatcatcatcatcacaacaacacaatatatgcaactagctagacaagtagagtaatagctactactatatactctctcacactctcactcactcacactactcaatatttatattatatatataaaatgaggtggttgcagttgaaagcagaataataatagaattatatatatatatagctgcttttgttgtagtatagaggagtaactagtagagtagttgttgcctagttggtagctagtaaaccacgtaatacatcatacccatataatctaagtgttaccggtagttaattaatagttttttatattatttatttaataaaaaaaatatttgacatgatattaaattactaatttgtcaccttttttagcgctggactggaccttatttctcaaatatttattttttattgctgttgttattattatttgtttgaaaaataagaaaatcacatggtgattttttttcaatcattaatttcagtagtttagatagtttaggaaattatatatatatatcagatataaaagtttaagtctcatcgttaattaattataggtctacttcgagagttcctattttattaagaatggcattgcttcagcaagttagtctctcaaaaaattaaatataaattctcttataagagattatagtgagtttggaaactttaatccaaataaaaaaatgtgaattaaaaaatttctactactatacaaaaatattactaccactacaccatacgataaattaaataataataataaatataattattattattattattattatatataaaacttgcaaggttggaaaactctatcaactcaacacacactactcacactcaatttttatacctatctctatccctatccctaactagctctctctctctctctctctctctctcctccaactactttctttcttcttcatcttcctttttgcttctttctcttattatatatatacacacacaaacacatatacatatactcatatacaacaccatatatatatatacatccttcaatttccctattatttccattctctctctctctctctctctctctattattatatatgattattgaaaccatggaattagatgatcaaatgaataacaacaatattctcacgatgaaaggcaaacgcaccaaacgccacaggcaaatctccggcgccgccaccgccagtacctcatcctcatcctcatcaaccaccattagtaataattcttcattctcctcagatgaagaagaacaagatatggctaattgcctcattctcctagctcaaggccaccaccgccgacgccgccgccataacaacaaaaattcaaccatcaccaccgctaatatgaaaggatcaggaggattattgtttgtttacgagtgtaaaacatgcaatcggagttttccgtcgtttcaagctctgggcggccaccgtgccagtcacaaaaagcctaaactgatctcaccggaaaaaatcgcggcggtggccgccgatgatgatgatcgattgtacgaattagaagatgaagaagaagaagtaatagtagaagatgatcgtcttcaagaaatgttggtgttcaacaccaaaacgacgtcggttaacaagggtaataaggtgcacgagtgctccatatgtggatccgaattcagttcgggtcaagccttgggtggccacatgagacgccacagaccacatcccaatacgacaactaaaacgacaattaattcatcgtcgtttcttcatccaaataataataataaagcaattttactggatctcaaccttccggcgccggaagaggacagccacaaccaccgtgaatcgaataagttccaatttgtttcagctcaacaacctaatattgtcttctcaactccggctttggttcattgtcattactagttaatactaaatattactccaaataaaaatctatatattttgtgaattattattattttatatcaatttgatgaattcaatatatatactaagttttgtttatatgaatttttctttttcgattaattatatcgtaagtatgatgaaaatggttgaattttaaatatgtacatctatatatactttgagtaggtaggtggctagtgtaaaaaaatgctaagggagtgatatattgcgtataaattaatattgagtctatacattttactgttgactattttttttatattactgttgactatttagaatgcgcctggtaccttaaattcttcaataataatgttttaatagtaagagtattattattgaggactaatgtggattcacttttatataggtgaagtcttataattaattagcaatatatttgctaaaaattattttttaaaattatatagaatttatatcaatagtgatggaatactaggcactaatagtacttttgatccaatttttataagtagtgactttacataaatagtgataaaatatcatgcgctaataataatttgaacatttctcttatgtctttcattcaagaaaagtgaatgtgagtgatatttatattatttatattgtagggtactttttggagtggtgaatcgatgtgggacactaaaataaatacagtacacacaacacaactatgcaaattggggaatggctagattttggcagagcatataacccaactaaaagtgtgtatctctcatctcacctcctcatgtggattagcttctttcctttttcttaatttttttcttatttttttttttaaaaaaatagaagagtcagttgcattaaatgacaaaagaaagaagtatgtatataatatagatttattaggtagatggtccaagtagtgagttttaatttgagtatagttcttcttatctcagccagcctaacagttccacctaattaactaactctatatatatgtgtgtgtgtgactgagtgtgatccaacaccttttcatgtcactttaacatacacttcatttctttataaaatttatataaataataatgaaaatcatcatcacaattatcatcttaatatgcaattgtgtagtgtaataattgggtcctactcctacacacaaattgatattcccaagaaagatactctttcactcaaaccacaaaactattcattttcatctctcaactcaagtctctatttatccatatatctttaattaattaattaatatggtctttctagctttagaccccacaccataccctctctctctctctctgtttctctttctctatctataaaattatggaatcaagttcttcctctgtaattggtcatatcaattttgttctcttttttattattttttttaaagaaaaagaaaaatgtataaaccctatatatatattttattaaactaaagaatcacatatatagtgcaaaattttttatttctttaattattttgagaattttaaagactacacattagttataggaatatttaaaaatgcaagtaaaaacaatctgtactacaagagtacacaacagaaaaggtaataaacaaagcaaaagattatgatatatgtatttgtgatgattagtaatatgtgtgaattaattactaagtatatatacatagtgattattgagtaggtacgtacgttaataatatttgttatatttttattatgtgcacgtagtctttaattttgagtggtaaaataattaataagccatgttgcgtgacatctcctaattatatacattttcactatacgtacaatttcacacacacacacacaagggaattctgaaatgagattgatatttggtcatttatatagatttaattaattggacattattattgacacatgtatatgtgttgtcccaaaaggtttataattaattaaaattttgaatatatattatcaatattctttactcactttatatgcacatgattgacaattcattcacgtacataaataatcgagtaagtctatagtgaactcttaaaaatggtgttctattacgacatttaaaagagatttttagtctatttttttttttttgtgatagtgcagagtctttttcaaaacaggacaaatctcctaaacaacccatacatatttcattcaacaaaacccaaaaattattataagtctttttatactcagatccaaaaaggcaaactgcataacagaaaatagagctgcatcttctctcgaatttagcacgacttatctcgcttccattgaggacgttccatggcttcttctaccttgttgcagctcacctctgacaagctgaagtcgcagcttagtcttgggccttctcagtcatcaaaattttcatgtcgtcctttatagcattacagagtcagtgctattaggcctattttttggatcttcataacattgtagctatttagtattatttataaatttttaaaaaattctaagtataatttacaatataccaaaaataatatttacatattttgttacacgcgcgattatttcttttataagcgtggtaaataattgtttaaattttattttcagtacggtaaactattcgaaattttttaaaaatttataaatagtctaaatagatacaatattagaaaaatatcataaaaaagtagactcgatcgagttgcactcatcgagtcactgtgccaaacttaattgattctcatttgtaaaatgactttacatatttatactaattaagtaatattaacaatttactaattaattcctataagcaatgattaatatttttcaaatgccgactaaccataatataagcgatttatatttttttggtcaaaaatatagtaaataataattatatatatatgtcgatatgtgtgaagaaattataaaaattgatttaattatacgattgcttgactttactcatcaaactaaaaactaataattaattatataatgaaagtaatattaatagctagggttgcttcgaaaggatgtgttctaactaaatcacttaaccaaatcgagtagagtttggtctgtccatgacaccaaccccatgattttgacttgacccaacccaacccatgccaacaaattatattaatattattattaattatatctaatattttgtttataattaattaatttggtgatcgagctaaatgaaaaggtttggtacctaattaagttaaattaatacacacaattaggctcacaattcactgatcactttaattgtgtgagttaggtttttatggttactcaaatatatatatatacgtgcaatacaaaatatatatataataattttatgatagtgacatacaaatattttctttaaaaaaaatagataaagcgtacatatgtaatataactacaatgtatacatacacatagaatcatataaaaatatttattgtacgatgttcctttaaagatttgggtggggtttccgatcgagctaaatttcaaagattaatttggttgttaaagatgcatggtgaaatctaacaatgcatgcatgcatctggtataagcttaattaatggtaagttcatggtgtacgctttaattgaaacctttgttagatatttatatatataaactgaaatgtatatgtttaagtattaagtgcggaattaatcaaacatatatacactatgaataaggatcga

SEQ ID NO: 111152 - DNA, 11549 bp, Cannabis sativa
  modified_base (49)..(74): a, c, t, g, unknown or other
  modified_base (2731)..(2739): a, c, t, g, unknown or other
accatgcaacataaaatgttattgttgatctttattaataagtaaatcnnnnnnnnnnnnnnnnnnnnnnnnnnagggcacaaaacccaacactttttcctttaaggcaatcacctagccttcagcagcaacaacctagtcttcagcaactctaagcttctcaaccagctccactaccttcttgtgtttattatccattgtgtaaacataaccaacacaagcctaaagataaaagaaacaatgtcaagtgacaatacaacaaaaaaaaagtaaaagccagaaggagacaagacaaagaacttactacaaagatgttggtgaaccatctttgagaaattatgtgtggaggttttgggctaaccaatcgttacaatggaatattatcaaccctagcactaattagggcctcatcattagcaaaaagtcaggaaccttgctcacgcaactactccattaagtctgaacctgagttcagagcagtatgttcggaatcattccgagagaggtcaatcggagatctctcattagcaccagcagtattagacttctccctaccagagtcttgagcaggaaaagcgccattagcaggtctagccctctttttgatcttcttcttcgaagcagtagaggaagcaagaatgccttgaaccacttcccttgtcagaagctcaatctccctcgacgttagaatcttcctcttcaagttcgaacaagatgccatagcaaccaagaagcatatattgtctgcaaaaagtaaagaccgaaggttagcacaacaaaaagaatcaagttaacaagttaagaacacaacatggagtgtcagcaacctgttgattccccatccttcttcgaaacaatcctagcgaaggtaactcctccgtcatcctggtctatgaacacaaataatctccctaaatattctgtgtcatttcgaatagaagtcacttcttccatcacaatttgagatagaataatagttgcactctgagcatcttcataactttgctcaagtggcatggtccaagtttgtcagggaagccaacatcaacatacactctctcgcatgacatgatcaacacaaccttccagagatttttagtgctaaagagggttcaaccatctctctcacatagcatcaatttaaagcaacatgacatcaactctcctcttcatgttgataagaggatcatgtcttgtgaaagggccaactttttggaaggtaatgtgtcttgacggaagaacatgagaataaaaatactcttgatagtaaaggccacaattactctaggttatgtgttctatgaatgggccaaactaatggaagtggtaaaagccttgagctttatgggtttgactcctatttaagtcgtagagaaagtttatctcatgaggagttgggatagaccagttcctaaggcagtgaaatataaagaaggtggctagaatcctgtagccattggagtttatctggtaatggaatacactgaagaagtcaactatagatataaaccaaggatgcaagggtaagtaagcacccacattcatgtggaatctcgaccaggcactataataagtattttggaaaccattgggagcaccatatcgaagcttctaaataacagttttaggaagacagtgatcatcctaaattatttgagcttgaagctcgataaggttactagatacaataggcctaagctcaaaggcccaatctcttgaatcatcactttcaacggcggctttgagaagtttagttaccatcactttaccaccacgtgccttatccaagttcttaggcttaggcactgccaaattttctctaatgaactgggcaacatggggatcatattcattaggtaaccttctgcttctcttcattctagccatctcaagtttaatgattcaagctacttacaacttaaggaaagtcaatcttcgttgaaataagtcaaagtagcttggaagaatttttcaaagcacaagaaggatgtattggatttttcgagagtttgaaaaattgtttcaagggtttttgggggttaacagtgattggaataagagaaacaaaggaagataagaagagaaaaaaagttggcgtcgaggggaaagacaaaaaaaatgttttttctaccttgaagtgaagaaggcttgaagacttgatgaatgctataagcatgtggagtgaagaaggaatcgtaaaaaaattggttctcaactcacttatttatagttgattccaatttccaaatcctaattggagtctttaaaatttaaagcttcctaatgaagaggtaaattatatctttccccttctcctttgtcaagctaattttgaattcctatctaactaggaatagaaatataaatttaaaaggtaacagccattcctaatgctattgggatcaaggaaaaaatagagaaattaaaggaaaaagataaatgataattaaaaggccaaaagtctttactcttcttactttctctctctaatttgaaattgcagattcaacaaggattaggattccaatctaattaatcctaatgccataacaaaaattaaaaaaaaaaaatcaaagaaagagataaaaataagtgaaaaaaaaagataagattttttccactttttctttgttaatgaatttttgaaattctcaaggactaatcaaaagtgttcaaagtctcaattcagttgggaatgcttaaagaatagatacaagtgcctaagaatgtnnnnnnnnntgcccatctggtagtttcaagcaaaacgggcttggttcacgtcatcaagtcaactctacacaagtgtgaaattgacttggtgggaatatattaacctagaaacgttccctagtgatgtgggcatcaatgtttgacacgtggaatgaaggatgatgtcacagagttgagtaaacttcagtcatagtagtcaacctaggaggggaccctagccctatgcccaagttgactctaggatatctgagatggaaatttggacttcaataacttgaatccaacccactatcttttattattctgtaccatgaagatatggagcaacctaatccaagggttaggagctgaaattacacgaatctgcaacccaaaagccaacttgggcacctagggtttccacccagccctcaagttaacattcctcaactagggttttagtttttgggaccgtctttataatatcccaaattttttgggcgtattttattaaatatgtgattatattggtaatggagtaagattatgatcttacttaggctaattgagtgatacttagtgtaaatctaataaatggttaaatgaagcataatttataaataacagagattttattgaattatgtgggtatagtagataccacttttgaaataaaatatttttgagttcggtggccatggaaacacgacggagtggtcaaaaatatcacgacaattaagttgtgtcgtattggaattatattggactaggttaaaatattgcataataggttgaatcagaagttagaaattggccgaattactcctaggtttgattctaggttttatggtttttagaggggcaaattagtcattttgaggataggattttaatttgtcctatatttttttggctgaaatgggaattatattaagtatattatttattttaaatttaagttttacaaaggataaacttaagaaaatttaacaaaaatacaaaaatttcttctccttctttctccttattcaaaccctaaggaccagcagacccaagggagtttcttcaccaattttgttcatcttcagctggtttagcaagagatggaggttgtccaagttttgaggtaagctttccttgtgtagtttaaggttttttttcaagttttgaattagttttgggttagggttttaggattttggaaatgaggtgctaaattgaggttagaacaagtttttaggcttaatttaggattatttaagtttgatttggttagaaactaagctgttagtgttgaattagaggaatttaagtttttgagcttaatttcatttgattatgctattttgatttaatggatgaattgttgtgaattggagcttggaatccattatatttatggtattggactgttctgggaggtttgagcatgtttggaggcaatttggttggatttttggagcaaaaccagagtttccttttttctgctgggaaattggttaaccagtttcacaggtatagtgaaaccagtcagccggttttgccagcaggggaaaccctaattttggcttcgaaactagttttgtttgaggagttttttaaagcttagattggggtatttagtgatgtttgagttagttcagatcagtggggagataggtttgttcggttacaggaattagggtttgttcctagagttttgactaagttatttatcgggttttgttgtcatgacataggactgggatcgtcaagcgtagttccactcaggtcgacccgcacacctgattactggactgaggtaagaaaatctttacacactattaagcatgttagataagaaacgattatgaacgttggtgcctcgatcatgatcgaggtaatagttgttattgttgtgactcgattatgaacgagggatagatacagtcattatcgttatgagtaattactcgtttgaaactacagataggtttcttacttatcggttgctttattgggcaacgatagtgacatatgaagttcatggataacaggtggtaagagtgctttatgaggcactgtgattggctcgtcttatagacgtttaattgattagcattgctaagtatttattgaatgatgagaatgttgttatgtcttattgtgattacttgcactttacattgcgtatgatttatcaacttttcttactgagtctttgtgactcacgggtgcttggtggtgcaggtaaagggaagggtaaagaggatcaaccatgagtaagaggttttccagtagtgtacatatcaaccacggtgcctcagccaccagtggataggatccacccttttggctgtattttgaattgtaactctttgatgtaaaactaatattgaaacagagtgtaaaagttttatacaggggatccccgtacttgacagtggttatattttataaaaactatgttttatctttaattaaaagtttttaatttcattgcacttttcttagattaataaattagcctataaataaatctgtaaaagcacacatgtggcgtcctgtgggatagggcgttacaacatggtattagagcaaccaatgtttaaagatcctaaagactggtttgatatgtacactggctgcgaagactcgttcgactcatggtatagtaagtgatagttgttagaatacttgctaattacttactggattacctatttcattgaaaagtgttagttattcgaaaagcataatagtgagcaatgtgtatgcgtatgtttggaaatgcttaatagcattgattataaattgagctgtactaaatgatggaaagttgtggtcgcaggtgtatagattatgcacccgaggagatctgataggggtaaccgcgagcttgctgggcttggggttggcggtgagggcgagaatcctccacctccaccaaattgggaaaagttatatgtcacgatgcaggagaccatctgatagcaaggtgatcaaattcgataactgagggagcagcaagctcagcctattctaaatcccaatcttgatcctccagtgcctcttgtagtgccacaggatgcgggaaatcagttagaaccattatatgagcgatttaggaagcaaaatcccccagtgtttgagggtcaggttgatccactcaaggcggagcaatggatgagcatgataacatctattttttatttcatgcgagttaagggtaatgattgggtctagtgggaaattgtgtcacagggtcatgacctgaataacatgacctgggatgctttccggaccttgttctatgagaaatactgcaataaatccatccgagctgcaaaggcagaaaaatttatacggttgacctagggcaatatgatggtgacagagtacgccaccaagttcgaccgactggaaaagtttgccatagatgaaatggctattgaggctactagaaaagctaaatttattcgtggattagaagagcacatcactcgagatgtgattgttgttgccaaacaacctgggtttttttgaacttatgctcaggtggttgagttggcccttgtggctaagggagcagatgattaaatccagaaaagaaatggtgcatgaagagattcatggaagcagacgtctggtgctagttttggtaagggtaataaccctagtgatcgcaagaaaatacctaatgatccgtcagctacagggtcgaataagaggtttcaaagaaagcaaggcttccttcatggtggaaacaaaaattgacagacctatccaaactgtccaaggtgtaagagacgccatcagagcgagtgtcaagctagggcctgctttcagtgtcgggtagtaggtcatctaaaaaagaaattgcccacagctactgcgaccacaacagaagaaagatgatacttttactcctgctcgggtattttctgtagcccaggcagaggctgattctggcccttccactgtgacaggtcagctttctatcggtggtactttattgatcgttttaattgattccggtgcgacaaattcctatatttcaagtagagtaattggaaatttacatagacctagcaatgtgttgccgagtgattatggtactttgctgcctacttgacaactggttattttcagcaagtgggttaggtcccttccagtgtcggtggaaggaagggaactatcagttgatctgattgaactaaatctagaagatattaatgtgatactggggatggactggctcgcaaaatataatgcaaccatcgattgtaaaggaaagatggtaacttttgagctagagggtgacgactcattcatatttctgggtaaggttcaaggatcccagataccattaatctcggcacttaaggcgagagattttctatgggatggatgtatcggtttcctagccagtttagtggatactacaaaagaaacaccaacggggccagaacatgttctagtggttcgagaatttctagatgtccttccaaaggagttattgggattaccaccgaagcgagaaactaattttgaaattgatttgataccgggggcagagcctgtatctaaagctccgtatagaatggcacctgcagagatgagagagctgaaagtttagttacagggaatgttggatttgaaattaattagaccgagtacctcaccttggggtgcaccagccttattcgtgaagaagaaggacgcaaccttacgaatgtatattgattaccgagagttaaacaaattgagagtaaagaacaagtatcttttgccaaggatagatgacttgtttgaccaatagcaaggaaatactgtcttctctaagatcgatctttgatctggttatcaccagttgaggattcgggaggaggatattcctaagacaacttttgtacccagtatggacactatgaatttctagtgatgtccttcaaattaacaaatgcttcgacaatattcatggatttaatgaactgagtgttgaaggactttttagataattttgtgattttcttcattgacgatatttaaatctactctgattcaaaagaggcacgcgagaaacatttttagatggtgttgtaacatctccaggagcataagctatatactaaattcaagaaatgtgagttctgattgccccaggtaagtttcttagggcatgtggtaaataaagatggtatcttggtggatccgatgaatattaaagttattagagattggcctcgacccaagtctgcaactgaggttagaagtttactgggattaggaggatactactaaagatttattgaagggtttctagaatttctacgcccttaatagaattgacgcgaaagtactgtaaatctgtttggactgataagtgtgagagtagttttcaggaattaaagtagaggttaattaccgctcccgtgttaaccttgccggttagtaacgagaagtttgtaatatattgtgacgtgtccaaacaggggttaggttgtgttctaatgcagtctgggaaagttattgcctatgcgtctaagcaattgaaggaatatgagcagaagtatcctgctcacaacattgaactggcaagagtcatttttgcactgaaagtttgacgccattatctgtatggaaaaaagtgtgaaatctataccgatcacaagagcctcaaatactttttcagtgagaatgacttaaacatgaggcagcggcaatggttagaagtggttaaagattatgactgcgaaatttgctaccaccttggaaaagcaaatatggtagcgaatgctctaagtcgaaagggtccaggacaagtttgtgaattgaagaagatttcaccgaagttggctgaggatatgaccagagcgggaattgagttcatggttgggaaacttgctaatataatgttgcagtctaatttgttagaaagaatcaagacaacccagcagagtgatcctgaactacaggagtacaaagaaaagcttgaagttgggtcagcgaaggacttttcgatttcatcagacggattactacatataagggcagggtttgtgtaccggctgacaaaagtattagacaggagattctagatgagttttctactgtttctatggaacaagattacagtcaaaatgactttccttttaaagatgctgttgacgtctcaaaaaaggggaaaaaggtgggctctggtgtacaggcccaccaatcattatgagtatcctcagttggaattacagtgggcttggaaacccatgggtcaaccaattcttagagaacatttgtgttcaaaagaagcccaatttttttttgtgtgtgtgtgaaataatttgcaataaagctgtagttgaacgtgttcaggcccgtttgggttatgaaggtagttcttcagttgattctcaaggaaggaaatgtgggcttgctctattatggaaagttgctgaagaggcccaattgctaagtttttatcataaccacattgatgtggaagtctctatccatggggatgataagtagcggctaacagggttttatggcgaacccaacagaagcctgcaaatgaacacttggaatcttttttgtactctggcgtctgaatcaaacctcccctggtgcgttattggcaatttcaacaacatatcttctccaaaggacaaaaaagggggtcgtccctatcctacttctctaataactgtttttcaaagtgtgatacatgattgtggattttatgaaatggagcttctccgatatcccttcacctgggagcgtgggtgtggtaccaatgattgtgtggagattaaacttgacaaacccatggttgcacttagctggatgtcagttttcaaagaagcttccctttcaatttcgggttctctttatcagattacactccaatttttttatatccttcttcctctcatggtaagatctttgtttatcgtttttgctatgagaatgcttgggctcatgaacctctttgtgcccagattgttaaagaatgttgggtagctaattcctaattcccttcccatgataaattgatgatttgttgctctaaacttgatgtgtggggaaggtctttaactggaaattttaaaaagcttatctctcaaagcaaaatttctttacatcatctgaaaatgattactgcttctgatacagctgctgagtttgctcgagaaaagaataactattttaaaattttggcccagcaagagctctattggaagcaacgttccaaataattctggttacatggtggtgataaaaatagcaaatacttccatgatgttgcaagtgcccgtaaggaatcaatcaaattcaaaagctttaaaattcagcaggagattggaagggtgagataacggccttgaaaaggtcatttttgattatttctcaaaactttatactgttggtactactaattgtgacaaggttgtgagtgatatcaattgttctattcttaactctaataatgaagaccttctgcagcctatatcccatgatgaagttaaatctgctctttttcaaatgcatcctgataaggcactaggccgtgacgtttttagccctagtttttactacgacattgggaaactgtaggttctgatgtggtccaactggtacaagatttctttcagtcaggttatcttccccctcatctcaatgatactaatttagttatggttcaaaagaagaagaactttaatggtgtgggagatctagggccaatagctctctgtaatgtcctctataaagtaattttaaaagttttggcaaattggatgtggggtttagtcaaccaggtcatctctgacactcaaagcacctttattcttggtaggctaattttttataatattatggtggtgtttgaagtaatgcattacctcaaacataaaacaaaaggcaagaaaggttttatggctctgaagcttgatatgagtgaggcctatgaccgtgttgaatggggctatttgcgggttgttatgcctcgtatgggctttatggatagatggattgacttggttctgcactgtgtcactacagtgcattacacagttatacatggtgatcatatcataggctctataatcccttccagaggtattcgacaaggtgacccgctctccacttacctttttattatgtgtgctaaaggactgtcatctcttattcgtaaatttgaagccaaccgtgtacttcaaggttgtcgggtggcccatagtgtgccttctattactcacatgctttttgttgacgacaactatcccttatgtcaagcttctgtgaatgctgctacaagtatgatgactctcctaaattcatttgaatcagcctctggtcaaaaggtgaatcaatataaatcaactattttctccagtcctaataatgctcttatcttacgatctcagatatgtgccattcttggcatgcccgaagcttcaaagggtagtccttaccttggtctgcaaacatctcttgggatcgtatggttgctcataagctggtggtatggatttccgtcatcttcatgattttaaccttgtcatgctagctaaacaagggtggagactgctttgtaacccctcctccttggctggtcgggtctataaggcaagatatttcccaaatttagacttcctctcagctcctttgggtccaaatctaagttttgtttggcgtagcatatgggctgctcatcaattgttcagttaggggctcaccgtattgttggtatagatgatgatgtcaatatcttaaaccatccttggttatgtggggctgaagatgtaacgccctaatgctaaggcacgctacagtgctttttcaataattgtgcaatcttt

SEQ ID NO: 111153 - DNA, 6497 bp, Cannabis sativa
aaaaattacaccaaatattatattctttattattctattattttattaatataataagaatattttaatactaaatattacactaaatttaatttttttatatttattttcaaactttatggtatttttgacaagtgttactcaagttttgttatatttgtaatagtttaattattagtgatagtccaaaccgtaaaaactgcaccgcatcgcaccatttttttgcagtacagtttctgcggttttttaatttcgcgatgcgcaggtgcggtttgaaatattagaaaaactgcatatgtaaattggttttaaaaaatagttaaaaattatactgcccgcaccgcaaatatccctaataaataaatacatttataatataaaagtacaaataaatacatttataaaaattttgattaatatttatttataattatttagtttttaaaggcccttggagttggcctaaaacacttcacttttaatataatttgtaaaattttaactaaactttcaacccatagcctttagaaactatattatacattcgaaccagggcaaattaaaatataatacccatatgactcaaaaaaaaaaatatatatatatatatatatataatacccatatatagatggttttttttttttttctgtttttgctgattataaaatagatagatgtagactactccaccgactttaacaactaattaactacattcatatttatcaaatgtctctgttacgtgtcatgctcatgtgacatgtgtgtaaagataatatttgtgtttttttttgaagagatataaaatatttgttaattacgttaaagcagtacaattaattatgattatttttatttatttatttaacacgtttaaatgagctaatcgtgtacttatttcttcttcaaattttcactgcatgtatccgtacgatgcgtgtaacgtgtcattttctcgaatatgtattcatgaaatttcatggaaacaacatgtatgtaatgtaacctaagaagcactgatttccaccctttttaaccacttgtatatataaattatataccaaccagccaacaacgttagaaatttcttcaaactttggtgagagttgttttgaaatgtaataatacaatagtcaaaattttacataattaattttcttttgaaagaggaagaccgctatggtgtaatgtattatatattattatacgcctatggtgtatacagatacagtcgttttctgtgtgagcccccaatagtgtactatagtctaaactctaaaggcttctattctctccccccaaaaagactactctaatgaaatcgaaagcaatcaaaaaggcaaaattttaattaataaataaatattagagtggaaaatttttcaatctcctcctccttcttcttctgcatatttcaaaatggccatttgtaatgatgactcctcttgtatatgccaattgccatcattaccacactcaaacacaaacaaaaccacagctatatctctcaccttttcatttttcttcctcctactacattacaagccataataatatctcctctcctatttaaatctacaattcccatcttaaagaatccatactttcttttagctttttctagctagtgacatacttcttgcaatcttttatggtcctatctctctctctctctctctgacaaaatgtgtatgaactcgtcagaaatgataactgagattgctattaccggcctatactcttcttttcgccttagaagaccctcttccaagagatacaaccttcgagttcatggccttaacaggtttcttcttctctctctctggtttcctctgtattttctctctctctctgttttcctctgcctttgtctaatataattaagttatatataaaactaaaaaagagtttctttaatgatgaaataggagaagaaaatcaagtaaagtggatatggaagtcaagaacttgagactttatattgagaataaaaccatcatggaagagaatcagaggttaagaaagaaagctcttcttcttcaccaagagaaccaagccttattatctcagcttcaaaacaagttgtcatcatctcaactcaactaggaagaaatattattttagtgtctaatcttcctctatgggtacctacttttgtgggtttattttactttttaatatagtataatatattcgaggtgggaaactgatcaagctacacaaatgatatcttatctaatctagttttatgtatacaacaaattatattttatagttgttgtaatcctttcacgtaggaattaaattatgaatttttatagttgttaacttctatgaaaagcgagcttttacccaaaaaaaaaaagaaaaaagaaaaatgtgcattaaattagactggattcattcgtgaccgatgcccaattatatgacatgaatatgctcagtttgttctttgtgaaatttacgttaaagctatgacctacatcgttaatcataatagtggagagaaaggggaaaaagaaaaacaaagaaaaaggtcgtttctgccaggttgatggatatgagtgtagctttgcagagctaattgttcatttcattaatcatcatctatttctttggttcaaagccacaagcaaggtaaataaatttaccaataggaaagtgacatgaagtgtttaaaatttcagaataagcttcaaatattatgtaatcctttttctcaatggattataatacagcagtacaggctacagcaccaacactcatgtagatgacacataaatgcacagaagtaattaaaacatacgcacacaggaaaacacgaaaccatcgtcatctgtaatttaaaaccaacacagtcaaaaatctgcttcacactgtaacataacatgaaagtttatttatgacctcttcttcatagcaagagtatagcgcctaaaatagaatacaatacaataaagaaacctagtaatcaataccggcccaccaagatgaaatcatcatcatcgagaaccttaacatctttgtctcctacaaaattctcccgcccgatttccttgaccaagtcgacgaattccagcctcttttccagaggaagaggaacataaggcagcctgaaaaccggcctcacaaccccaagttgagcaagggctgtgttcaagccaatgggatttggctcttggaataaccagttgacaagaggcaatatttttgagttaagtgaagggttctttcctcgaaacatgatttctcgcatcaaccctggtatcaagttactggtaacagatatgactccagtagccccatgactccacctagcatcgtggcattgatcatcatttccactccagaccacgattcccttgtctgcatactcttcaattcgatcatttcctacacactccttaataccggccaagttggcactttttgctactctatcaatcactcttggtggaatatcttgtccagttcgtgatggaacattgtatataatagttggacccatggaaatcacgctattgaagtgcgcaatcaatccatccaaagaggttttgccataatagggatttatgtgaagagcagcatgcattccgacagcaaaaccctgctcactagcatgaatagcttcccttgtagaattgcttccggtgtttccaatcaccttgattgatccaccaaagcagttgactgtgtgaccaatgagcataatatgttcatcccagctcattaattggccttcgccagttgtgccgcccacaatcacggcttcagcaccatttgtaatctgcatattcaccaatgcatcataagcttcgagatcaaaccttccatcaggtagatatggagttttgatagctgtaatcagtctaagagacttaatatcttctgctgacgtcctgcaaacaagagcatccattatagacccaacaaattgtttgtctccttctcgcataaattgtaaggtcagtcatatactgggaatatattcaaaatagaatttactaaccgtatggtccgtatctagagaaaatttactttgaagtgactacttcctagatacacacgtcgtgatttagttatctatttctaaataaaaaataaaaaaggtatcgagcccaaaaaaactgactatttccaatcccagcaaacattaaaataaaaaaaaaattaagaaaactctactttagagagcatgtgtgaacatcaaacatgcacacggttcaaatgatcctaattttgggatttggaaaaaggcaagccgcaattatgcacatgaaacaaatgaaaacataactcagttcagaaaataaaacattatagtttacctgtgtttaacttcaaaactgcgcataggaagatgaaagtttggaagaacagccgcttgtggagctctccatttggcatttctcctgtttcattgaattaaagtaattgacatcagcaagccaacagatatttgattgtggcaaaaaaaattgatactttctgtttgacagtagctagcattcactttggaaagacactagcattaataaaccataaatttcttccaaagatggtaattagtagataattagcctatttagtaccaatatgcaaaccagcaaggagatggtcagtactatctatttcacagtagctgcattagctttggataaagcacaaccatcaataaaccataaaaataaaaaattgcaaggagctggcatttattagaaaacagcataattagtaccaatatgcaaaaatagactatatggaataatggtgattaattattagacagatatgcctctccagagtacaaatggaagaacagaaacattaacaactatcacagagcagcttattgaagggccaaaattggcattgctcagcaggcatgaggagctaaacaaaagaataccttagagggtgtctttatattgaagctaaatgctaaaaagtaagaattaagaagaaaagttccaaatctacaaaggtgaagttgttatttagtgaagcaattataggcactgtgaagaattataaattctaagtactttcagggagaagggcatcatgattagtcaatcaatacaactttaaaataaatggtgttatactttatatccacccagaaagaaattccaccatttctaagtagtattgtacagtacaagaagctacccctcaacaaacaaaagtctatatatgtatgtatgttacattttcatggataaagaactaaattaaattcaatatataaataaaataacatgaatcatgactataatttcttaaactattttatatatatatatatatatatataaagagctgactcgaatcaattattaaaatagaacggcacaaacctcttgtagctatcgccagaattgtgacgcggaagctggagagccgagtctcgcaagcaaacgctacagctctttaaggtagccatttccaattccgaacaaatagaccccgaactcaaaagagtaacccgacccggaaataactcctattcagatggctggaacaaagtaaaagaagagttgtagtgcaagaagggatttttatttaaaaaaaaaatcagtgaatggtgagagtggtgagaatagacgtgaatgaaattacggtaagagatagataatgagctgagaaggttccgttggcgtcagcggccatgaaatgggtttcgggtggagaaaatgggttgggatggtgagtgaaagcagaaggctataggaggctgcgggagactattgaaagggttttgtttagttataatagacgggctgggccgccttcgaccgaccagggtttctgagtctagtattcttgtaccttccatttcaaattttatttttttttttaaaaaaaaataaaagaatattatcaaaatcacaggttgttattccaattttaaaatttaaaatataaatttatcacttaaatatttcttgtttgttgcacgatttttgttaaagttatttttaacagaaagcttttttatttttaattcacattctaatctgaaaaaagaaaagaaaataacttaattaaattgcaaattttttttagttattttgcttgcattggaacataattacaaaaattggattaaatatagttttagacattttgggatatattttgagttaaatttagcacaaattataattcttgcattagagatgatcttatataatatatgagaagaataaaaaatatacacattcactcacaactttaactttaagtataggttagtgaagatcaacataatttgaacaagatgttatcacatttgttcaaaaatttatttcctcaatctctaaaaactaaggtggcctttagttaagaggaatcaaaacataaaaataaaaaaaaataggaataagcaggagcggacccacataaagacgaggtggggcagtcgcctccctaaaaaaattaaaaaaaaaatatatatatatatgtattttagctagttacaacatatattt

SEQ ID NO: 111154 - DNA, 4637 bp, Cannabis sativa
ttttttttttttttaaatttgacatatatttttcatttgcttttaaaggaaattacttgttatattgcatttggcgtaattgaaagtggcaaataaaattgtgatatgattatcttaggaagtgattgttcacttattatatgtacttttgatattatttgcacataaataaacagcaactttttttttctttctcaaacaatgtataaaatagttaaattggttctttcataaattttttaagctttttttagataatttagaatgttgcacgcgcgtataaatgtcaaaacaagtacgcatgtcatgagttatttgaaactttattccaacgtcctcgattattcggaatttcgtaaaaattgtaaaaaagattttgtaattacattatacaaagtaatattcatgcctccaaaatattaaaagtacttgtaaatagtgattaaaacaagtttagagaattacaaaacataacaataataatagtaataaaatgtgattatttaaaaccatctttcattattaatactatttttgttattaggtttgtgaattttggtcttgtacatttgggtaggaataagagtagagcattactattaagagttggtgccttgtcgtgtgagtagcgattttttattacttattaaattaaaataaatgatatatgatattaaattacaccaatagcaatacaatatttatttatgatattgtgcagtttaagatacactttacctttagcatttctcgtatgagcgagattacgcagactgggtttgttattgacttgagatggcaaatgagagtgccatgtggcgctagtatgaaaaaagtggttgcaggtagaagggctgctagtgcaggtagatgggattttctccatattttctttaggagttgatactaccttaatggttttcaaaataattattgatattgtcgaattagttattttaaaaacttatgcggtagtaactaattatcattatatcattaataaagtaaaaaattgctagcagcaactaattactatcatatcaattttaaaataacttattcgatatatataattaggtatcataaaaaaatgttatactcagtgacggatctataatttttactttgtagagacttatttatcattaacaaatatttatacatatattataatcactcttactaaatttatttaattttgtggggatttttatattattttggtctataattattaaattaaaaaaattacatttaattttttaaaatacaatatttttactagagccaccacattgttactagtgggtccgtcttgttatactttggtgaccttattattttatctatatctaacaaaacaacattgttattaaacagtatgatacttgataaaatttatgtttaaagttagcattttttttaaaaaaaattcccatttcatttttacattaatggcctctgggccagtcgaagaaataaggccgaaagctcaaactgatatttctttagggtttttttaaaaatacttatctttcttgttatttttatatttttactatcatatattttttttttatatttttattgtgttaagtttttaaaaatactgtcttaaagctttaaaattacaaaattactgtgtttcaatatgcaaaataatatcaactccttaacttatttttgtattacaaagttatttttttacttagttttgacgacttgattatttttttgtacttttacattattttttcataaatttttttgttagaattttatactttcaacttttttttttctcttcttttttgagttagtgatagttaaaataaaaatttatattttagaaattaaatgaatgcttatatgaataattaaaataataaaatcttataattttgaaacgggacatataatgtataattaaaaaataaaaaattaactagataacaatataattttaatatggtaatatctactagtgcacattgtgtcaattaaaaaacgaaataaaacttatcattgtatttaaaaaaaaaatgtgtcaaaaaagtaaactaaatatatgtatcaacatctacaaagaaacacacatacaacaaaaaattataagaaataaactaaacaccataacaaatgcacataaataaaaaaaataatcaaaaaataaatgtacaacaaaaaatagtttgaaaaactacttaaaagataattaaaatacaacataaaaatgacaaaataaatgcacatatatacatcaaaaaaattatcaagaataaactaaataaatacacaataacaaatgcacataaataaaaaaacaattgtacaacaacaaacaatacataaaaataaatgaaaaacaactacaacacaactatagaacacataaacaacaacatgaaagcaactataaaataacaagaagacagctataaagtaacagaaaaatagcaagacatcaatctcgttgcaatgtgcatatcattcatagatcaactccgaataaactacaaaacatctaaaaaaagtattacttttattagccaaatattaattactctatacaaaaataaagaacaaataaaatacatgtttattgtacaataaaaataataaaataacgataaaataacttaattaacaacaactcaactttaatcctatatacttagtataaaggagagaaaaataagaagatagaaatattttttttttattgtttggaaagaaggaaggataggaaaaaataaacatgtaattacatcatgacaaatacaaataaataaataagaaataattaaataaataaatgtataacaaaaaaaacctaaaaactctataaaaataactacaaaataacttttttttttaaaataaaagcgtttatataaataaaggaagttagacctcacagtcgttacaaaataagttcataggtatggaaaaaatatctaaaaaaccatatcaattgtgagtaaaagcccatttaatcaaattatgagtcaaaaaatgactgagcaatattaaaaaaaaaacacaaccaacaaaaaaagaagaagtacttttacattgattcgagtagttctcaatctcccaatgagagtccacatcagtgagagttgttaccaccttagaatcgctttctacaataacaaaattacacctcttctcagctgccgtctctaaagctaagcaacaggcctcgacctcaccacaaagtgcgtcagagaaatctaatcttatcgtaatcacccaacacaccacactctgattatgtctagcaacaacaataatgcacatgttgtccatccccactctaacattaaagttcagcttgatccaattaatttggagggggatgccagacatccaatcgagtcagagagtgaataggagaaagagaagccctataatttgtataataaaaagaaatagaatcaatataatgtttaatgttacctaaattattattgtgtaccttatcattctgagctcgctaaatagtatccacacgcataaagaaacacctcatctacattaaggcccttgtcatgtaaactccagttgaacttgattcagtcccacatacaaatgtcagtgtcagtgataggaaagatcccccacggggatgaccttcacaaataaaaagccagattgcaccgaagaaataggtgctccatactatcatcttaaaccccacaaataggatagagggagttgtcaatacagaacctcttgttcatgattttgcaaactggaagcgtgttagaaaggatactccaccataagatcttgtgacgctctaggtatttactattaattctagagcttgttccaaagggagggagaaatatcacaatgaggggatcaatggagagcttgaattaagtagacagacttactagagaacctgccactgctgtttttagtccaaacccatgagtcactacccctaccagaaggatttcccccttttaagatgacaacgatggtttcctgatcaaataaataatgaagcttctggagatcccatttctcaccatcagtcagaaggtccgcaataaaattaaggccaagagaaggattgtctttggatttagggaaaaaatctcggccatgagtaatccaaggatcctcccaaattctagtatccttaccattagaaatccttttgcatgctccttcccgaagtgtcttgttagctttaaccacatttttccaaaactagaaattcgagtccttatagtgacagtgaaagagttattttccctaaaggtacttggtctctaaaatcttgcaacaaagagattggctctcagtaaacgaattccatccccatttagccagaaaggcttgattcatttctctggttttttgaaagcccaaccctccacaacattttggaaggcacaatttgtcccacaccttgaggtgcacccatggttccctttctcacaaccccaccaaaaattacgcaccaaaccatcagttctaatcaccataagattggaaagtttggtttatggtagtttgcatggaatactgttgtgaaaattatgtacgcaagtacacgcagtcaaacaagtaataaagtgataagtaagatcgtctccacaaggattgcaaacaaa

SEQ ID NO: 111155 - DNA, 8130 bp, Cannabis sativa
tacgtttaaaaatcacgtaatatgcctatgttagttagggtgttacagcatgtgaatggatgagctctctatttatatcaactgatctcttctattgctaagtcaacaaggaatagatataaatttaaatttaaaaagaaagatatatatatatagagagagagagagagggagagagaacaaatatgctatcttttcccttttctctcctttctttttatcattaaatttcaaaatcccttgttctaagagaaataggatttttaaattcctagttctacaagaagtctttgaagagcagaatataatttcgaagatggtcaaaattgaatcccacctagtagtttcgagagaaaagagcttagttcacgtcatcatgttaacctcatacatgtgttaagttttcttggggggcaaatgtttactcgagaattgaccttggtgatgaggacatcaatgtttgacacatgggaaaaaagaaaacgtcatgaagttgagtagtcccaagtcatagcagctgacctgggaggggtccttaaccctgcgcccaggttgactttgggaattctaggaactccggaatgggtatttggatccctccaaattgtttcaaactcaccaccttttagtattatgaatcatgaagataagaagaatcaagtccaaggcctggaacttgaaaagagacgaaacaacacccctgaattaaaccaagaagcctaggattttcaccatgttcccggttgacattgcaactagggtttcgattttcgagtccatcttagtaaaaatgactcaaaatttttactttggcttgaataagagttgtcacaaacatatttgagcaatcaaaattaaaatcagaacacttttattttttagcacctaaggcacaaggtacatagggcacccagggcccaggttgacatattgtcaacctagggcatttccaacaataacataggagcattattcccagaattttatttctctccatccaaaacgatgaaacaagtgcttttgggaaagaaactgatcgacctggaggcaaaaaaaaagggatccaacacttagggtaacactttgttagcctgggccatagccaacatcaattaagaagaagtcttctggtcttattctctgttttcatcaaaaattaagatttgggtgattttggggaacaaaaaaaatcatctatgaggcataacttgggcccaatgcccaggttgacatttttcaactgggttgtttccaatcagtttttctgagaagtctttcaagaatattttccatttttgtgaataattgagggacgagtatttccaagaatcaaactgtacaatctggtggcacaaagttggaccaacacccaggttgacattagtgctatgaccagcgcggaggttgacattttgtaaacctgggatatttctatttgttttccaaaatgtggtttgggaatctctttttgtttttagaaatgacgaagatacaagtgatcttggggagaaaatgagattttctaagggtcataacagggtgccaatgcccaggttgacatgggtgctgcaccctacgccatggttgacgtgcaacccgattcgcatgtttccacttctcaaaatcaaattttcctcaagcattcatcttattttggttaaatatggcatatgagatcttgttaaaaatccttaattccttagaagtatcaaaacgagcctagggaagcactcctcgcccaagttgacgtgtcacctagtgtgctgggttctgctgatcagaatttgattctgtctcgaccatcagactattttttcatagtaaacaagagatacgaattaaaataggtaaaaattcacactttgacatttcaccctttcaacaaggtgggataccagtaaaatcatgaagtttcgagtctacccgatttcacaaaaaagctacatctccgagaattggtgaacaacttcaaaagagcaaagaagctgattaaatgatgtcaacatatcatttaggtatcaaaaatacaagtttgggacattttcagtcttaccagcgtccatgttgacgtcaggattttaacctaggcgttggatgtcaatcttggcgttgggttatcaacctgagcattgggtgctgaaaaaccatcagtaaaatagccataactccctcaatattgattcgattgacgtgactcaccaaaatttgtgctcgggattgttgcatttttcccacaaattacccaaaaacaatatgacagacgagattcaaactctaaaaattgacgattttcaaccagagtaaattttcaccattagaacataagcaatctccaatattaagccaaagtgaatttttcatactttttgtattttttttattaatattttaataggacctccttccctattaaaggagagctctctagttcatttttcacattcttctaagtccccataaggttagagcatctctctctactttctctctcttgaaatttgaggtcttgccttaggcagttttcttgtaactctcttgagaaataaaaactcaaagtatacgtagcttcattactgacgcgtcacaaggagtgaactatgataaatttcttctgtctctttatttacttaaacacaattctcctcttcctaatctagtgaatgggtgttggcaagatttttgcgtcaacacacttatgcataaaattctcgtgtgacaacaaaagtgtgagagtggtaaggggcaatcaaaagagtgcaaaaaaccattacaatgtcttagctagagcaatcttcatggtctgataagaagtcgaagaagttcatagagcactcatccaacctaaacaggattaacttgggaggaagatgaattagatcctaagagttgggatagaaaaaatgattggcatggagccatgtagacatgatcggaatcaacccaaacatcatatgccatgccttaaatattgataaaaattcaaacccattctgccagagaagactgttgtatctgattcgagcaaaagccgtaaaggtgtaagtcaagaaattaacctcttttgagttcctctagaaagctctatatcctgtttggctagaaaatatagtgatggtcccaaaaaagccaaagagaacttggagaacttgcattgactttggagaaatattgtatatgcagttcaaagatcatttaaatgaacttagaattataatcgaacttaccaccttagaattttttagttgcatattgataaaatgattaggtttatgattagttactagcaattgacaaagttcttctagggatatgactttaagatagtaaacgatattttaaatgtcatcccgtctaagtctgatcttggtaaaaccttagaatgagataatggttaagtacttagtgtataccattattaaatctagggatgccctgatcatatctttaagaaaagatagaattacattcatttaaagcgatatgtaattaaaccccatgatttcagggggtaatcgttgtaaaaatatcaatcaaccctgtaattaactgcctactatgtgattataaatagaggcaaaatagactgcaaaagggacgaaaaaatataaggaaaaggccctgaaaaaccaccagaaatctaataagattgactcttggactatacagaattttaactgaaaaaccacgtaaaaaatcctttgtgttcatactttttcttttaatatttgtatttttttgcgtgagattatcactaattggctcatatttagttaacgaaaatctgcgttaacaacttgcatgttggatttatcacaaaatcagggggtttcccctgagttagaccttgagagtgcgtgtaccaccatagggaacatctcttttgtcctacggccactactctgacactatagtatgcaaaggcaacgcacacatcacaccggtcgacctcaagtggtcccctgtggtacaaaatgtaacagccccgtacgggctcgactttagcgcgtgggcccaaagtcagtgtattttatatattttcctcatttatgggctaggtttacatgcaaaccctagcaggtcacgggtatgtccatacctgaatcacaacctataaatactgcatcataccctcatggaaagaatttaaaattcatcatgtatacactatagcaaagagctagggtttttgagcttgtcaagaacactggtgtaattattcaaggctactcagcctaatacaactaacacgtggactagggttcattaatactcgaaccacataaaaatatccatctccatgtcatttgctcaattgattttctttgtacttattttattatattgagtttctaaaaatctcagtaaatattttggtgcttttatttagagttgcggaaagaatttaagccaagtggtatctataacaatagtggcttctagaaataacatcataaagaccactcccgtggtcaagatgccataatggacaatgttaactcgcctcctatggtccacgctcagccaaacactgtgagagatggggaggcatctgaagtttgtggccgtccagccaagagatccctgcatcaagagaaatttttccatgagaaccccatcgaagaggatgagatgaatgattgagaagaaaatcttgaaggtcggggtgatgacgaagaggacggggaggacagtggtgaaattaaagatggatattattatgagtaagatcccaaggtacatcagatgggtaaagaattttcaccgacccaacaaatactattggtataagatatttcccatcaaatgaaaaaaaaaaaacattagtgaaactataggccaagtttggggccagggaagaaattttgaggaaaatgccctagaagagctcatccttaaggcaaatagtcctacaagcacacaaatcctactaatgtttgagcctctactccagtaatagacaaagggaaaggcattatggatgaaccttccaaaaatgctgccccaaccactcctaggaacatctagaacgctgccaacagctatgcccaacaactctgatgcctttctaattcgtaaagcaaaggtgggcagaatgataggtccattactctagcaccaaggcctactttacagggattgaaaattgaccctagcaattctttcaaccaaggcagggaagtacatttagtttttcctgaagaaaattggtccactacagatctctgtaattgcctaaacacaaaatgcaaaaaatccaaaggcaaatgggcgaggcctcgcagagttgatcttaaaaaccacattaatgacatgatccatgggcttaagctcccaaacagtgataataaacacttggaagaatagatagccgcgttgactaaacttatgtagaagtaaagctgagccatctctgaaaccatgcgtcgggcatatcatagaggccgcactacctgagaacttcaaaattccccaaatagatttgtatgagtaggacagatcccagggcccatttttccaaatgtaaaagactcatgcaagtggcaaaggccagtgatgatgccaaattcctctaattttcattaacacaatctaagtttgcgaaagaatggtggaaaaggctccctcttggattgatttactgctgaaaagacgtataatccacatttaggaagaaagttattgctgcgagggactacgatatggaagtaggatctttgaccaatctcaagcaacatgcaggggagagccttaaggccttcatccaaaaaatgattgaagcagcggccaaggccaaggttagcaatgatatgaagcttgtggcccttcaatttgggttaaagttttgctcctttctttggtgcgaattgcaaaggaaaatggctaaaactttgttcgaattcatgtccaaggtccagggagttaataattcggaagatgcttatatgctagcttttagagtttctccaacaccaactccacccgtccgtttactccgtaattctcaacttcggtaggacaaatagctggaagccattacacaactcctacattctatggacccactggcttagggcacgtgcctacgcaaactaatttttttggctatgggtcagtacaaactggatgtagtgttactcgcgaagaagcaaaaatggatggcccataatcgaatgtcaattattcgaggagcaagagaaataatttgagtcaaaaagagcgagactccaaagaaaggaagaagttaatatgaacaaaaatatattgaatacagtagcctcatcgatattcgtaaaaatgtttataagattacttgcaatatggtccactacaaaaagtcaccttcaatgttcaaaggagggaagaaaaagatagatcaaaataagaggtgtgagtaccacggcaatgttggccacactaccaacgaatgcaattatttaaaagatgagatagaacttttggcctgagtggggcacctgggtcattgggtctagaatccaataatctatcctgaataagatataactcacgaacaactcttgattcccgaacaggagggagctgtaaatcctctacagggggtgggcctccgtcaatctccgaaaatacaacctctggctccataagcttcggtgatacaagccccagcaattcaggcccctcagggggtacccaatgcgcagcctaccgtggttgtcctagctctcaaacttgggaagattaaggaattacaaggcatgaatttactgtcacgagtaaaaggcgtgccaacccttactagacagttcgctgcactaggctgatttgtctcaaattccactgacaagtgtgttcccttattcaatctactaagatgaaggaacaaacgatttcaatggactgatgattgcgcgaaaaccttctaagctataaaacatcaactatgcaagtcattgatcttttcaaaaccagtagatgttgaagagttattcatctacttggctatcactgagcatgcagccagtgctgctctagtggatgagaatgaagggacacatcgcccggtgtactatgttagtaagtgactcattggagccgagtctaggtatccccccccccattaagaagctagcttattgtttagtattggactccaaaaaggtaaggctatacttttaagcccatccaatcaaagtgttgattaaccaaccactcatgcaagttctgatgaagccagaagcatcaggatgtctactcaaatgggttgtagaacttggtcagtttgaaattgcctatcaacctcgaacaacaatcaaaggccaagcattaactgacttcatcgctaaatgcactagcctctaagaagacaaccccatcatctgtcaataccagaaccacatgcttgagactgtagctcaagagagttttggaccttcttagaagctctacatagatggggtcctccaataggcatgtcctcggtgtaggtctcatccttgtaattcttgaagggtttcacactcacaattccttgtggtttgagtttaatgcaaccaataatgaaactgagtatgaggcactcctagtaggacttcaattggcactggctgtcaaagctggatcattagagatttatagtgattctcagcttgttgttaatcaaatccttcctgaatacaaagcccaagggctgaagatgattacatacttgagcaaagttaaaaatttgttatcctagctaaaacactactccatttagcaagtaccacgtaaagaaaaaatgaatgtggagtcctagctagctagtacaacagattctcattgaatacctctctaaacaaagcatcagtgatgactcggagtctgttctcataaaaaaaaaatagttcatcatggataaccttgattagccaatacttagagtaacgttttctcccaacagacagcaatgaagctaagaaactaataagaaaagtagctcgctttatcattatggttggactgatgaatagaagaagctactcaattcctcttctaatgtgtgtcacaacagacactactagaaaaaatacaattagcaacactttttttaactaaagaaaattaaaagacaacacttataaaagtgttgcctcctagagtgttgccaaaaat

SEQ ID NO: 111156 - DNA, 2378 bp, Cannabis sativa
  modified_base (26)..(54): a, c, t, g, unknown or other
  modified_base (2311)..(2330): a, c, t, g, unknown or other
tttctgatcttttattaattagtaannnnnnnnnnnnnnnnnnnnnnnnnnnnnagggcacaaaatccaacaaaatcatctaccacgaagaagttacatgaaaaagaatactacactctcaagtaagggtgaaattcagtcggttatagtcggtttttattaattttatagtcgatcgttcgattacagtttttattttatgacaatcgtaattgatcgttgagaaattataatcgttcgaaactgaacgtacagtttttggcagttttggtggtttaaccaattttttttttcaaaaatcgtaaccaaaactaaccaccaaattctgtaacactctaatctctagggacgccatgtgtgtgcttttacaagttaatttataaaaataaactgacattttaataaaatatgtaatttaaataaaatttactaattagttaaagtaaaccaaacatacgttataatttttcaaacttcagggatccacttttagactttacaaaagtttccacccaacattacattcaaaatataactttgagatctcgaaagcgacttgaaactatgtcccgacaactctatcctactagctggataagttgatatgtatattttccagtggagactccaactcataactaatctaatttgttctttccttacctgcaccacgaagcactcgtgagtcacaaaaactcaacaagaaaaacaatattataaatatcatataccattatacaaacataaccaaataatcacgtactttaattcatattcaggaaatcacactacacattgtaaaacatacattattaataatatttatctaataagacaatacttcactcttattttataaagtaatcatttcaatgtcgttgtctaatgagacaacaaaaccttacaacagttttacatagagttataaccctttcttgcatatggtaataatcgtgtcacatatagacatgctttgaggtacaattatatttttttttatctctaatccaaattcaggtgtgccgctcaacttgaatggtgatcactcgacgatccaagatcttatatcacaacagcggtaaaccgataaataactcgttataacactttctaggacttaaacttaaaacaaaaggtttctctatctataaattacgtgacaataccctaaatatcgataaaatataaaaaacgagataccccgagaattcccaaccgattgactgaattacgaatcggtccgccgtttctgatggacccaaccaattcatcggttcacgaaactagttgaccagttctgcgagaggtacattaacgcaaaaatcttcaagttctactcttccacatatgcccaaaccaaaccaaaccaaaacatctagaacaggtcaaatataccttctaaacagtttaatcaattcagaacacaaaattatacgaggaatcaaaattcaccatgtgagagtgaagctttgaactcaaaagccctaacctcattctcaaattcaacacaatattcctagacatgaattaactaccaattctaacttaaaaaatgcatacatcaattctaatccaaccaaaacatcacagaacctaattcctcaaaattccttaaaaacctatccttaactcagccaaatccaagaaaaggctaaaaacaactcacctcaaacttagacagctcctcacttgagtttatagtaagaattagagaagaaaagatgagaaaaatctaaggtttccctcctagttttctttgagccaaaaagaaagacagagaaatggagagagaagggttttgtgttgaggattttctacagaaatctaaattccaaaacctatataaattataataataaagagaaagaataaattaaattaaataaaacttaatttatttaattaaactcttaatacattactctttttgcgcttccatacaataatattcctattaaaatttaggggtaaaattgtcattaataaataattcgtttaacctcaaaacttgtaaacatcacataaaatctcccagtatctctaaaatacacttatactgatgtgatatttttggccaatcaatcaagtttctactattgttggacctgaaaatattttattttatatataacatatatattacacatataatctaataaaatttacaaaattgtaaaaattgcactaaatatgctcatttctcataataggcccaaatacccaaattatacatagtaagataataatcttactcattacttctcgtatttaatgaaatatactttatcaagggaaatttgaaaaactatannnnnnnnnnnnnnnnnnnntattcttaaaccaatacatttcaaactaaaaaatatatgacactttta

SEQ ID NO: 111157 - DNA, 1793 bp, Cannabis sativa
aatgatagaaaataagatcatcatctatcagagttggacattatcaaagtaaatttcttataatcaaagcaaaacaagacacaaatttataaataaataaatgggtatataattggaagagaatttgttaaaattgacgttagatttggagtatctaagaaggaggggcatttgtgtcgttttccacaagctgaagagtcgttttctgcagaggcaggcaggcattcttaaatgcgtttccttcaattaccaaacatttgttacctatacatgtcacaaatgctatatacttcagaaaatttaccgcaactagaataagtcttacaccaccaaaaatatcaattttgtttttttgttgcaatagtgttattactaaagcaatgtttaaaaatattatagtaatgcaaaagtgtaaaatgtaatttattacctgaactagaaggatagaagggcagagcagaaaatggtaaaatggaaagaagggtcaagtgggcataaataaaccacaaattaagaaatgtgtacaatacagaaagctcgaaattttggtatacattaacttgtaaagttaaagaagcacgtgcggccaaaatggcaaattaatattcacaaaccaaagactatttataacgtatatattatatatagatacttgtacgtgtcatgactcatgtgtgtacatataactatttattgactatcttagactctgtgtagcctaaggctaagctatgaactcataataattaatcttctttccagttttgggggacaactggtctgtagacatatacctgaaattacaatatcaaccttggatcaagtttcagtcaaaaataaaaaataaatcatgtacaaatgctttcgattactattgttatttgtcttatgccaaattttagttggaaattttctcattaccataggaaataggaggatcacaaatagagaagaataaaaataattacactcaacaacacttaacaggcttgactaagatttttacatctttattctaaaagtcatttcctatctaacatagatacttaaaaaaatttagaaatgcatctaataatttttaagcctcatatatccaacttagtgtctaaaaatgagtatattcttacaaaattctaccacaaaaaattgcattcaacaatatatatatcaagtgaacaatatggtctctatttatagagttttcactctcatttaaatatgaataactaccataaaattcttagatgttaccgatattaaattagacatttatgaaattaaatgagtaatttgagagttttgagaattgttagaaccaagcacaacgttcataaaatattaaaaatacatgctgaaaaatagttagatgtcacctcttcctcggcgacatgtcgcctttaatttggtaacaagtaattatttaccaatttttttagcaattaataaaataactccaaacggttcaaaacttttcacatagactttatatcatttatacaccctgtaaatgatagaaataagtcacagtgactatatttccataggaaccatttattcatattcaaataacattagtaactcaatttattatggagggatgattattaagatgagttacaaattttatgatctttgaatataaatgatttataactccttttagatcatcatttacacatataaaacttcatatttatatattataatttgacaaatattatttaggggctttttcatttttatacttcaaaacagtttttttttttgtattttttacgaaattctacatagaa

SEQ ID NO: 111158 - DNA, 8476 bp, Cannabis sativa
  modified_base (8431)..(8441): a, c, t, g, unknown or other
ataaaatccaactccatggctgtcgagctagaccaacttacggccgacaaatggacactgacttccaaagtggaggagatcaaaattcaagcaaaggacttttggaggagggccatcaaagacgctttctgaacggttgaggctaaatataatcacttcattaacaaggccattgaatcccatcagcaaaaaacccaacagttatagactgagttgtccactgctacgatcgaagtggaatctctttccaagaaaatccaagaggtcaatgatcttaatgacattttgtaggctcgggtactgcaaaggagcaccgtggctaattataagcagattaaggtcaatgttctaaatattaagctaagggatgataatgcaaagctcaaggaagtcaagtctgaatctgagagtcgaagggagtgcacaagttggagatggatcggttggcagagaaggattggtggaagaaccttgttgacaatgagaaaattctactgaaatgtaaggtagcctgggaagctaaaagacacaaggcttttgtggttttcagggctttttgtaggtctgctaccacttactaccaacacatcaatgactccatctaagattccatgaaggttgagaaggaagctacagaggctgcggagacctatcacatgcaaagcgttgagatagcctttgtaagcacccttcacttgttatggaataagtatccttctgtactcaaggtcttaagggaagatgaagcggagtatttggcgaaggtacaggctttggagaatggcacatatctcccagctgactcctacaaatttgatggagaggtttcttctcccaaaaattatggttgcctcttccaaaactgaatcacaactcgaaatagaccagattggctagagtccagttcaagaccatgcccataaccagactcaaccatgagattgtggcactttcttcttcttgttctttttttctccttcttttggttttgggggcctttggctcccttttggtattcacgaagacagataaaaatgccttgaccagaaggtcgtttgtaatagtttagacatcttttcttttttgtctttttaagcatactattttagcctttatgttttgcttatttgttagccttttaataggttattttaggatgccttaagatgctggttccaacagccaaagctttgaaccttaaacctttcttaggaccgattctaagccacttgctgagcgttggaagtgttaagaaacaagttcttcttctgggtctcaatactttatgggacttagggcatttttatggcacatatagactttagctagttaatttctaagtagtgtaaaaggatcttaagtttactcccaaaccactaggggttcacagagctcaactcctatttggtacttagattaactgtttaagcaaactattaaatctacatgtgatgataaagtggctttctcccaaaaggctaggctttcgtattccaggcatagctttattttttgcaccaacataatatcgataaaggctgaaaatacatcaaaattcaggcaatattttcatttccacaattttaatttacagagctaaattaatgaacaataaatttacctctcgcaaaattttgtaagaaagcagttgaaaacgtccaagtatttcaggcaaagattctactcccaattttttaggtataaggctatgaaaacttattttgcacatgataagaaaatagttgaaaatattaaaaattttaggcaaagttttctattcccaagatttcataacaaatatggggctttatttttacaaggtcatgccatttggattggaaaatgcaggagtaacgtaccaatgaatcttcaataaattgtttgaaggacaaattggccacaatatggaggtttatgtgtggatggcatgttagtaaaatcagtccaaattaatgatcatattatagatctcgatgaatgattttttattctgagaaaatacaaaatgaagcttaatcctaagaagtgctcttttggagtctcattaggaaaattctttagatttatagttaatgggaggcaaatcctaaaaagataaaagcattgctcgagattccatctcctaccaaaagaagtccaatcattaactggaaaaacaactacacttaatagatttatttcaaaattaagtaataagtgccttctattttttaatgtgttgagaggcaataagaagtttgaatagacagaggaatgtaagcaggttattccaaacattaaagaagatttttaaactttgcatgtactatcaaagtcgataatgggagagaccttgttcctctatttagtagtttcaaaaaaagctataagtgcaaccttggtgtgagaagaagggaaaatccaatacccagtatagtttgttagcaaaaggttgttaggggcagagacgagatacacatcacttaaaaaacttgcattaagtctaatccatgcctcaagaaaaatgcgaccatattttctagtgaatcccattagagtcttaacaaatcaatgattaagacaagttctcttaaaacccaatggctaagggcgtttaataaaatggtcgattaagctaggataatttaaaatttcaaaccatcccaaagatgcaattagaggacaagcattagtggatttatgatagagggaatgggtatggaaacaaggccaagacttgtggaagttattcgtatacggctcatcaaatgaaaatggctcggggcagggatcatattaatatcacgtgagcaatttaggttccactatgctctaaggtatcatttttaggcttcaataatgaggttgaatattaatcattgttagctggactaaggattgcaaaagttttaaaagcttaagcaattcattgtttcagtgattctcaattggtcgtaaaccaggtattgggagaatatcaagcgaaagggattaaaataaaataaaaatacttggagaaagttcaaaataacttaaagaaatttgattactataaaattgaacaagttccaagagaataaaactctaatgctaacacccttgcaaagttagccttgtaattcaagactaatgacctcaatttggttcccattgaaaatcttgaggaacctagtatttgcgagaaggaagatccaaatgtagaaacggtaaatacaagctcgacgtgaatgacaccaataacggattatctactaaatggaagaatttattttgataaaaataaggctaggaaactcatgtataagatctcaagatacacaatcgtagaaaatttgctttatcgaagaggcaactccatgtcgttattacaatgtgtattactagcaaaacccaagagtataattaaagaaatacacaaaggcttttgtggagatcatgtaggttggtagagcttatcaaagaaaataattcaacaaggatatttggccaaccataaataaaggtacacatgagtttattagagagtgataaatgtcaaagattttcacacattccttgggtgcaaccaacaaaattacgaatgatgaactctcgttatacgttcaccatatggaaaattgacctcattcactcattaccagttggacagggatgggaaaaatatacagttgtggtcgtcaatttctttacaaaatagacagaatctgaaccattggtttcaatcacttcaaaaaaagtcttggacttcatgataaaagcacaatatgttagtttggaattctaataaaattagtgtcaaataatgggactcaattcgatagtgatatattcacagagttttgcaagagaaatgaaatcataaaaagcttctctttagcagctcaaccgcaagctaatggccaagtagaggttgtaaataaaactcttaaagacactataaaaaacaaactcggcgcaacaaaaggaaaggttgatgagctaccacaagtcttatgggtccactgaacgactgagaaaatggcaacaggacacactccattttcaccggcgttcagctaaaaagctatgctacctaatgtggttaatattgttactcattagcgtgagttttacgaccagggacaaaacgaagagttattacaagaatccttaaacctgctcgaaaaaagatacaccaaataatagatgtgcaatgcaacatatcaataaaaaatacccaattttttttaataaaagagtcaaagaaaggttgttcaatgttggtgatttggttttatgaatagtattcctcattacacaagatccaatagcgagtgtattcaatcctaactgggaaggtcaatatgtaattgaggatgtaataggagcatgagtttataaattggcttggcctaacgacacctggtaaaaaatacttgaaacaacgaacatttaagactttgttattagtaagaaattttttaattaagtatataaatttacttttaagtttatgtaatatttgatttttttttaatgaaatttacattttatcaagtaacataaagtttttactttaaattacttagggacagacatatataatattgataattaaccaaacattaacaaccatgttattcatggaaaggttaaattttaatacttaaatgccaagaaatttttttcaaagaaaaatagataaagggatctcaacaaacaggttcggaacagtaaaaaattgatggattcattctatttataaagcaaaaataataacaagtgttataacgagatttctaagatcaattttaatagtaaaatgagaagttaaatgtaaaaggatgaactaaatactcgcatatgtcaaaacaaaaacaccaaaaataactaagtataaaattagttctacgaagtgtttgagtttgtgattattacttgcacgaaaaacaagtagtaaaatcgagatgaatagcgacaagtcttgagtcatttcaaggaaagtaaagtttttttaataaaatatggtcaagtcatgaattgctttacatagtcaaacacatctaatctttcacaagtaaaatgaagaatatgcttagacaacatgtgtaggaaaatatatatgtgcatataaagtctaacatttaaatataaataacctagttggccgtgcaactaggcaaaggtcacaagtaaattaaaattaagtcttaaattaagaaaggcaaataatattatctcggccttcaggccattaactatatatataacaagattaactaagcctccttagcaggagacttagaggcaacttcttcttcttcttcttcttcctcgccttctccctctggtgctcgtttttccctcttgcagctttatcttccttttccattttcttgaagatggcgacacatttttctacgttgggttgcagaaagtctagggtgactcctttgttatttttccagactgaagagagacttttgagctattgtcctaaacattaactcaaatgttgatccggtcaggcagaaccagaggccacttgatctggtataaaggttgtgtaggccgaagtcaaaaagctaacattaatagagttccttaaggaaactctataccatgtcaagatagctaatccagttcttgttgtgaagccaaatggaacttggaaaatgtgtattgacttcacagatctgaacaaggtgtgcctgaaagattatttcccacttccacgcatatatcaaatggtggaagctacatttagatacaaactattgagttttatggacgtgtactccaactacaaccaaataaagatacatgtagcagatcaatagcacactagcttccaaataaataaaggggtatactgctacctagtcatgccctttaggttgaaaaatatcggagccacctatcaacaattagtgaataaaatgttcaaggatattttgggaaagaatattgaagtttatgtggatgacatgctagtaaagtccaaaactattgggggagcataagaatgatctggaagaagctttttcgataatccaaatatatggtatgaagctaaacacaaaaaaatgtacctttggagtttcttcatggaaattactaagatttattgacagcttatgaggaatcgaagccaacttaaagaagatacatgctctcctagatatgccctccccaaggaaacataaagcttaaccaaaaggattgcagctctcagtagatttgtgtcgaaaacgacagataaatgcattctatttttcaacatcttatgtggaagcaagaaatttgaatggatcgttgagtgttaagaggctttccaaaggttataagaaaatttggctagagctcctattttatccaaaccgattgagaaagaactattatacctttattttgcagtgttagatcaagccatcagtgtcgcactagtgcgagaagaaggaggggttcaatttattatgtaagcaaaagattgatgggtgcggattctaggtatcccttgatagaaaagttgttctattacttactaatagcctcaaggaagttaaaaccgtacttttaggctcatgtcattaaggtattcacaaaccacaatcttcgccaagtcctggaaaagccagaatcctcaagaagattgctcaagtgtgctatggagctaagtcaatttgacatacattatcaaccaataatatctatcaaaggtaaagccctagctaattttattatggaatccaccgaaattaatgatgactcagaagaactagttataggactggtgatctggaaagactacattgaaggagctttgaacaaaaaaggtgtcggagctagagtaattctaatttttccccaagggcatcagctccaaagtgccctccactttcaattttttgcctccaacaacgaggcaaagcatgaagcaatgattgccgatttgcatctagccaaggatgtcagagctaaaaaacattgaagtttatagtgactcaaaactatttgtgaaccaaatatcaggggagtttcaagccaaaggagaaaagatggctgcctatatctccaaagcttgggaactacttcagaatttcaaaagatacaccatcgggcgagtcccaaggaactagaatgcctttacagatatgctggccaagctagcaactaattcaaggataaagaaaaatagagtggttcctgtagctcgactcgtcatgccaagtactcaggtactaggggtaaatgtcattgaccactccgcctcttggataggtcaaatatacaaatttttattttagagcactacccacaaatatagtaaccataagaaaactccagtattagactctaagacttgtcatcatggatgagaggttgtattgaagagggttatctatgccatactcgagaagcatagttgggaccgaaatcagtgcaattatccatgagatacaaaaagacttttgcagagaccacacatctggaccaagtttatccaaaaagatcatccaacaagggtgtttctagcccaccatgaaaaaagattgtatcagctacgttcagaagtgtgagcaatgccaacattacgccaatgtcccttgagctctgcctacaaaaatagccctcatgaacaacccatggcctttcatagtgtggggaattgatttaatagggtctcttcctactggaaaaggaagagttaaatacgccataattgtcgtcgattacttcgccaaatgagttgaagcagatgcaatgaatacagtaacctccaaaaagtccttgaatattttaattaagaacatagtatgtcattatggtcttccatataagatcgtgtctgataacagaaaaaacaattcgatagtcatcaattcactgaattctgtaccaaacatgggattatcaaaagctttttggttgtggccaggtcacaagtaaatagacaagtggaggtcgtcaacaagatctttaaaaccacattgaagaagaaattgtaggtctacaaagcacattggttggaagagcttcctagagttctttgggcatactagacaacaaaaagaactccaacatggcacactccatagtctatggtgtacggttttgaggtcagtggaaaccaccataccatctcttaggtgagaaacctacagtcctacccgaaaaccatgcttcatttcaagaattaatggatttgatcgaagaactccaatagtaatcctatacactcctcacacacacacgacaacccttccccacacacacacggcttgcatgcgagcccccatacactcgcaccaatacacacatatagaataacactcacacacacccatggctcacatgcgagaatcctacttacaccaacacccccacccacacccatgcacacaacgctcatctacacatgtacaacctctccttcttacgctggtgctttctgttgggaattattttaccnnnnnnnnnnntctactcacaagtatgtttattagcatcctaaata

SEQ ID NO: 111159 - DNA, 9333 bp, Cannabis sativa
aaacatcttagtagccagaggaaaagaaagcaaaagcgattcccgtagtagcggcgagcgaaatgggagcagcctatatattatattatatttaattataatataaaagtctaaaattttgttaggggtattttgttaagagtctaaatttcccttttcaaattatatattattcctcagtttgctttcgattttgctctcgtagaatcaaaacctggatcaatcgtttccactatagatatttatctttttcttttttcagactttcaggttctttctttgaaccctaattccactttggtttgtagcagacggatccatggtgtttttcagggccgcttcttcgttgtccaggcttcgctctcgacttgtaagtttctctcatactcatttatgttttggatttgggatgttctaatacgatcatgttatttctgatgaatatgttttgcagactgagcagccaaacctcaagaattctgtcagatggcttcaagttcagagctcctcggatcttgtgagttattcatttcttcgttcttgtaatctgatctgattaagtgattatatgatttcgtaaaagaatttcaaattcatcgccgggaattggcaatattaatattgctctccgatttcttttttatttatatttttaaaaatttaatttaacagcatccttataaacccctataccaattataattattttgttattatttaaaaaataaattcgttaatcaaaatcattatttaagttgttaaaattattagtgaaagtgaattcattttaagcatggcaattggatggtaacaacatggacatcatcatcccatatagcaacttacatgaagcttgcagtcattttcttactttaatgaaacatcgtattgctactgtttattacatgtcagaggtgacgaatgagtaacatttatacaatttcttatggtcattattgcccttttatgtaggaccttctatctcagctgagggaattgattcctcaacaacaggtttgtgactttatttcgtcttgcttcataaaattaattctcatttgataaatccctcgtgttcttcttttgataatcaaataccatatagaattttgcttatattggtgttttagatcataatttgatgcagtgttatggaacatgtcaattaaagttcacatagctttttttttttcctttatgctgaacatttaaagatattttaagaaccaaactaagaagtttactgaattttgtattatttggagctttaaattttctgcttgttttgtttggtaacaggaacggctgaaaaaattaaagtcagaacatggaaaggttcaattgggcaatattactgttgatatggtaaatactgttttctgtttctatgtttttagtgtaaaatattgaatgttcattatagtcatagaactttacaagtgaagatatagtatcacgctgccagggtatcttgtgtaaaatgtaaactaacatatgttacatcttatgtatttttgaaggtaattggtggaatgagaggaatgactggactgctatgggaaacctcattacttgacccggatgaggtatacacttgaaattctgggttaggatattacatatttactctggttgtgatgcagtcagagtatataatgttttcctttcttcattatgtatgtttgtttctgtagggtatccgttttaggggcctgtctattcctgaatgccaaaaagttttaccagctgctaagcctgatggagaacctttgcctgagggtcttctctggctccttttaactggaaaggtatgcctttgctgtttttttttttctcccaatttaagaagcatgttcggacagtgtaatagcaaatgaaggcgaaaaactcacctgttagtggctaacattacaaaacatgtttactccaattcaattgagtcttgtgaaaattgtttctactagtcaaatgttgtgcttaatattgtattccaaccttcaatacatagcaaattattgttgctgtcacatctacaagtattccaataatgtttctatcttttcttttacatcccttttggtcttcaggtaccaaacaaagagcaagtagatgcattatcaaaagaattgcgagcacgtgcagttgttccaggtgccatcttatttttctgttcactgttacattcttattcactgtggtctgtgcttgacttgactgttttaatgtaatagtgccattgtatgtttcatacatggttcagaacttcagaatttgttgtgctagtgtatgtttcatatacagttacaggttggtcgcatttatttgctgtttggagtgagaattcatagaatcttttaaagactgatgcctttagcatttgtatattttgccttgacagcttatcattctcttagatcatataaccagaaataatgtgttactgccgtttggagaaattggttgtaaactaataagtatgttttgaaagattgttcagcgacgtagatagtctttggttatcaggttatagctatgtggctgcatattgtaaaagagttcaatgtatgctatattgttcaattgtacttgttttattttggtttgtaaaagtaaaactagaatcaatgtatgtttttctctttcgctgaagatttttgtgtcctacatttgtttgcctggctgcacatatacatgtttattttagtcacgttgatgctcagttacattctatggctagtatagtgattctgtatctcatgcatatataattattgcagattatgtctacaaggccattgatgctctacctgttacagctcatccaatgactcaattgacctctggtgttatggctcttcaggttggtgaatggatattcacttatttgaccattcctggatctgatctgattgactttattcttggtttttatagacgtactaaaataataatataaactttttatatttattaaatattttatttgagaggtggtcagtcatacacttctgactcctgtctctttttggaggtgatcttcctttcttttttttttttttttgaaaaaataatattgacttaatttttcattaatttcgaggtgatcttcctttcttataagctagttgcagattgtataaatagctagtacttgttaggggaaaggctgtctagagaattgttttacttaggtcacataggataaaccaagcctgtcgaaagcttggaaagtgtattttaattcaataaagaaatccagaggagttggattatccagcaacttaattcttactgtcttgacagaaagaaattccttttcacatgttgatgctttgttattgtttgtttggttctattcatttcataggagtagctctacttctaattgatactacctggtactttgtctgcaattcaggttgagagcgaatttcagaaggcatatgagaagggtatccataaatcaaagtgagcttctttgcattgctatgattttttcaacccagtcaactatgattttgacatgtttaaatatttttaaatatttcttaggtactgggaacctacctacgaggactcacttaatttgattgctcgagttcctttagtagctgcttacgtttatcgaaggtcagtgaagtgtatcaaatataatattaatatcccagtgacactttgcagttagtcattgattagcgcagatgcttttacatcatcaaatgtttgagtatcaaactattttaggtgtttactagtgtaagaagtgcatgtttatacaatgtgcatgtgattttcttttgtcttcattataatttagttgtaaaaaatcttctgtccattgtgcttatcatttctcttgcatttaacgttgatacacacgtattatgcatgggcttatgttgaaatatctcctgatgtatcgggatttgatcacttttgattcctttatttaggatttataaggatggaaaaattattcccctagatgactctctggactatggtggaaatttttcacacatgctgggttttgatgatcctaagatgctcgagcttatgagactttatgttaccattcacaggtttgtattataatctttccctaagatcataattatgtaacattgtaatgtcggactgagtcttaattaacttttagtcttcaccagttaaggatggcaactagagacaggctgacagtttttcttaacatctacttgcaatatgttacagtgatcatgaaggtgggaatgttagtgcacacacaggccaccttgtaagttatcctcctgctctaagcattttaatgtaaaaatgaagttttcttttccctactctatgcccttataggcagaatgtatttcttttggaacttaagtacttgtattactaaacaaagctttacttaaagcaagtaaattgtagaacaactaccaaaaacttcaaaaactatacacagaaatttatataaaattacaaaggaaaagaaaggacttatgaattcgagaaaggaatatctttaaattcctttacattatgaacccacatgcaataatcagttcgagctctctctttttcaaaaattcttttgttccttgatgacagacagcggaacttgtcattatcttcatcatattcctgaaaattagagatgcaactatttcttttagagaacttcagccaaattaggaaatccacacaataaaatctcatatcctagccaactttcttcccgaaactgaacaaatctgccatttcattttgtaaaggacatcctactcaagagctctttgtgggactccttatcatattgctacccagttgtgggaccactttttaggataaaacaaagtgaatgaaagtatgcctacctcctttagattaatcttttagagaatttactaatatttggttcaccaaaactctcttcttggattatcttccaatagtataccctaaaaattcaaggctatggtaccaactgcccacctaatataatttgccttgggaaaaaccatgccttgcccagattcagaccccataagttgcttttaaggctgttaggaatcacaaggtgtttggtggagtgacccatgatacttataaatatttcagtattctcaaatattttcattgtggaacaccatactcgaacatcctcttaattggctaatttgtgctcaccaatcatgagtggctcaacgcaagagactcttttggcctaaatcataaatggctattttggctcaatatttggacaggtttggattaaataatgtctacaagagttaagaagctccgatcctatatttagaatcatgggatctcttttaaaaccaattggtaattactggagagactcatgttttttataaatagttcactattctcaaacattttcaacgtgggaaagtggaagccatgcgctaacaaaggctaaaaaagatttttattaaattatgcagtctctttgatccctctaaaaagaacggcgaatcatctattcaaaatttttaaatgttttacttctattttctcttcctactccaaagccatgtaaaaaacatctacttccttggctttatttactaatctccccttaaagtaaacaaaaaagtagacaaaaggatccatgtgaacctttaaatttacccctcagtcttctattcagaaaaaatgagtatgaaactgagactaaacacccctatatccacttcctccaaatcctcggtatgtaattatctaatacaaaattcaaaactcaacaaagatcatatgcttttcctaaatccactttgaagtaactcccttcttcttatgacaatgctctactagttagcaatcaaagatacatcttaaatctgccttgttgcaacaaatgcatttcttgtttcacccatggtcttactacgtgcttctctcaacctcaatgacatcgatttagatgtattcttctataagtttgtcaccaaaataattggtctaaaatctctaactttgcagggttttttcttttttgggattaaacaccgtaagtttcctttgttattccatgtgtatgagaccatcctttgcaaatttaacaagtacttccgttaaactctgttaggtcaacttttgcaaatctcatttcaacttctctttcctctttcaatctaatgctccaactccctcgtcttcataactgaaagctccataacttaagctgttgcttcacaaatgatagtttcttcataaatttaaagccctgtcaacttgaaactcgagcatccgcctacttcataaatccgagattctgctcacttagtagatttaaagcatgataaatgtacagcaccatagcttaagttgcttctttgaaggttgattgttccaaaaccttatattaggattcctccatgttttgctggtaactaagagaaatcacctgtcctcctccaagaattctgattatggtgtactgattctttctccgtgctgactttgaagaaaacttctctttcttgtttccttttgcattgttgccatctgattgaaagcattgcttctgtgtttcctttgtaacacttcatcttaatcattaccattcaacttcttttttggttcttgttcaattcctacgatacctcttacccttcggaatacaccatcttctggcacggtaatatgcctataatctcatttatctttattttattcagaaatatgcctgtgacatttcaaaatacgctccattaaagtaagtgcaaatggacttacattcaaggtattctcagctctcaacaggatttgaatggcctcagttaaccattgtgcagtgttgaaagaaatgattaactcataactataactgaatttctcattaagcggtgaagtagtgcggttttggaatattatttatctatttgttgggctaatttttaattagtttttcttccttgacggtatctttcaaatacaggttgcgagtgccctttcggatccttacctttcatttggagctgcattaaatggtttggctgggccactccatggtttggcaaatcaggtattgcatagagttttcaactgccatctatctattagatttgaaagcattctgtttagtactgctaaaactcatcagttgttgttgttccattcattcatagtaaattaaaaatgttttttattttttatttttaatacttctattctgtgatgatgttggccacttccatgctgtttatatgcattttttattgagacaattattgcatatacacattagttggtctccttaagctttgtagtggtgatacgattgaactgctatcttgttatttaattgtttcattgcaactttgtcacatgctttacataatcaaatttaactcggataaatgatcaaattctgtaatatctcgaacctctacattttgttattatatatacataggacagaatccaagaggggtagtcaaatatgttatattatcaatgacgaaatgtgttgtgattatttttagcttgtttttgttcatttatttggcagtttatgttttagttggtaatcccccaccaatcttgcagtccttcattccttttcctctactcttgaatttgaacaatttttggttgcaggaagttttactttggatcaaatctgtggtagatgaatgcggagagaacataaccaaagaacagttgaaagaatatgtatggaaaacattgaatagcggaaaggtaatgatagtgattcatgttcagttactttttgcatgaaatgtttgaagtttgtctattatttgatttagtgataagagacaacacccctagcgccgagcaggtcacttaagattgataagcaattttatgttatttaaggaaaacaataaataaaaaagaaataaacaaaatctttcattcatcatgtatgcagttattcgcttgatgatttgggcctgtaaaactatgtcctcttgttcagtattattctataactcttattcttccatgtgtttttgtctttaataaaatgcaggttgttcctggatttggacatggtgttttgcgcaaaacagatccaagatacacatgtcaaagggagtttgcactaaagcacttgcctcatgatccgctgtttcagctggttaatttcccttctgaatttattgagagtgccaatgttcatccgattgccatttagctgacatatttttgcattaataggtttccaagctttatgaagttgtgcctccagttctcacagaattaggcaaggtaattgatgatccatcttttacttgggccaaaattatttatttagaaaaggattcataatgaattgcgaaaaaggattcatcacgaattgtaaaaagaattcataatgaaaaattaagcatctttctgaattttctgtggacaccaatagcttaaaaaagccatgtacatggatgttgatactgcactcttaatatttgctgaaactagtgatatgatgactgatcatacttggggaatgtcttgttctttgtaggttaagaacccgtggcccaatgttgatgcccacagtggggtcctgctgaactatttcggtctaacggaagcaaggtatgttttaaatggtgcctagagttttttctgttttgtggtttgttattataatgtatctattcttaattttgttaggtatttcactgttcttttcggtgtttcaaggagtattggaatttgttctcaggtttgtgctgttctctatatctctacattcattgacagaaatatttgattatccatacatatacatgcattaatttttttttttttttttatatattattaagaactgttgtatcgttccattttttgctcagttaatttgggaccgagctcttggtttgcctcttgagagaccaaagagtattacgatggattggcttgagagtcactgcaagaaagctgcttcatcttgaaagttgccgaggattgcaccatcatttatttgttcaataataattgtttcaaaaaaacaccctggctgaggttttcatgttggggctgtagagaactgcaacagtttagtgttaattttactttgttccctgatatttatttatggcttcaaataataatcctgcgatgagtaataataaggccgaaggttttgtgagacttgcatgcgtataatatttctttttttttttttttttttgagaataaatacttgttattataaattaataagacatgtcattttgtaagggaaatttgacaatatatgcttaaatatagcatatattgttttaatatactatgtaaaaaaaaattaaaaaaatactctccaattaatta

SEQ ID NO: 111160 - DNA, 2091 bp, Cannabis sativa
ccgtgttcggatcaaagcctccaatggattctacttgcaggtttttttttttttttttatgaataatatataataatatactccataattttatgttttttctttttgaataacacaattttatatgttgattgttcattttataactcaaaacataaagtaaagtatctttaatggaaagctataaatgtggtgtattgttattttttagaatattttactaaaaattaattctaatggtgatgtaaaatgtgtgctaaatttggccctagctaaaaattgtgctaaatttttttttttttgaaaacattcatcagctttattaaaggcaatccatagcgattatcaattcaggagaaacatcactactcctgaattcacgattagcaactaaatagaatgctcgagtcaagcaatgagcaacactatttacaaaacgtctaataaaattgacagaaacgtcacacaactcatctaataacattttacagtcagaaataatactcccaaagtaaaaaaataaaggggtcgaatatcgcaatgcttgtacaactgtaagactatccgtttcgattacaacttccttccaacctttatttttaatccaactcaacacttccttcatgcccaaagcttccaccatttctggttgcaagaccccagaccggcagctaccgaatgcctctaccatcgcaccagtagcatccctaacaaccccagtgaagctatacattgcagcaccattaaaactggcagcatcaacattgatttttaattacctatttgtcactcattaataaaaaatgtttttatatttataagttattaaaataatataaataaagttaattgtttgtatattttcaacgagtattaatgatattattgatttttttagttaatttacaccttatgcattggagcacaaatataaaaattaagcaaaatataattttgtgatatattttaaaccaaatttaactcaaaatatacattattcattggagatggtctaaaagttttaactctaaaatatgaaggtaataataaccgaataaataaatcaaagaggaattgtacaaataagccatccaataattactcaaaatttaataaaaattcaataacatgataaaaatttagtttcatttttgagggaattacaataagatattctgtattcataatgtaattctaattagtaatttatatgaacatatataaaaagcatttttcattaattaagtttttgattttttttttgttggaccataaaaataacattcaatattattttgttagcagatgcacattatggatgagttaatttggtgttacaagagttgcttgatgtagagggtgagagagatagagaaaactaagtcaaagggttgaccatgatggatttgaaaaatgtttgagaatcccttttgcgaattcttttattgttatttaattgttctttttctttttgtgctacaattttgaaagcatgtcatttgagtgagtagaagaaggggtcgtattgttatcttattaatataaattcttgatggacaagttattattaatattttcaatactaaaaaaaaaccctactactttattagataggggagtgaaatcacatttatgaaacaatgcagcaaatatggactattgaccattcaattgggaccttaaaaacacagcattagaatgactataaacaagttaaggcaatttcaatgactaagttaacatgacatctaacaactacctaaactaagctacttctaaaaaggtcaaatatttcccttttcatataaataacacataaaaattcacctaattttactctagataacttaatagttttgaaataagaatggttgagttaaaggttagagcatctccaataaaggtgtaaataagtggcgaaaaattaaaatatagctcatttaacaaaaagtttactccaatagtgtaccaaaaagtgatataattagcaaattttatgtcaaatttagcacaacatttgtcatgatgtaaaatttacaccacaataaatgtactactttttacatttatgtcatttatattattttatta

SEQ ID NO: 111161 - DNA, 3092 bp, Cannabis sativa
aactgagaaattctcattcactttctctttctctcttcatcttctttcttctcatctattttatattattctatattattttataacaactactacattgtcttattttttgaattttaacaattggtatacaggtgaatcacataagatatatatcaacgtagttgatatttgcatatttataaggtttaactaattggagttggtctttatcgtacaattatcacacattttatgtgtatatacattaagttggtgcaacattgccatacaattggcaaacaattttattattaataaaacataagcaaaaatgtcatataataaattgtcttaaatttgtcttaaattagtataggaatttgacaatatgttcttaaacaagaaaagtaataaaaccataaaataaaacacaagtcttaacatctttgttcataacaactaaaaaaacaaaacaaaagctgaacaataattgacaaaacactacaacaatcactttcttggaattgccttattgtactcaaaagagtatgaacaacttaaggatataatttttagggctgaatatttttaccaaatatgacctgacctggccaacctgccaggacccgactcaaccaactcaaaaatttaaagaaatccattcaattcaggcgggtcaggttcaactcggtacaccttttgggcagattttgggtttgagttttcaagtgaccaaatttcgggacggacccagacccgcccataaacccgattttttttactcttacataaattttaataataataaaatattacactttacatacattggacctcaaatataataacatttactatttctaaaaaaaaagttacataatacaacatatttacatttttttcaatgtgttgaaagtttatatgtatacatattttattaaatttaatggttttgttatatatttatatataattaagtaaatgtttaggttttgctctacgctcatatataattaagtatgtttatagataattaggtgagtataaaaaaaaagtttgactgagctaactgggtcaacctgcccaacccgaattcgccaatccaaaacttgctaatttgcaacacgtgaacgggccgggtctgggtacaattttttcaatatgaaacttgcaaatctaaaatccagtcaacctgcccgatgttcagtcctaataatttgtactctaaaatttctaaaaaaaataattgaattgagtgacatgaaacattgtcatcacatcctttacttttcttaatattttcaataacattgtaagtgcaagtagaataacacttggacctaaaatagtcaaacgggtaaaacttatgtttctaatcgtgcttatataaacaaacaaaaataaacatgataaaaaaataaaaacgataacaaaactgccctgtaattatacttgaactaatatacataacattcgcataatacacctaatccatatcaaatcaccagtaagtaaactatattgcaactatgtagcaacaactgaatgcataacacttaaaaattaccccaaaaacaacaacaaaaccaacaagcaataccaattaaacataaaatatagaactaaaaagaatagtaccagtactcattaatctaagataaataatctagtttatcttttgaaaaatataaactcaacttaaaatcaactaatgtgcaatttaaatacttttgtaggaatttttttctcttgaattaagaattcaccaaatgcatcaacaaaaataccacaatcattgcataacaaaattatagtaaaatgattcaaataatgataacaaaacttagaagcaattaaaacacaattatatcacattttttttttttaaaaaaaaaacacaattatatcacttgaatgagaatttaacaaatacaacaacaaaaacaccacaatcaatatataataaaaataataaaaatgattaaacttataaataactaaaatacaataataaaaataaaataagaaactacaaaacaactaataaacaacaataaatcaacataaccattaaaaatttacaaataaaatactaaatcatcaaaactaaataaaaaagaaaaatatatatatataaaactatttaagttaaagaagaataaacattgaaattggagatgatttcttttctttaagacatttcatcaaatatatgacagttgtacatttatatacatatattacaaaaactaaacttataaaataagagaaaatcacaaaatttgtaagcaaattaacataattaatagcaaacaaatacattaggaacaaattttttaaaaaaaatactcaattcaaaacttatattaatgaaatttaaacaagataaaaaaaatttacagaccttaatataaaaatattaatagcaacaaaataaaccttaagaacataggaacgactgagacaaattcgaaatgtcgttttccccattggatcacgacataggaggggttgcgtgcttgacaactaggaattggtgatgacgacgtcgaggcttggagaaaagatctacaccagcgaggcttggagatgagacttgcgacgacgacgacgattggagacaaaatttctgatgtcaggagactagaggtggttgccgttgaaagtgagaattgtagaaagtgtacgacaaaaagagaatgtatttttgtaaattgttaatagttatagttataaaaatttatgtgcccatgtagagtattttaataataaaagctggctttttgtatttttttttttgtaaaattttttttataaaaactatcaaatatataaataaaaatataaaaaaagttattaattatattaatgagtgataaaagagtaaataaaaaaatgatatttattgtggtataaaatttgatccatgctatattttgtgccaaatttggtacaatttttagtatatgccaaatttggaccacattatactttattattgaaaaatttacatgttatactaacttttgtcatttttttacaaaaatactgtcaagcggtattttttacttttttactgtattttttaataagttttatactgcagtata

SEQ ID NO: 111162 - DNA, 2985 bp, Cannabis sativa
ttcattgcaccaggtataatctttaaaaaccttccaaaagataattagctaaactcatgtagaactttctttttctacatttatatggatttttattagtttttcacttattttttcttttcacgaaattttcccataatagcaacgtaaaaatataaataattagttgttttgagtagttataatcttcttttattataagaattttttttaacattactccataaagacctcaaacataatcttactagaaaaactacgattagagtcagtgacagacccaggatttttactttgtgggggcttatttatcataaaaatatatttatagctacattataattactcttactaaatttatctaatttagtgggggcttttctactattttggcctataattattaaattaaaaaatttacataaagataatatttttgttcgtgggggctatagcccccacatcactcttaatgggtccgtccctgattagagtaatacatcaaaaatgtaaacttatggtcattttttaatttaaattatttttgaaataaaagggtcattttttaaatttttctctagttccatacaagctagtgatgatcctaaactcatgttatcacaaattttgattattagctaattatcttgtttttgatagaaaatgcatttgcaacaactatgagcacagaagcagatgtgtacagttatggagtagttttgctcgagttgataactagaaaacaagctgtggatacttcatttatggaggaaactgatattgtgagttgggttaggttgttatggagcaaaggagctgaaatcaatgagatagttgatttaagtcttgaaagagaactgtctaagttgactgttaaagaacaaattattgaagttcttcaagtggccttgagatgtactgtggatgatccaaagaaaagaccaacaatgagagatgttgttaagcaattattagatgttaatcctcgtcttaattcacaacttaacaagctaattcaatagacattgaagtctaattttgtaaaatttatatgttacattttagtataagtaaggttgactttaggcataagcaagctaagcgcatgtttggtgccctaatctccaaaaggactctaagcccaataagttggataaagattaaggattgtcccatcataggtttgttgtactaggttgttctatttgtaagatttatatatcttcaattgataaattatcctcaattccattccaagttacctcaacatgagtttggttgacaaaaaaaagtgacaacaaaagtgaaaatatcaactcacgaactagatagaaacaagagttacgaacaagacaataaacaattttatttaccaaacgcttaacaaaataaatcttaacgaactttaagataaatactaaaagcttacaatcttgcaccaacaaaccgaaagacgatagtgaagctgtgaaggtaacaaattgtagttcttttttttctagtatagcttagaatgggaaagtggatgaaaaattcacaagactaaattcaccaccttataaatgtactcttgactatgctcagctcattttaagagctgaatttagcaaattgagaattgtttacaatacattttcaagtccatgctattgaattgtacaaacttggattggaatcaagatctaataatgaaataattaacatataaaaactcacttcaatcttcactcataaaagaataaatataatttgtaaccatagaactgcaattttcaaaccttggacaataatatctcaaaaaagaatcaaaagagagagtaagacaataataaaagatgaccaaaaatagtggagaaattccttactaatgatgatgatgatgattacaaggattttgccaacaaaataatgtgatttctttttaatttacaatggaaattgtagccctcatgaacttccatgagatctaacagacgagatcgattgagctgatacagatgctgtagggctgttcagttcgcgttctccattgatgcctttcggttttccgctcagtctttctattgcgtcttggcatacttcgttgaaccactcatcttccggtagcacactgtttggagtttttataagttcgataagatatgtaagaatgcaaatatgatatgtataatgatgtttataatgaaacataatggtaaggggtaacctacttattgggatccatccctgttgagacaaatgctgccattgcttttgatatgatctcacccacaactcgattcagaattcgagacaaaaatcggccttgtgaagcaaagcagataacaaacttcatatccaaatagaactgcaaaccgatacaaaaaagtcaaaactttaatcagaatagccttatgatcgtatcgctcgattctccttctcctagacatcaccataaggaaatggatacctttctaacgttgttaaaactatttttttaatgcttcaatcgtgtgaaacgttagttgtcataactcggttttggatagacagcttaaattcactaacaaaataaaaataagatttttttttcggaaaaagaatacacacctgttgcaggccaagaggaccaaggggccttggaccatcctcaatgtcatcccaaaagctttggtcatctgagagccacaagatgaccgtttcggttaatctcattaatagcaatgtagcaaatctttctctgcctacaaacatatctgctgctaagttagccattctgttcagctttaagaaaagttcctgatttgaatcaaacacgaaaaaaaaatggaaaatcagactcgaaacggaaataaacgagggaaaaagtaattaaacagtttgcatattaacctggaatataaacgatggaaaccaatctatctcatctacatttccatccatgtttatgtacatatctgctgtaagatggctttcaccatcttccgtaaatatgagatcgagagc

SEQ ID NO: 111163 - DNA, 2709 bp, Cannabis sativa
tatttttactattttagaaaatgcagggtccattttgtcatttaacaaaacacagggtccaatctgtaacttttgcaaaatacaggatccaaaatggtatttaccctaaaaaataacatatataattaactagtgctagtaattttacagaaataaattgaagatcaatcaacataagatgtatgctatagaaaatgatatatgtatgttaaatatataattcaaatttcaatcttaatttttttgtgttataaagatatattaatatatataaataattgatagaactttgactgttatatatttttttttatagttatgcattaatagagtttgttaataatttgattaatatatatacgtattctttttatttgtagatgtgaaaatcaactacaattaatattttctttaagcgaaagaatattaatagttcaacatctgatatcttatcaaatccatgtgtgaatgttgatcatgaaaatttagaaaattacctaacaaaatctttaagacttgacattaaagaagaatttattatcaattcattagaacgtgattcaggattacaaccaccaatatgggagtatccacctgaaaaacgtgatgaagttcgtagaacttatatctatatgagatcatttacgttcttttcagtcatcttggtttaaattatttctatcttggttgagtattctcctaaagtatgtgtgtattttgtctaccatatttttttatttcacgctaaatatgcacaccttagattgaatgcatttgctattaatggatttcaatcatagaaaaggtgagaggaaattttgtgtatttttagcacatattggaaacgatatcaattcacctcataaaaaggctgagaaagcagttgcagatctcatgaatcaatcaacacgtattgcaagaaggtttgcgaacttcacatcacaagaaaatgctgaaaatagatttcatctgaaaacttcaattaagagaattaggtggcttgcatttctacttgtatataaagtggtaactctttttcttacacttccagtttataaatttactacaaagtggtctttttcagctatgaatatagtgaagactacacttcgcaataagatggaagatgaatttttaagtaattgtttgctagtgtatattcaaaaagaaattgctaaaaatttagcataaattcaattatagatgattttcgtgatatgcaagagacgtgctatattttaattttaataatatattttaaactatttgttgcttaatatataatatagttaggccccctaaatttttatccctgacggtatatattactttttgttttatttttgtttgaaagggactaatttgttataacgtatatgatattcttttttttaaaatgagaaagtaatctaatatacattggagcactcacaataatttttttaaaataaaaaggttttaaaaaatttgaaaaagcttactaaaaatatgttatagttttaaactcttttagtttaaagtttatttagaacttattatttatgcttatatttatagaatactatttattgctctaaatttattttattaattattttgagttttaataattatttttatatgaagatatgtatatatattgatattatacatttgaaataaataaaatatattaaaattaaaaaaaataagttttagtaatgtattttaagaaaattaatgtatggtgtaatataaaaatgtgctctaaaataaaaaaaaaatggtaatatattatagagataaaataaaaaaaattattagaagtacactaagttaacaaatttataatattaattaattaaggtgtctttcttcacaatattaattaacaaaatatatataattggtgatgctatctatattgacaagataaattaagcactaattaataaacccaaattttgtgtttgaaatcgtaagtctttgatttaagttttaaaaataagccacgtgatcctaatatattgtattattttaagatagttatattttacgtatggtattggagtattaattaaaataatatactcaaaaaaaaatatcttatcatatatacacacattatgtctatttaattttagtcacagataatttaattatatattgatattacattttatacaacactatgtataaaaaaatatatatgtataattttttttttttttttttaaatcatatatgtataatttgagtgtatcacaatcgatcattcctttaaatatatattatttattgcaactatcaactatggctctagaaaatacttcaacataaatatatgtattaaatatattatataccaaaagtagatgctagatttgtatacttattaatcatgtaataaatattgtttttggtgtattacaataattaatcatggaattatgtgcgtatacaagtgtataaccgggggctaattaagaacaagtaaataacgttcacgtcaagcaattaattagtataataatcagggtatatacgcaaatatataagcaacatatataatcaatcatatcagataagtaccataccctattcttgtgtattttttagagttacgtggcgagccacgtaaatattagttttatataagttctagtggtttttgtttaagaattcagtaactaagcaacggcaacaataatggtagatagatctatttaa

SEQ ID NO: 111164 - DNA, 2814 bp, Cannabis sativa
ggggggggggggggtccaatgggtccgatatggggtctgatagatccaattgtgtccgatgtgggattcgatgagggagatccaattgtgtaaatggaagtgatgtaaataggaaatattttaggaacattataaaagttgtcatatcctataaatattagttattaaatgtaaccctaaaaaattaaatttccctttcaatatctataagcataatagcattgacgagaacatgaaacacatcttccactctacatgagtagcataatggcattgcaagagggcatgaaacacgtctcaactatcaagcatgtttaaacgtttcgttttatatgtatatatttctaaaaagcatactttattttattttattttatgtacatgagatataaattttggagacatgtatgaaattaagtagtgaactatattttttatttttaataaacattttatgggaaagaattttgaaataattattgtgaaaagttttgacacgagttttaacaatttaatcaaagaaaatgagtcgtttgcaaaaacgacacccaaccatcatcttcaggtagctttaacaatggtgcatataacgatatgtaaaggaatcacctcatttatttccatattaaataagtatagtgctccatgtttaacaaagaacctttaaaacgaaagagagtcataaaggaaacatgtatgagactatgacaccaggccaccaaaacaacacaaactcaaagagccttgaggatgtcatcagcactggagacagaaaactctcccccattttcgacgtttgcaaccgtcacctttaggttatccactactagagcaaacctcctagaacggattcccagtcctttctctgaaagatcaagctcaaggccgagagcgtgggtgtactttgcagctccatcagcaaggaacttaacattcttgttaccagagtaggtttgagcccatgctttcatgacaaacgggtcattgactgcaaaaatgagtgaaaaagaaggaaagttagatttggagattccaatttggtttatttcaatatttcaactccaggattgaacatttcaatcgaaccccccaaaaaattggcaacttgaagtgcagaaaggcagtattaaaatgcatattcatccacaaaacaaagtaatagtttggttcagtcatctacaagttcaagcaagaccatcatctttccacttgacttagcatgatataatgggtgctgtttacttcatattttaacagttcatacataagtcaccaatcaaaaaagtaaaccatttcagtatataactaaatggctaaatgaataaggaatatcattaaaatccatatcatgttggctagtataaaacaaatgcaacgaaaaacgaaatgttactaacatttcagctcaacatattggtaagtattcaacgagacaaaagagttcaatttctttaatattagtcggtgataacaattcgaacctaatacccgatgagatgtgtttgaaacaagctataactgcaatgcaaccacaattggatataatgcacaaattgactaatatagctccaaataagagcgaaatgatccaatgaagcttccaaaagttgtatttgtaagttaatacacaattaaacaaagaagattatcttcactcccaaaaatacccaaaagagaaaaaaagagatcaggcttaccgctaactaagaaaatttcgttgacgcccttagccttgaattcagcttctttctcaatgaaacccggtacgtgcttagtgctgttcccaaacataaacaataaaaaaatctcaatcaaaaaatattcatcgacaaaaaactgatgctatatgcttaacggatcgcaacttttcctacagattcagcaaccaaaccacatctcaaattagccactccaagagagagagagaaatacctgcaagtaggagtgaatgcaccgggaacgccgaagagaacgaccttcttaccggcggccagagagtgtacggatacgttttggagatcgtcattttcgtcaaagaagctaagggttccgtcaggtaaggaatcaccaacagcaatcggggccattgttgttgatcaacggtggaacagggaaagtgtagattgggattggatagagcggtggtcggatattgagtggaaatgagtagggaagggtagttgactatatagagactagagagagagtgtgtgtcggacttagcgaattgtatttagctggttttgatattactatttggagtccgactctaaaataataattaggttaagaatatattaaatttaaaaatttctcgctaattttatttaattttttattaatgtagtaattatttaaattatatttctgaattttaatatttattaaattatatttttaaattttaatataaattaaattgtaccttttaaattttagtaaaattgtacaaaattttttaattccaactatcttaataatattaaaaaaaatttaaaagtacgaaaaattaaagagcatgatataatatatattaaagtttttttagaaaaaatttaaattaacctaataattaattagatttgcgttcttgtagctacaatgggtcccactataacctattctgttttgccgcttattttccccgccaaacaaaaaagtgtaatatcctctaccaactcacacatcttcatcttcttattagggccggtataattttccgtccataaatgataaatatgtttaacggaccaagaggtggagtactaacataccttctctttcttattattattattatttaaaacaatgatc

SEQ ID NO: 111165 - DNA, 5665 bp, Cannabis sativa
tggtaaaataaattccaacatacctaacaatagaaatgaagctagtaagctaatttgaaaagctctcggtatctgatcttagatgggtaatctatgggcgtaggttttccttacctcttttgagatgtgttaacaaagatgaagcctcacgacttctctttgaaatccatacatgattttatgggaatcattctgggggcaaagtttatccaaaatgatctcaagacaaggatacttttggctgaccatgatggaagactctcattcctatgtaaaaaatgtgacaaatactaatagttttcttaaatacctcgagctccacccaacgagttaacccaaatgaaaaacccttggttgtttgctatttggggaattgattctatcgaccaactaccaaagggaaaagacaatgtccaatatgcagttcttacaatggactacttcactaaatggacagaagtcaagccattagccactatcacttccaaaaaaagtccttaattttgtggtaaaaacatcatttgttgatagggctccccaaaaaatagtttcggataatggtacataatttgacagccatatgttcaccaaattttattcaaagcacagaatagaaaatagttttgctgcaatatcttatccacgggaaaatggataggtcaaagctgtaatatcctaagattagtaaatagatttgcaactctaattgaattaatttagtataaatgagtaattatattattagatatattattagataattaattatgtaaaattatataagatttattgcatttaagaccttatttatgagggggcatttttgtaattttgacctaagaatggtaaaattataattttgttatatattatgctaatggactatattattacattatatattcatattattacataatatattcatattatcttactacagatgatttttttacaagttagcgcggtaaaatcataatcgggtattttaagctagaaccgggtttggggttcaaaattattttattgtgtgattatggaataacataatatatatgggaatatctaaatatatgtgtaaaaattttgtaaggacagaaatgcccttagttgatattatgtgatttttatgccataaaggcaaaatggtcttttggccaccttttaccatttcttgtaaaatctattatttgattaagtatgaaatgaaaaactattttttggtttatgaacccacccccgatcctctctctcaaaccctatttagaaattttatttaattgtaagatttttttttattattttagaagtgatttggggaagaatgagtttgtagtggaatcaagctttggggaagatcttgaggtagttttaatcctcttttcttagtgttttgaattatggaatttgttggttgtgtttaaagtgcatggtgttgttgtgttatgatcttgatcgggtattgttagtattcatgtgcttaaaagctaagaaatggtagattattattgtttgtgcttgaatctgaattttaggtcagattcttggtatgtgttgtgattttcttagttatctttgataattttagtttgaaagctgggtattttgagcatgaaaatcatcttgtggttattttaagtttaaaagcatggatttttgtaattggagctttgagatttatgtgtgactttaagcatgttaattggagattagtgatgcttgaaaatactttatttggcatgaaaaataattattgtgatatggtaggttttattatgaattgttatatgttgaaaatctggaaaaatgacattttttgagttttaagcccagtcgtcacaacgaggcttgaacccaaaataggggttggcccctgcctaatctggtcatggcgagcctatatctggtcgtgatgataaatggtcgaggcaagaaggcagtgacagttcaatttttgttgttttattttgagcataacttttgactctgaacttcgatttggacattttttatatcgttggaaagcttattttgggctctattatttggtccagagttggagccataaatgtgaatattttttagatgagatttgggattaaccctattatgtgaaaccttagaatttttactacgaataccgatgcttggtcaagatcacctatggatttagatttcccctcatacgttggaaatcaagtgagatagtgaattatgcacatagagtatagcgtggtgacacagttaaatgtgattaattatatgaaagcaggagtcatggttattaccctaagttttatatattgtgagttagggttaccaccctaagtatgtgtattgtgaattaggattattatcctaaacatgtttattatgaactagggttattaccttaagaatatacattgtggaatagggtcgttaccctagtgtgtgtgattttgattcggatcacatgtgtagataaacatatactaaaggtgttgtgtataatttgattatgcatgacttgaccaatatgtaaaacctatttcattaacgtgttgttaccatgaaagagttatttatatcacaacgataattattagtagattagcctgaatcctgagtgtgcatgaactcttgcttgtgttcattgagttctttgattcacttgttaaagtttcttagagaagataattcttacaacatttattttgggagcttaataacatgagtgactgggaacatgttatacaatagtggaatctaagctttcttaacagattgaatgttagttcccttatagtgttaattttttttttttttttgatgaatcaggtgattttcattactccaagaaaatttgtacaacactatagcattctccaactagagaatctaaataatatctaatacaaggtttcaaaccaaattctatctatattagacacttttttttggccaaatacaagaaattctactctttgtaatatttttgacttgtgctatgattgtatcgcttcttacaactttttccttttgatccaacaagccctgcttaggtatttttgttgaagaatcttgagtaggaagatcgtcatccttcctcttgccaatctcttggaacatcctggaagacatggttggacaataaaaaaaatgagacttagaaacataaacaaaaaagtatacaagaataaaaaaaaaagatttgcaataatatagtcatattataaatgccctcgactactcgaggtgcatcctcataaggctttactgtgggttcgtcatccaaggacattttcataagatcaaccttaacaacctttttggctttgccctctacaacgggcaaaggcgagcatagtacctcgaccacatattttattattctgatattggctgggcggagaggttgagcaggagaagcaggactctttgaggcatatttttcctttatggccttgggacgagcagatggtgccttttccttagacgtggccttggaagatttatgcctaactacaatcgaagtataaaatctgtatttttgaaaattctcttacgtggccaactttcttatattctctcatcggctaagagttggagtattcagcgacatctctcccttagccttaaagtaagagttgaacggataaaagacccaacctgttggaaaagaaagatgtttggtcatcacatcctgagtgaagaaataatctctaaataatttatcgatcttagtattgtccaatgtgccctctagccagttgtaattaagcaaagagaaataaaagtatcccatgtcgtggttacacgagttggacttcagatcaaacagaaaattaatttcatggctggagggctcccccatcctaactttgcatataagatatacattttaaataaatatttaatgcccttaggactaatttgtgttggaaaaatattgtaataatccataatcttccttaagtaaggatggagggaaagtatagctccctccctgctcggcgtgaggctttgactaggcacagagtacagtgcaaaggtcattggccaatttttcagggtccgtacggaagatagtggcgttcttgaacaagccactagcttatatattggccatccattgatttattggcatagacggagcgaactgccatcaaatgattggcctagcatccatagtactagatatggtgaccagaatcgcctctgtaatttcctccttgaggtaatatacaccaagaataagacaccaaccagaaagggttgagggtccatctccctcatattcatcgcttgtcttttgtacgacctctcttcttcttcccttatccattggacgttctcttcgtcctcctcctcagagaaatcctaaacttcaagatcaccttccctcgaattggccattctccgagcaatgtatggatcaaagctggggttttgacgaacggtctacttggtatgagccaagtttttccttcttggaaacctagccttggaagtgctctgtgcaactgtaactgcaagatcggccagaataaaattcccttgacgttgcacaggctttctgaagggtaaagtgtctttgatgtttggacggactatgtacgtgcaagatgatagcaaaaattgtcaccaacctttattcagctcctagatgtgctggacgtatgtttcgcctccaatctaatcaaaatattgatgatgtcggtaatcagatttcgaagaatcactcgacgattctccctctccagtggtcacaaaaaatattaacgacacgcttgaagaagatgagaagctagttacacagagagtgttatcttcaaataagagctggagcaggtcattgtcaatcgagtattcacctccccaaaagtcaattggatttatctacaaaattgaaggctagagaggggaaaccctaagctgtgcaactgcaagaggtgtttttctaaattaaccacttttttaagcataaaaactaaagctgaaagcttccttttgtttgggttgtgagaaaatgaaaatgaaaatgttaattttaaattttaattttaaattttagctttggtgatcctgacattgattgatcgatactcccttattacaccttttgttgagacttagagagagaatagaaaattgataggagaatgatgggattggaatggggtacaaaagtagccatgtatttgcatcattgcctaattgtttgctgcctttcacttttctttcttctttttaatttttgtgtcataatcattgattttttttttttttgaaggaaatctaatttattcaaaattcaatgaattacttttactcttttgtcaattatcgaatgaccaaagagttaaggacaccaatgtaccaaaattcttatgacaaatggatctctgaaattagagcactcacaaaataagacctccattacagtaaatatcaattctattctacatgtggaatattttttatttctctttctttttcttggacttccttttccactaatataaatatatttatatatatataatctaagaaataatacatataaatgtgtcgaggcattttattatataattatagggtaatactatagtaggacctagcaaaagtttcctaccggtagggaactttttttttttttaaccgttaattttagatcttgtgg

SEQ ID NO: 111166 - DNA, 4846 bp, Cannabis sativa
  modified_base (27)..(30): a, c, t, g, unknown or other
gtaagtaaaataaataataaaaatgtnnnntctaatagtgggaacttaatgttgctaaagaaataaaagtttgggatcaatttaccaaaatataaagtttagagactaacttgccaaaacttatatagattggagactaatttgccaaaaaataaaatttgagaaccaacttgtcaaaacatgtatagtttagggacatgcggtacaaataagccttattatatatgttggattattatgttttaaattatgtttttttgtatatatatatatttttaaatgaaattaacctaaatggtagctaaaatagattggatggatctaatccaatccaataaaaaattagccaatacatccaatggttggcactgatccaatccaataaatttactggattggatcgaatcagatcaaatgacttaattcgattggattggaacggatgataaaatttaatatccaataaataattagattgaatccattgggtctaaatccattgaatgtgatccaataaatatccctaccatcttataatacttcatgaatacattttttaggtgttaaaagataatatttataatcaacatttatctttatatatataaattataaaaaatgtgtacacccctcggtaaaactcctatttgtttcaacatctaggggagttttatagtttaatttttttttattattttgttatattttgtagggccacttgtaaatttttaaaaaactttagaatagtttatattgctaaaaataaaatttaaaatattttgttgagtgcacgacttttttgtcttatacacatagtaaataattatttgaactttatttttaacaatataaattattcaaaattgtctgaaaattgataagtaatcctaaattattgtaatatataagcaattataaggaaaaggagactacaaaattttgttagatgtaaaaatatacaagcgtatatatccaaatacttttttgaacatgtatctaaatacttataacaataagtttataattaaagtaatgaaaattaataatttataattacctaaacatatattactaatactaattaatttcatgaaaaattgaggtggctattgcaacccaactcttgtttgatattttttcttgtttgggtcaagggttaaaaacccatcacaacccttctcgaaaaggattaaaagtttggtcattttgaaagctaacttaactgtaggtggtgctatctgtatgattggaactcttgattggaactcttgagcattactacccttataggttgtcagagaatctcatattattaatatgtggaaaaattagaacaaatataaaatttataaactactccttccattacaattttttttttctgggtaatgttaacaaattctaacatagctcacacgtgattctgagattgccaatataagataattttgtgtataaataggaatgtttagaaaacgcctaaatgggggagcatcgaatttatgaatcctcatagtggtggtgcatcattagaaaaagaaaggcgaaagcaaaagtatagcacccacaaatcacaaaatatccaatttgtgagtcctgttatttgtttaagtagcgagaaacataagggaacattaaaaaccaattggaattgcaaagaaaccaggtgtgacaatcccaatattggaaacaaagtttagcagtagtagtagtaagcaaagcatgctgtttgttgttgggttacaaagtaacagttgtcctttctagtcaagagatttgttattctcacctcttggactgctcccagcgctgctatttgacaatgatccaaacgctgtcttctgtaggacccctgtaggagatgatgaccccattggaggactattgtcccatccttgagtcatcagattaagcaccgacgaggaggacgacgacgagttcttacactcaacaacagacccgtttttgttgttgttggagtggtggagtacctcccctagtggaccccccatcaatgagttttcccatgcaatcggaatccaattccgattccccacttgctgctcttccgctccgactcccaaactcattgacaggctggtcttttcaggcgacgaagatgaggggatgtagtggtctgacgacgccagcggcatggaaatggacaactgggtgcggtccgtctgcatgtctatttccggccacgaaagggcttctcggttggtctgctgtgatttaggccaatcgtcgatgaaatggcggagggaatgctgttggttttgggggagagagtcagaagttgccagtccgaaagactgagtcaagaacgcgttctgatctttagagtacagagagagacctgaagaagttttctgttgttccatcctgcaaaaatgatagaaagaaataatcatttcatttttccccaaattcaaaattaaaggaaatgtgttttttttctttgtctacgtgtagaatctctttcggtttaatgacctgtttaggtgggttgtagctgaagtgttttgttgttgaagtagatgctggttcgaaatggtgaggctgttgttggatgagccggcggcgcccgatacagcaacagaggtggatgagggtgacgaagaagctaaaggcactgcctttgacgtcttggcggcagtttgaccttccacaggctttcttgaacgatgacggcctctgttcatatgccgctcgcaatatttctggtctgcaactgcgtctcttgagcaccgccatttcttcccatctgtcctacgacaccttcctggctccggatcggcattgttggagaacccaagatggtaagaaccccatcccactgcgaaaataaacgacaaccaagttaatcaaacgacatcttaagatcatctaactaaaaatattataaagtaaaaacaacaaacacttacatgtattgggcctcagaagtccacctgaaaagtgagagaaaccagacgagtcaatggcttttcttattgggatgagaagattagacggaatggggacatttgcagtaatgtatttgtagatcaaagcttgttgctccaactccatccattgagatgaagtgaatggaccttttgcccatgttatggccccatgcatattggtaccaccgttcgaattcaagctcccggagttataccctgcaacaaacccccaaaatcgactgtgtttttaagtaacattgaaccaagattctaaaccaatacaaaatggtcatgtctgaatatagaaagattgatcatgttcaagagaatgagcatgaaagctgcacagaaaaggacatgtaatagttttgttgcccataaatgaacttgaaagtaaaattcataaatcctttgcctcgttagttatagtgtttttgctaaaattttgtcaaaaaataaaaataaaataaagtaaatccaatgtagaatatttaactacagttacggaatgttaccaaaatgtgtctcaacaaaaacaggagcaataacagtcaacatatttgttgaggacttgttaccctttttcggggttgttgttggttttggtgacaaagactcaccagcaaacgccattaatagggttttttttgttcttttttattattttattttttttttgggcgaaaagacctccattataactgtggaatcaaaacccaaataaccaataacagccaactctttaggtagcactcacactcacagaaggtcaaatcttttccgacaacatgagcaaaatgtttaccaaaagccaaaaaaaaaaaaaaaaacacaaagaacccacctaaaaaaaaaaaccacagctggctccatgcaagcaaccaacaagaaaatagtactataaggtagcattgaaacttgtcatttgttaattaatcttgtaatattatgttatacctgtgtttctagtgtaagcagataagaaagcgttgggatagttacaaggcaacaatgtagcattattctgagatgaggtcttgtccgccattaaagtttctgatttgggagaagaaaagcttaacatttgttgctgctgaccagtacaattagatctctgtactggtaaagaagcgtttctctgcctctgaagctgcgccattcctaatttgcagtatgagaaatcttcagttgtcttagcaattttggagctactacgccagaactcatccagaccggtactactattactggccgcaccagatctctcctgcttaccagatccgtacaacctctgtttcatttcaggatctgtagaagaagtagataatgaactaataaactcatttcctgattctgaaatcgcaccagacccgtaatccgaccccattaccattccaaaatccattccttttttttttctttgttttctttctgttataacacgcagattaaaatgaaaaatctcgttcaaaagaaaatatatttacaaaactgctacctagcagggagagagattggatagtactgtgaaacaagacagagagttgaggatgagaatggagagaaactcattttttttccttcagtttgttggaatggaaggcttggaaaatataaagcttatgatattagatatatatggtttgagtctgaaaccagactggtttttgtttataaaaagtagatgtttttgaaagaaagataaaataattggagagagaggaaaagaagtgactgcccgggacaaagtttgtcctataaatatatgaatatctcggacatatatagatacatatataaagggaaatttgaatttgtatgcttgcatttaattaaaatttgtcctcaaaactcataataccccatatttaaaatatatgaccattttttctatt

SEQ ID NO: 111167 - DNA, 4240 bp, Cannabis sativa
aaagagagaaattgttcaaatttctagatttagctaacatatcagcagcatctcattgactttttcaggttgttttacataatttataagaattttttcacaaccaagatctcactgttaataactagcaaccaatattgtcaaagatgcataaatttgcataaaaaaaataataattataaagctttacactgtgaaaagaaacagagtctttaactacatcattctatgatagccgaaaaaaaagaccatagaaaataaagataataccatctctagaatatgcttcacttcttcaacagtgtttttatctgccactccattgagtaaaacatcaacgtcgttcccctttatagcttgtggtatgtggcatattcctgaagctatatcacaaatggttgacttttaacttgtgaacaattcaaaaaccagttctccaattaatatacaataaggtatctaaagccaaattctgattctaatgtgtgtaaactaaaacggaaaggtctaacacaaacgagttcttaaatacaaattccaaaacttggataaaacttgttgacttgattttccaagtgtgtgctttgagaagcttatttaaagttgagcagccttctatacatatatatagataattcatatattgtcaagaccaggctccaccattaagggttcaaattctcctgcgaattggccactctctcgttttctttatcaaccttgatactgttatattacgaatatataaatatcaagtaaaatgagtatgtatgtaatcatgtacctgaggaagccaaaggtgtagggagaggaggagagaagagggtgcaataggaagatacattctgattcaagtgaagggaaggagtgagtttgaaagcatgtgaagctcttcttagcaaggtcggtaatttgaagctattggcagccatggctgaagggccgttgctcgctcaatcgcccctgggattagtttgggttggaaatgcccgtgtccgcggtgttcttgcctttttgttcgactcattcagtaaaacgacattctgttattaaaacgacacacattaagtaaacgagacagtaaacttaaaaacgataacaaacgaccgcgcaacgcagaaaacgacaatataacttacaaacaagaagagcaacgccctaggtgaaaaagcgacaatactttatagagaagaagactaaacgacaccacttgtagaaacgacaatatatagggggaacgacaataattacaaaacacgatagagattgttttttttcttttcttttttgattaaacaataatggccaaaaaaataataataataaataataaaaaaattaatccttcttggtaacactctttaaggtaacaaaaaaataataatgtaacactcttcttaatgcgacaaaattccgtgacattttttaaaaattatattaaaaataagaagttgatggtaactttttggtgaaaatatggttaaataactggaatcaagtacagaaataacagtcaaactagaactttcattcatttcatattcaataatccaaactctattgatttgattgatcacattgtcatgagctagtttccaatcaaaatggaacaacaactgtgtgccagaggacgattaatatcagctaaggcaatcagtatgccaggacacatcttttaacaccaaatggaatgagcccaaaatcattgcccataattgaaatcagtacaactctcatgaaacctctcccatagtgagtaccactcttactctcctatgctttttttttctgataatgactctcctatgtttttttacttcaaaaaaaatctacctttatatatttatttcaataagaaaaaggtatattcctctttttttgtaaaacgtaaatacacatattattgcaagaagaagtaaatattgatgtttatgtaaaagaaaaagattataagtatttttgtaaaaaaaaaaaacctattgacaaataaggcccaaattcaagaaagtggcgaccaataagcaacgtctatttccaaattcaaattcaaatctcttttctccctcctctcctttcctctcctctgactctgatcttgatctgagcctgagccatggctaccacgacgaactcatctctcatcaccccaaccaaaaccccatcagagaaatcccaatcggcaaggcaccacaaacggaaccataccatgctcgaatcatcatcgttgtccaagtcccggttcgaggcctacaatcgccttcaggccgctgccgttgctttcggcgagaagttgcctattccggagattgtcgccctcggtggacagtctgatggaaagagctcccttcttgaagccctactcggcttccggttcaatgttcgcgaggtcgagatgggcactcgtcgccccctcattctccagatggttcacgatcccacagctctcgagcctcgctgccgcttccaggtactactctttgtttgaagaaatgtagcaatgattcggtgaggttggttgctcctgtttcaaagcaatgtcttattgctttattggtcattacaaaaatagttatttttatagtttttgggatgttctagggttttaatatagttttagggatttcgacaattgagtacctcgatcaaacaaaaagaaaatttgagtttgttgctgtaattcctctataactgaaaacggcctttttcttcatgggttctagaatgacttgtttttaaaatgaacaggcttcaactgtttgtgtgcaaataaattctgtttagtatgattcaagtaattgagatgttagactaatcacacgagatgttggcctgaattattataaacaggatgaggactctgaagaatatggaagtcctgttgtgttggcctctgcaattgcagatatcataaagtctcggactgatgccattttgaagaaaaccaaaactgctgtttctcccaaaccaattgtgatgagagctgaatatgcacattgtcctaacctcaccattattgatactccaggttttgttcttaaggtgtgttgtgttttattaaatgttcagagtggagttttttagaattttgtttgtactatactgttattgaattgtgtctatttatgatgttttatttagccttatgataacggtttaattttgatgaattgataaggtaatgaaagccttggtcatctgcaatttactaacaagccttgtaatttccattttggttggcaggcaaagaagggagaacctgaaaatacacctgatgagattctttccatggtgaaatcacttgctagtcctccacaccgcattcttctctttcttcaacagagtagtgtggagtggtgctcctcattgtggttggatgccattcgggacattgacccaacatttaggcgtacagtaatcgttgtatcaaagtttgataatcgtctcaaggtatgagcttataatatactagaaagaatgacatttgaattccaatcatattttaatggattaaaatagactgatttgcaatttagggctgttttagtcatctttatgacatgaattccaatcatattatgtgaatctagtcatatagggttaataatgatttcttctaattgattttgatggctgaattcttttatgcaggaatttagtgatcgatgggaagttgatcgatatttgagtgcaagtggttatttgggagatagcactcacccattttttgttgccctaccaaaggataggaatacaatttcaaatgatgagtttcgtaggcaaatatctcaagtggacacagaagtcatccgtcatttgcgtgagggtgttgcaggaggatttgatgaagaaaagttcaggccatatattggtttcagctgcctgagagaatatctggagtctgaacttcagaggagatacaaagaagctgcaccagcaacacttgctttgcttgaacaacgttctagtgaagtcaccactgaactgtccagaatggactccaaaatacaagctacttctgatgtttctcaactcagaagatttgcaatgttgtatactgcttctatctgcaataatgtggtgcgtaatcaactcaataatcatggaaaacaatataatttacaaactatctatagtggtgtcattggagcaatatatttttccatgtaccaattaaattgcgactccacacacaagtagttccagaatttgatttcacaagctgatttatgctttttttttt

SEQ ID NO: 111168 - DNA, 1511 bp, Cannabis sativa
ttaaaataattttaataaaaaaaaataaacaattaggtagattaattatatttaggtttaactaacatatgctgaccctactggcaacatctaataatttgtgatttttttttttataaaaaaagtaacccaataatttctcataaaccaataattctgttatatagctacattttatataaaatagatttatatacgtgtataataaatttttcacattttattttcagcacatacaatgaagaaaaagttattagactaaaaatttgaaaaaaaaaataacaaacatatgttaatatggaaaaaatttcatttttacattttgaattttttttatttacaaaattatacctcgccaattaaataataaacaactttttaattattttatagtttatttttaattgtatagagaaaataaaagcaaattgatggtaaaaaaattcagctcaattgatgagagccttagtaaattctatttataggcaaggtcaaaagactaaatacaatagaggagccaaatgctcaattatagctgtaaaacaacactaatagaaaagggaatctcccataaaccccatgattgcctcatcattataattattacagtatatctacctactgctgcctactaagagtgagtcacatatccgatgtaagaccacattaataccatcacaagaaaaactagagagaaataaggttcatttcttcacatcccctctcaaatgcaggagtgagttcattaatccaagtttgtctattaagaaatagaaccttgaacttgacaatatttttgttagacagtctgcaacttggtcagatgaaggtatatatcttatgtccaactctttgttcaagactttatcacaaatgaaatcgatgtcaacttcaatgtgtttaggtctggcatgaaaaacagggctggaagccaaagcatttgctcccatattgttgtaccaagtaacaactataggtgtttgaaaatcatgctctttgagaagagatttagttcaagaaaattttcctgtaacattagccaaagcacgatattatgattctgtgcttgaccttgcaacaacaggttgcttcttggatgacaatgacactaaggtgttgccaaaataaacacaataacttgttatggatctcctatcatctgggcagcatgccctatcaacattagaatacccaatgatattcagtggctctcacaactaatgtgggtggagacctttatgcatggttccttttaagtatctcaagactctctttgcaccactctagtgaacagttgttggggcctttatgaactagctaattagcttgttcacaacataggagatgtctgaccttgtgtgggatataagaatatttctttttaaatagaaatttatttcaggggaccgagctcctcactcattctgttcataacagcgaaattctatctaaagagagttgagagagcgagaaagcccgactacccacatcaatcgatttcttttgcagat

SEQ ID NO: 111169 - DNA, 9464 bp, Cannabis sativa
ggcccacatgtgtggtcggccactaaagtggattttagccatttattttatctttttttaatccatataatcaaatcctaaaccttagttgaaatactataaaaggaataagagggctctcattctcatcaaactcgataaccttattttcattctttgttagacaactagaaacttgagagtctccttccttagtgatttcgaatcctctcttcttgttcttcattgatttcattcctttagtgatagagtaccatgcccactcatagcaagtaaagtactcaatcatagtgtggaagactgtggttaacccaactaaaggagagaagatccaggttcagatcttgataatactatgcgacaaaaatgaatcaagggctagagatcttaacggaaggatcattattattttgatgccattaatgtaaggtttactaaactttatatatgtttatttcatcgtattaagaaattcatatttagggtgttaaattatagttaataatcaaacatacatgttagtaaatctagatcctgataaattatacgaagagaatactcaccactgtcatgctttctaccacgtcatccttctacttttctttttctataaggaaaatttgacaattcatgtttaaaaattgttcagggtcttttagtaatgcatagaaattttatattctaaaattaattaaatctcaaaatacccgcctcatacattcctctttctctctgtcctctctccctttctctctaactctcaccaaacccaaccgatacccacgaccatagaaccagactgaatcagagccagaccaaacccacaaccaccgcaccaccttcggtaaaacccactccgaagatgaaacataggacaaaatcgaggaggatatcgcgaaaccacaaagagaaatcgtgaaacccaaaaccccaaactctatgagctcaaccaccttgaaacccccgaaatccctacccatcgttggagttctcaactcacttattttctgcatttttttttcttctaatttttgacgatgtcgcgaaacatcgctaaatatcgcaaaacattgcaaaatcatgaaatatcgctaaatgtctccaattcacaacatcgctaaacacatcgctaaatatcgcaaaatcatactcaagttttcacgataattagcgatgtttagtgatgtgctgtgtattttttagtctcacatcacaaatacatcgttaatatcatcgcaaaatatcactaaatatgcaaaacatcgccaaatatcagaaatcatcgctaaacttcatccttaacctcagatttgtattatcattgcaaatacatcgctaaatatagcaaaatattgtacaaaaattggtaaactagaagaaagaaacgtaaaaaatgagagagtctgtcagaaaagatgatgatgagggcttgcgactgggttttagggtctgtgtgtttgacggtaggggttctaggtcggggttaatgccggagagtgagagagttagagagaatttttttttaaatgtaagggtatttttggcagaaaaagatattaaaagtatatgtatactatttttaattgggtagtatataaaacaacatattttacatttaaacatattaagttaaatttcttataaaagagaaacttaaaatatggaaatttaatcttcttttatacatatatgacataaaaaagttcataataatgtaaacaataaatgtccataagcccaaaaaattatttaaatatgccataaaaaaaataaacattaaaaaaatctcataattcatgtaatttctactatatatatttaaagtatattttactaataaatgtttttttttttaattgtaaatttcatttcaactagaccaattcagtctcaataatatcagcaacatcaaaagagagattaggttctgaaaaatacaatcaacatatacacgagacgttctaaccataaggtgaacaaatcaattagtattgtttgataaaacataaaaaaaaatattattaaaagaagataaatgttattagtcatgaagcacaatcaatagtttttgtacttcgttgtgccgtgttatgttttatttagttaatttgtttgtgtaagttgttatattaaaggattcattgattttaggagtactcggataaattttctatttttacataattttaatttcttttattaaaagtagagtttattttcatctttgatacatttttaccaatattatttgcactgggtattttttttttttttgtaccatattattcagttaaatatggtagcattaatggagtttcaaaatcatggtactgttgaattggtactctttactctttattctatcgattctcattgtttagttttgaaaccgatttttttcaaagaattatactttttataatgaattaggatctttattaaaatatattgttagtttgttttctaattttttggaagaatccctaattcatgtttaactaagcatgaattagatatgctccacttagtgaggatagtaaactcgcttggacaaatacttaattttaattttaactgtaaataaatacctaaatttaatttttagcaataataatacttaaattatatttcttaaacttctgtaagtcattatccatgtattattttttattgatatatttgaattaatttttaaataaaaaataaaaatataatgacttaaaaccaatcaaaaaatttcacttgggaatttacttaacactaacagtaagtatttataggagttctcgaattacaagttaggtattattatcgctgaaaattaaatttaaatatttatctgcaatcagaagttaaacttaaatatttatgccgcaaattactgatttattaaacttattgctatcaataaagagttcattgtcaaactaaataaatacacagcaaaaggaaacctagagtttgcaaaaactttcattcgaaacaaaacatccctaagattttgttgagagaaattttactctctcggtagaataaccctaaaaacatttccattgaaaaaccataactaactagtacaaccttacagtcgtagagaagcaagttggaaattaatgcagtaaacttacaaggttaaattataaaaaggtgcacgactacaaagacaatagtttaacgaaaaacctgcaatttccaactcctttttccaaatgagaaaaatctaggcaacaaaactgcacaatttggtcctgagttcatagttggatatacagagaaaaacttatgatggttctttgagcagattatatggagatagggtcagacacataataaaggttcaacctgaacctatttttatcacattacgtttatacttgatcacataatatagtctaaaaacaaagagacccttgtgtcaactccttttgccaactgacctctcttcttttattaatgtcttcagccagcaatcttgtcgatcatcttttatattcgtttctgtctgaatatgtgcaacaagaataaaataaagaaataaaatagaattacctattccaacataaaagtttacgtctcctgcttttgttcaccctctgatatctctgtttcttgcaagttcatctgacctgtaacagcataacccataaaacaaaattacatccacgctattgcaagcttctatttaaaaacagactctgtagatgacaaactgggaaactaaataacaaatctttcatcaactagatcgaaccaaaattcaaatttctcataaattaatcaacttatgaaataaatatcccaatatctaatgtttatatttatgtctatgtgcttgtacttcgctaataatgcaagctgaagattttggttttctaaaatgatggttatgtaagtctatgagaaactactaaaattattcttatgttgtgatcttcatcaggtattcttaaatttactctgaccaatcaatcagttatgaacatgaaaattatctcattctaatctcatttgaaatgaagaggggaactcagaattctgtgaatttgatccttattttaaattaaaccaaacatcttcataaaattgttaataatactagtcccgggtttaaaatcaatttcatggctgccaatgttgggaatttattagcctgctatgatctctttgaagatcatggttcatcttaagtagaagtaggtacaatacaatattaatgatgctcagctgtacctaacaaggttatcagagaaggagattttttcgacccatttgatctcatgtctgtacctgcaattcacaccagaattatgagttcaatgtaataataggcgagatcctgtcagattggaaccatttatggtgattttacttctctaatgatgcaggcttaaggttttgatctcatgtctgtactgatacgctaatatagaaagcaatgcaaccaacggacttgttaattttcaattaaaagaacgtacctgaattttcaagggatttcaggacatctgattttttgaaagtatatccaatgaaattggtatctttggatgtcaacatctgcaacatcatacaagaccacaaattaaccagaagttatccttatatgccaacatctacaaaatcgagaaagaactttatgctcatttttggttccaattcaaaccatccaagcgttaacctcgggatagcgtaatataaacagaataaacatattcccaggcaagattctggcacagaaaccccataactaaagagaccacaataaaattacctttcgccatggtcccactgttggaattgaggatggctgaccctctacctacaaaatccatagagacaaaacaacttcaacactgtggttgtgatacttgagagagattagtttgagtgaaacaaaaattgagtttgggttggatgaaaaacaaggaagcacttgctgctttttgcatagcccaatcacccgaaaaatgtatgaaaaatgtttgagttactcacttcaggaaacttctcgaaattctgcgtgtccaagtcaccaaccactgtaggtttaaatgcagcttccatttcgtatagcttgtcccactgaactgaatgcatctgaaccatggatgggcctgggaaaacatcaaccaaactataccaattagaaaatgtgaaaaataacctaggactggatgatatgaaaatctcataattgttctttccgaataacagatctgtttcaccaaatgcagttacctttagttcttccactcctcggctgcccagccttgtttcaacattgcataataagtgacatatcaaatctttagcctcattggatatttttggttcatcagggaatttcaggcatgttctccaattgatgatctaaagaagaaaaatagattaaaaaaaaaaaaaagatattgaaggatgattgtgatatagctaaaatcatatgactatataataccttgcggcatgtgatccttggatcatcggagcaaaaggggggatagccaataagcatttcgtacataattgccccaagtgaccaccaatcacattcgattccataccccttctttagcagcacttcaggagccatatagtcgagagtgccaacagtcgaataagcctgcagtgtatcacaatagtccaaacatgtattttttttgcattacaacaaaatatttttatttatcaaactatcaaaattataaaaattataaaaagtaaaacaaaaaatataaacaaatcttgaagatataccaatgcccggcgattacgtttccactgcagtagttgttctttgggcatcatccaagggggtctatcacaggcagcttgtccttcattttcagaattggtttccccattggttaagtcctcattttccaatagcaaagttgaatacttatcatcaagaggtttacacaagccaaaatctgagagtttcaaatgtccatttctgtccagtatcaggttatctggctttatgtccctgtaatattagaagagtgaacatagcatactgtttatagttgggaacaacatatgagctgaaaagacaaacaaaaaatttaacccctcatgctctgaccataatttgagtaataatattagttcttaccttttcttaatgaagaacacgatctaacactcacgagcaaaaaaaattatgctcttaactacctggtctatgaattacggagaatgtgccttgattaaactttcaggcccccgagagcatatagacaagtcaaaatacttggaattaaaacattaataaaaagagcatgtgaaggccgtacctatgaatataattgtgttgatgaatcgaatgaatggctagaacactctctgccatataaaagcgagcaacatcttcggaaagaacatcttctctcatcaataatgtcataatgtctccaccaggtaaatactccataataaggtataagaagtcggaatcttgaaatgaatagaaaagcttaacaatgcaccgactatcaacctcagcaagcaagttcctctcggaccggacatgctcaacctaaattattgaaggaaaataaagttggcaatcagtgaataatgtatcgcacgaaaccatgaataggtagttgattgaaaaggtcccgatacaatgttaattttggatcgccacatttaaataaaagaaaaaaaaggagtaattatgcacatagaaacaagattttccatttatatgaccaaacaagatataaagtacaattactttaactggtaaatgctaatcaagaaattagtacttgaaacttttacgaaacacattaaaatgtcttcccattcatatccaaatgttattttattaacagatttgataatgatttgtcacctggccacggctaagcatatctgacttcttcagtttcttcatggcaaaaatctcccctgtatctttagcacggcacaatctcacctacaaccataaagaacaatgaataaattaaatctgcacaggaatttaatataattctacaccaattaactcaagtcaccagtacaaacttattccgctaccagaacctccaaactaatcattcaaatttaagacaagaaatacttaatggacttcacaaactcaataccatccacatatttttgagtacttgtaaattcttctatacctccccaaatgcacctttgccaattacagtcaactgctcgaagtcatcgattccaattttccggcgttggagtctcatatattcagtctctctacgctccaaattcctcaacatctgttcttgttcctcagtcgatatttgagactcctgcgcttttctctgaagcgttcgacgtctgaaaaagaaaagcccaaaattatcaaaaagtaaagaaaccaatcttgattgaagattacctcactacacatcaacaatctcagctaattaatcatgttctattcccacaaaattagactgagaacaacaatatcccatacctctctttgcgctcctgcaatccctgaagataattcttgtagtgattctctataaactgtttggcggcggcggctttctgcctcgtcacaggagaagaaacagatacatcgggactggaatcaaacccgaccctatccgacctcaaattcaaagcccccaatctcaccgttccatcgccgccgtccattctctatcgatcaagcaccaaaaataaagtaagaatcaaagaagaatttacagagagatccaattgactgaaggagagatccaggagctatagctctgggaacatacacagagccagagcaggagtcaggattgagaaaaggaaaagagtagaaaccataccagagtccagactacaaagtggcagttcaatataaatacatgtgtggatcgtgagtgtgtcttatctatggtacaaattgtcgtttatttagaattgagaaaagatatacggttttctttttgctttctgaggaattgagtgcgatcgacgccatcgttttcctcgcatgaactggaatcttggacgcaaatatttatttattaattaatttttttttttactctgacaatttaatttaattattatttttaataattgtttgtgtgtgttggcgatttgcggtgtggtgtcggcggagatctatagaaggtaagctggaaagtgatgcattgactgcaaatatggaccgatttttgcgtgagatttcatttatgaatgcggggtcatagaaaaagaatgagctgacgtgtccaatttgtgattggttacctcaggagatgtaaaagtctcgtgcgagcgtgtgccatggacttaattaatgccctattcatggaaatggcagcttcgcaccgaagcttgccaatttacacccgacgagattcgattattttactagtacttcttcactataattaatttgctacggcttatacaaattaatttcttaactaagtactattatattatatttagagtaataaatctccctatattttacatattatcaccattagaaaaataactgggacacaactcaaattgcacatatttattacacattatttgtatattattttaatatttttcaattgtggctgatgctttagcgggtttgctaagggacattgccccctctatggcaatgagtttgtttggtttccttcaataaaatgacttaattaacaaaaaaaaaaaaattattttcgacattttacgatatattctacgatatgatttagttagaaactgtatttaacgctaataagtttttgcaattatttgtgatcttaattttgatgatatatgtcggagtgttaattttgtatgatctccaatatttttttattgtttgcgatgtgatttaatcagaggccgtaatttaatattttgtgattttattttcattgttaaattacgagtgtctttttttctttgcatgtatatttttttatatattttatattttttaattatttttgtagatggctcttattattgaaggaatttagacaatattaaaaatatgtgaatatttaaagactatttgaatacccatgtgagtactcacttacaatagcgagtactcataaaatatagtataatatataaatacgagtattgtatataatataaaaaagacacaaattatagtggttcagcaagagcttgagctcggcttgcctaatccactgttgaaagagatctcatgctctgtaattttattagaatcagccccgtcccttttgaatgtagggggaagcccctacttataggtagtaggtaacgattacaaaattatggtcattatgatagacccttacaaataataataaaaggcttattaattgtactaattacaacaattgtaactccttgattaatgacacttgaatgcttgaccatttattttatgttgattggtgtgtgttgttgggttttatgccctaaataaacctcatttcatataatcagatttactcatt

SEQ ID NO: 111170 - DNA, 5260 bp, Cannabis sativa
  modified_base (71)..(82): a, c, t, g, unknown or other
aaactaagaagaaagccaatagaactatggtctaatccattcacaaggagtaaccaaaagttttctattannnnnnnnnnnnaggaaattttcgtttataagtctggtatgaggactcattattcgaagttattcgtgttagattttgaggacaaaatccttttaacgaggggataattgtaatgactgcatacttagaatatggattggtaagataattagttttaattatttgtatttaataattatatgtgattatatatgttatgggcactattttaaagaaataggcattagagttataatttctcaattttagagattttattcaactctaaatgtattatatatgctatatatgaaatttatcatttttatgattttttctcggtaacgatagaaatacgatggtttggccattagagtcacatgggttagacttagaatcttatttttagtgggacaatcttaaatattatttggaatatcaggattaggcaaggtagtggtgtttgactatttaacccctatgccttatgggttgagcatcggtcggtttggtcgatttttttctaaataaaaatctagaattcggtttttggtctggattggtgcaatccgaaaaccgaccgaccaatccagaacttatcttaaaatcgaccattttgaaccacggtttggtcgatttaactgcccataccgattttttttttataaaaaatatgatgcaatttattctataaacacataattctacattttacaactacaaacatactaattaattgttcaaaaactaattatcttattcttttaactgtaatattaataaaataataatatattattatatattattagtaactacaatatataaagcaaaaaaaaaacttaataaattaatatatatatatatgtataatggtcggttttggtttttcggtcgacttattaccccaaaataatcgactgttcaatggcagttttaaccgtttagcgattttttcggtttttggttccgtcagtttcggttccagcggtgttcggtaggtcgatttaaacgattttttcagttttctggattttatgctcaacctaccttatagtaacttaagcttcaagaaaggggcaaatgataattttgcctaaactagaattatgttattctgttggtttattgtagaataaactataattttaatattcttattttaatgttgggataacctaagttatataaccattatccaatttatgaaagaaaaaaaggacctcttcatttctctctgtcctctcttcgaccttaagaaactagcaagaaccaagccagtttcttcatcaaatttcaaagttttcagcttgaatacagggtattatggtggtgcaaatcagaggtaagccctattacttcttttccttgagttttgggagttaaacattaggttcaagaatacaattatttgagatagcttctgttcatgtttgggaagtttaaggatggtttaatagattgatttaggactgtttgaaagtcttgtagtggctgtggtgtgagttgagcaagttttagtttttgaactcaaagcttcctcaacaatggaaatttttgattcttagtataattttttgtgtttaacctatgcaataggttccttgtgtaatatgttgatattctagaaagtttggtatcatttgagattgattggaccaagttatgggggttggaagattggaaatttttgtgtttttctgcccagacaaccggaactgcagttggtttagggctataccaactagaattctggttggatagtatcaggtaaggccgattttcgtattttggccataacttttcacttgggtgtctgttttagacattatatatactgtttgaaagcatatgacgagctctacaacatgttataattattagagccaaattatgtctttttttatagggtgtcttcaccacgtagttaggtagaaaaccctagattttattttgggtattagaaagtgttctagattagacacttaccagttttatgttaatgtgacatagggcatccatttagaaagtgacatttccattcaaattgactgacatacttgaatctagaaatgaggtaagactagcatagaatatttatgtatatctgtatgtgtattatatgcatgctacttatatgattcatatgctaccaactcttgtacaatagcggtattgagtgcattggtaaaccatatgatggttaaaggtacaattcattgttaccaatactagtacagtttggtacgtggtgcatgtggtacaacactcagtggtacttggggtaggggtcaaaccctaccaacactagtacagtagtggtatgtagtgcatgtggtatagatgtcgtacctttgttaagaatgttcttaatcacctgttaagccttttagataggtgtatgggtgcctaaatagaagtcggtaatatattgtatgtcatatgcttttcctactgagtctgtcgactcacagatattgtttgcacgtgtagataaaggaaaggcaaaggctaagcaccagtgagtctagggcttgaggatgattggacatatcaagatggttaaacttggagagttcggtctcaagacgacttgggcctttattttatagttgtgtagcgagatgtttataaaatgtattttcgagtttgttgtaaacttttaagatgggatcccgaattttatgtacggttatatatttataaaaatttaaggttaattaaaaattttaattgggcaccatttttgagaaaaattttgattagcaaaggcgtggacagtatttagaaaaccattgtaggttgcctaagcaagtgttacacccatggtaatggtttttgctctactcattttatcatttgggcactgcaaggggctctcttcttcccccatgggggagtcttatcgggatttcccccttggttgtggtatggttccaagtgtatggagagttttttgagtaagggtcattgtgcattactcgtggtggacgtggatgcctatcatttatgttaaaaagtgactttattacctctaggtaccatacttaggcatacacgtcatggtatattgggctgacctagccttacctatgtattacatcataataagtcgacctggccttacctttcgagttcttttttgttagtcgctggatgtagctctaatgggtagatcatgggcatgtaggcagctcttctcgagctaggtcctaggtttctttccgctgaatgccccctagggtcatccttccttgatgccactctttctagttttcttgggtgtaggtatgatgaatttctcgcgccaagttggttagtcctctaggcttcaaattttaccacattggtcatttccacatgagctttctcaagtggttggagttgagaggttccttatggtgaccaccagtcgttggttgtgtagaaaaatttcaacatctttaggaagtcgagaataccttttcatgttggaacattgattgatcattctaagaaaaatgtagcttgaactttgtgtttcccccagatggtgccaaactattaacagtaagaacttattaacgatattatggctagagaagtaatgactaataaaaatgatataatgatcttaatgtaaaaatataagagagattgggtaagtgagaagatcagaaatactttgtattcaaaaaatagtctctcaaaattacaaggttccaactcacctaatggagtttaggggtatttatagtgaggctctatttcccttgtttataaaatgagttgtcaatggttcctatgcgggcgatgtactattatgatggcagtttgtggtgggatgaggcattgttggtcgagtgccaggtggtactgatatgagcacgcatctactactttgacccaatgtacgtccactactttgtgttagatgttgcaggtgttgtggtcgtaccctctgatccaccctatccacaactatatcctgagttggcagagctgtcaaggtcaaaagttgtattctacgagcacaaggatggcttactccttgtggtgggtttacaatactttgctatatcgaaacgatcaatagtcagtgaacaaccccctatccgggataaatgataagaatttgaacccattttcccaggtgtccagctctagccaacatttcaatctcatcttttaaatatccacattcactggtggtgtgccccaggtctctgtgatactcacaacccttattttgatccttcttgtactttccttctagaggcatcctcagaggcttcctataatggaccatattgcaggtcgccttgtacatattctcctgagtatccactaagctcgtgtattcaatgtactttgcttcatattcttttcttggtttctttaaagtctcaattcagttctattccttccacctctcttgctccgagactagctcacattttattccagaacattcgcttgtggcttcgactgttcaggagcaatactacatctagtttgagttgctccataccaagagaaaagagtctgagtaggtgcttgcatagatggagaaggtctatagacaactagagtgtattgtgttttgggaatatgatcttatagagtaaatccatgagtagatgcggaagagattagtgttagagggactccaaatgcttgttggcaagcatcttccaaattgatgaagccttgtgcccttgacataaactaggacaaggtctcttccctcttcctctgcatctttccccacaatacggagccaactgtaagtctagattgtagggctatgagtttcatgtcgtcggtcacctttgtttttgcatctacctccatcattcagtgaatgaagctctttaggctttttcctgcctgttgtttgatattggtgatcgaacgtacttccacatcatagtcttaggcaactatgaattacttctagaaggccgacgaaaactcttttcaactatggattaacccggaagtcaatctcttccaccaatcctccgctgacttagtgagtgttagagaaaaacacaaacatttggtgtcatcacttaccctggccacttgcatcatctcgttgtatttagccacgtaggtccttgggtctatacgtccgtcatataactcaatctgagctatcttgaagttctctaggagtggggctttctgttggaaattattttatcatgatcttagatctactcacaa

SEQ ID NO: 111171 - DNA, 3199 bp, Cannabis sativa
aacccttacatccgctaccaaacagggcagcaactcagttggaacagtctccaaactgcaagtacaatcaggatataatctagcaactctagcaaacttatgagccactacattatcacccctaaacatattagtcctgatagaagtaatagaaatttaatatgtcgagtaagacaaataatacaaattcgaaaaaattacgtactatacggcaaataattttaaattatattatcactgcaaaataatataaaattcactcactaattaaacattattgaaatatataataatttattcaagaacaaacttaaaagtaaaaaaaaaaaaacattgctgtggaaatcatgaaatgaaacaatcattcaagaaaaactagtcacaaaatacaacacaacaaaattacccaatcaaatagtggttgtggcctttgtcaaggacaagaatttcaccgatgaacccaacaacaacttagaagccttaatagtaaacgtatcatatcttaagaagagttccaccaaaagtaccctacacataagcagcaccagatcttttccaggacactgtttgttatcaaccgttggattctgagtctccctcccatttgaccaataaacatattgcaataacttctctccctcttctccaacaaatctatcactaacaaattcttctgggttatcaaaaatccttggatcttttgtagccaacggctgatatccaaagatcatttctcctttcttaatctgaaatgccacgtcatggctgttgactatcatatcctctttagccttaccatattgaaacggaactggagggtcaattctcaatgcctcatagattactgacttagtcaaactcattttattcaaagctgttatggtaaccccaccttgttccttaacaacggttctgatttcatcagccaattgtcgatgcaaactctctcctcctaatgcgacccacttgattaaacttggaaacaaagctttcatgccaccgtaagcattgaaaccagcaacgaaaaccaagttgtgacaagcttcatctcttttgatattgaaacgattctctgcttcgtcgaggattacacttgcagacgagtaaaaagcattgtaaagcttgtcgtatccggatttaaccagaaacgaaggtaaaggaaacgtgtgtagaaccaaatcttcgaacaaattaaggaacttcgaaagtcctaaggttatcagtggatggagttgaaagaagagccacttgtcgaaatctatgtttgcttttggtccaagcccatgttcagttgggttaccatcgcaaaagaggttaaagacgaagttaaaagacatgttatcacttaagtcattgaagttggcaacgttgttatctcttatgttgtcttcaatattagcgaaaagttcggataagcaagcacgaaagagagggatgaaagtgtcgtgtttggaggcgagagtagagagtatgaagcctttgattgctgcgtgtttgggctcagaagggtcaagataagcgcacacgcggtggccgccggtaaaggaggtggagggcatgaaggtgccgtcaaggacgttacgtttttcgatttttgagttgtcgagtaggacggaaaagctgacggcgtcaaggacggcaatgactttgggatttgaggagatgaatggaccaggaggcatgttggtacggaagactgttgagccatatttgttgatccggctaaggaagaactcgtcctgaccttggttgtagaagtagtcgtggcggtcttttagagctccgaagaatggaaggccgtagctaccggggatgggtttcagtggtcgggaattattctcgtctgaggttggtgaagccatgtttgtttatgatgataatggagtggtttgttcaactatagcattagtgtcagtatcgtatatatatttatagacaattaatgctaataatggtcatattgttctaataattgaccagttgcattttcttcatcatcttcatcattttgtattacaataccctaaataatcataccaaaccctcaaatatatatattgtaaatagggtgtgcaatgcaataataatagattgatttaattacaacccactgttaaatattgggtatttaattgtgatcggattggattggatgttatttttgaatatttaatcggttcggatgttgaatgggctgtctaataatttaatcaatcaaactaatgaatattttcatttaatttgaatgagtaattagattttatgttgatattttttaaatatatgtatatatgaaaattaatatttaattttttttaatggataattcaatttaatagatattggatttaaaatagtagaaattatataatacatgggaaaattaaaagagtttaattttatatggtataaataaataatactatgggattattatatggttttttttttttttttttatatttatatgggaattaaaaaaaaagatagaaatcccatattagtaaaataataataagttgtgctagaaaagttaccggcaccagaaaattcaccggaaaagtgtcgttgatgccggaaaaattagtgtcgccgaaaaagttgccgaaaaagtcattatcgccagaaaagttgctggaaaaccgtcgccgaaaaagttattggaaaaatcaccgtcgcctgaaaaagtcactagaaataaatgactcggatataaacaaaaatagaaccaattctattacataatgaataaaaacaaataacacaaaataactcaaaccagttatacttgaaatataaccatgtaacataatgaataaaaataaataacacaaaataactcaaacaagttatacttaaaatagaaccgtttttataacagtgttataatgaataaaactaaataacacaaaataactcaaaccggttatataacataatgaatgaatatttttgaggtaaatatggtatgtgtgtaattatttagtgggtcagagcatgttgaataatggatatttttgtttgagttattttatttaactgatttttgtgtgtgagtttttatcttaattagttgtttcacggaaccagtttttttgtctcaaatttttaagtactagttgataaatataatcagtttctttatattatatttgaattattgtatgttattctttgtatttatttattttgttatgga

SEQ ID NO: 111172 - DNA, 9176 bp, Cannabis sativa
  modified_base (9147)..(9151): a, c, t, g, unknown or other
atccacataattattaatatttataacaaatctcttaatttttttttttatttaaaacataattttatttttcattttgtgcccctttccaaaatttacttaaatgcccattttaaataatttttctgtcactggcttggattgtctttttttctttcttcccaactccaacaataaaataaatatcaatatagtgttgtaaataagtctccaagatacaattaaacatacgaaatatgtaaaataataactatataagtttagaggaattgctatattgaaatttaacatataatagaaaaatgacatgttttcttactcttccccactagttttgttcattgtcaacttatttttttatttttatttttttggaatgaacttaagaaagttagggacattgttaatgtgaatattatgaatttcgtgtaattacatacaaaaaccacaaagtaacgactgaactggatggacacagtcatggtcattaataactttattaaacttcaaattaatattactaatttagttgacaaaggttggcacctgcaaattttatataatttagcttctgaccctactaatgagtacaaggacaatttcaacaatcaaccaaaactaatttaagtaaagaaattaggctaattcattaccacaacatgcattaaaaaaacttagcataacataaccgtgttgaatatacttgattattatttaaaaaaaaaaatactttggaatgatattttcaaaaatatattccaaattcttgttatttagccccaaagcttccaagtctcaaagaagaagaaaatttaatcatggacaagaaaagattgtctttgcttttcttagttctgtttctttggtcttcatcaatgaacttgactttaggttcaacttctaaagaagtagatgcccttctcaaatggaaagctagcttgaaaacaccaaataactctgccttctactcatggacaattgatctccccgctgctaaatccatcaacagttctgaaaattctccatgcaattggtttggtgttttttgcaacactgaaaaaagtgtcatcactataaaccttaccaactctggtttacaaggtacactgcaccaattctcattctcctcttttagtaatctttcaagtttgaatctcagcagtaatgaactctatagtgccatcccacctgaaatcattaatctttcaaaattagtctttcttgatctgacagataataaattttctgggaaaatcccacctgggataggtaacttgaccaatcttaagaccttgttcctcactaaaaatcagttaagtggctcaattcctcaagaactaagaaacttaaaatctctttcccagttaagcctcgactcgaataatctttcgggcttgatccctccatcactaggtgatctaacaaacctcactctccttgcactatccactaacaacctttctggtcccattccacaagagttgggaaatttgaaatcaatactttatctatttttgaacgcaaataaactcaacggctctattccattctcatttagtggccttagaaagttaagaatgctatgtcttcaccgaaaccagctttcgggttctgtccctcaagagatagagaacctcttagagttaacttctcttgacttggacactaaccaattcagtggttacttgcctgaaaacctttgtaaaagtggagttcttcgaggcttttcagcatttgacaaccatttcattggtccaatccccaaatactttaggaactgtactactttgtacaagcttcgtatacaaggcaatcgattccttggcaacataactgaggtctttggagtctatccaaacttgtcttacatagatataagccgtaataagttttatggagagatttcacaagactggaaacagagcaaaaatctcactgttatgaaaatggcagacaacaacattactggcactataccatctgagattggtagcttaaaacagctagctgaacttgatctctcctcaaataatttagttgggttgatcccaaaacagcttggaaatcttacttctttgctgaatatgagactaaacgacaatcaactctctggtggtataccctctgagtttatgtcactgacaaatcttaatcatcttgacttgtcatccaacaacttgaacaactcaattcctggattctttggtgttttcttgagagccaattatgtcaacttgagcagcaacaagtttagtcaagaaatccctgtccagtttggtaacttagtccatctttctcagctagatttgagttacaactcgcttgaaggagagataccatggcagatgagcaaaatgcagagcttggagagtcttaatctttcacacaacagtctttctggttcgatcccaacaacttttgacggcatgttgggcttgttaaacattgacatatcttataataagcttcatggtccggttcctaacatcacagtttttagaactgctccaaaagaagcactagaaggaaatatggggttatgtgccaactttggaagccttgagccttgtccaggtagctcaagaattgaacccaatccagctttaatagctgtacctgttgtgggagcatatctacttatagttgttgtctgcttaattgccattgttattggaagaaagtataaaaccaaatcaaatgaagaagaagaagaagaagaaagagacgaaaaccaagatggggaagtagttttttcggtactgaattatgatagaagaaaattgtacaaagaaatcataagagcaaccaataactttgacccgagatttttcattggagaaggaggatgtggaagggtctataaagcaaaactttcactacccaatacagatattgtggcagtgaagaaacttcattctccagctgaaggtcaaaggagactaattgggaaggaattgttgaatgaaataagagcgttggtagagatacgacatagaaatattgttaagttttatgggttttgtttgcataaacgagagtcgtttttggtgtatgagtatgttgaaaggggaagcttggggagtatgttgaggagtgaagagggtgcgaaggagttggactgggacaagagggtgaagatcgttagaggcgtggctcatgcattggattacatgcaccatggttgctccattccaattgttcatcgagacatatcaagcaacaatgtgttggtggattcagagtttgaggctcgtgtttcagattttggcactgccaagcttctaaatccggactcctccaattggacctcacttgcaggcacctttggatacgtagccccaggtaaatccttcaactatattattagtattacacataacattttttacaagtaattagctttaccaaaactatgaaaatcattgcaaatgttacattatgtatgttcattttttaaaacaattagtgatgtagcactaatatgatcctaatctattgcaaattaagagcctaaacagaagaaaaaaaatacatcagttacatgtgctcatgattgtttaaaaaaaatgaacataatgcaattaaaaggaaacatttgtaatcatttttatagtttggaagtagtaagtaatataaaactctacaatggtaatacttaagagattaaaatcttatttattcgttaaaataaaatgtgtacaacagattttaatctttttcgtaactctactcttgccataaccttattttgtaggtaacaacagtaattcatgttttcccatttaatatgtgcacgattattataagttacagggtatgtaatatggttttgtgttttatatttcttttatggacgacagagcttgcttacacaatgaagataagtgagaaatgtgatgtttatagttttggggtgttggcattagaagttatgatggggaagcagccaggagatttcatctccactctctatgcatcatcgtcattagagttagagaacaagcaaaagttggtgatgaagatcatgcaagttttggaccaacgtccacaaccacctttaccaaatcttgagattcaactcacaactattgccactctcgtaatctcatgcttacaatatgacccaaactccaggccacccatgaacataatttctaagattttatccacccaatctattattcatctttaactctacataaaatcaagttttacactgtttagttatgttttatgtatgtataaatcaaatgtaaaatgattaaaaaaataaaaaggtaaaataaaaggatcgattacttcgttgtcagttacatggtgtaataataatcactcgctttgtgtaacaattattaatttcaatctatttctatagaaaacttcctcttttaaaatccagtaagactatctttgtactttataggccaattatttaacagaaaaaaggacatgctactaacaatctttgtaattctttcaaagatacattaaacataagaacatataataagtattagacaatctggatttcagtttcagatattaggtaaactatattccaaaggaaacccaatgttatgtcacaacaacataacagcatactgtaacaacaccaacagaagtacaaaaagagaaacaaaattctcaagtttcttcttgttcaggcaaaagttttaatttcccttttttagtgagttcaaaatggatgttagttcagttattctaaactagcttttacttttctgttactttaccaccatgcacaaccaaaagttttgatatggtaaaagtaccacatcatttcttcagtgggcttctggagaaaatcttcttgcagaatggtctggtttgtagcaacacgtaaggctgaactgcactgaggatggactcatgaagagcgcccatgtcctgtcacaaagaataaagttaaacctttgaacacaagtgaaattgataaggagaaagagaaagtgtttgtggggtttgatagtcatgaattcaactccttgccttcgtaatttcgagagcatatcgaatgacatagttagcgaaaggatgttccaacaactgatcaaattgagaaactgagagcaattcatagatgatgcttggacgaatctcatcgaaatgctttagacatttttcaaccacatgactgctaaatttatgcattgagaggtactcatagttccctctaaactgagaagccaatttggcattggcagatggaagccttagccctatgataaactgaataacataattcctgccattgaaaagtaaagagtgatgggcaatgcaaaagtgtcatgaaatacataactgaactaatagaagatttctttcatattcaaaacttctattttaccatataaccattcagactaatcatcttaagcaactagcaacatctctcactaaatatgtactatataagtttgtattttacatatagaaggaaacctaaggtagcagaacaaatagacagtagtgcaaattagagtgaagttataagattgtttacccataaggatcttgagcaaggaaaagtgcattgttagtaatttccgtcactaacttatctagatgcttttccggggcacgtgaaaggcaccgctgcagtacacaacatccttgccgatgagttgcaatatctatacaatacttcacagcatcgtgaaatatatgctgtcaaacacaatcaattaattatagaatcacttaagaattttttttcaacagagctgcaagaattctaataaaatagtggatttcattctatagacaggacttctaggtgcataggtatgaactgtgcaaatgtgaaatcaggaactttgggatagtgttattacacaccaagcaaagctatcattactcagcttgttaaattaacaagtccatttcaatccaagagtctacacatatctctataatactccaatcaaggtgactaacaattgcctaaatcagggagtccatgaattcttagtagcattgtctatcaagaagcacacagtgtttaagattctagagttgtaaactagaaaataagcatattgctatttttttttaaaaaaaaaaggaaaaaagagaaaggctttgagatgaagatcccaagaacaaggtactttcagaagtcaggtgatggcatagaaaccttagcatccaaaggaaatcgaatctcggagtcacaaatcagcattagtccacgcatgacagtactctctacaggacccctagtgacatactatcgagaaaaacagaaacactggacaaaagtgcaccaatatgttttgctattagagatatcaggctaacaaaactcaaatagtaggatacgagactgaaaggtcttgcagcaattatttctctctttaaaaatcaactaacatgacaatagtgaaaacatttaagttgattttgtgacaagaaatgcaagcaccaattagtaataaagtttgtaagctcatcaggagattgattttcaatgcatggcaacatatttttcctattaattgaagatatgactttggtattgcttgacttgagttattggtgttcaatgagtcattgctgactccaaaaaagatggggcatgaggttcacatggttcataacctttttgtgattggtctcataagaattcagcacacaataagctttgtttcagcaacttgaatatgatcttaaagaaaaggcatgaaaaagctcattcagctttgcccatttgctaagttaaactcagttcataacaatatttaatctacaaaaatgttaacatcttaaaacaaaacgtgttgcctttcgacaaaaaaatgactcaagaataattttgcacgagtggtattctacttgttatgatctacactaccaacatgtaaagaaactcaaaaagaacagaagaacatcaagaaatacagaaccttaatatgcaataccaaaaagcatgtccataaatcaagctataaccaatagaaagaaaaccaaatacctcattgtgttcactactaaagcattgcaaacaacgctgcacaacatgatttccatttaaatctttagcaagaagaaggaaaccaggttcgatggctgacataatcaactctataagatctctatcttcagcattctcaatcaacttctgtaccacacgcgagctaatagaaaacattaccaattagttgagagagagtggaaacaaaaaaaattacaaaggtactactgcaggagccataaatacttagagaaatgaatgaaccattgaggattacccatgtgcatctagagaaatgtcaacaagctgtcctggtttttgggttaacacaaccgcaatctgtagtttttgttgtttacaacaaacatccaaaagcttctgtataaggtaatttccaaaagggttgatggagagctccacaacatgatcaattactccatcaaatattatttgcacatctcgacttgttccctgttcaaacaacgtttgcaaggtccggcaaccatattgatccttagctatgcagtatatgtaatccttcagcttatctaatgaagataatactgccggaaagtgcagctgtgaatctttactcgaactcactttatttccactcaaacactttccttctatgatgaaactgtcttcaaaaataaaacccttaaactcccctgcacattgttcacgcctgaaaacttgtggaatctcacctcttggttttgctttcgtccattcttccatcattaaagtattatacaatgaatttctcatattctcttttagtttgggttccaggaaacgagaggtggagctaaatgagtctgtgagattcttacctctattagagtcatttccatgtggttgtagcagagcatcaacattttgttcctgtgtttggcccatcatatgaatcattggattgccattgaaactgggagtgggaccaaagctccttgaagtagaatggatatgagtgagaggagaccctggtttaaaccttttatcaccgtcagaactgatcggaacagcactcttagatgatcggaaagcttcaaagccaaaagggtcattacaagggatggctgctcccccaaaagaagcattaccaagaacaattccatctgggtctctatcaaatcccctgtttctgattccttcctcactgctaatatgcattctacagaaactttcagataatcccagatcattaagcagcttctctttggtttgagaataagaagcgtcggggttggacaacaattccctcgagtaaccagtagtagtactccgtctgggatacttagactcctcaaatggggttgaatatgaaccagcgtcgtcagagaaatcaaacccatggccatttgagaaggggtttgaaggagagtactgggtttgcttagaagctctactcattgatgagcttctgaccaaacggttatggtgttgatgattcaaatatgatgatggtggtggattgaagattccacgcattgagttttcagactctctttcactattcatcttctctattacttgtaaatttttctttcttgaaatttttttcaaacaacacaaacacagtacatatgtatatactaatattttcttgaattctttctacattaacgttcaatcattatagtcagaagaaagaacatgatgaggaaaaaaaacccacaatcaaaatcgtgaaactcacacaagaaatggatttaaagaaacccaagaagcagagaacgaaattgttttattcatttcctttggtatgttgtggcattcgcatttgaatcttaatattttgttggaatggatttggtggggatggagagaggaaacggaatttgattgattctcttggaaaatagcacgttatggttactctctatgaaaaccaaggagggagtcagtcgccactcgcacaccccatatagtacgcatttaaagtgcagaggagagagaaaaaaaaaaagagctctgctctcatctaattcaatctaattaataattaaattttaaaatttaaatctaattaaacctcaaaatttaatccaatccaagtctaattacaagtctaataatgttaatattaacttaaatatatatatatatactagcaaaaaactacgtgcaaggcacgtatactaaatttnnnnntagtttttttctatgttatttgaaa

SEQ ID NO: 111173 - DNA, 1469 bp, Cannabis sativa
aaaaaaaaaaaaaaaacaactcctattgttatgcttttttagccttattattttggaacccaaggtttttcattggtcaaatatggcaaacgcgttattaataagtttatttattttggtacgtaaaagaagaaatactctgtaaaacaattaacgtaataacaaaagcatagacaaaattaaagaataaataagaaatcccaaaagtagtgggttggttttttcttttgttttgtttcaaaagaattaataattaaaaaggaaagatgaatatacctggagttcagtggtaacagggtactcatccatgtcgacgtagttcttgttcattgagtccataacaagcttatcacactcaggctccatccaagtggtgacaaaggaagccaaattcagccttggctttccatcaagcattaactcatcgtttatcatctgatacgccacttcctttggtgtcgaattctcaggtatctcatacctataaataaataaatattttaattaattaaatataaaaaacatatagtattatagaaatgtatatatgtatttattaatcttacttagcagcagagtctcggacgtagcgagatgcaaaggtggagtgaatggagtcattggactcagaaaaaactttggacaaaaccatactgaattaattaatgcctcttaattaataattggtgtatgaaattggggacagagaaaaaataattggaataatagagaatggtttggatttgttgtgtgattgtgtgggtttttgaagaggttttggggtttgtatttatagtgggggttttgggtttgggtttacaaacgaaagagactatgaaggtactttttttttataataaaaggaggtgtattttattgaaagaaagaaaaagagaataataaaaagaagttgaccaaaataaaaaagaaaaatctaaaataaaaggtcttacatttagaagaaatggaccacgtgtaataactataatatcgatatttatgaagcgtgtaatatatatgtaatgtatgtattagtatcacattcacaggtgttaattgtatctacaattttacgtgtgtgaacagtataaaattttggtaagagtggaaagacccttgaattgaataacaatatttgcacccttaattttgtaagcgtttttttctttttcttttttaacaaggaactggttttattttactttaaaagacaaatgttaaaaattacataatattttcgagcaacttacactatatataatttttaaattaatgcttttaatttttattttttctttcaaaatctattatatatattttttttcaatcattcacataacatacttaaatttttaatttttttacttttacactgctgggcagaattgtttttcaaaaatattgtgttttttttttttttaaaaaaaaaaatactgtgtaagttttatactatgtactgtgttaagttt

SEQ ID NO: 111174 - DNA, 4120 bp, Cannabis sativa
  modified_base (34)..(36): a, c, t, g, unknown or other
tgcacagtatgtttaaaaaatcacgtaatacgcnnntgctagttagggtgttacactctaggtgaaggtccgaaaggatcccctcccttgtgctatctgtgaggtatttatagaccaattctcttgcatgggcagtttttggataagtcaccgcggggatgaaatcccaccgttggattggtacgtggcgtatttttcatgtggctttaagggtgtcagatcatactggttgtactggctgagcctcagagatgtgtcaccctagggtcattcttgtttaaatttccctttctcctagtcgttgcattatttatctcggtacacgaagacacgcatgcctacacgatagcgtgttgtgggggacaacctctgatattgtgcatgaaatagcctagttcctaggtctgtagcctaacacacgtgcataaagatctcatgagccgaagatgtacccgagactggtgcaacactaagacctggtcatgtagattcacatccctcgcgacagtaaatagtcttcgctccaggatggatgagactttgactcacgaaacggaggaagaccgtggttcacgggagcccattttttggctagcagttagggagccttccttcacggaagctttccccgcaaggttaatgcccttatcttctcaggatactcaatgaagtacttgggcggcctagtgacttattgaccttctttgattgaaatctacgcgtcatgcttacaaagatgcgaataacatctacccccaagctttcgggacatactatggttcaggagcttgcagtatctccttttgaaataaattacgcatgtgggactttggacaggttctttaatgcagtacatcatcagtcgccaaactgaagtatcattactcaaaaggcatgattacttctattcttttggcagtgccttaaatgctgacttttgaattttgcacgcgtggtgggcgtgtattctgtgggatcctcaaaacgatagtgattggatttatgatttcttctcattcgctgtgtgccttttacaatgcatgcaatgacgggagccgactgttgggaagtgagatatcccctcagcttctcgttcatccaaccgtcagacacctcttgagcgagcgaattgaatcgtttacctcttatggaaggtgccttttctaggtatcccataaatgcctttagcatctattccacttttcactttctttggctgtcaaaccagagctctttgagtttcaaatcttatcctgttgcataagacttcatcaccattacagtcagacacaatctccttcgtcgtggatgttgcaccaaaactgccaacccccacattctcttgtcaactggtaacttttcttctttgtttatttgttatagaattttgaggagattgtgaagatgcctttgtttctagaacgttggttccatgtccatcgtcttcgaaggttttgggatcacgccatgcgctgactcattctgttgttgtgtcgacttctgacaggtacagtaagtctgcaatggaaggagcgggttctcttgaagctacgagcgacagttttgccaggaagaggcagaagcttgtggtatccacccccaagattggggtcttccctcagtgtcgcgatcctcagttgaggctgggctagcctcggtctttttacctcttggctctgtcaagggtacctttagtggggttcaccttccccataaaggtgattccttttaaccctgtccatatgcagaaggagagggaggcgaatagggccctaaaagggcgcttggaggctgaaaggctacaagtctacaagagggcgattgtgctgtcaacggtccgtaagattgaaatctcggaggacgtgcatactccaaaccctacgaggctgactattaaggtcgaggccttggagaaaagcctggaatataaggtgggccgagaggctgcaccttttgctgccaaactcctagaccatgtagctaggagcgcctctaaactgcctatgaaggcttgggcgtcctccagtagcacatacattgtttcgctagcccattctaccaagcggcaggcaggttgggtaaggcctcgagacattgcctccacttttctctttgttttggtttgttttctttgtccctgttctaacacttcaaccttttttaacttggcttattttgacaggcggccctactaacgaagaaggttgctgcggaggatggagtgttggtgacggagttggagcaagtcaaggcagccaaccgtgacctacgtgccaccaatgagaccctccgggtcgaacttacggacaccaagttctagattggggtattcgcaacaggcgaaccagcagctggaggaggagaattcccaccaagcctgcttcatacggagcatgaaggttgttcgcgatctttacacgtgggcgcggatatctagtgcaggcttttcctcccagttaggtggtgtctaaccttgaacctccggcagacctcccatattaatgttgttgtgctttctttttccttttttatatatatatatcctctctctagccacaaagacaattaaaattttgccctggccgcgggggctgtaatagtaaaatagggtcattttgtgttgctccttacttggagatttggtgtggtagactcttggggactggttgtgttattgaagcacttggttccaacggccagtgtttcaaccttttcctgttagtcctaattatctctcgatcaattctggaactacttttctatttgactctttctcacccggggttgtgatgctttttaactcgccactcgaaaggttacatgtttgaagttaaccaggagatggcctctttccgcgaaacgagatctttcacaactttgcacatctccttcggggtctggttctttcacaaggtcgagttccgggggtgatgtctgcgactgtcttagacttagacatttttcttactcatgtccttgtcagccttacattctagcctgttatgcaactcgatgggctaagcttatatgaagtccgcaaagatttgtaagaggggattcgggcatgtcttttctttttcaagaattttggccgactacgcttcttatctccaggttcattcttgagtttagcctttgaggaaagaattcaagtgcatttctcccggggagattttagttgaaaatgtttcccctttttggttgcatgtatacacttgggttgatcaaatttggaaaatggatgtaagatgttatagccatcagccatcggacataccataccccccaaatgagctgggaattttggactcaaattctcggtcatttgtttggagtctaacttgtgtctctttaaaatctctcaagaggagagttgagtgtagttctgcctcacttcgggaagcatatggtccttccaagggagcctctcaaaagtgcacaacctttcttaggctaggggtgacaattcgtgttcgcgggtcgtgttcgtgtcgtgtcgagacccatgtataacaggtacatgctcgaccagaacacgacccgtttaataatcgtgttaaaaaaatgaaacctgaacatgacctgtttataaacgggttgacacaacatgacctgtgtaacccatttatatgtatattttgtttaaacacgtcaatcaataacacgtttataaagtattcaacacgtttgtaatccatttatgacacgttaaagtactaaaataactttaaatatgtcattaacgggtcaatttcatgttagccgtgtcaacccaaacacgacccgtttattaaacgggttaaacgagtcaacccgaacacgatccaaacccatttaaggcaaagccaaacccgctaactctcgtgcgggtttcgagtcgtatcatcgtgtctgacccgttttgccggccctatctcaagcttccatgagaaggaaccatggggtctcgaacgaaaacccagttgtatgattgatcccaaacaatcccttcgtgacataaacctcataggtgaacgcatgggtcttttgcagcgtcgaggtacttaaccatttatctctatttagccaagctcgaaggaaatcatcatttcacttcaatgtccagataaaagctatagat

SEQ ID NO: 111175 - DNA, 2339 bp, Cannabis sativa
  modified_base (218)..(218): a, c, t, g, unknown or other
atatatatacaggctgccacataattaatagttttaaaaatgaattaatatatatatgtaattatttacttttttaagtgcaaaaaaagggtgtcaagactaaacatgtcatcttaattatagtagacagtaaacatcatactaaagattcaatttgctgtcccagaaagaaacttcatgccctttttttttctctttacatatatatatatataaanatatatatataaatatataatatactacttaacattcgaactttgaaaggtcaagtggaaactatatatagttatttatgatcaatggatatgatcattctcataattaataataagttattattaattacactttgttatttcttttttatcaatattatataaattgaaagagaaagaaaaggtataaataatttttgttaaagaagagacacacagacagttgtttgtagcacgtgtggcactagctagggtttttcccacgtgtgggtcccatgcagtgaaggagccaacttcccacatcactattcactacactatatataatattatagtgtataccaactcaaaaatgctacttcacatctaataattacagtatatatatatatattatttatatatatatatatatgttttatatatagagagagaggagtaacacaagttgcaaaacgatgaaatagggttcatatgtgttacaataataataagttgtcccttctggaagtatatatataaaacaaacttattagaagattattaattatggtatgcttgtcacaattattattattattatatatccaattgcaatgaatggaatattttcatttttgttctaattaagctaccatatttaattgaaaacatgcaagtttagatcatgtaatgattatggaaggtaattacataattttgcatagtttagagtaattacatttagtgttctaatcacactcctcaatttttatgtattgattttctactttgctaggtcaattatattacaaatttcgtctaaatttttcaaaatgtatcttatatatagttgtaataattttgtatattatgacctatgcttgcattaacttaattagcatactcttcatttatatgttcttagtttttttcttatctaatagaaaaaaaatacataaaagctaatattaaatcataagtattagacacacaatattatagtgtcccataacattatattcctttgtaaaaaagccaaaaagtactcatatatatagatactattgttgaatagtatccatactatgactattttcgttaatttggttaattaattagacaaagttcatgtagagatttttgagttttccattctattgtttcattttatattatatgtttgtgacattacaacaaaagtatattttgcactaattttgtaagtgatatttatatatatatatatatatatatttgttaagaactaacacaaaagattactagttacaaattaaaaattatttttctatatgtacatctgcttcgtagagcaaaaaaaattttttgggtagtatatatgtgaattaattatgacgaaatttggaatgtcattttacaaaaaattatcaaaccaaaactatatatattatataaatatatagactattaaatacctagctatatatatatctatagtccctagctatatatgttccaaagcgtaataaatggaagcaaagatgaattttctataggtgaattagggtttacacttactaataattgaccataattgaataattgatgatcagttcattgtaagccaaaaaaatgttttctatttatgtaaaaattaatatatatttaaatattaattaattagtcatgaaaacaacacatatcgatatggaagcttactagcttaattaattagtctattttattataaaacctcatgacatatacaattaaccacacatgtctatcattttcaatcttctaattcatattaatattttatttgttcatcaaaagaaattaatatttttaattatcttaaatatataattaatattgaaacaatattaatgaaaatattatatagatatctatcaaattaagaagaataaattcaacacatatgtccatatgaccagtcaaggttcaagaaacccaagtatcatcatatggggccaatatatataaatttataattcactatgaaaatgtttgtatatatatgatattttttaacattatgttaatgcaattttttatataagggataaatacataatttttttattgcttagctattatatatgttccatatagaaacatttagggctcgtttggaac

SEQ ID NO: 111176 - DNA, 6203 bp, Cannabis sativa
  modified_base (6157)..(6157): a, c, t, g, unknown or other
ctaatttttgattgggcgggttatggttaaatatttgcaacccgatatttatattgggttgataaaaatatgctataacccgactaaaccgaccgacgtacacccctactgtccatattccaatacttttattaaaatctactttttctttctctaaccttacctttctctcctaggtacgaattgaagtttatgtacatagtttcacttgtattaaataaatacataaacaccaacaacatggttttatatataataaataaataaataaatattaaaaaatgaagaaaaaagaaatgaaaatcagtaccaaaaatgtccctcaaccaaataatacccaataaatgaaagaagtgagaagattagaggtagtgatttggaacttaatgattggtttataggtctaaaaagggacaaatgaaaatgttaatacaagacaagttagagaagctttttttgcagaaaaagataaaaaagggtgaccatgaatttgaattatatccaaagagtattagacctattaatatcaaccacaagattagattttgagagatattaaaatccacaatgccctggcccagtcactttcccacaaaccctcaaaagatctctaaaacaaaatagaaacatcagagagaccaagtactactggtaactattattcttaatcaatttaaccaaatactaagaaatcaaaagaaaggcaaaaaaataccagaagctgattttggttgaatttttattttatttttaatcttaatggcttcccttacttcactcacctcatatccatcttcatcatctttacaatcaaattttcaacactcacctctgatgttggcttctaaacattctcaacataattataactcctcttggttgatgattggagtgttgagatctgcacaaacatcctcacaacgcctgaaaatccaaagtgcagcaaccaaaccagcaaaaagaccaggtaacattagtattaaatgtctattgatgttgacaactatctatgattagaccctcacttgttctcttttcctttttttaaaaaaaatcttcttttagctgaagaagactggaagatcaaaagggaaaaattgctagagaaaagggtatagctctactgctcttattgtccatcttattacacacatgaacaatgtgacataattagcttatttgatcaatattcacaatagaaaacaatcactgacttaaaaggataagtaggaatgcaagcatgaatgaaaattaatgagataacaatttatttattcgatcatatttaactgtgttttcaagagcaaaaaagggttagaagcaaaaccatttaacaagctcccgaaaaatcctatcttgcaggtacggagtgtggatgctaaagaagctctgagactccagaaagaaaataactttgttattcttgatgtgcggcctgaagcagaatttaaagaggttagtctgcttatgaaaacacccacttcattagaataagaaacaagtaaaacggaaaaaatagttatcggaaagagagggagttcataagattccattttcattctaatagcatgtaagtcaccattgctgtctcttcatgaaaaaatttatgagcaagaatgaaaactatggggtttgagtataagttaatggttttctatgttaggctcatgcaccaggtgccatcaatgtacaaatatataggcttataaaagagtggacagcatgggacatagctcgccgagctgcgtttgcattttttggcatctttgccggtacagaggagaaccctgagttcataccaagtatgaatcataacctacttctttcgacactactttatgagaacttctttccatggactaacataattggtacttggtaaatagctgtggagtcaaaaataaaaaaggatgcaaagataatagtggcttgctcaaccgggggaacaatgaaaccaacccaaaatctcccagaaggtcaacaatcaaggtaacataattttatagcctatcgataataatttagtttctttcccatagatgttcaaactattggtaccttctacagatcactgatagcggcctacttgcttgttctgaatgggtataacaatgtctaccacttggaaggagggctttattcatggtccaaagaagatttaccaatcacaagtgaagaggaagagtagggtgttaagaagaagatagttacatttcatggcattcaaatttttgtccctaacagaatctgtttaaaatagaagcaataatatatcatggctaacagcaattgtgaagtcatgtgtcaatctcataattaactagatcttgatatgaaaatctatgtgaatataatgatatacaaataatagattagttttacacaatgacattagaataactgaatgaaaataattgatgtgtatgtgacgacacctatggaatttcaccttacaaacatttcaaatgtgtacactttctctaacatgctccaaatctctaaaactaaagaaaacgaggcccgaaaggcaacagggattttcaccagtccggattttcaccatttgagattgaaaattatgcatgtattcaataaagaaaaataattcaaattcccctgggggtgtggggtgggaacaaacatattgcagccaattaaatatctcatgatgttataataatagccatgcatcctacctgcacatatttaaaatattctgactttagtatgccaatgaaactctagccatcgctagagcaccttcgtaacttagatttccaccgataaatccactcatgtgaacaaagacacagcccgggattcctgcaacctcagagagtttgtcatgttccaaacccctccaaaccgatggaagaggtctccgactctcaaatttatcatgtgatattgccactgcctgaattctccatgttttgttcctgtcatcctgaacaggaaataatttaattacaagccaaaccaagaatgataaatttagaacttccacttcaaccgatgaaagacaccacagaatgctgaaaaaaagaaacttttctcccttttgagtcagtagagaattggaaggatttgtatcatgtcatgtattttatgagtacctggtaaataacatatttgatgggaggatcaatcttcatctcctcctcaagctcaaatatatgaagcttccactgtcaaaagacgagtaattaagtaatattatgggcatgatctcttagtccatgactccatgtagaacaaactccacataatgcttcatctccttttttttctctctctctctctctctttcttttttaggattcataactatttaaaagaaaactagttgtttgaaaatttcccagccaataaagatgggatgccttgaatcacaactaaccattcatcacatatcttagaaccaccgacatgacctccaatgtcaaaatcaaaagcaactctatcagttcaaccgcaattcaaaaccatgtgatttaaaaaacaaaagtagaactagccgacattgaaacatacgcaaatgtcaaatagaaacatacaaatttcagacattcaagatagcataatgcatttaaacttaaaaaggtcagcatagctaaacaagatggcataatcaacagtggcagacagtaaaaatgaaagaatgcatgcacaggtgggaaatggttacatttaatcaacaacagagaaacaaaggacatcaattaagcaggaaaatgcttacttaccgggcaagatttagtcagtaccatgatttctttacttggatcaatatttcctcttgcaagaagacattccataacaattgatcgagctggtaaccacgatcttgcgtgaaaatttaaaatctgagatacagagatgtcaattcattacattggcgacttcaaaatttaaatgctcaacaaacatcttaaaatgaagaaaaacaaatcatacatctagaaactcgctgccagctaagttcattgcgcattggaaagcttcatcttctttctcagatgaaagatcatggtccaaccaatccagatttaatcttccaactctagaagataggtttgtattattgacatatttaggaggttggtctatgtcatattggtttattccattgtcaatagcatctattgcctatcccattgaacaatataacaatccaaaattaaacatcagaattcatgcacatcacacctcattgaaaagaagaaccaaaatttcatgaaacacagtaaatcatacctccatgaagctcttgtaaattgctagatataacctaaacacatttgggtgtccctcatcaagattaagcttcctggatattatctccatcccataatgctgattaattaataaaataaagggatatttacgacgaaatcctcataatatttgcaattattgtacatatgatcctaataaaaaaaaaagtgacaggcaaaaatgtcttatcttatgatttagttacaatcatactcttttgattattaagtttcaactaagcccgttaagtgctaactaagaaacacactctacatattatttgtaccacgtaataaataaaaaaaaaaaactaaaatagccaaaagttatagctccaacaaaatcgtaagataagatatttttgttgcttttattagacgagtaacaattacaaatattaggggtttctccacaaatatctcattaataaataaacaaaaaaggttagaggattgaaacataatagacttttctctaagctatatgaagtgaaatattaaccttatagacaagaccggcgctactgagcttggtggtaaagccatgaccaagcacttgatgaaacccatgctggtggtgatcgaaacggtttctgctcgggtcataaacgccaccaacgtcaactaatgcctccaaggaatccaaaacctgtaaaagtgaagcattgtatcaatggtttcccggagaattttcgcaagaacaaaacagaaaattaaaaaataaggaagagtacctggatatcacgagtgcgaaggattttggcagctgagaatttattggtgagacgaaggaagtagcaggcgagagcttcatcgcaatgaaaggtgccattgtgagtgcctattaggttggtcgtcgccattgatgagaatgaaaaacgattcgaaggagtcagagattgccgccgaaacgacggcgtttgaggaaatagaagctctcccgcgttaatcgcagtcctcctaatcatggtctctttctttcttagaaagaaaagaaaaagggtatttatataaagaaacttaataagaaaaaatatattatttaaaataaaaatttaatatgagattgaattatcataaagtaaatattaaaaattatagtaattatcggagttgttattagtgtcaaaaaaacgcgtcggagtttgttgttagtgtcagaaaagtcactggagttactgtcggcataaaaaaagtcatcgaaattagtattattgccggaaaaatcactgaaaaaatattaagaaaccagtttcttagtgattttttcgatgacaatgtcaattctaacgacttttctgaagtttgttgtcggtaccgaaaaaatcgtcggagtagctgtcggtgtcagaaaagttatcggagttgttgccggcaccgaaaaattcgccagaattagcattgtcgtcagaaaaatcaccaagaatttggttccttcgttaagaaattgatttcttcataagaaacattacaaaattacggtcttacgtaattttaattatttttatggtttatagatctatttacaaaaaatataatattttaatgtattttttttatgttgtactcttattattttattttttatttttattatttatatattatgtttatgttgtctttttaagatttttggtgtgtttttataaaatattgtaaaaaaaaattataacataaaagtgtaactattttacaaaaatagccattgtaattttcgagacaaatgacaccatattataaagaggaaattacattgtatactcactttactttacttgttttaatttttacctttatttttcatattttttagatttacccacgtttatggatgatatccccattaaaccccttaagttatgtaaattatatgctagacntaagtagagagtgagggtatatatatattaggcaatccactcaaaa

SEQ ID NO: 111177 - DNA, 1044 bp, Cannabis sativa
gctgtcatattagcatattgtttaatgaaaagcaaagaaacattgtttaaaatactaaattagtgattgtgactaaaactaaattagtgacaacttgtgtcttaatactacgttttaggcataaggaatttttttcacatttagttacaaaaaattatgctgtgactaaaaagttatcactaaatgtagttgttgtttgtagtgtttctaaaatggtttccaatgattcattgagtttaattttggtcaattttagccagtttctaatttctgatgcaaaaaatataattagtttagtcatagataaacatttcgtttagactattattaaattttattttaataaaaattgagtactattatatatatactatatattttgaaaaataaaatttgtcaattaacataatatggagttcgatcaaatttttttttatccaattaattatattataatcttattcttttgttgatggaaaatagtgagtagttagttgataactatatagaagctcatgtataattttatgtaaaccggccttaattatacaaattaaaaaataataattaattacatatgcagtactatgtctgtgatatcactaaattgtattaattaattagtgatttagttttagtacgtaattgatatcactcttatatattattaattaaacttatttatatatatttcagaattatttatatttatgcagtggtggacaatttaataattaattaaatatatatgcatgctttcactaaaagattattcaaagataataataagcttagtttcaaagctagatgactttattatatggaaatgagtactgtgtttatattataataaagagattattcaaataattttctataaaatatatatgatccgtaccgatcagctaggtcataaaaaattgataggggtttaaataatatgataattgttattaggacgttcaagtattcaatactacaaaatgaaagacttagtgcatgtttggcattataactaaaaaactgttttttgaaaacaatttg

SEQ ID NO: 111178 - DNA, 4598 bp, Cannabis sativa
tttttgctagtatatatatagattatttttaacttttaaaattttacatgatttaaaaaattaaaacaattcagaaaaaaaaaatacgtccatataaccttttaaagaggtgagccctaaatgaaccctacgatcacttctattgttatcaactttatgcctgctaccagtgggcaccttaacattgaaaaactaatgcaatgatttattagggtaattgtactattattctaattaaccttttaaaaaatattgcccctgaaaacaaagaataaacaaaccccaaatgatatcattcgaccatcgttattggttgaccttttggccatatatattatatggtaagaaattcacgaggaaatcgcattgaccagcttcttcgttcttatgcaaatgcctgtacaaaatgatcagaagctgaaaatctaacaaaaaaatcctagccaagccactcctaaaagaagaaaaagcttgaacttataatattaataagggataagctaaactttataataattagcataatttctccacaaaaaaagtgtttcttctaagcaacaaaagacatttttgacaaaataaaaatgctcccccctttattgattaagggaaaaggagaagacaagtgagatctaatttgactatgaatgaaatgaatgaatcgaatggttagtaactaactggatttcatgttcaatgttgttgagaatggaaaaatgaaagactttcaagttctgttcgtttcttcaccgcccttctgaaaggcttccgatttcgccaccaaagacgctcaatcccactattacacctcagagtgttgttctgatccgagagcatcttctgagttgagtcggaattgacccttctcgatttctttattgactttgtgttacggggagacggtgtcttaggctccacggatttggcatccgatgatctgttaccagttattgcaaatgaaacttaagggaattgataaaggacagcaaatgaatggttgtagaacatttctcaacaaaatcacactatcaccaaccgactttaaataacatgtacaagaaagagcacttcgaaaacaatgatatgatggacatttggtaatatgtcaaagcaaacataaaagctaatatgatgccagcaaaaattgattcgtaggagcctttcttgttgcttatcgataacaggtctataacattcaaacctctaaacccgtggcacactgcagactgattctgcttaacaaaacatgcttggttcccacataagagcagcacaataatttagagaaatgcaatatggagataatataaattcattaatataaaaccaggctgacctctcattatccatcaatgacagcatcagcaattcagcctttcgtggttcacatgcaggacagatgtagatgtttggtggagtcactaatttgatgcagtcgaagtgataccactcgtcgcattgatcacatgcaatcatcgctctttgatcatatggcttccgacaaatgcaatagagcatactacgagttcttaataactgcatccatggaagaagaaaattgtaacaacaatttacacaaacaccaagtaacttgattagtctaaaggcccaatgtattaccttaagttccttatctagatgaacgggcaaattctccccctctttgataaggtcaaaaactttatctaagctaagagccccagaatctgctgcgacctattgacaggaacacaacattttcaaatgtgagagagagggagagataggaatggcttgaagggaaacaagaaatgacagataaaagagcaatggttttaaaagaaaaggagcaacgatttgaaccttcttagcatgatctgcccacttcaggcctacacgcttcacttctgtaagtttctgcctgaagtgatcttctggtggaatgttcaaggtcagcccctgcaacattttataaaaatgcattacagatagctgacaaaattaccgcaacataattgcatcaattgtaaaaacttaaaggaccaaagtggagctcaaaaagtttacattgtacttcataaatggcactcttaagaaatgacaattttaaattttaaccagacaaattaagcgttccactcatttggactcaaataaatgcatatagagagcacaaaatggagtttgagtttgcataaaaagcatacctctttcaaatgctgttgaatctgttggagtgtgggcttctctaaactcacaagtaacctattgactttatgtttccaagagtttctagctaaagccaacttgaaattgcgatcaactgcattgtcacatacacctgctagctcggtcgcctttaaaaccaaagaataacaatcaggatgaagcaaaattctagcagtataagaaaattttggctactatttaattatttgttctctttcttaagtgtggatgaatctcttgggtgggatcacagaagaagtttaatgaattacaataatttttgcacgatccaaaatcctatagtagcagttcatttgagaaaagaagaagagcctggagaatgggaaccagggaggatctgttgtttacagtagagtaaaataccacaacataataatccacagcacacctttaaagcagcagttaactttccagaaattgtactcagatctttgtcaaccaaagctaaggcattatcagcaatctctgtaatgcgagttttgcatgccttagccttttccaccagctctttcaaaatttctctttcttcaatactgcaccaacaaaaataagaaaaaaaaatatatcaatacctacagtgaagtacaaattaaaagatactgaagaagcagtgagaagaagttcagttttcaagtgaaaaggcagatggtatttgatgaagtagaaatcacgtctagaggtagaaattgaattaacagaattagagattttgttaccagacagagaagtcttgatgattggagtgaagttcaataagcattttaagctctggacgcttcccagcaaatctctgcgagcataaaatggaatgagatttatatacacactcatctcaaattttaaaatctttatagaaagacgtaccagaggaccacctcccttgaaagaaatttgtcctgacactaagtattcacaataaggacatctatatccttctacgcatgctacatccacagctgcaggtccaaggcaccgcaaatggtagctgttttaatttttacaaaaaacacaggttgttcttaataaatgatgacagcaatataataaaatcacaacatattaagcaattcaggatataatacagaagaaataaatagtagctgtttgaattatatatatttataaaattatctataagcagcaggtaattctgggagtttagaataaataagataaaacctcaacaaagctagaagtaccttaccagtccttgcagatggaacaaataagaaactcttggttccgggaatcattaaaacagcatagacagtaatcctttgcttgtgaaccacatgacttgtctaatatgtacagtgatctttctatcgtctgctttatctgtatattaataaatataaaacaacataaatacatataataatcaaaccaacaaaggtttatacagaactgagagaaaaatcagacaaaacctttagcaaagtgtcaagcaatgtagtctcatcatcaattaaggtccctaagatgtctctgcaagattttttccacttctcaacctttacaacttcagataaaaccatatcgagttctgggcagctaagagcatcagcaattccactttcctgcatatgattataacaattaagctatatgtaaaaaaaaagttttatcctatagtggaatcatatacaagttaaaatacatattaaatcacagcacaaaaacctcattcactcgttttgcaatgcatgacaacagaattgaataaaagcattatagtcacatactcagcctcagaaaatagttaagtgtatatgagtagaaaacactaaaagctaaggtaaacaaagatagtcttacagatacagacaatcttctgcaattgcaatacacattaacattagataattgctatagatagcaaaatatcacccctgtaatataaacaaattcagaccataccttaagctgtaaaatactagaccaacaacgttttccaggttctaggtggaaaaagtgatgcacttgctcttgccacaacctgcataatgtttgattataatcaatttcgcaagtatgtagagaaagggggaaaaaagtgacacaaattatacatggggcttatttcaagcacaggaaaagaaaagtaaatttaaaacattgtaaaaacaaaaatacgaaaaagtacatataacttccaataataaaataaaaaaaatcactccaagcaatcacagcaaaatagagaagaattctaccccaagcccccaacaaattttgaagatataaacagtcaaactgttgaaaaaactcaaccaaatgagtttctgtaagcaatttggaaaaaaaaaaaaaacaaggaattctcaaagcattttcggaaaaattaggacatagtaaatttaaaacat

SEQ ID NO: 111179 - DNA, 5331 bp, Cannabis sativa
  modified_base (49)..(58): a, c, t, g, unknown or other
  modified_base (106)..(123): a, c, t, g, unknown or other
tcagatgaatctatacattatgtgcatataatcatgaaacaaatcatgnnnnnnnnnnaacattaaatgttaattctgatctctattaataagtaaatctgattannnnnnnnnnnnnnnnnnttagggcataaaacccaatacctatgtcctactagagaaatgagtggtgctcagatccttttcctttttcattggcatttcatcttccttgaagatgacatttctgctaatgatgcatcttttgaaacctagttcaaggcaccagagtttatatcccttaacaccatgggatatccaataaatatgcattttatagctctaggttgtaacttatcttgccttatgtgggcacatgtagtacaaccaaacacctttagatgctcactagctaggtttgttccttatccaaacctcttatggtgttttaaattttaatggcactgagggacaccagttaattaagtatggagttgttatcacaacttcacccataattttctttctattctagcaccaacaagcaagcatgcatctcactcttttaagtagagaaatattcattctctctgcaaccccattatgttggggtgtgtcctagctatgttgtgtctagctattccctctttcatgaagtatttactaaagtcattagaacagtactccaaaccattgtctgttcgaagcttcttcaccttctttccaagttgattctcaactagctttctccatgtgatgaagctttccaaggcttgatccatggatttcagcaaaatgacctagacctttcatgaaaagtcatcaactatactcatgaaatagcttgctccacctagagttggtattctagatggcccgcatgttggaacttaatttactaagatctagatttattaaacatgtatgttggttatcattataatctaacattctaaatatgaaatctctaaaatgataaaataaacacataagagcaacaagaaattcttacattggctgcaacagaataataagactcattctgttcagttctctgacacttgttcctttctattgtagagtagtaacaagaactgaacctttattattcttgaataaccaaatcacctttcatcacaatcttccatgccaatctaagtattaccttaaattgtgtggtaattctcaaacactaaagccacgaatttgagagtgtaaaagagagattcgaaaatagctaaggaaaggaaagaccttttatctaatttaattttctacatttttggctgacaaaagttctctcttgaatcaaagccttcatattccttttataagctctctttaggtttagtttaaagtagaatgggctttagaaaaatatagtgagccaaaactaaaactcttagctgaaattgcttatatggcccatggttttgatttgtgtcactttatttcatttaaatgaaattatctttatcttttctaaaataccatctttcttctttaattatttaaatgctaattttatttatttaataattaaataagtattgaacaaaattaccatttaaatatatttattaattagactctctaaagtctcttaattaacaaataaaccctctttttacttttcttatcaaataagctcttactttgtgaaattcataaataacataaagtcctctttagaattctaattggtttaataaaccaattaattgagtctacaagataatattatcccatatagtgtggggatcatgagcctatgtaaccaagctcccaataagtagttctagtatttaacaagtaaattctctatcttattaatttctcttgactccactataaatttagaattgtactgttgattacacagaacgctctatacaccctagtatagatacgcggtgaattatccatttcaatctaaacaatcaatgatcctctatggatggtttacatcatgtagggagaaatttatcgttttatccctcaatgtattttatccttaaaacgcttagctacttgtaaatgatatctagtaaactaatataattattgaaatgagtactcgaccatttaaaatcatttagccaagctctaagaaaaccatcgttttacttctaagattttatagaagctatagattttatatctatgattagcgctcccactctattgcactatcgtgctcccaagatgtaagtatgggctagtcctattggtaagcggacaacaaataagtcaaagaactcgaatagtataattaggctagaacctaatcatcttagaattgagatcgttaatttaagatcaactaagtgatattgacttagaaaagatattacggtaagattatgatatcttttccactgtcaatatcggttcagtccgatgtatagccagtacatccgatacaggcttactttgctaatgccttagtgttatctatgttttcgaaaagggacacgtaaattctaaatagaagctcaaaacccgtaagtggttctaaataacataaactggccaagcccaattgatatctggccttctaggagaacaactgcattcctcgccagatgagtttttgtcaagtcttattagcatatggaagagtgtcgatttcgtgtacccgtaagagcttcctagcgtgtattcaaaagtcattcttagtttcccatttattacttcgcacagaataagaaattatttttcttaaatctcagaaagagaataaaatcatggtaaaaaaggaaattgaataattaaagatcaagtagttaatatgacattaattatccacattcaaaggatacaatatgaaaactagcaccgtgatcaaatctccacatcaacatacaggtgttgcctcatgggctgggcttcatctaataagcccaaatctatgtattgactgtaaactccccattagagggaaagggtaactaagtatgacatttactactctataaatacacattgaatccttcatgcaaagtgttaaaaattcttgattgacttgctcaaaaatagaataaaatgctcatacttattgtaatcccttaggcttttctagcctatctgataataatactaactcgtagactaaggcttgttaaggctccaaccacgtaaaaaactctgatttccttcttcatattttattttcttaattgtattttctttatctctaatattaaataattagttttttgaaaatctcagtttatattttggtgctttcattgagagctaaagaaagtagtgatatcgttcaagattacgttcagtaactatggtactcacccgaaccaaatctaattttcacttcactgatcctataaagggtaattttgatcccaatgctaagatgggagatgcaaaatatccaactgatgcaactagttgccacaagaaggatcaaactaacaaggactctattcctgaagatcgtataaaagaaggcaatgaattaaaggagactgattatgctcatcctaatgataataatcaagacatgcatgttgatgatgatgttgaaaaggaaggtgatccagatgagtcagatcctgtggtcaccatggccaggaagttgaaagaaactgaagataaattatcgttgcaagagcaattttctttgttgatgcatgaaaaaatggagagaatggaagctgtgattaaagcactaactactgccaataaagctaaccatattgctccatcaaataacactactgggaaagttgatcccaaaaatcctggaacctatgatactcataatgaaaaaaggaaaggaaaagtaggcaaaacttcaaagaaggttgcccatgctgaacaacaaaagaaatctaaatcagccaaccaacctcaaatgaaaaagaaatgaaatcatgcttcaagttaaggtgaccaaactgattctcaaggtaaagctacgcatgatggtaaatctgatgtaaaagctaagaagcctactacatgtaaagacataaatcactaagatgattttgctagttagagttatgacgtcaaagaggtgtatttgccatcagttgacaaaattggaagtatttccacaaatgatcttcagagaagactgaatgccaaaagagaaaaggtcaaaattgagaaagccacaccttatagagatgacctaagaaaccatattaaggatttcatttgtggaaaagaatcactagacactacaagtcaatgtctacagcgtaaaattgaagagttaacaaagctcacgaaaaagatatcccataagcaaaattgaactctatccgactcgaaagagaaagacatggaaccatgtgtgaaaaagactatagatgcacaatttttggaacacttcagaatgcctcagatggaattgtatgaaggaagaatagacctcagggaccatctatccaagtacatctaaattatgcacgtagcaaaagctactgatgatgcaaagtacctctacttttctgaactctatcaaagtccgtggaggattgggggaaaaggttatctcttggatcaattcgtaacaggaaggatttacaaaacatgtttaagaaataattcctagcaacaaaggattttgacttggaagaaagctcttttacgaacattaaacaacaactaggagaaagcctcaagaagtacatccatcacatgatggatacgacaacaaagataaatgttactaataatatgaagatggtggctttgacattaggattaaccatttgatccttattatggggagaaattcaaaggaagagggcatattcattatctgacttcttatccagagcccacagattcataaacctagaagatgcctatgctctggcttatagagtactttcagcacctattgctaatacaataactactcaaactttatagatgactacttcgactatctttcctctaacaaccacatttctaactcccatagtttacgaaccaagtacttccgtgcagccagctacacaaactaatttctctagctttggagcagcacaaatcggatacagtgatgttcccaaacaaacaaaccgacaaatgaaagttccagattcaaacgtgagtcattcccagagcaaaagatgttccaaatctacaagcaaaaatgagtatgcaaagaaaggaagaacttaagaattgagatactccgagtatactagcctgacaatacttgcgagaatgtttacaaggccacttgtaatacaacccattacaaaagacctccacctatgtacaaatgaggaaagcaaaaaagggacccaaataaaaggtgtgaatacctatgatattgtgtaacgccctaatgctaaggcacgctacagt

SEQ ID NO: 111180 - DNA, 5707 bp, Cannabis sativa
aactggattagttatccagacttctaacatgcccaaacactggattggacaaattagcctgtctaatcaaatccagtcctgcgtaccaaacggacccttcaaaaaaatacttattcaaaaaaacaataacacttaaaccttgattaaccttatctaaccctccacccaaaagaaaaacccttagaagttaagacaataacatatcccgtcaacattagaaaagaaaataaacaaaagagactaaaaataaagggataagtttaccctgatattatatttcatcaaaatctacctacttttatgagtgggttgcctaatatacttctgcagtgtagcacatgatttatattgatctaattggtataatagagatatcatctataaaagtgtgtatatcttaaagaatatagaaatgaaagtaaaaattaaaataaataaaataaagtggttatacaatgcaattttcacaaaaataaacaatactaaccaaaggaaaaccctttggttagtaactacaattttatgttattctccttaaaaaactagaaaaacttgtaggaattacaattttatcacacaattacataaactcaaaccttgaaaaagcttatttacaccacttacctcgtaaaagtttacttaacgttgtcaacaatgcttgatttgctgacataataatggcccccaatctaattaccctagattcatttaaaatagttgcatgtaccatcaatgtagaatcgatgttcgtgaatcgttccatttgaatagaagaaaagctagaaataacctcactctccttacttcgtagtcaaagtcttctttactaattcatttgttaaatcaacagagttacgaaaactcgaaatctagctaattatttgattaggatatctttgttgtattctgtgtgttatcttatgtcattccaaccttattgcccatgcaatagtaatcaatctcttaagagaatctttctcaacaatattaaaataaggataaaaaattattattatttcattctggccatattgtctatgagattatgttaactgttaattaaagtagaacctctgtcccatagaagaatatcatacgaccaagatgttaagtacaccctcctagcagagccctaagatgaacttgaaaaaagaatgaatctagccaacttgagcttcaagcttattagcagaaagtggctacacaattcaataaataagtaaaggaaagaaatatctttgtgagaaattggtactgagaatggttttcttgaacacaaaaggatgtgcgataggtgtgctcggaccaaattgagaagggtcatatcaagtcactgaagtcacaaggttaggagcctacaatttgggttggtgtacaatgataaaatgaaacttttgtgcctcaatatactagaatggagataacttgaaaaactactactagtgaatgaaaaggtctagagaccacgtaatttcttcttgataaaaacatcattcttaaatgatggatttgggatggagttttcgttcaatagttcataaatttttagtgctaaggttcgctgattgtacatttaaagcatttttctacgtaataaaacattacttttaagtaatgtcccgttcaaaagttttaaagtttatttacttatggtctgtttcaccatgtaagagtttttcattctcaaataaatgtatgtatttgaagtaatgacacattctgaccaataaatgaatacaacgattcattatcattcaaattgtgttaatattatatatgactgcttgtaaaaactttgtgatttattttaaagtcatagaattgcctaacatgtgtacaaatagatctggttaggaatgaggtccgaacgggctatagtggcgtactctggttaatttacaactgaccaaggctcaaaaatctacttgatcacttggggcacctacacccgtacaacataggcaagaaggcacgtgaagatacttaagcaaaaaaactaagaatgaagtatgtgtaaaaaataaaaggttttatcatatgcataaaggttaaagtctgggattacaagctacctggccataaaaccaagtttcaaagcctcttggtcgactaaattgtaccaacaaaaaggcccttagggtcgtacaaaaataattaaaaaaaaaagaaagtgagaaacagcttcaaggattcattagggttagagggtttagatcatcgatcgtcgagaagtggtcctactgctggacgaaaaaattagggtaaatatcttcattcttctcggtatttggagcagcaattcaccagaactccccttagttcttttcagatcctcctcagctttctggctctcacaaaaaagggaaacaagtgctttcaaggaagaaacataccaacctagaggcctaaatgaggaactagcacccaggttaatgcctggtgctggcccaacgcctatgtcaacctaggccaatttcgaggagttttccgaaaattttctaagcatattcttcatttttcgtcaaacattaagactcaagtatttttggggtgcccacggaactttctaaaggcccgaaattggacccagcgtccaggttaacatattgtcagcctaggctgtttccaatcacttttccaaaaatttgttcttggaatgttttccatcgtcagaattaatgaagatacaagtaaactgaaggagaaaacgacaattctacgggcatcaaaattgagcccatcgcccaggttgacctcctattaggcccaacgcctaagttgacaattaacttgatgcactaatttcgatcactcaaatgtaaattctgtttcgagcattctctttgaaatggtcaaaaaagggtttgagaccttgtccttaatttcaagaattttggaaataccaaaatgacaacttggaagctctgaaaagagtacccaacgcccaaattttcatatggactagtgtgctgaattttacttatctcattttggttctgtctctactgttcagctagttttttttatagtgactgggagctatgaagttagaagagtcaaattgataacttcatattttgacttttctggcaaagtgacttattcgaaaatcaggtagtttcgagtcttttgtttctacgaaacagcaacatctctgagaactgctgaccagcttcaccaaaatgcaaaaactagctaagtgttgtcaaaatatcacttaggctaacaaattatacatcctagacactattttccttggccaggttagcgctagatgtcaatctaggagctagatgtcaacctgggcggtgggagcagaccagcctttagtaaaacagtcataattcactcaatattgatcatattgatacggttcaacttgagtattgaagctatttcaatgttctataaagtcatgtctaacactccaatcaaaattctgaagttatcaactctaaattttgttctcaagagagttataaatttaaattacaggttacccaaagtgggtcccacgaacgcgattcaagcttcaaaaattgacgactgacctctggagtcaatttcaccattagataatcatcaacgatcaaaaatagcctaaatatatatatatatatatattttatatattttgatgaaatactttattattatattaataggaccttattccctataaaaggagagctccacaagcttatttttttaagttcaaaaaagtactcataagatcagtgcatttctctctagtttctctctctagaaattagagcgtccaaacttagctatttttttctaattcatctcgtgagaaataaaacatgaagtagacgtagttctattactatcgcgatacggggagtgaactagtactataaattagtgtttctctcttatttatacttaactcttaatacattctcgccaatttgacgagcatctgtggccaaatatctgtgtctaaatttttgtgtcaacataaataatgtatttgtatttttatataaatagtgaagtcatctcactattcaatggacctttttttgcattcagaaataacagttactttgaagaaatatttgtacactttttgagaattatcgtaaaactcacctggtcggaccttgtaatcttgatagttcctcataagtaacacaacaacaaaaaaaagagtaggtcattaccgttataaggggtcgaacctctataaatattgtgtgtcgtttactatttttatttcatcattaattcctttacaaatatcatcgctttaaagaatcagtattgttggctaataaaagcgaggtcaacacatacatttaacatgcagtttagatatttgaaagaaatacacaatttacaacttttgaaagttataccattgtgtttaatgtatttcaaaaattgatttaaatttctattagcaattaatttaaaatttaaaagcaaagatataaatttataccaaatatttaatgagtaattattctagctttgaccgtcattaaaatactaatttaactctaagttcaagttaccttgataagcatttgtaaagaaggagattcaatcataattctattaaaataagaatccaacgatatcacatttaggtgagagccaaaattattcttattttatgagttttccattgttttagtattgtaaatactagtctaagttgtcatctattagggatgagtcaactagatttcatattcacaaaatacctattttttgagatctaagggtttgattggtttgtgattcaaaaattgtgttttttaaaaatgtattttgaaaataaaagttttaattttgtaagtgaaaaattgtttctaaatatgtgattggttgtagtatgatttaatgtttttgagttttaaaaaattgaatatgtgattggttgagaatctcaaaataaaaagtaagagaataattggagagtttttggattccatgatttgaaaacataaaaaacataaaaatggtattcaaaatagtattcaaattttgttttgaaaacactcaaccaatcaagaattcttaggtggacccccacgattttaatcttcaaaaacataaaataattttcaaatcctaaaccaatcacaccctaactcttttagattgtttaacggataaccatcctttggagatggtctcattaaaaacaataatcaactaagttagatcaatattggaattcgaaattgatactacataatttataacagaaaccaatgctttttcaatataaattcacacatacattttcaaaaatttgtaagcatttagcaagtaatgaagatatggaaaaaaatacaaaataaacatatctcaaatattttccaaattttttaactaaataatatacaatgtcctatattgggaaggatacaaagatatcaccagttaaatagagtagtcagctcatctaaaatagacattgttttcgcaaccttttattcgatcaaaataagaattcaacattgtcttattttgagcgagagtcaaagtcaatcttattttatgagcttctaccatagtttcatagatgtaaaatcaattctaagtattccttaatgaaaataaagctctcagaaatgaacctacaaaatatttatctttcaagatcttacgttttttttttttttttttgacgcggtgatcaaaatcacacaagattatcaaagcagcaatc

SEQ ID NO: 111181 - DNA, 2751 bp, Cannabis sativa
aaaaaaaaaaaaatttaaataaaaaaaaaaaaaaaaaaaaacatgaaataatattaccaaatctaaacccgaaaattaatagcatcaaaacattagaaaaaaatcctacttgcgcaacatttcattgtccaagcaagctcacactccattttcaaaatatttaagtatctttttggtggcacaatgtagcttagagaaaaaaattcatacgaaaactaagattttcctcaaatatttacaaatgataactaaacaatccctgtttttctattcagtccattctttctctcctataattctcataacactatttcaacaaaatttcaaacatttctaatagcttaattaatagcctaataaatccccaaaacaaattcaagatctaataaaaattaatgtataaatcatgcttcgtaaacaacaaattaattaaagctatacacataactccgaataataacaacaataaagagaaagagtaccattttggatatggaatttggtgaagcaaaaaccctagaaaactcggagactttgagcggccaaagtgaaggctttacattttcagtactagcttatatattagactcccaaatttgcagtcggaggaaggaggtaagagttgccctaaggtctatgggcccttaaggtttgggcttcattagatggaggcacatatttagagatattgctctaaccttgggcctatgaataagtcaggcccaaaactgcgacggccacacgcaactgcagcaagcgcgttcttttcgtttacttacctcacgcctcacgtcacgcgttactctttttccctaagcatgcattaacgcaatattacaaaaatttacaccttatttgaatttttctttagaagaaaaatattggtttttttttttctctaatttttttttgaacaattgcttgattttgtaaaataacaattggataaattaactttataattacataaaaaaaatataaattcactttttttcttttttattgtgtacttgcgatagatcaaatttgaagttaggaatgaagtttagtgatgattaatgatgttttgcgatgtttgactacaatagtaaatatttgcgtatttattgatgttttgcaatatatttgcaatatgagactaaaaatgcaaaatacattgctaaatcacactcaagtttttacaatgattagcgatatttagcgatgtaccttctttttagtcttatctagggccgagaatatatgagcctaaagcgaattaaatttttgggccatctctctcaaaaatatatataaaaaattattgaaaatggatgtcatgacatttgaactcatgacattatatatgtcatacactccaaccaactaagatatgaatatttattgtttacaatatatttaattttacttaaataaaaatctaatgaaactttttattttttattttaggtctcgaaaagtatgggccctaggcccgggcctcgctcgcgtatgcctagggccagccctggtcatatcacaaatacatcgcaaaacatcactaaatacgtaaacatttaattttttagtcaaacatcgctaatcattactaaacttcatccctaacctcagaattgctctatcatcacaaaaaatcgcaataaactggataacccaaagaaaaaaacccagaaaacgtgacaaatttaaaatccaatttttgggtaaaaaaattaagaaaacacaaacacaaatatacacatttgttaaaaaacaaactatatgtttgggaatcacccaaacatagagcaagagaatgagaggcgctcttggtggtttgacgtcgctcaacaatttgcgatgtctcgatgaagggcttggttcgcagtgtgcggtggtgagcagagtgtggtgcacgatggtgagtttaaatagtcttttacgggagagagaatgagatgaagaagatagagtattgagaaatttgaaatgagagagatatttttgaatttagatgaaataataacatatttttcttatttctattatgggtgaattaatttgaatctatgttttacatttaaatttaaatatgataacccaaatttctcaaatagtaatactatattctaaaatttattctccaatgaataatgtgtattaatttatttacattatttatgctaattccttttttttttatatatatattattattcttcttcacctaattcaattatactttgcctttgacctcactccaaaagacaaattataattaaaatgattatataaaaagaaatataaattaagaatcttttttactttaataaattaaacgagcgatatttatttatttattttaacaaaggagagttatttattttttaacaaaagcactatatgagtaaaattaaatattaagttccaccaaatttaatttaataattattttaaaatatataatatctaagaagattttcaaccacactctctaaatacatttttaactaaaataaaaagtgtacttaaaaaaaaataaactctaactatataagcagctactataataaagaagactaatattttaataaaaaatattactattttttcattattttttaaattaatttatatttaacaaattcacacaataaatatactattaagtacaagatagttttttcatttttacacttcaaaacagttttttatttttttttcatttttacagaattctacatagaaacatctattgcaactagccctgca

SEQ ID NO: 111182 - DNA, 5785 bp, Cannabis sativa
tatattattcaagaaagtccaacaagaattcaacaaaaatacgtaatagtacaatacataacaatacgattacaaaaattcaacaagaatttttaacttctgtaggtgcaaacattctgttgtgccccttaccaccatacttgctacaggttcattttatcacaatcctttcaccattataagtaattcagtttgacttaattcttccaaccttttgcttcttgggtcgccctactggttgcttctcaacaggcactccaactatcatgtactttatgtcatcagacaattcccaatcattctcatcataaactggcataattatgccttcatatgtgctcttccaatattacgtggtgtaatatggcgagcatagtgcgtacatgctaatattttattgctgagttgcagcatatgtacgaggataaggaaacttcatgatttagaacaagctgcgagtgcaagtttgttcttgcaaatgcactacgacaccggtctcaactgatcttccagggtgaacattcaacgtgtaaggtccacatgtgtcaacattcaaataccgagatttctcaaactacaatgtcaagtcatcctccatttctggtgttagggtcttcgtccacttatcaactttttcttttcacgtagcaaaccactactagactttaaacctcaaaaattcaacagaagaagtggtcgaaagcctcttgagtccttagttgtgttgttgaagcttccagcccaattactcatcattacattgtaacattcccctaaaaagtacaactgaacccttttctcaaatctaatttcctcaagatataatgcaactgcaacattcattgcctgaatcttctcaaattctctatgaaactctgtttttgaatacatgtaggcacaagtataaatatggttcgtgaatacatcagtcttgaacttgtggtatacattcataataatgtggtggtagcatgtaccgtggtgtgcatcagggaatatgagctccaaagcatgaacaatgcttaagcacgaacaatgctttgatgcctatccgacacgaaggctaagttctcgacatcactaataagtttctcataaaataagtccaagagtcgtggttttcgttgttaactaccgcaaaagctatcagaaaaatgtggttacctaaatccagtgccactacatacaacattttcccaccataactagtcttcaagaaagacccatcaacgcatacaacaggtcgacaaaacctaaccacgcgcctacaaagacccaacaagaagaaaaaacacttgaaaggaccatcctttacaacaaaatctgtgatggtacctggatttctcaactttagcatgtccaagtaactaggtaatttcaagtatgaagttccaggtgtaccccgaactaggtgtagtgccttctctctacacctccttgccttttcataactcatttggattccgtaattgtggtgcacatctttcctaatatcagaggccaaatgatccgagtcatcagttgtaatggaaaacaattctaagcaatgggaaacaatcctttaaacaagctttgttttgatccgtgaagtcaatgcatatacaccatgttctgtttggtttaagtataaaaactaggttagccatccatttgggataatacacatctctgatgaaggtgtgggatagcatcttgtctacttccttctccaaagctgctgattttatcgcatccaaagggcatcttttttgttgtactggaggcatatctttgttaacattcaaaacatgagtgatgacattcgagcttatccttgttatgtctctatggcaccatgcaaagacatcggttgattctttgatggtgtctatgatctcagtcctctcattagggcccaaaccttttcctaagcggatcactttggttgggttttgatcacaaatgcttacttcctcaatctcctccacaggtttcaaaaaagttttagagccgatgccaagatccaattcatcttgtccttcgggcaggattacttttctggtctcttggaccatgaaaatggcttgttacacaaccatattatagcactttctcgcttctccttggtttccacgaacagttccaacccctgctgcttgagtagggaacttgaggcacaagtgcctgattaaggtaatccctccaaactcaaccaaagtcaaacgtcccaaaattgcattgtacgccgtggggcagtctactacaacaaaggtacagtacttgaacgtactttgggtggtgtttgggcacagagttatggggagtctcacctttcccataggaactagagtagtcccattgaatcccgtgagttttgaaccactcagggagaggtcttgatcagtacgtctaatggcaataaaagcatctttaaataggaggttaagtgaactcccattgtctaccaagatcccggcgacaatcttgctggcgatgggagtttcaattaccaagggtcgtgatgagggaaacgcaccatcttggcatcctcttccataaaggtaataggctgacctataagttagggcctttacgccggaagttggttgacttcccatatctcttcatcatgatccaaagctttagcataacacttcaactcattctgtgtagttcctccaatatatggtcctcttaaaatcatggccactctcccatttggtctaggagactgtctaggtgctagatggtgctgagagaggactcctagagggactggcccatttaggacttaggctagttccttgggaggtgatagtgctctgatttgtccattcatgtgtggtaacctatctttgatccatccgtacaagtgacctagccttattaggctctcaacttcatctttcaaattcttgcattcattggtggtgtggccaatatcattatgatattcaaatcttttgttagggtctcttcgcgagctatctcggtatagaggaagcggtctctagaagtgggtgttttgccttgttgctaagtacacacattcttgggtgtccactaaatcggtatactaggtatactgagaggtgtaacctttcttttgccttttattctttgtttgcgtgcttccttttgaagatctcttgctctaggagagttgaggagcatctgttgcacttgctatgggaggtgcgaattaagaggatattgcaaacttactctgagagctaggttaccccttagtgctccaatttagattgagctggggtaaaagcaaggttgtgggtgtatcctagtgttgttgagaattgcacatgaaactagaaggataattctcagaaattgcgttctaggagcataccctggttcgccaatggaataataccctctgaaagtagttatttgcgcttcctctagactgatgtactttttagccctcttctgaaagtcctaaagactagcagctccttcctgttggatttcattccaaaaagagattctcgttcgaattcccacttgaagcaatgccaattgctgtccatcataaacctttttagtcttagaagcttcttccttaaatattttataacattttttagagttttaattggtagttgtttaatgttggtcaaagtgctgacttcaaggtttatttttttggccgccacgaacagccttcgaaagctaacttgcaacttgttccaatggtccatagatccaggttctagcttcttaaaccactcctcagtggaccctcctaaggtcagcaggaaacataaacactttgtgtcatcgctgactctcatgactgtcatcacgcggttaaactaagataagtggtcactggggtttgagtctcatgcgtacaaggccattttaggcattttgaaattctttgggagctccacttcaaggatgtatctagcacagggttctcggtcctcacaatcaaattctgaatcatatctcatttgtcttcaggagactttatcaatatctttttggaggatagtgagttcgaccaagattccctcattcaaggcactttctgagactactattgcttgtttttttcgctctaagaaatttctaagatcattgtgtttggcgttgagtttctatctcaaatcgataagagggtctttgtggttttcccttttctctcccccggctcttggtgcacgaatacacttttccggtctccccagttgagggccagcattttcctttggaaacctgcccctttgcggaccttttgccttagggagatcagagcaaattttcggcaaatcttgagccttcttgttctttttaggaatggttgtggggtttgcctttgggaagccttttgaagggtatcgaatagggcttggctctcgatttttgtgccttggattatttggcagtggagactcctctctctcgttttgtctggcatttggatgcacatggatgcctgccgtttccatagctttttgcatggcaaccattatttcttgcatcctcctgttctgctccctttgctctgccaactcggcttcatggtcagcgacatttgtcttaatgccatgagttcggtgtaactaccatcatcatatgtgtcgtactcttcttagtttttgtcgtattctatatcattagtttcatcttgttcttctgcttctacgtctactcgcaaagccaccttttcttcgtctagccccttagggccttggggatggacgtggttgacgtacgtggtttctagttttcaccatcgtattgagaatttacttttgatattcttcttatgtaaggccttctacaactcttaatgaaagcaccaaaatattgactgagattttcgacaactaattaatgaaagctgttttaataattaaaagagattagatgcaaatagtttttacgtggttggggcaataatgagccatagtccacgagtcactactatttaatgtagtagtatttcttacagatgatgttttacactattttttccgacccctttctcataatacggttgaggtatttatagcttcataaaaagagctaaaaggtctctattgtcgcaagtattgaagaatggcttgcacaagttcctgagttcgaataatagggtatgtatgtctgtatagtaggttacatagattttagctaggtgttaagtgacataaacccttcacctttcttgattgatgtgatagtttattgtacagtcgtcataaatctcataaattagagtataatcgccaaagaatgagtttaatgcctctgacatatctttttagatccatttgcagatgcttcctccatgccgcatttaatgtgctttatataagtcatgtccgagacttaatgatcgtccctagaggccttgcctagctcccaaagatgaacaaaatatcttggcaacatgatgcaattgaagctcttagagggactttccggatatgaccatccaatccagataaattctcttaggatttattatgagtacttcgtgatcttaagacccacttgtcatatgatcaacttcgggactaccacgtatattagaacaaaaaaaagataacactttaacttaaatttagaaaaataattttaattcaataaatacatataaaaaaagaaatcaaatttcccatatcaatgagttattttaccatcaaaaatcatataaaagttaatttttccttgaagagcgcctttttagttgcctaaatgcctagttaaaaaaaaatggtaaaaaagttgtacttttcgtgtacgttagttttcttcgattttttttttttttttt

SEQ ID NO: 111183 - DNA, 14737 bp, Cannabis sativa
  modified_base (14668)..(14695): a, c, t, g, unknown or other
aaaacagctatcgtagttaattacacttccccaacattcaaattcagaactgactacggtttcattagagaactcgcgactactgtaaattcaaatgtcaccctaaaaaaaaaatcattcccaagtgattcattaacgtttccaactctcctgcactaatatcttcatacaagcttagaccaagtttaactatcatgggggaatggtgactacaaaatttttagtacatatattaatatattatgagttaatcaaaaaataacaacaagcatcttatgagctaactagtaaaataaaagccgacctatacacgaggcaaatatgccagacccacattcttgattttccatcctaagttttcataaagatctctaaaacatcaataactcgactgagcatggaccggcaaagttaaagctaccttctatgagctagagtaccatataagagaagaaaaaaattggaatcctagatagatcacctactggcatgaaagagtcagcaatgagcatggctccttattcttcccaccacatctgatatagctatgtttcgcaactgtggggcacacaggtcagtaagaacccattggtggcattccataaccgggcattggaggcatccccatccctcccattggaattggtggtgggggttgagcaaaccctgctccacccattcccggtggtgcaggcaaggcaggaagcaattgggcatacatgttctgcaaaagatttaaaatgaaaacagaaaaacactttcagaacttttaatgcttcacactttataactaaaataaataacaggacattccattgaagtttgcatactatgattatcgcttggtaaaattaacccaatgctggaatgaagaagataatacggccttatagcttttctagtttcagacataaaatgcattttccgtaggcagagtgatatgagtccaataatgtaccacagaaacagagtaaaacccaacgtgtcttatgtttattaagacaacttatcatatttatgtaatatctgagttactaatcatatgtttatgatgagacctaaaacgccagcaaagtggccaaaacctaccagttggtgggttcatgcaaaggtcaggcacttagcacaatttataaattgtttagttttagttttctgaaaattagacagaacaatttaaatcccctaaataaagatacttgctaggtagatgtagaagtaagtaagagaataagaaaagctttaaaagacaagggaatcatacatgttgagcaaccaattccttctcctcattctcttttgctttcacctcattttgagcttcaattttgtccttcactagttcatccactttgcttgtatactctcgaataaactgaaaagaaaaaaacaggatagcagaaagttaaatggttaaatcatgcggagatggaaatgaaaacagctccatttttttttctaggggatgtgggggcaaaaacctgcaagagatatgggaaggcaaaatcgatcatattgttcagccaggcaagctcaaggacaacatcaggccgcagcaaatcataacaaacaaagaggcatgatgcaaagcactctttctttccctgcaaataacatagataagtattttatcagcagaagccagaaaaacaaacacataaacattcatgacaaagcaaaacagaaacattcctcagaagaagcaatataaacaatcgcatcagacattcataacaaagtaagaaagaaactttcatcagcagaagccaaataaacaattgcatcagacattcatagcaaagagtgtgtttgtgtgtatgggaggcttttgaatcctaagatgtgtgtttgtgtgtctatctttgtatttggccaatatttaatagttatttccaaaaaacaaacaaacagaaacaaaacaaaaaaaccgaaattaatagtcaaggtaaaaatcagagatgagaaaatcaaaattatgtttttaaaaaaaaaaaactagaccactcacctaacaatataattgacaaacaaaaaactatgacaattgcaatgtaggtaaccaagagagactcaaacttggaccttttgaccttgtggcaaactacaggcctgaccattcttagacatgctatgtattataagagcttacaacccagccccatccaaccaaacaaaattataagaaaaatatagtgaagcaaatgactaagaactaaaactatttcatttatgtttcttttgtttagattaagtcagaccttctcaatgaaatatacaagtaagtcttctgaaagttcacgatcgccagactgtgagcaggtttccatagcatctttgtatagattgtctttctttgataatgcaatagactgcttccatcttcccgctttcttatagatataagcagcaacacgtctcatctcaagaagctcatgtttctcaatctgcatcaattaatagataaaaatggtaaaatccaacaaatcacaaaactaccttagctaatgatatttgaaccaaaccttttgtgcaagacctatctggtcaaagctatcatgcaaatcaattgattcccgtaatctatcatagtcttcctcctctatatatatttcattcaaagcttcattaacagcagaaacattggtactctgaacagcgaccatgtatggcttcacaagacggagatgaccagcctgaaatcaaatggatgaagggataatcaattgacacttataacatcagaataaagaggcaaacgagaaaaaggcatacctttcgcattatgtccactactcgggcatggtctacacgaagggcaatcacgttcaaaagatcattgataatatctggatgttcttgtaagtagaaatgtacagccttatagtagagctcaacactagcaactttgacaatcacatctttgaattgcatgtggtcccaagcttctggagagtggttcataacagtggtcgcagcattgtcaaattcatcatactggatatataagtaagtcagttccttccaatgttgctgttcatcacaagctcgtataagcttgggaatgttaagtcgggtggagaacagtttaatgtgttccatcagcttttccggacggtatcttgcatatagaactcctagctcagtaaatatgcccatatgtgcacgttccaatcccagtccactctccataagagatattaactcatcaaagcgtcccctgttctggtaatactcactgacttcttccaaatcatccacctaaacatttaaagcacatcaaagtaaaaaaaattagcagaagaatctttacaaattacaaaagaaaattcatcaaggttcttctttattcaatatacattatgagatcttgtcccgacttcaaaattttgagagcctaaaagtattactttttaaatggtcagaagatcttcccaaagaaatatgcatcaacctgcttccctaggagtgtattaaaaataggatgttttgaatcttgatgatattttaatactttctatttcattaacttcctataataagccttgtcctaattctaagaaagaaaagaaaaggttatgatcctcaaatattgtacatagttatcttatttccttttcttttatattaaaattatattttatgaaattcagagaaaaaaaaaaagattatgatcgtcaaatacatagttatttttttcccttttacaattaaaaattatattttatgatgaaattttaatcttgtagtcattatatatagtttatcaacttttttgagtcaagtcctttgaaatgatatctcattataaaaaaatattttaaacaaatttgacacagtttaatgagaactttcaaattgtaaaaataaatctattaataaattttgcaatttaaaaagctccttcaaaacagagtagacaaataaaaactaaaaaagtaaagattcattttttcttacctacgctgaacagatccttaataactagtacacaagactacaaaaccttaagaagcgaaagtggtgctgaaatttatattcaacatgttccaacaaaaaatgacacaaatcaaagtagcagcgagattacctgaatgatgatattgagaccacagatctgtgccaaacgaaattcctcggcatcaacacaagcaaaacaaacttccttccatgttttagtactgttagcttttcgagctgcatcaactgcattttgaaattgctgtagcttgacaagagtgacagccagcttagcccagttagagataaatgcatatatgattttagctgcttcgtacaaagcttcatcatacaatcgatctccaacattttggagattagcaacatttggcataagaatgaactcttcaatctcagccaaccgatcaattttagcatatgcataaataagttcgccgtcaacctttggctctttggttttctgtctaaccatcagaagataccgcaccaagtcagggtacacattttcattctcagcagcacgtatgacatccaagaactgagttgcatcatctgcacggatgaatgactcgatagcatcactcaccagaccctcccgcaattgggccttggctacctgactccaaacagcatcttcttcaacacggaatgcaaactctacagctcgttcgatgcttcgaatgttatccaataggacattcacagcctgaacattcaaattgaacttcttgaagatggcgactgcttcttcatatagttgagcttcaacagccacctctccaactgcaggtccatcaaagttgtctagcctatttatgtaatccataactcttgatggatcagccttaatggcagtaagaattaacagattttgaagattgaaattcccactaaaagcagagttttgaagtacaatcttttcaagaagttcaatcaactcgtggggaaggtcagcagtcataaaggctttaacagctgctgaaacttgctcgggactattgctctcaggcagagctgtagatacaacttgatcaataagctgtcttctatattcattttcaggagtaagaactttctcccatagatcaccatccattctttccaccacatacctgacatataaagccaatagcatcacaataggttattgaaaaaatttgacgtgcaacacttaacagtaaacatgagtacacaaacctggcttgaagtttaaacaaggaatttctatttgttacatttataagttcatcatcacattgccctctacggtaagcaacaacagcaagagtgggatcccttttctcacaatatttaccaacgacacgagaatcataatatggattggttgtgagaaaatgttctgggttattgttgctgtcaataatgattttacccagagcattgtgaacatgtacatcttggcttccctcactcacaagatgctccaagaattgagtgagcaagcgaagacgattcctgtgagccaaaagcatataatatgtcagaagagagaatgcaaattaaaataccaagatttatatatatatataaataaatgtgtacctcttctcgcattcctccaccaaaggctcaacaggaagaagagaacgaactgataaaatcaggcctttaataaagtcctcggggcattcatcatctaagagctgtcctacaactagaggtgcatttccagggttgacctattatgaaacaagaaaacaaaaatgctggctaatcaatttcatgttagctattcaaggaacatgagaagcagaacaaagaatttcttgggaatcctacaagatccattctttttatattcatcagcttcatataaccgtgtcaaacaggaggtaagggacatcaactcaaatttaaaaaagtaaaaaaaaaaaaagttaaccaatatatcaatttatacacatgtatatatatatatgaaaagttaaccatcatctagaagaagtatgaaaatcctaaatgaaagcaattttgtctctatgttaacagagaaagaagggctgggaagaaatttaggggcttcaatttgcaattttctattctcatataaaaaaaatcatcaaccagaaatctgaaacaacctcacacaaaaaaacatttaccttttggacataaccttcaatatacctaagcatgttgctggtgtataaataatgggtgagatcaggaacaaaaccaaaacgatcgcagacattaatcagcgggcgtgcatctggaagcttggcttccattagaaaattctttgttttttctgggtcataaaagtttgattcccgtgtaacacgctcgacctccttaatttgtccggtttttgcagctgcctcaatgtacttgaagtggatctcgggatcctcactaccagaaagaaaaaaaattaaaaaaggaatcaacaagaaagatgcagatagtcaaacaaaatttttttgtacctggaactcaaatacgagcccaagaaaaagtacagtccttcataggatttgaactgctcgaataattttatgcatgcatccacacccaattgctctgcatattcttttgcagtctgcatcaaactattatagtaagcctcacttcaataaactatgcaaaatcaaaaataggtcaaaagaagtatggctttcacctggacaataatctgaagattgcctctaagatttactactagaagatccttcatgcactcaagagcccattctttggaaagggtaccaaagaactcaactaaagcctaaatacacttgaaagttagataacatatggtatatacacattgatcaaagttaaataaagatttcaataccaacctgtggatcaattgcatgtgtattcacaataatacgtttgacatctgataactctgtataatgctgcaggcattgacaagcatttaagtcagaagataattaaacatccctcagaggaatttttgcacttatatgtaacaagctctcatacctgtagggcacgcaaatacaaaccagctttttcacagagttgtgcaatacgtggacggtcataatgagtgaacattccatttgccaaaattgcatcagcaacatttgggaatgtcacaagatttatttccaaaacctacaaaaagtaaattagaagctgatatgttaacatatagaagcaaatgtgaattgtagataaaaacactgaaaagaaactcaatggacctttgtctgaaggtgtgcatgttcaggtaaattgggcttcagcacatccaacaaaaaggcagttgcctcacgaatcaaattccgctgaaaaatagtgaaacaagcacaataacatgaaatcccaatagataaattctttagtttgaaactacaaatgcattcacaaatttattatgtatttacaaaatgggaaagcaagttaaagaagattgcattaaagcatgaatgtctatagaattggataactcagtattaccacgtaatgtaaaataaattgaatctaacacttgaaatgcacaaatatatacttaaaacaaacctgcagaaacagatctgtaattgtgttgtaatcaactgggcagccaccctccatttgagacatcatcaatgcaaaattaaccgctccctgaaattgagatagatcatgacatattaaaatgccaaaggagtcaaaatttgataacacttgaaaaaaaacaatagagcttcatacaaatacaaatacctgtggatctgtccgcaaaattgtttgcagaagaaacaaataatcaggtgtgtagccaacctgaaacgaaaacaagtttgaatataattagtaagaaccaagaatgttcaaataattatgaccaaagacacacaagtagctctgttcactaaaaaaatgggcaaagagagaaaaagaagacattagtaacctgctttgagtatactaaaatcttgtcaaactcccttctctctgcaaatgctgcaacaacttttggagttgctctggctttgatgtatatctttagagcaaggtcattgtccactgtctgcatattaagaatacttcatactgttagaaagaaagagaaaaatgtaataatcaaaacataataaaatcggctatgctagttatcagattggggcttgtatgcatcattagggacctaacatgcttataagaattgagaacctcaaagatcttatccaattagacgtataataaatcaaatcacccatggccaagggcaatttcaaatcacacaaattattctctatataactgatttttctctatcagcaacctctgaaatgagtacttataatagcctcaaaagtataaaatggtgtacaatgtattgaaagatcttttatataatagcaatatcatttatttcagaccttgacaagatctccaagctcttcactacattcaagcttgtcctcagccaaccagttctccaaaagatttttcttgttttgatttacaactaggcgagatagctccaaggattcaaaagcatttagttttcctttagtcaacaaggttccaaagtattgtagtaatggtggtgtttgcccagtttgcacagggacactctgcaatggtgaacaacataagcagattaaaatctccaaaaaaaacttagcatgacctaaataaatgcaccatgaaaggtggttgcgtatatctatacaataatcgcaagaataagcatggccaaatccaaaagttacaccataaacaccatgttaggcagtcatgtatatgagaaaagcaataataagcatggacattattgagtaaaaagaagaaaaaaaaaagaaaagaaaccaacaggaaatccaaaagttaaacctgaaatttagcaactgtctcttgagtacgaagtatgcccattggagattctgctgcaagttctgcagcctctttgtactttgtctgagcaaacagttcttgaaagcgctggacaacctgagtgtgacagccagattatcatatttttagcatgtgattaagaattaccaagtgaagaaaaagcatcaaaatgcagtgatgctgatcacacaatgatgtgcaagattaaagattgtgataatgaatgtcctggagcactttagaggacataggggaatggggcaacaataacgtttcacctacgaaacatcaaagtaagttagaaacatgcacatgtaaactttgtaagttatttcaacgacgtattggttagaaatcacattgcttgatgccatcaaataaatttaacttagtagatttacttactcacaagtctctaacaagtcttagagacttggattgtttcaatctaaaataactacactctatacataccagttcttctgcgccaggaaggtttcctcttttagcaagattaacagcaagttccaaattgtttaactgcaaaaataaaaaagtaacatctcaaattcaaatacaacaatttttgctccagtaaacacacacacgtacagaaaaattaaaaaaacatacctgaccactgacaaaagatacaattgtttgctcatttacagtggcaagcagcacctggcctcgcctattgacagcataaaaacccccaactgatgaagcttctgcagtcagaaagatggggtctggactgattctgtttctataaactgctgttgctgtctctaggtcatacacaaatagaagccctagctttgtaatcacgtatatcaaaccgtacttttgtgatatctaccaccaccagaaaaagagaaaaagattaatctgggcagaaagtttgggtttaaataaaataaatatacaacagtattagaatacctgcattgacacaggaaagtcatcagcgaagtcgggaggaaaaaatagatctgcttgcttcttagtaaatgatggttttcctgagaacaatatccagaaaataagtaccatagaacaatcaactgatagcttgaaattaaatgaagaaaaatcagcacgattctgaaaaccacacaacaaacaactattgataggaacaagattcatttttgcacgggtctgcaattgtggataaattttaaaggttgatattaaatgttcagctaacctggctgggcaccaagttcaataatatgcaactttgatgtaacttgtccagcattgaagctttttgaagcgaaacaaataagaattgaaggattttcatttcctgcaaccttcatgtaacaaagtttttcattattattaaataaaatacataacaaaaaaaaaataatagtgctgaaaaagggggagacagattcacactttaaatgtggcaaatgatgcagcatgtgcttcaagggcttgactacgttgctgatccacggagaaaagttgcatatttcctttcactagctgtggcctctgcagcaataatttgggtaaagataaagctaagatattcttgagataagtaaaaatacaaactaaaccaatagaagttactaagagactaagctttgcttaatcataatgaagtcttgctccagccaggagtaaaataaaaaagtgtagaatccctaaattttctcatacaaatcacatccaactcttttaattaaaagatatgattgtttatttctaaataaatgagccaaaagttgctatcagcacaatagatgccattttagacttgccaaaactaatcttcttctaaatcattaacaccatgcatctttcaattcaataaattacaccataaatttctcgccactcaacaatgaagaaataaatgatccagtgttttacccccttccttgcacaccacacaccaagagaaaattagagcaaggacatatcttctcatatgaagacttttgttccattattactaggtgcatgagcatgccacaagagatgagtcctgagcctaaaggcaggttttactcgctacaaaacaccacctatggagtcaaagaatgtaaacacccacaaatctaagtatttgtgtaaaacaaataaattagcaccacaacatcttgtgttctacacaaaagtacataaaagaaaatgctggttccgcgtaaacatttctcttgcatatatcaacattaaagcaatcccaagatgtcaaaatgtagtaacccaacttgaaaaacttacagagttcacattttctaacctacaaagcccggtctaccagtagggtagaaggaaaaataacgatactaacaaagcataactaaaggaatgaataggatttattcccccgatctatgaccattgtagagttttgcatcctaaacttttcttagtagcaaaaattccccctaaactataaaaattattgataataaccccctgtaattacattctgctcaattctttaaacaatttgttgatatagcactaacataacgttagtctagcagagttcaagatccacacaaaaaataaatgcataaatagcagtctaatgatgaattatgagagcatgtatgtagattcttggaggtactgtttgtatgtttaaggtcaatacactgaatttcaggtagcttaaagttactaaataggtcattggactacaattatacctgtaactaatagtcatataagcaaattgttttaaaaaataagcataatgtaactagaggggaatatttgcaacaatttgcacagttcaggggttttttcgcaatagagaaaaaatcaggaaacaaaacacaggatgtcaaaattcaggatatacaaaagtacataaaaaaagctggttctgcataaacatttctcttgcatatatcaacattaaagcaatcccaggatgtcaaaattcaataacccaacttgaaaaacttacagggttcacattttctaacctgcaaaccctggtctcttgcatatatcaacattaaagcgatcccaggatctcaaaattcagtaacccaacttgaaaaacttacacagttcacattttctaacctacaaaccctggtgttcacattttctaacctacaaaccctagaccggtagggtagaaggaaaatatagggatactaataaagcataactaaaaagattattacaataaataatgaccactaacctcaggtgaaccttgagcaataccgatcaaaaccaaccacttttcagtagggtcacatcggtagttaattatttgattacttgccaaattagctgtccgctcaaacatctttacaggttcagactcgcctaatataaattactcagaatattagcagggtaatcacttatgcagaatcagctggttgaaaagaacaacaaagcaccataataattctaatgtcaagaaaatatgatggggtatcttaccttcaattgaccagtgataaactgaggtctgtgtaaccaggcccaacatctttggagtgatccacttccaaaagacaacctataataacaaaatacaatgacgaggacttagtaatgaaacaagacctcatgttacctacagtcatactgagttcataaatagtattgtaataaataatttgaatgccctgaaagaaagaaatcacctgttcaggcatctgatgtgattttatctttgcttttgcttcaatattgaatatttgtaaatgatcctgagtagttcctggtgttaaagctacaaacaaaccatggtcgttgattaatcagatgacaaccataagaacaaaatgaacaaggcaatgataataatccagagaacaaatacagtaatacttcgagttatgcttgatagaagaataatgatgaaattacaatttctcaatagcactaaaaacaaaccataaacttaccgataacctaaacaaggaatacacacatgcccataatatgtgtatgtccacatatctatatctatatatatatatatatttacaataataatgtcaacgaaataacagtgcatgaagtagagaaattgatatcttgaagataataataccaacaatgcctagtacaggcaactgatcaaaagaggagcaaaaaatgtgtaagtcggtttaacacaggcaatgttaatatataaaatgaaatacagctacgcatataccagcactcatcacccccaaattgtaaggtagaaacatccggtagccaagacaatacaatgcagtaacacaccatcacaacatcacataaaagaatcgaatttatttaagtagaaaagtgtggtgatacctttaagagcgagaattctagagttggggttcatcaatgccgaatctgccgtaatgggacgtcttaaaggctgcataggcatattcatgtcgacaataaccacactattctgaggtgcagtctctcgtacacaaataaacttgtcggattccatggtcacattcgtaaatgtgatgaattgggaatttatcccaatactgggtaactgtaaagaaagaaagaaagaaaatccataaccacaaactccaacactcacactcaaaatgaggttaaaaatcacacaaaagtagcaaagttcacaaaatgagttaggttcaaaacatcgcaaaaacgataatcaaccaaaaggagcagcgtatatatccgatggcataatgcgattcaaaatcaagtaattaccataaactgagacgaaattaacatgaaactgaacaagaaaaggaaaaatatgaaattgaaacgacagtagaagaagcacgcaccgttaggatctccttcattgtgatgggggcatttgcagccgccatggtgcctagatcggaggtttcagcggagaaaatgcgattgaagaagagagtagaaccaaaatattggttctagagagagaaagaaatgagctgcagatctagccagtagaagagctgcaaacgagcgatgaaggtgagtcgcctttcttcacgattaattttgtttaattttttttccttttttttttaataaaagatagaaaagaaaatttactcactcaaccgctgtgagggtttgtacgtcgaagtcgtcgagtcaattcagtaagaattggaaatgtacaatccaggactgcatggtcggaaggttttgggtaaaggttggtaaaattagtattaccctagcattaaatgggtataataggtagaaattaaataccatatataagatgtataaattacttttttattgtcaattaattttgagatgaaatttcatgcacctcatcgcattctaatatagtatcagagtcaaactaaactctaacgagtatccgatctaaatttaataatcgatccaaaaagacgaaccaaaagaattacttgtaatttgggaatagtgagtcaaaagagccacttgtaatcgagcagtgcaagattggtgaacaaaaaatagtcatcatcgtgaagggtattagagagagagtaataaattactagcctattccacataattagttatttttgttatgtcagttagttgttaaatagtattaggttgttaaactattttaattagttttttactttcgattgttagctggattggttagtcggttgttctttaaatactttgcctctatataacctgaatcactgaacattgtattcactcaattcattcaataacattttttccatttctttctttcttttttcacaatatggtatcagtgcatggaagatatgctttcttccgatcttaattcttttattatctttcaccgtcaattgcttcttcttctccggtgatgatcttgtttgtagtgaagaattcaattctgttgggttttgtgccctannnnnnnnnnnnnnnnnnnnnnnnnnnnttactaataaagatcagaaataacattttatgttgcacggtt

SEQ ID NO: 111184 - DNA, 4552 bp, Cannabis sativa
aaatttaataaaattagatgaaccttgtgatagatttaattaaacatttagtttagaaaaataaaggttatctttattaaatttgtaggaaacttccccatcgtatggtgtatagctctagtgaaggattccatatggacaaggacacacgccactcaaaggtttcacctttaaaagttactgcctaaatcaattgtcggacaaaaagggggtttcagaggcacgtatgcgcactaccatggtcagacgcaagggacaaaatctgattctgtgtcaaagtgtggacaaccaccgacttgggtcctgaatataatattgttgaatgagctctagaattactaagccaaagccttcctggatcgcactgatccactacctttttcagaatacttgaagctttgggcaactgtgatcctccctaattacggatggatagtaagggtcctggatctttattcttactcaccaacattacagacctatgattggctcttggaatatgataatctccagcgtcttcaagcaagaagtatatattgatcatggatcgtccagagtggcacccttctgtgattgccatgtatcaggcatccaggaatactgataataggaaggatgtcctattaaaatatcaataatacaaaaaatatgaaaaaaaatcactttgagcttatcttggctactgatgatgatctaaaaaaagttgacctctgatgaaaatcatcaatatttagagtttgaatccttttcgagcaacttgcgaaaaaaaaaaaaagaattgttttcagcacaaattttaaacttgaaatttttagaatagtgatgtgggtgtgagacattagtttaattagcttttgaagatcattaaaatgcaagttgaatcgcatcaattggatcaatattgggggagttacggtaattttagtaaagatttctttagcacccagcgcttaggttgacaacccaatgcccaggttaacatcctgacatcaacctggacattttcaaatcataatcattaatgaaaataaagaatattccatgaagacttcttgtgaattactgttgacaatgactcaggttaacaaagtgtaaacttgggcgttatcccaacatccaagtcaacataggtgatgggtcctagttcttacctccatgtcaatctgttcattctcaaaaccacttaattattcgttttggaaggagataataaaattctcaggatacttctttaatattttgattggaagtgccctagattaacaatacatcaacctgggcgctaggtgcactaggtgccctaggcgcctagtggcttaggtgctcaaaattgaaaatgttcagataatgattttgataccttagataagttcatgatagatcttattcatgtcaatgtaaaaactttgagccatttctagtaagacggactcaaaaattgaaaccctagttggaatttcaacctaggcccttggtgcgaactctaggtagccagattgacttttggggtgctgttttgtctcttttctgtctctaggcctttgaatttgattcttcttgtcttctttgttaataatactaaaatatggtgagctgcaaacaactttgtgggatttaaacacccattttggagtttccaaagtcaacttacgcagggtagggacccctcccaggtcgactgctatgactgagtacttctcaactccaagatgttttctttctttccacgtgtcaaacatttatgtccacatcactagggtaagtttcccgttaaatttcacttcctccacctttgttaggacccttactttgactctttcctttaatgttctatcgctttctttgattaggtcttccacaacttagattcaaatcaccattagaacttcctagtttcttcattcttcatctcaagatctatatagttgggtgcagagatcacttcctttacagcaataaaatttcacccatacttgatagttgtcttcacctctctataggaatctggtagtgagttaaggattataatagcttaattctcatcacttagagcttcattttcaccagaatttgcaagctctatgtgcatccttaaaaattcatttagattttattttagattctgtggccattttattttgaatccaaagatcttttctacaagaaagatcttattgaacaaaaacttatgttggaattattcttccaacttcttacagattgttgctagagttttatctttgtcagccaacctaatgattgcatcagtgacattagagataatgatcccagttgttgaatcaaggaactcttcttgtttaatcttaaaggttccttttggccattcaataggttctaagaactctttaaagctttttttgtgtcagtattgatatcatcatccttctccaaatccaatagtcacatgaacaatcaaacttgtcaatattagtcttaatactactcatgttaaagtttttggaaattaagttagatttagggttagagatttcgataggaacatccaatggaatgtcctctagctctccactatctggttcatgttctagaggaacatcatcatgttctagaggaacatcatcatgttcttgaggtacatcatctaattcatgaaaaacatcctcctcttattgaggtatattttctttttcttgaggagcaccttctttcggttcctgctcattgaattcttctaatattgctagcttcttgtgtctcttatgatctgagttgttgtggatactagctctgataccactattggaattttaacaattcctacacaaaaataactcaacacaaatttaggcccaaatagacattttatggtacttatctaaaatctttttatgcgtccactaaaagaattagatcgatacaaacccagaacctcgacccaattacaataccaataaccctaacaaaaccctaacaaacctcaaatgtttgatcaaacattggagaattattttccttagtgaaaacacaaaacatggagagaaaattagggtttcaattccaaacatgcacacacacgatcaattagtgaaacacaattagaatcaaatagaagaagagaaagaatgaaagacagtatagaaaataccagatttttgtcaacagtcacccaaatgataggctacgtcttcgacgagcacgcctcagcaatactcgagctccactatagtcaataacaggtttagatccttgagtctctcaagatttcatgtcacaattagtttcggcagataatcttttatattaactctcttcgaatgtgtttctctctttcttttacaagctctctttttgtttcttttcttttcttgtacaacaatcgcaagtaaagctcttctctttacaaaagaagccatctctctctctctctctctctaactctctactcacagaagatggatataatgcagcaggtagtactcctagtcttctcttctcgtttttatagcactagggtacgttctgagtttgtggatcttttgtaactgaattttttcctttctaaattttattaagggtaaaaggatgtgaaagcaacttgtgcttgatccgttgtagttttttcaattgttggtttttgtattcatgagtttataagggtatttatataacaataaaaaatattagaataactataggcatataaatagtcatgtatgcatgtagaataaatttaggaattgaacatatacgaaaagatgatcgatattatgtatctctagccattaatgaatataagcccccacaaaatgtagatatttagattttaaaaactacgagaaaaagaaattagtggggtctagatcatccaagctctcactaaccctcttggatgatgtttattaaagaatggatatgagtcataatcttgatgatcaccaataccctatatttatataggtgagagcttctattaaaatctccgttacaattaattgtcagaatttacgaaaaataatgagaaaataaaattaagtaactaaaatattatgtaattaaaatattttagtcatttgccaaataattcactacaagaaaagggactttttatcccactttttacacttggaaaaataaaaaatgggataaaaagatatggtgtaacttttaatcccacttttatgtttggagcttgaaagaaatgaaatttagaagttctaacaagggtctcgttttgcaaataaacaaaaaaattgggttgggagggtcatttttatgtattttccaaacatagccttaacattttaagagaaactttttatcccattttgtatgtaacaaccgggataaaaagttctgaaaaaaatgggcttaaaagatggaacagcccagccaaaccctagcattttttgtttcgtgccgcccccctctctctctctctgaaaccctctctatcatttgcctcactctgagacctaaagcttcccaaacgcccttctctcttctcaacctccatttttatccaaatcttgaagctttgatcttaggtatgatgaatatgatatatatatat

SEQ ID NO: 111185 - DNA, 12128 bp, Cannabis sativa
aaaaaaaaaacagtataaatgttgcaatttccgtgcaacagtaaaaatgaaataaattgagaaaaatcagtatagggtgtaaatttcccttatttattagttaagtgccttaagcccaaaaatagcccatgagagcctcctcctcctcctcctccttcttcttcttctttgattcagtttcttcttcttctctcgtgtcctgtgctcttgtaatggctctcagctcgtcaaagtttctgaaatcgtacggctatgatctgctcttgggttctatagctgcattttatgtcttcaccgttccatacaccaaggttgaagaaagcttcaacgttcaggtagattccattttctcatacttctccattcatgtttggttggcaagaaactgttggaaaatgaaatattctaggaattgaagtactgggactgcttattttttaagtagtaacgattagctattgtgattcatgaaataaggcatttactctttttactgggattgcttagggaaaagtatgttgaggaaaaaaaataaaagaaggtttttctgggttttctttttatatgaaataaattcattggaaatttacattgactagattttataactatacgaattagaaagatattccctttagagtgattcaattgattttacttgctttcttgtttgatgatgagaaagtgcagaattgaaaagttttaatttggttttatgtggtgatgatttgtatttttactcaacagattacttttgaccaaatggcttaattgataaatgtcttagtaatattgaaagattatgtagcttcacatgatttgtaatagctgggagaatttgaggcttcacatgaaagaaggaaagaaatgtcagtagtttgatttaacatacttcattcatatcagctaattaaataattgaacatggtgcactgcattatagagtgtgcatcttttctgattaatatggatattttgccacgggagacagagtgacaataaaactttcttgaagaggaggctactagagaagaaaatgacatattgtgatcatagcaataacaggtggggtttgcgaaaattagaaccagaagaaaagaaaagaaaatccagggttttgggtgtttttgtgcttggtgttcaaattattactcatttcctgggctggaaaagagatggccagcacttggtggaactctagcttaatattactctagtacatacatataactttttggcgtttagtaaaagaaagaaacaagaagtaatagaatcatactccattgtccttgtctgctgctccatatttcaactctagcacagaaaaataaataaaatgaagtgattgttttgagtttgatttgtagtgataaggaagaatgacattttgctattctgaattgttatctcacttgtctgttttttggcatctgtaatttcttgatttgctaatttttctaaatcataatattttttcaaggcaacgcatgacattctatatcatcggcatcacatagataaagtaagttcggttttctctgtctttatggagctttcaaaactgtagttggctgtatcacatcagaattatggcttacttttttgtttgaatttttttctcactatcacagtatgatcatttggaattccctggagtggttccgcgcacttttcttggtacgcatgcaatcttactattcttgtgcttacgataaattgaataggataccctacatgttctacataataattattgtttttttaaaggctctgacttcatggtctatttatgatgtcttattttgtagctcagtaacataaggcccactgttttggttccttgtgctatctcatttctcaagtactctttgttcatcatatagaaagtccatgtccttctgtatatgtctacataatatattaagatgtgtgtttgtccaaccagaaatgtatatgatgatatatatattccttttgtaactgaaatattctgaataatgataaaaaaaagattagtctccttattaaacatctaatttaccaagcaatgtaatctatattcctgtaggtgcgttgcttgtatctaccgtggcatctccagtcatattgataataaacttgatgcatttcccaaagctttatgctctctttgcaggttagcacttatttgttttttaagatgcttggaaaagtgaatggtcccttaaccttttttcctgtgcctgtgaaaagggaaaatttcttctatattaatgttgtacctttattgaagtgattatttttgagagagtaagtgtaatgggtgataagttgatctatgctacagttttcacatagatggtgaggaaaatcaggtcaaagagggtattgacaatcttaaatgaggaataggtgtagtttcgtggctgacattacgagggagtgatggcccatggctttagtagatagggagaggaaaaggcagtaaagagcttctcccctcttgcattatatgattttgctatgtaatactatcctgtgacaagctttctaaaagaagaaagaacatattctagctgttgaagttctaggatttgcaatacagtaaagaaggaaatttaatctactctaatagtatactttttttgttatccagttcgcatggctttagtactattgataagacctgaactgttgctgccagtttattgaaaagtatatggagtataaaataattataataggaatatactgatctgatattaaaggaaaatctgatattgatattaaacaaacaagctgccacaattcccacaggtttcgagagcctggggtctctccaattgatgctgaaatcaataatcagatcaagcatgccccccaaaccactcaacacacacacatatatagcactcatacactcaccaagccaaaccaaaagccaactataaatacactaaagaaactgacaaacaagttaattctagtgagacctcttatttttcctagcataagtgaagctaaccaaaggtcaaacatcaattccaaatccgctgttagagttggtggcaaggtaggaagggagtgcgatgtgccaatggctgttcgtagttgagacacatgaaatactgggtgaactgctgaagatggaggtaaatccaagcagtaagcgacaacaccaatgtgcttaccttaaagggaccatagaaacgagcaataagtttctcatttttgcgaatagccaatgacttttgtcgataaagtcgctacttaacaaacacagaatcaccctctttaaattccaccaattgacaagacacagcacctgaagatttcatcttttgccgagccctgagtaaatgcatttttaagtcatctagaaagaaatctcgctctgctaacaactgatccactgcaatggcagcagtggcaccagaagaatgtcgaactagtgaaggaggatctcttccatacaatacattaaaaggggtacatcccaaggaggagtgaaaagaagtattgtaccaatactcagcccatgatagccacttggccaaactattggtttctctgaagagaagcatcgtaaataagtctcaaggtagcagttaacaacctctgtttgcccatcagtttgagggtgataagcggtactatgtttcagttcagtaccctggagatggaagagttcagtccagaagtgactaagaataatgagatccctatcagagatgatagaattaggcaacccatgaagtttgaccacattatggagaaaagcttcagcaactgctcgagcaataaatggatgtttcagcggtataaaatgagcgtacttaaatgatccaccacaacaaagatggtgtcaacactatcggattcgggtaacccttcaatgaaatctatagttagatcctcccaaacccgctcgggcaatgccaaaaattgcaacaaaccagcgggagacatggccatggtcttattccgttggcacacctcacactctcttatgaactcaaccaccacccgcttcataccaacccaaaaaatgtcaccatgaagttgttggtaagtgcgagactccctagaatgatcgccaatcagagaacaatgatactctttcaaaagggaagggagtaaggtcgatgtagcagataaaaccatcctcccttgatacaccaagcgatcatgttccaaggcaaaaccagggaccatagtaaccattggctaaatcaactcgaacccgagagagaagggcatcttgttgaatttcttgttctacaatatcccagtttaaccaagtggtagaggtgagaactgagcatgccactatgggaacttgagataaagcatcaacgacaccgttggccgccctaggcctatagacgatttcaaaatcatagccaagcaacttaaccaccacttctgattgtcaggtgtcacaagtcgttccaacaaagactcgaggcttttttaaatctgtatgcaccacaaaccttcgtcctagtaggtaaggatgccacttgagaatagcaaggacaatagccataagttctttttcgtagatagatttgagttgagcgcggggcttcaaaggctgactgaaataggctatgggacacccctcttgcatctagtcgaccttgattccataagcggaagcatttatttctgccacaaaagttttagaaaagtctgggagagcaaggaccggtatcgttgtcatagctgtcttaagagcattgaatgattttgtagcagtatcggtccaactaaagcgatccttcttgagttgattagcgagaggtcgagcaatggtgccatacccagccacaaactttcggtaataaccagtgaggcccaaaaatcctcggagttctttgatggtttgaggtagcgggcagtttagcatggcttggactttagacgagtcaattgccacaccttttgatgaaattatgtgccccaagtattccaactgtcactaaccaaagcaacacttcttcatattagcatataattgatgcttggaaagagtttgcaacacaatgttgagatgctcaacatgggtagcttcatcaagactataaacaaggatatcatcaaagaatacaaacacaaaacgacgaagaaaaggcctaaaattttcattcatgagtgcctggaaggtagctggtgcattagtcaacccaaacgacatcaccaacttgtaatgaccatgagtgcgaaaggctgtcttatgaacgtcttctgcatgaacacgaatctggtgatatcccgatcttaaatccaactttgaaatttattagctcattgataattggaattgaaaatttattagctactgtcaccttattaagagctcggtaatcaacacaaaagcgccaactgccatttttttacaagtaataccgggctagaaaaagggttggtactaggttgacaaatactggcatccaaaatctctccgaccaattgctcgatttcatctttcactgacgggggataccagtacgggcgaacactaatcgaagaggtcctatacggagaattatggcatgatcatggctacggtttggagggaggctcgttggtggttcaaaaacaggagcataagtttgcaataactttgagataggagctagtaatccttggtgcaactctgttacaactgtactgcccaactccacccaaaccccctacttctcttgttggatgattttcatcatagtcttgagagatactcgagttctatctagtgtaggatcaccacgaagtgtaaaggtttttcttccaaggtaagcttcatgatgtgatccttccaatggtgataagtgcctcccaatgtttctaaccattgcatcctgagtataacatcggtactgcctaacgataacggtaaaaaatcctcaattatctccaattcttgtagcactaaaggcacagcctgagaaattccttcccctttaattgcttggcctgaccccatctgcaatgtttaaaaagatgcttttgaggtgcgcctcaagttgaggcgtttaaagattgcaccaaggcgtgcgccttgctaaggagaagagaggcgtacgccttaatgggtgaggcgttgaactgaggcgtgaggcattgaggcgtaagaggcgtgcacctcaaattttgaaagtgaaatgggctatttgagccctaaaaaaaggcccaaattgttattttaaattcgtttttgctgcccaacttaaaaaatctaaaaaacctttaaaaagcccaataaatattaattaaaaagcccaatgaaatatttaagtaagcccaaatgaaacttaaaaataaaaaacctaattctatcttcttcctatctgcctctcttcttcacaacagctgtgcaactgcttatttattcaaccaacagagaaaaaaaaacttgttgcttgcttccttcaaatgtgttctaggatagtagaatttaggattctaaatctagaaatataattatcttgattttaggagttttatgagacatatcttttggtatgtttgaattttatgagatgttttatggttattatttttataagacattttatagtatgtttgaaatttatgtgacagtttattcatttgtaggtgctctaaaagcattgattccattaatttttgaggcttacgccttgtacgcctcgtcttaccaaaaaaagaacgcctttaaggctcatttgcgtttttttaaacattgcccatttgtaccccataagtttcggtggaagaaattgggagagccaacttagaaaccaactctgctatgatgaagttatgggtgacaccactatcaatcaataccaccacttcctgctcgtgaattttgctgagtaacttcatagtttttggagaagttaatccaacaattgaattcaaggaagacctctaccaattgcgctttggttgtggttgacgacagaatgcccaaagcttcctcgatgggattatcttcaagaggatcgggttcgtcttcttggatgagaaaaatttgtagttctgccgctttacactcatggccttagtgccacttctcatcgcacttgtaacacacactccgacttctcttctccttcaattcagtctcaatcatcttacggcatcctatcatttttcctgtagaagaaattgtagatgtaggtggagaagagtatgatttatgagtggaaaaatttgtcttaccattgtttctaatcgtgcccttgtattcctctgttggatatgtactaatgggtcgagttacagatgagtttactttagtagacccaaatttgtgagatctaaccaaagattgattggcttctatggattcagcaagttccatagtttggacgagcccattgggcttcaaaatacgtgatgggccttggatttccatttggagcccttttaaaaaagttaactctaatatagcctcatcaatcgtccctattgaagcggccagagattcaaactggcaacgatattcttggaccgtagatacttattgaagattgaggaaacgatcataaatcgtcccttagatccctggacgaaatcgcctaatgagcatagattttaattcttcccaggtattgattgatcgccgtagattttcccacctgaacgagtggaaagtcgccccttcgcacggtggcttctaactgctctaccacagtcaaccgctgtaaactgaagtatcgatttgcacggtacgcccaattatcgaggtcagcccttgaatacacgggcaattcaatttgtcaggctcggaactcttgtcgtcttcctccatcttagttctcgtttctaccaaacctagtcacagttggggttgacaaattctcaccaacaatctgcctaccaggggtttgagaagtcgcagaggcttcgcagatgctagcgagttcattgacaatgcgagcttgtccattcatcagtatcttcagttgttctgtaatcatagccaagttgtgtggtaaataaaatatatgcaagtatatgcaatcgaaacaagtaatataatgataaattaacacgataaataatgataaataagtatacgcaagtatatggtaaaattgatacgcaagtatatggtaaaattgatacgcaagtatacgcatcaaaagaagtaatataaagtatcgtttcctcgaggattgattattaattaccaatcaattaattctttagttttattttattaataaaaatatttgagaaaataaataagacaaaacaataattaaaatttagaaaactagcaatgataaaaacaagaattattatgatccccaactatcttttattttacctcataacgtaattatccaattttcttcttcctattcaattgataagttgagttaagaagtttataatttagttaagacttataaattcaatctatgtgaaaatttcttatatttttatagtaagtttaatcacacaaatagcattaaacatagcaactaataaaatcatacaaacaccataggtactttcgtcctaaatctacacttagcattcctcgcaattttcgaatggtatcaaaagcttgcctcagccctctttaaatagagccaaaaattcgagtcccccacccaccccaaaaaaaaaacaagcaatttcctcttatcttcgcagtttctcgttgtcagtttcgtgttgcgacgactgatagtattttgaccatatctctctcaatataactcggaattgaacaatttaagatgttttggaaagataaaagagagatttagaactttcattcagaaagtttttcctagaagtgaatggatcatagtcaaaaattggcttgaagcttcagactttattttcagtcacaaacgaagcatgttgaacatccaaagaaatttcaatttttttttggaaagtgatcactattaactcttgatcacgaaattaagagatgacaatgcaatatttgacccatttgaggcaataggaaattactctaagctaaaagaagtttcctttctttattagattttttcatttttgctcaaaaagacttgcagaacactaaaattactaaaattgaagatctccaaacattttttttagaaaacaaataaaaacaaaaccaaacataaatctgcacaataaaataattaaaatactaaaacacatcctaaattagactataaaaaatacataaaaataaacctaacactgtgctcatgggatttcagatgttctttcacgcctgagatctcggtatctataatctacatattctagctgttgaagttctaggatttgcaatacagtaaagaataaatttaatctactctaagagtatactttttctgttatccagttcgcatggctttaggttgcattgtactatctactttacgccttttccgccttcaggtatgttcttaccatttttttttctaaaaaacaattgtatactcaatatattctgaggtttccaagtttagctagttatgtatgatgtatcttatgagttttgtgacactctatgctataatatacaagaggcaccatcgtttactgatttagttttatgcaaaattcaaaagcactaacgaattttgtacctgaagctggtagtttattgtacctgaagagcaatagtgcattgatattatttgatttattttataactttcagtaatgctccaatttacattatcaggtcagagataagtttggacagcaagtagaagcgttctttgtaatattaacgacacttcagtttcatttgctgttctattgttctcgccctcttcctaatatatttgctttgggagtaggtaattgcttcttgcactttagttcttatttttagtcttttgtcggttgctggttggtgatgattttaaagtatttgcccctgagatgtctaatatcacagtatcttctgctaaatcaatcttcatgtttcatttaatattgtagtcaacttggcttatgcattttggctcaaggggaagttttattcagctttaaactgtctggtatgtttctactgtaaatatggcgctttttttgtgtgtgtggggcaaatgaatataacggaatttagttacactttatgacacaatttacaagtctcattttattccttttctactacctaacatgccatcatttagcccttgagtaaatattaattatacctagttctcaaggtaatgatttttgttatattaaaatttggtttgaatataatgttcatgtataatatttctattctcttgtcaaatatttttagtctgatttgtgtggttggctttgttgccacttataaattttcttatcggggcaatttttattctctatggttttttttttttcttacagttctttgttttatatgatcagatttttgctacagttgtctttagatgcgatatcctattacttatttgtccccttggcttggagctattgttggtaggttctgtttcggacctgatttatgtttttatttttgttcttttattcctgtttatgatgtaaaaacatatagtttgcagtgaaattgctactctcacagaacacttgtttagattctattcccaactgttgcttgttgttggttaggttaaatcatgtgtagtattttatctcatgccctaatcgctgtcatggagtgctttcaactttctttttgtcacttgaattattaggggacttttcttggtagtacggtaaattggggcaggtgtagatctaatgagagcctaccaattaaatatgattgcaatagtatttctatgtttatgatgatctattataacttattccttatattgttgtgtatatataacaacatttgtgacttcacacctgatgtttttatctttgttcttgattagactaaatcaattacaatatggggaacactgaaacactgcgtctggtttgctctggtttgcataggttggtgtactagttcaaattttcagtgtttccgttagactcgtgcatgtcgatttgcatactagacatcctgaatcaatagcatggttttgaattcttcacagtgcaggtcttactatattgattgattcaattttttggagaaggttattgtggcctgaatttgaagttttttggttcaactctgttctgaatcgaagctctgagtggggtgtatccttccaaatgaaattcttgcactgttatttttaatttgtaaagttttatattttactataattttcattgttatgtgttttcctttatattgtctccctcccttcagacacatccattccactggtacttcacttcagcacttccccgctcattgctagctgcatatcctctttttctggtgagtctatagtacaagaaacttagagtacgtttggttgggaagaatgaaaagttgaaaacataggaatagaaatggaaatgggaataggaatgggaatagaatggaataaaatttaaagtgcataaaaaaattgataaaataatttgttttggaatgttctttccttccatttcttaatggaataggaaatagcccttcatttcagacattccaatactttaaaatgcaaccaaacaaagaaatgaaatgaaaattgatttctttccattccattacctccaatcaaacacaacctaagtttcttagtgtagcaatttgtgatgaacttagctctatggtgtgctcaatatttaatctgtctctacccgataacattgggctatttctggcgttttgcactgaccaaatacaacgtcattcacgtgaaatctttaaagatcattgatttctggtagttgtgtatcattcatactttttaatgttttggaagaatttcttgatagtaagaatcatcattggctattttgtatttggcataataactaatatgagcaaattttagtttaatatcttatgctataagactggattttgtaaacatgcatgttactaactttagtgtctaacttagggaagttttgacaaaactgatgagtcgaaaagttcttttttctctcttctctctcctttgactgagaactgtgccatgcacacgagggggttccatggtccttctggccatggaaagcaccaaaaccccactggttttgggaagaaaaaaggtcactaccccactggt

SEQ ID NO: 111186 - DNA, 4305 bp, Cannabis sativa
aattatactattttaattattaattcaaataaaaaactaaaatattaaataaaattaacactacgtggcttgacacgtaacaatcactagtgtaactattaaagtagtaattacaaatttactttcaactctcattgtaatcactataaaaataataaaattattttaaactataaccgaaaacttttatgacttatttatcccattatattatgacctacaaatatagtttgttcatgttctcaaggatgaagcgtcgtcgtttggagaaagttgttttcccggtaaacaaaaatcagggtttaagagctcgcaccatagctggggagctccgaatagccagaagatgagattcaacttcgaatttgaagagaagaaaacggatcatggaaggtcatccacgcccaaaaatgaactccattgggtccccctcaacactcaccccgtcttcactgctcctgccactccagcccatgcctccaacttcgctccaccctccacaaatctcttggcttgggacggagcttcgaggctttacttttgggactccgaccaacttttccttcataggatctccgttcgcctcggggacccagaacccacctctgtccttgccgcttctccttcaaaggtctctcctttctctctctctctctctctctctcttcttttttcaaatttatttttggttgctgagaaagtgaaggaaaatatgagggaatgtgggtgctccataacctatgcttgtgattccgaatacatatcaaccgttgttatatgacatctctatgtaatttggaatctatgaaaacaatagcagttgttaagaacttaaaattaagctttcagtttcttgattatacttgcttgaagaactattggactgttttcttcattttgatttcaatgcattgtttattaaatctggtaaatttaataggtgttgcgaccggatgtggaacttgaatttgccgttcataaaatttccattaataggagtggttcggcactgtttctttttggttcagatgccttaagtgtaatgtatctctacggacgtggttcttccaaagacgatgccataatatgcaggtatggaaacatagtgatgcactgtcattttggttcgcattatacttcaactaatgtaacaaatattgaaacttctagttataatacttataatagagaatcactgggaaactttttgttttcttggttttttagtttcgattctacctgtagttgagtcttggttggtaaagatcacttcttatgtcaaggtttgagattgatgtaccatttatgcaggactgttagtgttggttcacaaatctattctaatgggagcagtgtcatccgtgtgctgcaagttttatggcacccttacagtgatactcacttgggaattctttcttctgattcagttttcaggtatctcactcacatcttcattttggaaaatgtttcatgtagctattatgttgtaagaatgatgttttccaatcttgatgaatcaaattgaaatttattttctgaaagttctcttggtttacattattaagaagatacaaaactataaattataaatatgatttagaagttatgatgattagttaggaaggttaccattatgaagcaagataacttggaagttagaacgaaaaattcagtttagagtaggaatgagatttaaatggtcagtttgtgtcccatgcagtttttaattggatacaatgggttgggggccaacaagttgggaattattttgcttattctactttttgatgtttttattaccttattgtttttggctttcattagtctggtttcagaacatgtagtttttgttatacagtataaccttttgttttaacatttttatgttaccattgttttgtagaatttttgatctctcttcaaatataattcaaccagagcaagagtattatcttcaacctttggaaccaggtagacacaggaatgcgacatcaatttgtgctgttgatttttcatttggtggtgaccacttgtgggacaggtttagtgtaagtaactgttcaaattttgattccaatcgacttgaatttgttcaatgaatattttggatgaagctctctttataatgctggtttattctggtgctttatttcttcattttatggcattctttgagggtaactattagcttttaggttttcaaccaaatttgtgtttacatcaactaatttcttattaatttttttagctcaagaactaatttcttgttacttattttgcgccgttgtacaggtctttattttgttcagtgatggttcaatttataccctttgcccagttgttccttttggaaggtaggcattagataaaattaatttattagaaggattgcttctcattctgaatagtctttatgtgataacaatatatggtgtagctagcataacgtttaggctaagttactattgtactggcttgcttctttatacatgatgaactgctttttcttaaaacagtgtttacaaatgggagtccattacggagatatatagtgatgcccacacatttggtctgaaatcagcttatccagtcgcagttagcaattccagtcttgcaatttcttggctggaggcaacatttccagatctagcaaaccaaacatcagaaggggtggacctttctacattaagagctcgtccatttgcattatttgatgcatcactttctttgcaggtatagatattgtgctttcatgctacatactttccctgcacttattttccaaaatgattgtcttgtctatacgccagttgtagctaccaatattctgtaaaacacaaatattttgtaggcaatgtcatgtgtgtcagttggacttttgttgggtaatattaaattatagaatgtaacctaattgagtcaccttttcacaatggcgagcacttccttttcgaagatcacaaatttggtttaactttgaaaatcaattaatgcattctgttttattacattatagggccctcttaaaaaagtttgtcatgaaggagaagaagatttatccattcgtggtgtagaatgtgaaggtcgtgcagttagtcttttatataatatagtcagcaaagactcaattttggtgactgcttggagtggtggtcaattgcaaatagatgccttggccgatgaaatccagccagtttggaatgttggtagtccatctcgtctccgtgttgatttccatgaccatattgttggtatggctatgatttgcgagagaagccaaaacaataattcaactgttaagcttgatcaatcacttgaaaatactgtttggttggggcatcctcctcctctactgagactagctatcgtggatctggctcttccaactaaagcagaaagtggttctttcatcacaatgtttgctgatccgcttatgccagaaagaatatactgtcttcatgatggagggatagattcagtagtgttgcattttctcccatttacgagtcagattagtggcaaaaatgaggttgggaggataccatctgtgcatcctgttttgagtacgtgccagggagaaacctcctcgccatacccactttgtggttttgtgtcattatcggattcatttggatattcttggattgttggggtcacaattgcacgagagtgtgtagtgctagagatgaaaacttggaaccttttgctcccaattcacgttgacaatgagaacaagcctacagaactaaatgagacagaattgccagatatcattagcaaagaactcctcagtggacctaaggtggttcttatgcctcaaacttcaaatctttgttctgttgccgcagattctattgaaggtcgatcaacacttcatcagtacttcaagcttttccatgaaaattatgtggagtatgcacataaggtaatttactaccatgctaagaaaataactaaactatactgttcaatggtggtgcattagcaagcttttttttttgctggccagtaatcttagactgttttagtggtaccatcttacctattttagtgtttatatgtgttttgtttttgaaaattgtttatttctagcaactcaataaaaactttttagttttagaacagttggaagattctaaatggcaatcttcgattaacttacgtttgtcaaacataatgcggttgataagttataatatatctatgtgttaggacctaggattagtggggtgtgctaacatatattaaataaaagggtaattgagtctttgtattgagggtagtgttttggagggaatacaatag

SEQ ID NO: 111187 - DNA, 3234 bp, Cannabis sativa
tgtagccttgctcttcgggagcatgtgagacttacatgccatctccgggaggcatgtctaaggttgatccctgcgcttaagatgacttagctgaattacataaacgccaaaccctttccacctacgtgtcatcatccggttggtccacgtattttgggcaaattcaggagtaacaataactatagcttaaatgctaccgtaaatgtatgcaaacataactacttgaatttgtgtatcacatattctccaatttatatatacctatgacactataattacacttatacatatatattaagttatatattatacattatattataagttttaagtttttatttatatattttttatatataattaaatatttagcttaaacattctataatatatattagtgatggtcactcaaggtgggatacatactatatataatatataattttaattaagtgaattgaataaattataattattcagcaaacttaatattgaagcttagtgtagttgaaaaagagagttgatctgatgaaatgagtcaaaacgatcacatgcgtttcgtatacttcactgtccatttctccattaataggtgtagctagtgctcatagaaacattccttatttggtaatcttttttattgtagcaaaattcataatatatcacatttgatataccaactaaggaatatatatgggaccacataccatctcattattgctcaatacaacatgccctcgattcatgtatagaacaatggggtatttttcttactcagccaaatattacaaaatagtatagtgctctagccaaacaagaggatcatatatacctgcaatatcatatctgtaagtgtgaacccttcttcctttctctaattccttatatcatatctctattatatatattacttttgttgtgtttgataggagaattagagctaggcacagaattatgggacgtggaaagattaagatttcaagaatagagaacaaaatcacaagacaagtaacctttgcaaaacgtcgagctgggcttttaaagaaaactcatgagcttgctgtgctatgcgatgctcagatcggtctcatcattttctctgccaatggaaaattatatgacttctgtagtgaccctttaaggtattaattaaattaatttattaattacttaattattattatatacttgagttgtatttaaacaatgtagaaatttctcttctgtcttacgaatatttgtggaagtggtccaattaattaatatcattttcaaaccaagaataatgtattattatatacgtatcacactatatatagctacatgtcaaaaattaaataatgatgaaattctctgaatcgcagttttggtcattattatttataataataaattaaatttaatgggcactcaaatatgtataaattataaattttgatatatatttagtttttactaagtatatttattattttttttacagtatgcagaatataatacagaagtatcaactcacaacaggaactcgaattgtggagcaaaatgacacagtaaggcacattattgtattattacaccaccatatatctccacaaaatatatttggctaataattaacaagaaaattataattttaaatgtataattttgtaggaacaactccacggtgaaatgagaagaatcataagcgaaactcaaaatcttcaaatgagtttacaacgctacactggagaggatttgagttcattgactttgggcgaattgaatgaactcgaacaagtcttagtccatgcttcccataatgtccgagctcgcaaggtatatatatacttcgatcgatcttattgttggataataataaagatctttagagagaatacttaaatagaagaaactatattttatatcttatgtgatttttgacttggtacaaaatgataggatgacttttttataaaactctatggactaatttaaaaacattattaaataattagggattgtttaacttggtaacttaaaaattattttttgttttaaaaattaataagatcgtttggttaatttttttaaaaattgtattttaaaaacagaattttaaaaaactagaaaacagaatacattaaaatgtagttttcaattttcaaaaataatttttttttgtctaatatattatattttatattcttgcttacatacccggactatggaacccggagcccagaccccaaccccggaccttggaccccaactcgaaccctggacccagacccggactcgaatcttgaacccgaaactagacttggactcggaccatgaccccagaccgacctcggactcgaacccagacatagacccggacttggaccccaaaccccgaaatcgggtcagaattcgggttcaggtctgagtttgagtctgggttcaggctgaggtctgggtccatgatccggtccaagcatggatggattcatttcatcataatatggtgtagaatattaattttttttagtaaaaaaattaaaaaatagttttaaaaaacttgagccaaacactattaaatttttaaaatgataaaaacctgaaatatgttctcacttttgaaaacacaattctaaaaattaaaaactaaaaacacagctaaacaaactcttagtttttgcatttttctacataattctcactactagcacaaatagaagataattctagaaaattcaagattactcaaacaaaacagaaaactttaaacactttattaataaatataaaaatagtctaaaaactttaataacaagaaaattttaaaaattaactatactaaataaatcaagtttaatatatcaacccttatattacctaataactatatatatttgattatatatgtgtagaatagtgctatgttattaattattattattgattaactttgcattatctatgcatgagcagtttgaaatcttacaacagcagatggagaatcttcaaagaaaggtactgaagtctcattattagtactgtacatataacatctcatatatttgttaatattattaattatatatatttgcaatgaaataatattaatattggctaaaatacatatatagaagcaactactggagcaagataatgagcacatttttcatctggtaagagtacatatttctagatatatatatatatatatactaggtgattgttacgtgtcaagccacgtagtgttagttt

SEQ ID NO: 111188 - DNA, 4291 bp, Cannabis sativa
  modified_base (27)..(40): a, c, t, g, unknown or other
aaaacagataggggtgcatcaatatannnnnnnnnnnnnngtgcattgtagaattttccaatagtataacccttgtataatttttaaagtgattattattaattatcaataatttgtttaatttaaataataaaattgtaaaacttttttttttttttttgagaaaataaaattgtaaaactttaaattccactattatgtaaaaatgcttttatacatgtaaatgacattatgtaaggtggtattaatatgattgtgccactttgacaagtctaaaggaacaagccagaaaaaaataaaaataaagacgtcacaataaacgacaaagaaaccactaaattatacggagccaataccgatgcactagccacgtggcagattatgactagctgacgtaatttcctatcaattttttattgtggcccacgtgtgacgcaaccgacgaagagagtgcggagcctactatagtactatttctgttttagtacttattattattaattattgtgtcttttgtttcttctattactattgtttttatctaccaaataaatgtggttactttttctcaaaataataataataataaatatggtattttttttttctaattctaaaaaaataaataaaataaaataataataataaatgataagaatttttttatttttacatttcaaaatattttttttatatatatttttacgaaaatctacatagaaactcacatagcaactaacagagcaacttaaatcgcaactaaaatctacatcacgacccacataaaaaccactagagaaatccaaactgtacattaaaaaacacataaagagtaatatataaggcaatcctctaaaaaaatatataaatatgctaatttaaagataaaaaaagtaaaaattgtcataaagtacctaaaattgtatttcttatttacattatgacttatttttttaaaagagaaaacaacattgttccatgttgttggaacattatattatttctatgtaacgtaaaaacaacatgtaaacgtatttttttacaacaatctaaaatcaacggtgtgcatgaaaaaaatcaataaaaaagtttaaaaaaaaatcgtaaaaatataaactttttttgttgtttttttggtgtttttaaaataagctcccgaaaaatcacatattttattagagcatctctagtggagatacaataagtgattcgaagctaaaacatacatagcaaaaaatacaatccacaatatataacccacctaaaaatatcttcaatagagtataaaaaatgtggtatgtatgagaaatcacacctttctttttctattttaatatcaaaaatactttcttcaatctaataagctatttctttgccttttatacatattattaacgttttatacatatgtagtatttgaattatttttcccttctttttcactctctttttaatttttatttaataatgggagtacagtagaagaccagactaatggccacaatctacctgccaaaagtctgagggattatgtgctacctacaatgatggaggtttagtcttgtataagaccacctgctgtcgatgctaacaactttaaaattaagccagccattctttagatggttcaatctactgtccagtttgggggactactttttgaggacccaaacatgcatctgtctaacttcatggagttgtgtcagatatttaaaatgaacggaattagtgatgatgccattcgcttgaggttattcccattctcactgagggaacgagccaagagttggttggtgtctttgccacctaacttgatcaacacctagaatgacctagcaatgaatttttttctcaaaattctttcctccagtaaatgtcgctaagttaagggggagattaacaatttctaccagcttgacaatgagtccctctatgaagcttggaaaagatttaaagacttgatttaaaagtgtcctcaacatgggatagaaaaaggggatgctattccagtacttttacaatgagttgggtgaaactattcgcacactcattgatgcagcatgctggtgggacaattaagagaaagagtgctaatgatgcatatgagttgttacaagaaatggccatgaacaatcaacaatcgccaagtgagaggaataattcaaagaaagtggctagtttgcatgagattaatgaaattactaagttgacgactcaagtcaaggctttgaccaagcaattgcaaagtaacacagtgacatcacaagcaaagcaagcataaacaatttgtgagtttcgtgggggtcctcatgtttatgaacagtgtccttttacggatgttaagaatatgtccatggagcaagcccaagaaattgggaacttcccccgcttaaacaattagttctctaatttttacaaccaggggtggaagaatcatccttatttctcgtggagaaataatattaatcaacaatagcctcaacaacaatctacacaacctcataagttcgcttaagaacaaaattctggtggcagttccaatcctaagtctgatgctctaaaccaattcatggctgaaacttggtcttctatctgaaaatttggaaactcaaatggggcaattggctacattagtggccaactgcgccctaggtaattttccaagcaccacaaaagttaatctaaaagaaaactacaaggcaatcacattgataagtggggagaactatgaggggccgagtgagaagcaaccagttgaagaagagggtcaggatcaacaggaacgagtacaaatggataagaagcatagaaaggagaaggttactgaagacctataagcaaaagaagcttcaacgccaatcattattgagcaccatattaaaatcccttatccttaaaggctttgcaagaacaacatggataaccagtttaccgaatttctaaaagtgttcaagaaactacacatcgatataccatttgaggaggccttagagaaaatgccaagttatgtcaaatttaagaaggacatcatgtccaagaagagaaagattaaagactttgaaactgtggcattgatagaggattgtagtgctatactccaaaagaagcttcctcccaagctgagagatcctggaagcttcaccattccatgcactgtagggaagattgagggcattaatgatctatgtgacttgggggcaaggataaatctgatgcccttatctgttttgaaaaggctgaaattgggagaagccaagccaataatggtgactttgtaactagcttattgttctttggcacacccaagaggagtcatcgaaaatgtccttgttaaggtggacaagtttatatttctagctgacttcatagtacttgatatggaagaggttaaaaatatccccatcatccttaggaggccattcttgacaacaagctaagtcgacgttcaaaaaggtgagttgaagctgagagtacaaggggaagaagttgtgttcaatgtgctcaaagctatgacttatccttaggctagtgataatttctttttggttgatgttttggggattttggtggaagaacggaaacctatagaagatcctctcgagttgagtttagtggaagatgaggtgattgagaaagatggaaaggaagccatggagtatgctaaatggttgaattattatgggacattgaaaagaaaatattttaaatagctttgggcagttctaaaaaagtcattacctttatctgagaagccactgtagttagaactaaaggttcttcctaaccatctatggtatgagattctgagtaaggacaagacacttctagttattattttggcttcactttttgatgtggaaactaaattttttttaagaattttatgggtgcatatgaaagccattgggtggaaattggcagatattaaggggatcattccctccacagtgatgcatcaaattttaatggaggatggagtcaagctaaccattgatgcccattaagatctactctaatcttgccttggtgggatatcttcccctctttcttcatctctaggcagaccctggaattggttagtcctaccatatgctctttcaggcaagatctgatcatcgttggtgggggtgggcaacatccaatctaattcaatctaattgaaatgaaccgatcaaatccagaccaattataaaaaattggatatccaattacaattggattggatgtaaaaagttgaattcttattggattggatcaattattggatgtcattttcaaaatctaattaaaa

SEQ ID NO: 111189 - DNA, 4342 bp, Cannabis sativa
atgccactaaaaataaacattgggtttatgccacttacaaacttaaaactttgaatatttatgtcgctatttaccctaattaaataaatatatatttatattttagtgttttaaaaaatgaaaaaaagtcggtggagagtaggagtgttcatccaattcaattcatacaataactcaaattcaatccaatctaatcttttacggattgaatcggttatttagatcaattattttttaatattaaattatttaatatttattaaaaatattttttttcacaaaactaacaacaaaataaaataaatgttgtatgtctccaataaaaaattaaaataaataaaataacaaatttaaaagaataaaaaaattgtatatagattttttttaattttgttttaatattaaatgttattgttactgcaacttgggtccaaatccacgatttagatttcaaatattggagtgaatgtgttctattcaaaattattggacaaattggtaaacccattatgcttggtgaattcacaaaacaaaaagaatgcctcaattttgctcgggttatgatcgaagtggatttgatacaggagttccccaaggacatttcttttgtcaatgaatgggatgaggaagtggttgttaaagttgtttatgaagggagactgattctctgtaaccactacaaaagtctagggcactcaagagaagattgtcagaagaagaatataggtaaaagcattgtgaaaacaaaatgggtgcctaagaaattggagaaagaacctgtgaaagttggaacaatggaaactgatcaagaaggttttcaaatggttaaaacaggggaaaataaagggtgttgaaactattcctaccaaaattgggaataattttcttgtacttggagaggtttgtgaatgctttaaggagatcgagtttcaagatgatgatattgagcaagacaagagagccagtaccaatggagggggagatcctctatttggtaatggatagaataatgtcgtggaacgttgagggcttaaaaagtctcaaaagcagttagttgtcaagaaattaattgaataaatgagggtgggactttttgggctcttggaaacaagggtaaggcctcataacttaggtgtcttataccttagaatgttctcgtgatggtgtttttcaactaataatgtgtgggatcatggttggcgtattatgataagttagaagcgggatatgttttctgtaaatatccttttttgttcaagtcaaataatgcatctcgaagtttatgttagagatgggaagaagagtttcttagtaacctttgtgtatggatttaatgaagctaaatgtagagatttgttatggaaggagcttagggacttagctaatgaaatatcttgtctttggctagtactaagcgactttaatgacattttgaatctgaaggaaagagtgggcaagaaggtttgattatctttctcaagtgcttttcgagattgtgtagaagattgtaaacatgaagatgctaagtttattgggtccttcttcacttggaataataaacatgaggtggaagacaaatttttttctaaaatagatagagttttagcggaccaagagtggttccaagaatatgaatcaagtgaggttgcctttctttcagagggcctttttgatcatactccagtgggtagaaaaaagcatttcaagttctttcggatgtggaaaaaagcaactggattttaggaagctttaattaaacattagagtactcaagtttcgggtactgctatatttcaggtgttgcaaaaacttaagaagcttaaggtgattttgaagaaaataaatgcaagagactttaagaatattggagtttcgaatatgcttgcttttcaacatatgatagagtgccaatccttattacaaagcaagcctactgattgtatttttctaaatcacgagaccaaggcaaggcaaaaatacaaagaaactcatgatgcttttatgtcactccttaaacagaaggctaaagtacattagttgcaagagggagatgaaaactcctctatttttcatgctagtatgaggcagaggagaatgcaaaataaaatttctcaattaaaaacatgaatggggcctgggtcgatgaagctccggctgttttaaatacatttctgggtttctatcaatctttgcttgacactaagttaaattagaggtgttttgtgctgaaaaaattgtgaagcagggcttaatgatttcacctatacaagcaaaatttcttttagcagcatacacaaaagaggaagtgaaaaggacaatttttgacattcatggcacaaaagctttggggccaaatggttatgagagttatttttatcaagataattgagagatagtgggtgaggaaatgtgtattgttcttcttaactttctgcataaagggatgttgttgatagagcttaataacacaaccatcaccttgatttcaaaaagtaaatgttttaaagtagtgagtgactttcgtcctattgcttgttgcaatgtcctctacatagtggccaccaaaatgatctgtttgagattaagaactatccttccatctctaatcacttccaatcaagagggacttgtgcatgataggttcatagctcataatataatgatatgccaagatttaattcattactatggttggaagaaatcaaggcctaattacatgatcaaacttgacctgaggaaagcatatgacacgatagaatggaacttcataaaagaggtgttggaagctttgcattttctggagaattttataaagctcataatggtatgtatccaatctcctaggttttccttgttgcttaatggtattatgcatggttactttgaaggaaaaagaggtttgaggcaaggagatcccatgtcaatgctattttttgttctcgggtggaatatttgtctcgaatattgaagaaaatagggggaaataaggaattcaaattttatgataggtgtaaaagtctagaacttaaccacttatgcttcgtcgatgatgttctcatattttgtcatggtgacttttaagtagaaacatattatgcttctagggttaaagttcttttctgagactttgagattatttcttaaagaagctaaatcactactttattgttgtggcatggataagaatgaagagcaaagagtcctagaatcttcgaggtactcgagaggtaatatgccttttaaatatcttggagtgtcgatttgtgcaaagagactttcaaagatggattgtgagattttgattgagaaaatggttcagtgagtgtgcctatggagttcaaggaacatctcttttgctgttagagccacattgatcaattcagtattgattacaattcacacttattggtctcaaatcatgattctaccaaagaagattcttcaaaaaataaatgttatttgcaggagttttctgtgaaaaagagaagcatagttagttggatcaggaaaggttacttggagtaaactttatactccaaagtcaacatatggtttaggttgcatggacatcattacctggaatattactgcaattggaaaatttgtttgggccttagctttaaagaaagacaatctttggatcaagtggggtcataatgtgtaaaaaaataatgaagaatggtggtcttacaaagctcattcaactagtagttggtattggaagcaaatttgtaagataaaagagagctttaaatttatgttcgaattaagaagttttatttcctctacttataagttggaaatggatatactatgttatgtaatcctttatccaaggttgattgggggaaggaaatgtgggaaaaacttagtcttctaaagcataaatttatcctttggttggctatgctttataaattgcatacgaaagacaatttgtctaaaattggtgttgcattggatagttcatgtgtagtttgtggcaaccatgaggagtccattcaacatctcttttttggttgtacaagcagaaataggagcttgggagttttcaagagttgactgaactggaatacttcaaataatactgtctaagagcttctgaagtggattcggaggagtaaattgtcaaaatataggcaccaatgtataccacaacggtagttggtgttgtgatagtcagtagtcctgggatccataagggaaaatatcgagtaagttgtgcaattccacaccacctggggaaggttgagtgggatgattctaagactgtgtaagtatgggactacacagttgaatagggcttaaatggattgattggtactacctatatcaacaaggt

SEQ ID NO: 111190 - DNA, 943 bp, Cannabis sativa
aaatgataatctcattttctaacaatgtaggctcccttatctactttctaaaatatcttattataagatcttgcatgcatgatacatgaagagactctgaactgtgaagacacttgtttttctttgtttgatctgattcagattgtttttattttggtagaacatcatggttgggcttgaattttatttagggtacgaaaaacaataaagaccatacaaaaggagagagaaataaagagttatccaaaggttcagcacaatcacgtgtatttcactcattggctgactccgtggagacgctatgcttgaatttatatttggtcgcaaattcagaatgcgaaacaccaaacaaataagtaaaaaatttatacataaataaaataaaaataaaaaagaagtagaagaagaagaagccacagtagcatattacttaattatatatataatataggattccaaattttacaattatttagtttaaaaagaaaaaaaaaatgaaacacggccagaccaaagcaccttttatttatttatcatgttcaaatgaaagactagaaaaatagccacacccacctattcaaagtaaatagtagtatcctttccaagtcaaaaatcgatcgatcgactttgttgaatcccatttgcatcttctcctataaatacccatctcatattgtactaccaaattacttcattattcattcgaaaccaacataactactcctacgtacgtactcatcatcttctacgtcgtgcgtattaatttcatatcctatatacgtacatacatattataaacaagaatcctagctttcgttttttacgtacgtacgtagaagttagaacatatatatacatatatatatttgatggagtttgttggtctaataataagtagttttcaacctctaattaactgggtgatcatgatgatgatcatact

SEQ ID NO: 111191 - DNA, 2925 bp, Cannabis sativa
  modified_base (1359)..(1362): a, c, t, g, unknown or other
agagaaagaaagagagtgtgtgagatagagagagaaagagaagagagagaggagtaggattaggaaagatcaatggcggaagaagatagtactacgacggaagcgacacttgaaaggacgccgacttgggcagtggcaacagtttgctttgttttgattttagtctctattatcatcgagcatctgcttcatcgcttagccaaggtaccgttatcacccatattttatcattttcctcaaatatatatctttgcagttaattactatcattataatcagttgtaatcttaaaaaagctgcccttaactctcttatttcatagtttctaaacaaaagacggaagaaatctctacttgaagctcttgataagatcaaatcaggtgtgattttgatttgtaatgtttttcttttagtataaatgaattattgtgggattattatatataactaattgttaatcatgaattaatgcagagctgatgctgttggggttcgtatcattgtttctaacaattagcgaaaagacaattgcaaacatatgtatacccgaaagtgttggccacacatttcttccttgtggtacccaaatgtccaccgacgtagaggaggaagctaagtgcgcccaacaggtaaaatatacccttttttttggacaaaaaaatgtggtatttttgcaaaattatatttatggtattttaaagaaaaaggatttagaaacagtggtgtatggatggaaaaacaggataaggtttctctgctatcgagaaatggtgtaaggcagcttcagtacctgatctttgtgttggccgtttcccatgtcttctcttgcgttcttaccttcggttttggcattgccaaggtagaaaattctttacattcaaaatattacatttaaattcggttaaaggttaagaagaaaaaaactgacagaataaaatggataggaatatatatttcgtattttcattgttaccaaaataaatacatgtttaggctgtagttaatatttaatgtaatattgctagtgcaagtcataaaagtatgattcaaaataaaatgaaaatagaagttaaatgaaggtgctagatgagctttccaagcaaaacaagagtgtgtcaattgctgaagtcgggacttttccatcagtttagatctaattaaatagaaagaaaggacaaattggcttggcttgtgtttggatatctttataaattcattctaatttcaacattaacgattgaaaaaaataaatttcagatgatgaggtgggaggcatgggaggcagaaaccagaacattggactatcaattttctaatggtatgttttttttttctttttcttttttttttttattattnnnnttattattattattattttgtgtgtgtttttgaatgtatataatatccctatatattaatagcattgtgttggacctaattatactattttggttgggacatatttgtcataaatagaaaaggtaagcgacaaaactgtgaacctaactagtggacaaaaaatgtacaattgaaagatacatgactatattaccgcgttggatatctaaaactaatcattcttattggatttcaaaaaaaaaaaaaaatcattcttatttaaagttaattttgtctattttttttttaaaaaaataattttatctaatttacctacaaccaaatattatgatttttttttttttaatttatttattcatttgtgagaagcacgtattagttaaataatatatatttaaaaaattttacaatacacttttttaaaataagtgtactgatgcatatttatttatttcggtatctataagaatatttatttcaatttttttttatggtcgtatacgttgttatttaagacatctgataaaattttgataaatttgaaaaaaatttaacagtcgaaaataggattcaaagagtgttgcatgcttgacttttttattttatacatgtgaaatagacggttttgacattaatttctacattaaaaagtatttcgaattttcttaaaattttgcaaaatattttaaacaattataacgtacacactatgaaaaaaaaattgtactaaaaaactaatatagatgtgaaaacagcaatcagtatacttattttagtagagtgcattgtgaaaacactctatatgttattattagatattattcactatgagttagtgtctcattttttaaaaaataattattaaaataaaatgtaatatttttaataaatttcaattaaattcatagatctaattactaaaattttaaaatgtaagttaattatattaataacataattatattaataatagtataataatatgaacgttattcgtaattgcatcctctttcattaaacaaacttttgataagaataattagacacatgcattaaggttaaatttaattaagatgaataaatatataaaaataagaatgagaataattggaataaaatagtataaaatttaaattttataacagaaaaaattattaattttttattggaatgattttttcttctatttcaaaagaaaaaagttatttcatgcactaaaattataaaaaagtcattccattgaaatgactcttctagtattttaaaatgtaacattaaataaatggaatgtattaaaaattgattcatttccattgtatttctttatattacctccaattaaacacattacacatcctcaattttagagcatgcccaacagaaagagttaaactaacttatttgctaaagttttaaagaattgtgttaaaatttatatccataagtaaggtaaatcaagatctaaaatagcttacgactatctcttgagttttacgtagctcaataaataatggagaattaaacatattttatataggataaataggggcataagtactcaaa

SEQ ID NO: 111192 - DNA, 1563 bp, Cannabis sativa
  modified_base (76)..(79): a, c, t, g, unknown or other
tgggtcatgaagaaggaggctctcctccgttttttttttttttttttccggtatttttgtttttttgttttttttnnnntttttttttttttgtatttgtgaaataatcccacttaattttgtattagcccaacataccttggtaccgactctgaatcatcatcaactttatcagcttccctcaatgcccatataaagtttacaccacttagctctaaaccaacagcaatctcattaacctcttcttctgaaaaatcagttaatgttccaaaagaaacatacaacacactatttggttcttgtttctccaaccactcaaatagccacttgtcttgatccttaatctccttactactaattgttgtcattttgtgtaaaggtccaattgcccacatcttcttatccaaaccaatttcattcactaaacgttgtaaaaaaataccttcaataattctacaactgttgaaaatatccccagcttgaaaattcaactcttgtaactgtttatttataaactcaatcaccacagttgggaaacaagatacccaagacggtatatgctttatagggagaacggtgtcgttttgtctcattaaggaaacacacttgtatgtgtagaaagaaaaaagagagccacagttaacagaatatgcttctccgtttggtatattagcgacatcttttactaccgaagtcattaaaacatcgtgaataacgacaagtcgttttgtggattgagatagtgaatggagaagattagaaactggtttgtggagttgggttaaggcttcgaagcatggaattaaggtattgggaaattttgttttggaagaagtaggtggtggaaattgaagtgggtagggatggaattggatttgggttagttggtgaagtgggtttggggctcgagacttgatttgtgagttgtgaagagttgaggtaatgtagtgggttgggattttgtatgaggagattatatgggcaaattgaagaaggtagttgagatggctttgagctaggaatggaaccattaacaccacaactggtgatgatgatgaagaagaagaagcaatggtggtagtctccattgattttttcttggtgaggttaagagatgataagatttgctttttataaattgttaagttcccaccaaataattgttttgcctgtatagcacgttgataaaggtgcttttttacttaggacaaatgataatgtcccatgtttattgtacaaaagaaaaaattagaaatgagtgattgcactccactcaagttatatcactctctcaagatttcaaaccactatttttagattctttcatcaaaagaataacttcaatgttttaaacgacacatcaacatgaactaagtcccactcttattaagggtgttcatcaaaccgctcaaatcgttcacactgcaaaaaaaaaagtgatttgaaattttttacggtgcggtcgcggtttgaatttttcctaaaccgcgcagtgcggtacgatttacagttttgaattgttaatatgcagtttaaactgcaccacaccgtacattataaaaa

SEQ ID NO: 111193 - DNA, 2197 bp, Cannabis sativa
gaggtatttcgatccttattcataatatatatatgtttgatttaattccgcattttatacataaacatatatatttcagtttatacatataaatgtctaacatgaagtatatgacccagacccaaattttagtaaattatatttttatataaaaatatttaaataattttaattttccccataaaattagtttttagtatttttgtccctaataaaaattatactttttatttttgtatattcttacatatttttcatatttattctcataaaatttatattttcatctataaccctatagaatttataattttttagtatcttttgttaatatcctttttaaaaaataataaaagaaaaaataatttatggcataaatacttaaatttaatttttagttgcaaataaatacataagtttaatttttaacagtaataatatctataagttatatttctagaactccgcaagtacctaaccgttaaatattaagtcattgaatgcacgtatcattttcttattaatatatttgaagtaatttttttaaaaataataaaaatttaatgattttggactaatcaataattgctacatgacaatttatttaaccggatactattatagaagtttcaaaattataacttaagtaatattaccgctaataaaagaaattgctctaaaaataatgaaacacattattaatatctttgtccccataaatttaatttttaatatttttgtccaaattaacaagaagtactagacaagtaggaaaattctaattaaatccattattttttttttctctctcgtttccccacgtcccaaaggctatatataaatctatcaaaaacttaggattctcattatattagtagttattagtacactacacactacacatgatcaccacctcatgatcatgaacatgaatccttggatttcgatatatcgagagccccctaatgaaaagttgaaaaccatagagatatagacacatattactacaatatgcatgtgacttgttttgttttccaataagagagcatgcacacaaatttcacacccctattatatataatctatggaagggaattatggctttctcttatggcttcttggggttggaattttgctcaaaaaaaaaaaatgaaccctataaatagtattgatcatataatgtgaggtaggggacaagtcgtataaagacatggaagaaacttcgacacattacctaacataataacttatgtacacatgtgtggctttatttatcccaacgtctttgtctatttgctaatggacacattgctaaataattggccttctattgcggctcttccgcttaaatattatacccaatacccatgtgatcataaaatatatacatggatatatactactctctactcatcctactctcaagtaaaaataatataattaatggatccaaaatattactatatatagtatagttttatcttcgtttgtctagcttaattttgacaagtatcattaattatttatgtggtgttgttaattatattataatcaactataaactagggctagcgattataataagtctttttttttgttagtgaacaatttcattaaacagatcagaagggacgtacaaatggagagacaataagttatttgtatattattcatatgttagttatcaatttagtatctaagtaaattattagactattaatcaattaaaaagttactaccgaaacttaatcaaattcgtttctttttcttcttttttttttttttttcactaacacaattttatctctgtcatttttctaatagaataggtcggttagggtttttttggtaagatctttgttttaataaaggttataaaattacttttttctataaaaagaataagaaaaggatacagataaaatttatgacatggaaattagttaaactaatataaaattaactattgagaaatttaatcaagctctcaagcaatgccctagatatcacatcccactttttttttttttaaagttaaaataaattagtatattcacagaaaaaatatatatatataataggaaataaattatttattggaaaaagttgtgctcatgttttttagtggtgaaataagcagagaaacaatattctgtatttttataaaaaaaaattgcaaaaatataaaaaaaaaaaa

SEQ ID NO: 111194 - DNA, 4493 bp, Cannabis sativa
  modified_base (42)..(45): a, c, t, g, unknown or other
accttttagtcacaacctaggaatcatgatttataattagtnnnnattttttcacttttagtcacaagttttattgtgactaaaagtaagatttttgtagtgtttataggtggccccatacgattagttagcgtccccttaaagtttttgtcttaaattttataagacctaatacttaattacaccaataacagtatgacaccgagtaataaggtactagacaccattgataccttttagcatttttaatttgaactatgtcattatttttgctctcattaataaaaatttaaatgttcaactcaatataacacctagcataaagctaaaaacttaaaatgtcacatattaatttaacgtcttcataatttccttattaattatttaacaaggaagtaatagttagtagataagctttatttcttaccccacatataaaagtcaaagcatcattggttagtttcatttctaaaactataattaattaacctacaaggaaaattatatcataattactttgatgtatgacaaaaaaattacttttatatataagaacaaattttatctgctattataaatttgtcatttctaacaatagtgagtcgcaaatccaagatttatagacaatccaaaatttataaatataaatataaataccaacccaatctttagtttccatgaccttctttcctttatattttgtaaaagtttcgttcattatcatgatatcatattttgcatccttatttatgtataaatcattttatttataaatataaatgtttgagaatattatatagaataaatacggttttttctttttgcttttgtctcagctacttacttctaaaaaaaaaattatttattaggaaatttctttctccaactatttcttcaaaccactatttttcttcttattttcttattccacattttttattttttaaatattaatatagtaaaatgattataattattaattttatttttagcatctttagattgacaaaaatattttataaattgattcgtaatttcagttgaattgtattttttatttttatactgtatgttgttaaataatttatataaggtatggaaagttaataaaatttctatatttagaaagtttatcataaaggtaagtttagtaaataaattaatttctgtctttccagctatgtaaataagatcatataggagtttcctatttggtttgatcggattaagagaagaaaaccgaaacaagactttccttttttatgaaaggaaagtcgcacttattgctcacgattttataggtacaggagttgaaatttcttggttgattgaagatcttttttaggaaagtctcttgtgagttgtggtcttgttcagaccgtgaatgagttgtcaataaagtgtatattgattataaatataccttatatcaactagatttagtatctttttcacatctttgtatttcattcacatcttgtaagaaagagtatctttattttgtagtctttctctgtgcttatgtattttgtattattttgagtctgtaatcaagtctacaaaagaagaagaacaacagtgatctaacaccgtactagattagttacattatcgtatttttttaatgtgcactcctttcctaatcgaagagtttgtaaaaaaagtgaataattaaaactttcataaataaacttaaacttaaataaatatatacaaatacatattccgggatcccattaaaaagttaaatctgtatacaaaacatgtttatacaaaatttttcgcctagcgtctatcaaaataaaggcctaatagtcccgaaaatctgaaaaaattcagatttatccatcttgatatgtacaatcttcatctagcccaaactcactactgttcagcctttgccttgcctttacctgcacatttaaacaatatctgtgagtcaatagactgagtgaaaaaagcataaacataaatatataactagatcataactaggtgcccatacacttaatcacgatcgtatcccgcatccaacacgtactaagtttggaacgtctgtacgacagtacaatcgaccgtaatattaacatatactcaacactctaattataccaatgtgatagcatcaatccgcactttgccaaatatatatccgtcagtattcggtgcaactctatgtacataaatactgctcttattgatatgttacctaataggcaactatgaaacatgtacactaaatatgtaagcatgcatattattatattagtcttacctcgattttgaattcaggtgtgacagtcaacctgagtggaaactgttgctcaacgatttaaggtcctaagtcacaatttacataaaattggtaagtgactcgctaaatcattttttagggacttaaactcaaaactaaaagttcatctatagatagatagtgtggcaataacttaaatatcgataaaacgtgaaaaactacgctctaaaatttgaaaaaattcggtgaaccgaaaccctaaacggtgaaccatttgctggggtcttgtttggagaaacagttcagcatttctagaaaaatgatggactatttttctacaaaaaacttcacccaaagctcaatactacaccaaactttttataactctcctattcacctagtaaagacatatacaacatattctaaccaaaaataatatcatcaaagcaccgaattcaatttcaccattattgagctaagtttgagattaaaatctcaaacctagctcaaacctaaccacagctacaaaagccactcaactccaactcaaacaaactcaatactaccatagaaaacaactcctaaacattccaaacttggacaaaaaggatatcttagaattgcatgcttaaacttaactttttcttaaaaattcaaagagaaaaatgaacttagtcttaccttggaatatcgcttcactaaccacctgaaacccttgttgaaattccttgtttttagtctgaaaatagtgaaaaatctataatttttcccttggtttgtttgggccgaacaagagagaaagaaggagagagagagagagaatggtttatcttgattttaggataactctaattttttgtttatctttaatcactaaatattcatcagaaattaactaaggaatttactagaatcccactaaaaacaatattcaacacttttatggcaaataacaaattttcccttacttaaccctgaagcaacctaaataatctaaaagtaaaatggtccaaccaaaacttcgattaaatctcagcattccaaattttgaactatcataccttgtaaattctaagatactcaaccatattcaagtggctctaatggccaaaacatcgtattccactaatactgggcataaaatatggaaaacatgaaattttatatataacatgcataatgcacttgaaatttaaatatatctccctaattgagaaattattaatctaaagctaatttttgacaataagctctaattatctgctaatttccataataaagttaagcaattattacaagtgctacattcaggagaaggttctacaagctttcaggagatagattttcaagtcttacctcgagaagaagcaagcactcttcaaggagatcgaagggagtttgagcacttgaagtttcaacaaaattcgattagaagatgaaatatatcaagcttgtggcatacaataagagggagtatatctatgtataagtcaattactttatatttttgagatctccatgcgtgaccccgcagactagtaacaatctataaggattgttgataccacatacaaaaaccttgtgtatttatatttttctgcactgtttgttttctagttttattttgtagttatagagttttgttccttagttacaaaatagctgttttagtaccatattattattttgcatttaattaattgattaattaaataataaattaataatattaaaatacagaatttcaattggtatcatagcaagttaataaactcttagttagatttagagatttgtattccatttaattctttttttgtgtgagatgtctttgtttgtagaaggaagctccattactcgaccacccttgtcgaataactcgaattatccatattggaagatcaaaatgagagcgttcatcaaataacaaaatgaaaaggcatggagggatatattttcaggttggtctccacctactgaagtggatgatgaaggtaatactaaggtaaaacctgaacttaagtggacttcggatgataaggttcccttgcctagtacctttaattttactttattgtccatttgtatctcatggttaccctttgactcttcaaaggtcttcaacaatgatttgtcataagtgacatgaacggtgtattgggttttgtgccctaaataaaacccatttcaatataatcatatttactaattaataaagatcagaaatcacattttatgt

SEQ ID NO: 111195 - DNA, 3342 bp, Cannabis sativa
gacccacacccacacacacaaacacatggctcgcatgtgagccctcgaacagcacacacacacgaacacggacagagacacacgcacacacacacacacgcatggctcacatacgagccctcgactcgcacacatgcacgcggacacacacacgagcacaactcacggggttggcctgggatcctcttgaatgtatcccaaggcctgctagtatcgttggtgactttgagaaatgcacatcgagtgagtaggtgaatcgaatgcgccctcattaatccttgggttacgaggcaactaataccaagggttagcagtgctaattttcgaggttaacagcataatttaaattacaattagagaaaaaaaaatctagactcaatttgattctacatttgatatttcatgccaagcactcaataaggaatattcatgaatggttcaatttacttgagttactgtcattacttattttcttgaaaaaaatcacccattcaacattatctaaagttaaaaagtagtcatgtcaatcccatcacccgatcactgacctatgagaggctagagttcataagacataaatttaaaagtcattcctcaccccaaaggacaaaacaaagaaaattataaagaggaatggaaatttaccttgttcgcaggtttcacatttagaaatggtagagccgggaaaagtggttcctcatcgttgacttctttgagtggaggagcttgtccactaaggagatattcactgaaaactaaacctgttacagcagcaagtatgaaataagtctagaacgctcacaagattttaatatcatatctctacaaaatatgtagacatcaaagacaaccacaaaggtgggtatcggtatgatgatggaaacacaattttactaaatctgcaacatttgaataattatccagtgcaaacttcaaaaatctgcaacattcattatggttactaaagattgattcaaatagtgcacttagtaaatacaaccagattataacactaagtatggtacaaataacgtataatagacagagtgtacaacgtcacaacacaaccaaaaacattttgtaggaataattagttagacacaagagaggaaaatacttgcacggtaaggatttaaagtccgtatttgaatgcattgatatgacttcagattgcagtacatgtggacaaacgtcaccacacaaaatgaaacaagggaaagtgatgtagaggaccctacgcagttagccaatcctataccaagcccaattccaatggacttgctcaccattccctgggcttcaccctttgcaatcacctacagtaagaagagataaactatacttaatcagcaagatgatgacttgtcaaaaatgaccttgtagaatgtaacaattgcgtagaaatggacataaaaggattttcgccctttgtaaaatcagtcacacttagaaaccaagctttaattagcaaaaaaaactgcatttaacctctgcaaagttcctttgagcagcaaagccagcatagaagcaactccttgtggcagcctgcaaataataacttcagaatttagacaacaatacaacactgtagtgggcactaaaaaaagtccaatgtctaaacagacaccttcttttatagcaggacagcacagtggtttcattacaggaaataacaaattgtagcactaattaagatcactactttaagaaatattcactcgaatataaagttctaaaaagtgaaaaaaggaagaagaaaaaaaaaacttacaataaagttattccattactaaagcttcgacagattaaagaagcattcaaaacatgaattgggtatctaatttatgaaagttacaataaagagcaactccatcgattgggctaaataacaaatactgcagttgactcttcttggtcttttgtctgcacttgtactatttagctagaaatctagaagataaaataccatatactaaaacaagtgaagagtttgcaaacctacttgaatcaatgcagcagccgagcgccctgccccagcagcagccccaattgcaacaaaaagatgaggaaatgcaggagtgaacatctccaatccaaaggcagcattttccataaaatctgcaaacaatctccacccttttggattcacatcaaaatgccgtccatattttgatagcatgatcttgctgagatacccaattccatccttaagcacccaattgatcgccgcagcagtaggaatagctcctttacccaatccaacagcataaagcaaagcctatattaatatataacaaagcataaacaaaccaataagagaaaaagctcaaaaattgtgcataaagaacgcagcttttcgattacctgagtggcaagtacaccactgatttggctagcgatgccttgtactcctctccagagtgaatagtctaaataatcactactcacgctttcaggaaaaccttctgggagcatcaaacgcataacgatctctctgcactgattccacaagcgggcaaccgagaaagaagacagcaatgaagaagatgaaccaagtcccgagtctaaaacgaaacaatcctcataaacattgggaacaagcatagtccacttgccccccttcacttcccagactaacccagattctgagtccgaagaacgagccgtggtagttcttgccagcgccgaagccaacccaaaatgacagaaggagcacgctgccgagcataagaagatagagaaaaagaggtaatggcggtgattgtgattaggcccagaagagccactaccctcctcgtcgtgccaacctccgccaccactgttgtcattgtttccatttcttccacctccacccccacccccatcaccaccgccacattcaatctctacattaatgagaggaagagatagagagcgccatctattatggttccctctgactactcgaatcggtgaagatgttaaacgctttaaatgaagtctacgaccttgaaaagccatggcggaacatgacgacgcttgagacgactttacactcgccggcagcggcggcgatgagacggggcttgggcatgggaaattcaatgtaaggggcctgcaagcgcaccccatttcttaacctcacctttttcacttcctatatggctccgtacattagtattcagctttgctccgaagaaactcgagttgtcctatcgaacgtgccaatcacgtgagactgtaggacagcttttaaaaatctgtttttttagagatttttttttttttttttttgaaagaaacatgtgttacaacacacctaaaaggaaggtagaggaccattccaaattaactcattatcta

SEQ ID NO: 111196 - DNA, 1980 bp, Cannabis sativa
aatgtcaaaactggggagaattttttcctgacttcatggaatagcaatagtgatccttcagttggaaaattcacagttgaaatatcaaaacagaaacctccagaagcaatcatttggataaacggatcagagagaaaaccacgctggagaagtggtccatgggctaagagtaagttctctggtataccagagatgaataccttttatcgaagttatttcaatctagtagaagaggcagaacaaggaacgacacgtcttcgtttcaattgggactacaacaactctacagtcctaaatatgttcctcacctctgaaggtgttgtaaacattgtaggaaaagaaagcgatgaaagtggctggtggtacaaggactgggaggcacccgagactccgtgcgatgtatatggagtttgtggtccttttggggtatgcaaagactctcaacctcccatttgtgagtgtttgaaaggatttggaccgaaatcgtttgaagagtggagcaaaggaaactggactagaggctgcgagagacgcagcccattactttgcgacaaaaatactagtggcttagctaattcccagagtggtaaaaaagatggattttcgaagatagacaatgtgaaactacccgatttttacgaatttgtggacccagtagagcttgatcgtgctgatagggagagctgtcaaataaggtgtttaaataattgttcttgcatagcttatgcatatgtggataatataggatgtttggtctggtctcaaggccttattgatatcgagtggttttcagatggtggtgaagatcttttctttcgtcttgctcactcggagctaggtgagaccaaagttgctaccttcgaaagttatacaatttgaactgttttctcctttttgtctttgctaaattcaatgtgtttaactaattgttcagttggaggagataaagttaagaacataatcatcagcctttcagttatttctagtgttgggattatagttgtcatagtgctatgtttgctaagaaggagagctagacgacagggtaagaaaagagtctcagattgaatataacctttcattgtatctctttctcaacacaatcataatcagatagaatctgatttagaaattttgtttcaatgttctgaatgctgaaatgctttagttactgacacaaataatgaaattataaaaccaggaaacaaaaaggagatcacagagcgcattgatttgatacgaaatgacaacttgaataatcttcaattttcaaaacagcctgacacctccgatcttcctacttttgacttggggaccattttacatgtcacaaacaacttcagtccaacaaacaagcttggacaaggaggatatggctctgtttataaggttgttgcagtttttttcttcatgataaactaattaataatcactattaaaatttctttgcttacaaatctgagtctatctgcaggggaaattgcaggatgggaaggaaatagcagttaaaaggctttctagtagctcaggacaaggcacagaagagttcaagaatgaattgatattgatctcaaaactccaacacagaaatcttgttaggctcttgggttgctgcattgagaaagaagagagaatactagtttatgagttaatgcccaacaaaagcttggacaactacatatttggtatactatactttctattttgatctatatttcttgcctaaaattgaaaattttcaagggaaacttgttatttgtttttaaaagttgctagcaaattaaaaaaaaaacaagagggattaatactagcacaaaacagctagaaaacaaccacaaactccttgtttagtttttatgatagttctgctaaaaaaaaatgacgttggatatgatacagaaaataatacatcaccgattaatctttcactggtttcatgaactagatccaagaggaagagaacagctgaattgggatgca

SEQ ID NO: 111197 - DNA, 3208 bp, Cannabis sativa
tacccacttttttttgagtggattgcctaatataccttcactctctacttaaatattgcatataatttacataacctaaagggtctaatggtaacaccattaatagaagtgtgtatatcttaaaaaaataagaaaaatgaagataaaaattaaaacaagtaaagtaaaatgggtacacaatctaatttcctccaaaacctgtgtatatgctaggtgactgtccttcctagagggtccgcccgttgtcttgtcttggtgctgtatttctcttatatatatgatgacaaaccacaaactacgcttattacttataatccaaacacaaatcgaaatcaaataatctcccaatctctctctctctctcttccccaagaaaaataatgggtgcttgcttaagcttctcaatctcatcctccgaatcagttcattattacgaagacaccaacaaagccaacatcatctccatcaatggggatttacgccaatacccaactccagttatagtcgcccatgtccttgatgctgaagcctcttcttcatcttcatcttcttctgatctcttcatctgtaactcggacgctctatacttcgaccagcaaattccagcgatggaattgcaagaacaccttcacccaaaccaaatctatttcgttctccacaaatcaagaacagaacaaccactctctgcctctgatatggccacactcgctcttaaagccactcaagcattagatcttaataaaaattcatcatcatcttcatcctccaccaagcgccaccgccgccgccaccgccgacgtaagtattctcgcattacgcatcatgacggtactactactacttcatcagatgatgaaattagcaaggaaacgacggagaccgcgatccagttcgatcaggactattacttgaccatagcaccttcgaagaagaagatgatgacgaaagaaccgttggggatatccagaacgggatccgttagaaggttgcagagattgacttctaaaagagccaagatggctgttcgttcttttcggctcaaactcacaaccatctatgaaggtactatcctaatttagttacatatcatcctcaggccggacttgaaatttagtggtattttttaaaattagtaaacaaaatgtttaattttaaaaagaaaaacaaatgtttttggatccgtaaactaggtgggttttaggcaaagcctagtccgccgatgtcggctgcatatcatccatcatcatcatcaagcttcaaccttcaagcttcgtacgtacgttatggtcttaatttcttccatttttatgtgttaattattcttttattaattaattgtaattaagcttttgtaagcaaaagatcgatacagattgcgtggtatatatatatatacatatggtttatttgaattttgatagtagtagtgtaggtattgattattatttacttctactactaattaatgatcatgtataattactcagttttgtcttaattaatattaattatcttattacgaatatgtatagtctttacacattaattcattctcaaacaaatgcttaattaatattgtgtcatatatattgataagattaatttcgatacgatacaaagaatcagaaaagtttgaatttcaaaccagattaatttgtcaaattgacatcataataaaaaacaaaaatggtaatatcatttatatatataagagaaatatatgaagtaattattagaatgtaatatatattaaaaaacattaatttgctcgcataatatatatatatatttatagagttattgtcgtgaggtcatatataacttttgtcttcacccattgaaaagtctctgttttttatatggagaatgataattttttttataaatatatataaccatctacattataaataattaattatttagaatctcttacaaatttttcaaatatttagaacataataattattgctctttctttcgatactgttaaaatttgacgcgcggatcttttccctagccatcagtttttgaattttgtaatgatattttgatccgtgtttatggaaatgtttcgttgagaaaaaaaaatctctttatttatatacataaaagagctccaaatcaacttatttaggggcaaatgaaataggcttaaaaacaacactgcgatggaaaattttagagtagtagtgtagtagtagtatatattcatataccaaaaaaaaaaaaaagttatatattgaagtttttttggacactattaattatttgctatttaataaatgaaatatctatcataactaccatatataaaaataaataaataaataatgttataatttattttaatatcagtgaatttatttcgtagcttaaggcaaaaaggcattcgaacgcggtttaataaattttgacgtctaccggaatggaccaaataaaaataatatagtttataaaaaaaaaggtcaaataatataatggaaagcaatggacgtacttttttttaatgaaaaataaaaagaaaaaagaaagtcaaatatagttattttacattattttataaataatatgtggttcatatttggtgcttaatttgttgatatcagtggtttcacattctaatagatatatttgattttcattatataatatctcaatcacatcatcagactttcctcttgtaaatatgcctacaacataataatgataatattaaaatttcaaacccattaattaactatgttaattaatccaattcataattaattaatattatgttaagagtctacatatatatagagtgctctatcgcattcttatcattcggtttttcaatggttgccaaatttggcaacatcaaaattttagggttgattttggttcataattatttttggggttatttaaagcaatccaatattatgcataacatattatccattccattgaataaatactccacttctttaattactctacacttaaaacaacaacatatttttttaatcaagaaagaaaaaatttcattaatcacaagcaaagatacaaacaaatacaacacaaagggctcaacaaaacacactagccaccaacaacatattaaactagataacgtaaccgcgcgttgcgcggtcctttcaataattgacaaaaaaaaatatataattttattaatttataattaattttatataagtttaaagta

SEQ ID NO: 111198 - DNA, 6366 bp, Cannabis sativa
cgaggcagtccgaatcggtccgcctccggctcgattgagttacctcagtgcctcgtcgattcttgaagccgcgactcgtacaggcgcgcaggtgagcttctcggaatatatttggaactgaagggtaggattggaattctggttttgacgtctttcccttatggtatgattaggctattcacccaggttatggttttctatcggaaagtgctgattttgctcaactctgtgagtccaaaggtctgatatttatagggcctcctgcctctgccattcggcaaatgggtgataaaaggtactttttgttcattttcaattgatgcaatcataactgattttctcttgtaataattgagaatttagtttcgttataatgcatggagtttgctgtgtaagcagtgcgtcgaagagaataatgggtgcagctggggtgccccttgtgcctggataccacggtaatgaacaagacgttgatacgatgaaactagaagcagacaagatagggtatccagttttgataaaacccactcatggcggtggaggaaaggtgtgtggctttttgctttcctcgtacaatgaattcaacattttgaaagatagaaggtgctattttcagtttccttttactttgttgtatggtttaagctatggccattctttattttgaactgatatgaatatgcccattacgtttcttttgctaagttaagaacatgttaaaggtagagcagttaatttgtgtcaaatggttttgatgtacttagaacctgtgtggtgaagaaagatatatccaagctaaccttacatgctcaagtattgtgttcttttatctcagagttatattcttatggtttagatatttctagggtatgagaatcgtgcagagtccagatgaatttgttgaatccttcctgggagcacaacgtgaggctgctgcttcatttggtgtaaacacaatattgctggagaaatatataacgcagccaaggcacatagaagtccaggttagtttgattaatattttttaatttactatgcagtgcacattcccgaaagttagtttcacggtcttgcattcttatataaaatagctgggtttgttttttgtcggaagcattgtctgtattaaaacattttctgttggtaatatacagtagtatttgttacttttttttactacagatttttggggacaaaaatgggaacgttctacatttgtatgagagggattgcagtgtgcagagaagacaccagaaaataattgaagaagccccagctgtaatgatcaattcccaaattatgagctcatgtgtcatgtttcttctattattttaatggaaaatctttttgtgcagccaaatatcactgatgaattccggttccacttgggtcaagctgctgtatctgctgcaaaggtttgtgttcttaacattttcttttactgctacatgctattactatttcaaccagtgtagctattgaacatttttatctgatataaaaggcagttggttatcacaatgctggcactgtggagtttatagttgatactacttccgggcaattttatttcatggagatgaacacacgtcttcaggttattttagtcaacaaccttttctgaagtcatttttattgaatcttcaaaggtgacataactataattgagtgtattcaattgtaggttgagcatcctgtgactgagatgattgttggtcaagatttggtagagtggcaaattcgtgtagcaaatggagaacctctcccaattagtcagtctgaggttccgttgtcaggtgattttctttaatcctgcaaaatgcgctaaagacatcattttcagcccacctttgcttaatcattatgttaagaatcatttgaactttggtacgaagtctttgatacaggtttttctattgatatacgccttatgacagtttcctgtggatggttgtgttgtgaagctcttatttatcccaagatgttaaactttggtttttataaatgataacaggccatgcctttgaagccagaatatatgctgaaaatgtaccaaaaggatttcttcctgcaactggagttcttcatcactatcatcacgttccagtcacatcaacaggtttgtgacattacagtacccatgtcacttgtatatagtaatatcagcattttaaacccctatattattgagctccaaacaatattatttcatagccgtgttttttttgttaactgatgttagtcctacgtttaattgtatgaattttcgtcattttttcattatgatgtgttccttttattgatacggtttctgcagttcgagttgaaacaggagttcaagaaggtgacactgttagtatgcattatgatccaatgattgctaagcttgtagtatggggagaaaatagagcagctgcattggttaaattaaaagattgtttatcaaagtttcaggtatatcttttctagactagcaaagacatcatagttattaagcttttttctccagtcagatattctgttatacttattggataaccccaaaaagctagctcaaatggtcatataagcggtttgctctcagattagggttaggtggggatcctagttttgaataaaaaagaatttataaatgtttggtgaatgctcaggtaaagttcgttttcagacatgtctagagtaggtttatcactaagtacaatagttttcttttatacaagtaattatttatttattttaaataaataatacctaatgattcctataattattatagataatacatgttggatcactgcgcattgatatttcatatttattttgttgttttgttcatcctctctgttcagtgtgatactattgacacatatttaaaaaggctgctgtattcagtgtcaaatttcatatgaaattaatggttattttctcccgcaggttgcaggcttaccaactaacattaattttcttcaaaaacttgccaatcattgggcatttgaagaaggaaaagtagaaacccattttattgaacactacaaagatgacctcttcattaattccagtgattcagttttagaaaaacaagcatatgatgctgcaagatttggtgcaactttggtagctgcatgtatagttgagaatgagcactctacacttaaagaaaatcttactggtaggtttgatctcaagctttgggttgcaatgcaagtccttttgtagaagactataagtacttacgtatgatgttacattcagggggaaatggtttactctctatatggtactcttctccaccttacagaatcaatcattgtgcaagtagtacaatggagcttgagtgggaaaatgagtatgatatcagcagctcaaggttattgacactttcacttacttgtaaaccagatggaaggtatctgattgaggtagacttcagcttcttattgtagtgaaaaagttatttaattggccattgttgtatctgttagttagtatgttcaattacaggtagcattttcatttgaacttttttttcttacaagtctctgctccatgatatacagacaaaaggaaacagtaatcctggtgtggaaatcaaagcaggaaaactgagtaaacatgaattcagagttgaagttgatggtgtaatcatggatgttcagttagcagtttacacaaaggtatgccagcttttatgttatcctgtattattttttaggcctctccccacccactagaataatgaatagccttgtgtatgatttttatatgtcttgttccttcagttgaaattgtggttccactatttataattcaaatttggatcccaggaccagaccaagcatattcatatatggcacggttcacatcatcatcatttcaaacagaaactgggccttgaattgtctgacgaagatgaatctcaacataagaccaactttgaaacatcgtctcatccacaaggaactgctgtggcacccatggctggtttggtggttaaggtgcttgtaaaggatgggacaaaagtagagggagggcagccaatattagtgttagaggcaatgaagatggaggtttgtacaagatccaggattctagttgcgtttagctttagaatttcatttctctatacaggaatttaatgtctattttttcattttcttcttaaagcatgttgtaaaggcacctttaactgggtacgtccacgggcttcaagtaacagctgggcagcaggtttctgatggcagtgctctctttagaatcaaggttagttgttttgcaactcgctatagttcaattgtggatttttgctttatatgaaaaacttggttgcatatttctccctatgatgcatgaaacttggcttggttgtgtattatatcatcatgtgcaattagtttctcttaaactttgaaaatagatacgatcaatatatgatttcctatgaagaaagagatgtgagaagatttaagtctaatataacataacatgaatgagcaggaggagcagcagcagagcacttgatgatcctcacagttgtagattcacttgaataaggaattgttcttgaataacgcaacgttgtctgaataaagctgtaaatcgcataaaaaatgggtaactcaactctaaaatgtaaagcatttactaattgtattttggtatatgtaacagaaactcatgtatattaatctgctggaattattaaaagataaataatacatatttttgtgttcgttagttacaagattaatgctgagcagttcggtattcttgacctaaaatagtcttgtttctttgagattttttgttccaaccaaaatatgggagaatttctcacacccaaaaatggtggatatctcattttttttttactagttcaattccatcccaattacacattacaggctgatggacctaactagggttcattgactagttagaggagtcttttatttgcctaattacgactgtttatacaatttggaatttgttgttttgatcctaatctattcagaccaaaccactggattaaccgagttgtttgactttatgattcaaccatagttttagaattctcactaacggactaatcaaactgcctattatatatcttactataaatgtatattgtaatggtatttcttaggttttaacagaattattatataaatgtctattgtaatggtatattttaggttttaacagaatttgttgtgcatgttaacagaatatgcttttcttatgatggaaactaatgtttgtttttatatctaacatacctatttgaaaagttagcaatgcttgtaatgaaattgaaaaggcatgaaagttagatcattcttaacaaattttttaaactctacattgattcatcaactaatctttttaatacgaaaaagtgaaccagatgaaaacgtgcaaatctgcaaaccttgaagtataaacatatgaaatttataattgtttataaaaatattactgttctgccatttgtagttgttttttttcccatctcttgatgtttttatatttcattaattagcatttttatttcaacagtatagagcttacatgtaaaagcaaacctttattatttttttctttctttttcatcacaataggttgtctgaaacaagaaccctaattgattcattatgaaaaaccgaagttaaatactaaacagaacacactaaagtcaccaggtgctaccaacaacacctagaataggaaacaagaaacaatgttgagccatcccacggcaaaggcaaatcaccgatacatccattaaaaaaaaaccttctaaaaactaaataaaaaaatatattcaaaccagacacaatagctacaaaatacttgatgaaacttacatataagtctaaataaaataaaataataaaatttaaaaatatagactaaaaattaagagaaaaatcaaccgaaaaattgaactgaaaataaaatggagaaagtaatctcaatatcgtgactgtgaagattgaagaatgatatactgcacttataatatgcattcggcttttaactaattatacatgcttcttttacataccataataaattatgatttttttttttcagtttaaaaatagtataaattttagagaaaaaaccgactttataatttaaaaatagatttatgacgcgtttactaaactgtaattaaaatcagaataatcaatgagagaaatgtatcggtttaaaatagaaaataataagaaacaatattttattatgatgtttactaaactgtcggaaagaaaccagaatcatattattttgtttacataactaagaaaggtaatcggaaatgttttaatttaacaaaattgccattattagaacatgtaatta

SEQ ID NO: 111199 - DNA, 4615 bp, Cannabis sativa
tgtgcccagtaaaaactcaagggtatttggctaggctctttgattctcacagtttgagttttacaaattcgtaatcttaatcataaagttgagtagatatactagcgttcctcataattgtcgtttttctctactaacattttctgtaatccgaattatactcatcaatttttgttaagacttttaaattgttggaattataaatttttgtctaattttactgataaaaatctgaataagtgaaaatttaagaaatataatttaataaatgttaaaagagcacatcttggtacattgataagtttagaagtataagttaatacaaaataatcctcaccatagtaaaattaaaaaaattagatgaaagtttttgaatttaatattttaaaaaataatcagtatttttaccaaatttataccagtaagttgtggtccttataataaactgttagttaataatatacaaattaaatactcacccattttacttcaatgaatgtaatatcataaaagatggaagtctcacgttaataaaaatttaggaatataatttagtaggggtgtaataaatttttgtaaatcgcctaattcgaacaacctgcttaaactaaattaagataatctgactaaaaatacaaattgaaaaacccatgaaaatataatctgcccaatttttttattaaacgggttgaaattttttatttttttaattaaatgggttgaatttaaagcgaacactcaacaatttaatatatatgaaagttagaaatataatttagtacaaagtttggaacaccatttggcacgacaacaatcgttacctaactaaaatggaacgaaattatacggaaatccttgaattaacattctttggggaaaaaatataaattagctttttgttttctttatttctttcaaaatgtgatatggttatgcttgatgaacagtcaattagaccaccacagcggcagtatggtcatccatgacgcagatgcagctccaagcatggaagcgttgcatgtctcttgctcaacgctgcgccaatatgagtcaactaaagcccattcactccatctttatcacccacggtctgcacctcgacaactacgccattagcaaactcgttaccttttctgcactctccgactccggcgacctctcatatgcgtctcgtctctttaatcatatcgagaaacccaattcgtatatttacaacacccttatcagagcctattcgcgcagttctaagcctcatttggctctgtgttacttcaagctcatgttaagaacatgcgacgaattagttatttgtgatcactgtacttttcattttgtccttcttgcctgcgttaatggcgtttggttaattgaaggaaagcaaattcataactgggttgtgaaaaatgggctgggtttgttggatggtcatgtgcagaccgcgcttattaggttgtatgcagagtgtaaggttatgggtgatgctagaaaggtgttcgatgaaattcctcaaagagatcaatttcagtggaatgttcttatgaatgggtatattcgatgcggtttcgcttctgaggctttaaaagctttccaatatatgttggcaattgggtttgagcctgatgagttttgtgtggttactgcactcatggcttgtaatcatttgggtgctctttggcaggggacgcgggtacatgagtacactaaggaaagaaaaggatttgaatccgatatcttcgttgggacggcgcttgttgatatgtatgccaagtgtggttgtctagacatggctgtggaagtctttgaaaacatgccaaaaaggaatgtgttctcttgggcagccataataggaggacttgcattacacgggcatgctaggaaagcaattcattgcttggaaaggatgcaaatggaggatggaatcaagcctgatggggttgttcttcttggagtgcttgtggcttgtactcatgcagggcttcaaaatgaaggccagcttttgttacacaacatgagaagtcagtatgggatttcgcctaaacatgagcactatagttgtgtggtggacttgctatgcagggcaggaaaaataagggaagcacatgagctcataagaaatatgcccatgaagccacttgcttctgtttggggtgctttactatgtggttgccgaattcataacaatgttgatcttgctgagcttgctgtcaaaaagcttctacagcttgaaaatggggataagacaggggaagatggagtctatgttcaattgtcaaacatttatttggctgcacaaagaagtgaagatgcagttaggatacgaaagatgattggcgatcggggaataaggaagacaccaggttggagtatgatagaagttgaaggaaagatgaatgagtttgtttcaggagatgttatccattcatgtcgattcgagatatgtatgatgctggatttactatcttctcatatggttaaggaccctttgtagagagtacaatgatggccaaagatgagtttacttgctctttttttcaaatacaaatatacatattgtacaccagaaattgtgtgaaaaataagtaaattttattcacattgaaggtctgagaaattgaagtgtaacatttccatcaattcccataacaacactcagaattttatatagctgttgaaaatcccattaatggaaaacactcatcctacaaatttctttctggttattggaaattagagtagtatattaagaagttgagtactatacagaactacagaacagagtacataaaggtatttgatgttgttgatcacgcctcaactcggattgaatgcgcaggatcacttttctacttcaaaactgcataaaaagaaaataagataaaaagaaatacacggatagaaccaataatatataatgtatatatatcttgaagagaagactaaccttcagataaggaagaagaaggaaccacaacaacatgcatatcaatattgttgggaggtagatgcaagcgaagaggataaagctgtccattcaatggattatgagaacatataacgacgtcgtttagtccagtatcattcttcaacctctgcttcaactcttctacaccactagtacccttaaacataaatgaaagctcttcttctccatcatcaatctcttcttttttgtttgacacacgatagtaaatcattctaccttcccctttcatcaccaatccactatcaaaatcaaaagaggacgactgcatagggcatatgaaccaaagatgtaaatatatacatacatttaaatatgttaaacagttaaaactatctatatgattctcaagtaaatatgttaaaggaaaaaatggtaacgattcaacctctgatcaaaaagatatatcttggttacgtttcatctcttcaacaagtttagtattattaccttcttatttctcctaggagaagcgatttcaattgtggggggagaatgaagagcttcaaccggggccgaccttggacgaggacggaaaggagacgggactcgaatctcaataacatccacatcccacaaaatccaatcctgcgttgaggttctatgaggaatgtcatgagtgatggagttgcgccacggcggcaaaccagtgttggcgcggaggaattggccgtatcgggtcttgagacgaacttgaaatccttctcttatgggttcccattcaagggatgaatccaaccttttgggaagattttgaataactttcttaccagtcattccaagaaggaaaggcatgtttgaggccattaagtatttaccataacagctctttaggcgtaaaacattggcctcttccaatagctcgacgctccacgtggcattccttaccaaaccattacgatcttgtacgacagattcttcatcttcatcggctaataggtacttgtcgtggtggctcctcagccgtaccatcctagcttttttgaaaagttccattataatgattaatacttaagctttgatttgatgatattaatgatttgcatgcatgcatgtatagaacaggacaatatcagaaacaaacaaaccttaattagtacatttaaatataatttgtgatacgaaatgaatggaaatgaagagaaggtgtttattaattatggtaaattttttctctacatttatcattaatatttatcttaaaaatatgctggtggtaggagtaacacgaagaggttttgataacaaattaagttagataaaacgttatatggaagctattttggttaattaattattattaatctataatttatttgatcgaattaactgaaatattatgatattatctgtataataattttgaaaaaatataaaaaacgagagacgtttatatagtcctttttcgttttctatctcaccttcaattaaacatattcgtttgcatagaattaagagtaaaaatcaaaattaccatatattttgtaaaaattagtgattacactatctgttttattaaagcaggtgcaaagaaataaaaatagttttattataacatttttagatcggactattattattatttttgtaaaaaatataaccatttttttatcataatacttttaaattggatta

SEQ ID NO: 111200 - DNA, 1381 bp, Cannabis sativa
tctctctctctctctctccagagaaaacaaccattttcttcaagcaattctcagggatttagcaagaattcaaggaaattttaagaattaagccaaggtaaagccctagtactcatttcttttaagttttagttagttcaagcttgcttttcgggaattggttatgttcaaaccctaagttttaaggggttgttttctgagctaattctgggttgattgttgtttatttgtgccggttttgtttgttgtggatggtgttgagcaagtttgagttcaagaactcaaacttggctcactaatggtgaatttatttgcatgttgttttagatacttttgggttgtgtgttatctttagaataccccaaattgatgttctgaaaagtttggtagcttctagttcaggtagaagcaagttttggtagcttttggttcaagcccttactgcccagaattaggtccctggtgtaagcttccttgaaggttagctttggcttagtaagcttccctgaaagttagcttccacatagcaagcttccctgaaggtgagcttccgtatttgtggggcttccatgcagggtttaccaagaaggtcaattttagtattttggccataacttttcacttgtgtgtctatttcagttgttctctataccgtttcaaagctcttgagaagctctatagcatgggttttattttagagcaaaataagtaggtagattggtgaaaaatccttgtttctatttgtgttttaaagaagtgttctagagtttacacttatcaattttatattgtgacatagggcctccgttcagcacgtgaatttccattaaggttgactagcacacttgaatcatgaaacgtggtaagattaacataagatatgtatatgtatatgtgtatgtatgtaaaatgcatgttgtattatataatttatatactaccaacactagtacaatagcggtacaaagtgcattggtacagtataatgttatgaattgatatcatagtggtgcaaccatagtgtcaggtcagtagtacgagcataatattgggtttgactagaatctaattcaataaagtatcaattgacgctatcatagcggtacaagcatagtagaaagtcggtagtacgagcatagtactgattaagagtaatatcatggtcaattgtacttttgggtattattaatgctatcaattgacgctatcatagcggtacgagcatagtaccaagccgacaacacaattataatgctagtagtggttgatatcatgatcgatagtatcaaatgttaagaacgttcttgatgcatctgaagccttgtaaataggtgtatgggcacctagacacaagtcggtattatgtgttgggttttatgcc

SEQ ID NO: 111201 - DNA, 13262 bp, Cannabis sativa
  modified_base (12475)..(12479): a, c, t, g, unknown or other
tatattcatttattatattttattgtttattataaaattttataataatcaattataattaatgaatcattttaaatttaagaaacaaaacataaggagctttttccttaaaaaaatacgaagcttttatgtacctgcttttttttttctctaaaaacaaaatatataattaattcatacacatatgtagagctttatttgttattttttttaaaaaagaaaaatagttatgatatagtgacgcgcaaggagtgttggtaaacatttacccagtttcccttggcgcgtcactataagttaatattttttttaaaaaaaacaaaattagagaaattgaatgatttaccctatagtgacacttcatatctttagtgactcaagttctaggacactaatactaaattttgagtctttttgtgtatgtcactaaaacttacccctaatcttttagtgacccacaatttttgtgcatgtcactaaaaggtaagtttgtggtagtgttttgggagataagtttatgacacgtggtgattgttggggtcatgggtgtattccgtgagctgtcagcagttaaaggataaaaaatcgaaggtacgacggtcgtggcacgcatgatgtgcctttaatgcatctgttgataacactaacactaatgtgggggatatagcccccactaacaaaaatatttccttttaaaaaattaaatgtaattttctttaatttgattatagacaaaaatgatagaaaagcccccacaaaattaaataaatctagtaagagtgattataatgtaaatataaatattttttaatgataaataagcccccacagagtaaaattttttagttcatcactgcatgtagggggcgcgtttcatggaaaatgttataatgatggtaggttgattgaaatgatccctctttaacgcatacggcactcgacgcagacaatgaagaaaaataaatgccctgagaaagttttgaatgttatttttcaacttcccatccgccagatcaaatcatacgttttggagagaagatatgtgccatttaattcaaattgcaaggatttgggccgaaataaatggactcttaaaaccattttttttttcgttttttaaccatctcaaaatttcaaaacctccatctttaatttcaaaccagagctttctattctagagaaaacttcaaccctgcaatcgtcttcagtggtgaatccaaaaagacttcgattgcttgatttagtactttgtaaacctcaacttagccaactttccaaacgtagagccattagaccttgaactgatccacccccagcctgacaagtatttcgatgctcaagccagctaaaatggcatgatcgactgggttcaatacacttgggaagatttccacgacaacctttcattccctactaccaagtaagtatgtcgatgctttgttgaatattttctatttcctatctatcatagaaatgctacttcaagctaggtcaaggatattttgtatgtgggaatggtgaaatgtcgcccgtagagttacatttctaggacaagattatgttgaatatttttttgcatatttttcaagattctgtaattagggttcgaaccaggcatgatgaaattttgagtgaatattaggtccgtccatcttctgtgcctcaacttggagtttttaggactaaaatggacttaatttctagaatttgctttagattttattaaggtaaattttccctgggttcccaatccatcacttcgagttgcccagcaaagagaggcttctgggagtgatgggtccgaaagggacctctcccagcaattttacgggaggacttccccaatgtccattttgtcatttggatattgggtgtccaattgcttggcctctcttttgctctttgtttttccagtgatggatttgaactaggaattccatatcgaagtggtggaaattgaaaaaaacacaacggttgccttcgtggaaggagtggccactgatgaagttctgatagaggctcatgttagaggacttcaacaggacattgccttggaggctatcgtagaggctactccgtccaaggtagttgcaaaatataaagggaaggggaaagccaaaaatccacctcccgcacaggtatataatgcttccatctgggatattgactaaaagatccacgtacaacttccgttcctacggtatgttggagatatacgccactaaagctgtacaatgcaacattttggggctaatgtggcgcaagttgtctatcgtagaagaatcgtctttagtgagcacagacgagttcagtgccataatttgggcctatatttcaagtgaagcacatcttcccctgaggacttatttcatgaagtctattgtgcaaattgagatagctcctttccagtttatacctctaacttacaagctttttgtcgcatggtatatcttctacaacatctttaagttcgaggtgcccattctggagttgattctgtacttatacgttgtgaaacctcaaccaattgtaagaaactggggttctacaagctagagaggtattccaatgctcattgccccaccagccatacattacactcccacaatctctgggagtattggttcttttcgactagtttccaattgaagagggtacctacccttcaactgagctttcaaattccaggtaaatattttggcctttccttctttcaaaatcttctctgttttagtttaagtgctaattgggcttttatgcttcttgtttataacaaagcctgtgcctcaaagcatttagacagaggaaataactaagaaggtagcccaatacaaggcctttactgaagcatagctgaaagttgaggtttggtcgccacaaaactgctccattaacatggtctaattgctggtttccaaagcatcaacaatgttagtggcaggggccaaagttaggcttcgaaagaggccaaggaggtgatagcttgtaacttggtcgaaatcatcatggaggccaccaaagaggataagctccttgaagctaatcggatgctacgccacctgaatcccatgacagaggaagatgagattctagaacaattttttgtggcatacccaaatgagggtgccctaggagccaacacttctagaagaggtaataaccctttcgtgtattttgtacccccatcctccatcacatatcttagatggatcaagggggactcgatagatatttcttgaacttagatcatcttaagtaccccatgaaggacttcatagacaaggtagatgaaattgttaggagtccaattaatccagagttgtaaacaaatactgttagattggaccccttctcgaacatgtccttccccaacctcagagagtatggaagcttcattggttgggaggacataatcttctttgcccgttgggaaccttatatatgctcactgaattgttgcacccacagacatactattttaggagatgttgctatatgctaactgtgattttgactttgctatttgaaggtttcatactaaccatctgattgatatgtttaccgatactccagaagaaaagatgatgaggtctttgagtgacaatatcacgaagtttctttccaagacggagggaactaaaggaaaatggaaggttaaggctagggcatctaggacctgtaaaccgaggcctccgtctacttcctcttcttttggggtccaggaaattcccctcctgtgaaggcatctgtgaaggccccaagttcccagcaataacaacaataccaatagcaacaacaacaacatcaatagaaacgccaacaacaagaataactaccacaataacaacaggcatccaaaacatcactccctaatctgcccaaggttactccatctcaaataagggccatcccacctttgaaaggaaaataatccacctccaatcaaccacaagggcaataaattgtcactaccttgcccaggatttcttctctaaatttcaggctgcctctgaagcctaccattcttagcaacaaaattttgaaaaaaaatgggagaggcagagcacaccttgaggcaacacaacaagaaggaacaaatagtgctccaaaaaagagttgacaccctttcttccatgaagaaggcaaagatccataagggaatccaaacttcttccctaggaccaatgattgacactgaagctcttagcaagtggatggtgcctaaggtagggagagaacttgcacctttttgccgtggagattctagaccaagtggtgcgtagtgtgagtgagctgaactaaaaaatgtgggcaatttatagtagtagtgatgctttcactttggctcaggctgtgaaacaaaaagtattaggggtaagctttgacttctcttgtattcatttttgttgttgtgtattgtcatcttatgttgtttcattgtgccatttgaccctgattgcagaaaggacttcaaaggaagtgggggccctagtcatatagttcaagtaggttcaagataagaaccaatccttttacactgataacaaacccttacttgctgaggttgacaaagcttaatctcaggccactgttgaggtgaactacgtcaaagcagacacagtggcttggataaatcacgtcaaaatcgagtgtaaggctgaggttgattgtgtagacaaagtggccagtgacaagtctctcaaactgtaacatgaatataaagccaaggctgaccaagaccataaggtagagttggaccagcttaaatctcaagtgtcttccctcactaatgagctttaccatgcgaaggaggagaaagatgaaatggatgctcacatgtcgctccaaaatatttcccaaaatgccaagctctaggaggtcaacactttgcaaaatgagattagtgagaaagatctagtgatctaaggcatgttgggaaatgtcgaggatctgaagaaggagagggattcactgaaagttaagcttgaaaaccggaacatagtcttgtaaagtgtccatttgactagtaatgcacacattgaaaccaaagaaaagttaaggaaggaagttgcacatcaaccagttactgatagaaaagcctttataaccatgttagccatgcatatgatcagggtgactgttgggcaatctatcaaggatgttgctgcacatattgccaaaatagaggctcaagcagaaaggtgccaccttcggttgcaggaaatgtcttactcgatgcttctgcatattttttggcataaggattctaccatactccaacatctcggaccagataaggaagaatatacccagagggtgaaggctatcaaattcgacacttattttgaggaattcggccttcatcacaatgatgatgaatttgtcaaggaattagctgaagatcttcaatcagagcattcagccgaggttgtagtttttgtagggaatgttgctcaagacctctaagaaatttatcaagataagcctgaagaccttccggctcttgcacaagataaatcgtaggatgcgcttctatttcaagctcaagtccaagtccaagagacttcttccgttccagaccaagtccaagataaaaccaaggcgtaattttatcttatagcttttttctttttaatcatgcattaatcatgttataactttgaagatagctttttcatttatgtatgcttgattttgtctgccatgctttggtttacttgttttctgcttttcttcgttcactacgctatttagtaggtttccttaggattttcaaagcttttggttccaatgataaaagcttgataccattagacttgttagtttatgaaattgcttgttgactcttggaagtgtgcgaactgaaaattccttttcttagatgtcaatattttcaaagttccttttgtggcacttatgaattttggcgagttaatcttagtctgagggaccactagctttttcctgaatcgccttatgaatcatagtgcttaactcccttccacgtgtttccagattagctgccttaagcagaatgttgtagcaatttttttgtcatttagatttagtgagggaaggggcaaagtgtgtaatagagtccaggcaaagtttcacttgaggaaacaaagctggacatgtattaacgtgtaggttaagcttcctaaatccaaagtgacaaagttggcttagtattacgataggttttccccaatttatgataagagagctgctggaagtgcaagggacttcaggcaaagcttctttttctcactccttgtagaaaacatatcaatatggttaacagattgaaccgacaatccaatagatttaaggtgatgtcccttctcacgggagaggctaaaaacatattgactatgctttttgtggagaccaagttgaaaatgtaatagacttcaagtgacacttccttccaggaaggaggttgaagatgtattaaaattcaagagatatttccactaaaactgaagatgaaacaaagttcaatatgcaacagacttcaagcgacacttccttcaaggaagaaggttgaagacctgttaaaatttaagagatatttccaaccaatagttttaataaaaattcaaagataaaatacaagtaaaaaacttaaatacaaataacaagtggacactgtatgtttttgagggcacatatctaggtacactacccccaagtgagctaagaagtttggacatctccaaattcttagtcacttgtttaaaacatagcttgtgtaggagacaataatgtgaattcttgtgtaaatttcttatatttttatttcattgtgtccacaggcttacatcaagaaataagatttacaaagaattacatataacttagaggaatgtcgagatgtggatacccctagcctattggtggtaacattgcaaatggtctgctttgcaggcatgagggatctctgatacctccattctcttgagttggtatgttccacttcccactttgtgttgtatctctaaggtccttccaagttaggtcctaagacccccactcaagataagatctccaacgccaaatgtacgactcttgaatttaacattgaattgttaggcaatcttgcattgctacatctttagttgaacttgtgactattcctagaactcttcaatcaaatataacagttcttggagcaaagactgattctgtgttggattgtaagtgtctcatctgtgagaggaaattatggtttctagtgggattactacttcacacccataagcaattgagtacggtgtgtgccccactgatgttctctctctctctatacctagaggacttgtggaagctcctccagccaatgggctttacaagcttggattttttttcttcaatgttatctttaagatcttattcatagctttgagttgtccatttccctatggtctggccaccgttgagaagctcttcaagattccaagttaaacataaaagtcagtgaagtgatcactgtcaaactgtgtcccattgttagagacaatcttgtgtggaagtccgaaacgacacatgttgttcttagaggtgactgtattcatgggctttgcctcaattagagaagtagtcaacaacaaccatggcataattgacaactttgttctcgatggggagggatcctactaagtcgattccttaaacaataaaaggccacggattattcatgaccatgatctctgttggtggcactcgtggaccttggcatatttttgaaactgttcacatttccagacattatgcaatccttcttcatcatgggccagaaatagccctaatagaggatcttcttggacaggcttggtccagaagtatagtctccttaaaaacctccatgaacctcgtggatgatagcacttatggcccagaagtatgatcatatattggtgagcctgatactagacctttcgggaaatatctttgtccatcaaaagcttacccaaacttaggaattggtggatggtccaatccaagaataagaattattagcgatggcatttacccctttgcattaatacttggagcttctaagtgtcctataggaaccactccgtactgtatgatctctaggtctgtggcaagttttgttagcatattcgtgaatgatttttggtctttagggacttagtggatgttgtagcttttgaaactttgcagcagatcctgggacatcatcacataggtataaattttttttgccttaattttatattctcaggatatttagtttaccaccaatagggaatcactgtgtacttcgatacattaggctcctacttccttagccaatcataatcctgctagcattgcttcattttttgctttattgttggaggtacgaaatttgaaacggagggcactctggagctgatgtccttacaaagaaagtagcataactcctagcccagctccctttttattcaacactccgtcaatgtagaatttccacaatggtaactccgggactggctcatccaggaggtcacttaatctaaaaaattccagtataaagttagctagggctttccctttgattaacacccacggctggtattggatgttaattggctaagttccatatcccattttcaatagcctactggatgactctaacttttgaagcacttggcggagatgatggttggtcagtaccttaatggggtgggcttagaagtagagattatctgcctagaggcaatcaataagcaaacattcaacttctcgatcatgggatacctagattctacaccaagtagtctttcgcttataaagtacactggtagaaagactcttccttcctctcgcactaatgcaacattaatgtcattattaaacacttccaaataaaggtacaactcctcaccttccaccggctttgataaaactggagccttagtcaagtgctccttgagtttctagaaggcttcttcacactccttagtccatttgaattttattatttcctcacaacacattgaagaatgggatgcatttgtccgtggactttgaaatgaatttgttgagggatgtgattcttttagtaacactttgcacgtccttgtgctttttgcaggatggcatgttgatgaagaccttgatcttctctaagtttgcctcaattccccaagagctggtgataacgcctaagaacttcctggaacagactctaaatctacacttttcgggattaagcttcatcccatatttttggagtactaaaaaggcctcctcgagatccgtactatgctctccgaatgtcttagactttaccagcatatcatcaacatatacttccaaatttctccccaattggtttttgaactttattcaccggtcgctgatacgtagctctggcattctttaatgcaaacagaatcactttgtaacagtacagcccttctctgtctagaagctggtgtgtttttaatctataacattcattttaatttagttgtcactagagtacgtgtccatgaagctcaataactcgtatccagaagtggcatccaccatctggtctattcgcagaagggggaagcaatccttggggtaagcgttgttaaggtctgtgaagtcaatgcacatcctccaattccattggccttagggacaaaaactagattggctaaccacactagatagaattattccttgatgaagtcattcgcggtcaacttatccacctctgcctttattgcctctgcccttactagatctaagggtctccgcttttggtaaactagttttgcatcttcattaatgtttaaggcatggtaaattgtgttgggtttgatccctgtcatgttagaatggctcgatgccagcacaccctgatttctcgtgactatgtccacaatcaattcttcaccattggtagtaaatttctccccaccttgatggtcttaccagggtataaatcgtagatttgaacttcttcaacatcctttcgtggctcaataaccctttcgatccccacttgagggtccaatcatcttcaaaatcctccttagcttctccttgagtctccaatctaggagaaataattgcttcctcttagaccataaacatagttcggacgaaaacattgtagcaactccttgcacttttctaatcacctttgactactccaatgcacccattatcaaagagaaacttcatgcacaagtgtcttattgaatttactactccaaaatctacaatgattggttgtcctcgtatggcattgtaagctgtgggacaatccacctctacaaaggtgaaatgcttgaaagcgcaaacattattttctcctttgagtgtgaccgagagctggagttttcccattggcatcagagcatctccattaaatccttgtagttgaatgagacaaggtgataggtttgcctccgtgagctcgatcacctggaatgcaattttgaacagaatgttcactaagctccaattgtccaccaagaccctaaaaactctcttttttgtgatttgggcttcaatgactaaggggtcattatggaggaagtgtacatgtttggcatcattcttcgtgaacgtgatagaaagttcatagttcaaggacgttgggctagtgattgtacaactatgcatgtttccccttctccatctaattccctcaagtaccttttttgggaatttcagtgcttcccacaaagtgtggtcctctagagatcgtggccacatgttcgtctaatggtggtagagctagacctgaagggtatggatttcccagtcctgaagctaatatagctaccgcatctggagctgtcagatcagggagtgctagaagttgtgatacgagagttgattatgacccactccttgtggatgatttatggtaccctgttgtcttagaacggtcaactgtttgtgagtgacccctatttggtatagataattggaattcgaacccattgccctaagtgtcttcctcttgccaggattttgatctcatccttcaagtagccacatttaattgttgagtgtcctacttctccatggtactcacaccttttacttagatctctttgaaacttccccccttgaggcatccgtgggggttttctgttgtggatcatgttgcaggttgctttgtacacattctcttgagtatccactaggatggagtactctatgtactttggtacatactctttccttgatttctttgaattttcactttgggtttgaccttttcctcctctcttgttctgagaatggctcatgttctgttctggaacttccgcttttgattgtttgagagtgatactacatcaagtttgcgtcgctccataccctaaaaaattggtttacgtaggtgtctacacagatgtgtaatgtccatagactgccagagtgtactgtgttcagggaacaggaacttgtgaggtaaatccagaagctggggcagtaggggttggtgtcagagggactctgaatgctcgcatataagtatcttccaaattaattaagccttgggccctcgccatgaactcgaacaatgtctcaacccttcttctttgcatttttccccataggagggagccaactgcaagtccaaacttcagggccacaagtttcatatcatcggtcacctttgtctgagaagccccctccatcatccgttgaatgaagtttttcaggctccacttgttggttactatcaaaagcgtaactatcaaaagaatggttactccacttgttgaaaacattgcagtgcattagcttcaccaaagcattgagcgttgtttttttctaacccgggtacagttcactttccatatccttaaacaaattgtcgtacttaccactaccattcaacagggggtcgttgaaggaataagtagcagtacttgtatcgtcaaaaccagaatcttctcttaaaatatcatccatcacatctaccatttcttcttcatcgttgtctactatttctacagtcggttctgtgaacgagtccccatgaaaataccaagttgtgtacgatcgttggatgccatgcataaacagatgtaccctaatattatcaagtctcaaacttcatattcagacatctaatacaagggcatcgagtaacttcagcagaatttatttgcattcgagaaactccaataaactcatctacacccctacgaaactatacacattgtctgtttaaagtcatctacgctctgccgctcaccatatttctacataatataaaaagaggaaattcaaaacaatgttgaaaatatgcaagtgtcctaatccactttctcactccattactaaaagggaaagaacctgttaacgcagatttttgttaaccaaatttgagcctcaccatattgatttaacatagaaaaaataaaagctatcaaaataaagaatatgaacactaggtttttacgtggttttgcagttaacattctgcatagtccacgagtcaatnnnnntcagatttctgagtatttttcagggcctctttcatttgagttttttttcatcccctttcttgatcttgtctgccactatttataggtacatagtgggaagtaatttaaaaaagttgacactaatcgctacagcaattatttcctcaaatcatgggattttacattgttacattgtgtggatgtgttacttagttttcttgtatcattgtcatctcattttgttttggtagtttttaggatttaaactatttctaggttcatattagggttcaggcaatatgtaggttgttttaagatctccaactcattaccttcgggtttgataaaattctctccaaggattgggactgctttttgcttgcagcaatgtcccactctggttcaggaatttatcgtccagaagttttagagttggagttccctacagaatcagtcatctcgtatatacccaacccttcaaaacccacctccaaattagagttgaacgatgctagggttagggaacacgcagtgagaacccaacaggaaaatatcggtagtcgctataggcgtttcttgcaaaacatttctgaaggcagatgctgattcttgcgagaagcagtgtaatatcccaataagtctaatagtatataattagggtttatatttatattatgtgttaataaggtaataagttgggttatgatcttactaatttatttcagcataaaatttaaattttgctataagtaagtaaataagcgtaatttataaattacagagatttatatagaatgtgtgaat

SEQ ID NO: 111202 - DNA, 2092 bp, Cannabis sativa
  modified_base (2050)..(2050): a, c, t, g, unknown or other
ctattttcccaaacaagatataagaaattcatatataattaccacctcatatccaaacataccttgcattttaaaatatagtgtaattactaaactgtgtaattaccaaccctagtaattacacagttactttcaaaaaaattctatttaactatatatagtgctactatatgtaaagaataactaaaaagtgttgtataaaataataaaaaattaattaaaataaatcatttatcttgtttcttctactatctagaaataaaagccatataacatagtttagggtcacaatccgtatttgcgggtcgcgtgtacgtatcgtttcgagacttgtgtattacaagtatatgcaatgttggtcctgagttgaaatgggtcataagaaaaaaaaaaattgggtccttactataaaagtaaatggtatttttaaaaattattaaaaaaaatatgtataatttttaaaagatattttttttttatttagacccctaaaatgagtaggccctaagcactggcatagcatgcctatgctaaggctgaccttgagtatatgcttaatctaaatatgacctatttaataatcatgttaaaaaatgaaacacaaacacaactcatttataaacggattaacacgacacaacttgtgtaacccatttataaatagattttgtttaagcatattaaccgattaatatattaatgacatatttaatacgtttgtgagccatttataacttgttaaagtactaaataactttaaatgagtcattaacaggtcaatttcgtattagtcgtatcaatccgaacatgatctgcttattaaataggttaaacgaatcaacctgaatacaaactgaacttatttaaggcaaacctaaacctgttaactttcgtgcaagtttcgaattgtgttaccgtatttggcctattgccagtcctaaacctgcttatatataatcttgcattttagttcatttaatttacacttatgtaaattaatatatatatctaattattattaattaatgctctaacaaattataaattattgtaaaatattgactaaatacaattaagttcataaaggtcatagtagtactactatatactaggtacaatgtcactattattattattactattctttttttacgaattattattttaactacttcaacaataaatcttattataggcttgctattttcaaagatattaattaattaacttttaatataggtgaattatagccaagtacaaaggacttagtctctctatcatgttgaaatgaaataatttacaactaataaaaatatgataattaaatatatttatttatataattaattagctagctagtgtcggcaacaacaatggaaacaataatacaatattaataagtcacctaaaaaaatttaaatttaacattgacccaagcaaacatgatctcttaaaaaaaagttgtgaaaatttttattggtttcaatgattagttagaaaaaggggaaataaataataaaaaaagttttttttttttgtgtataattaaaaaaaaaaaggaagtaaaatttgaagaaaggtaatgtaatgtgagcatttggtgacaaaataaacagcaagaataaatagacagcatacctgaaaaagaagcatccataaatgacagacatgacccactttcacttccacttgtatatatatatattatactataccatattatatatatttatatataattatataataattatgattatttttattttacatataggtccccatgtggaccttccttctacacatgtatttgcattttacacataaaattctccttttgattcttattaacacatgctttcaattattcctctccctctcactctatatatacatataagtgtgtatatatctatcatgttttttttttttttgacaatgaactttcattaaaaatatttaaaagtttatatatagagaaaagataaaaaatcacctattcaaattagtttatcatccaccctaagtgcacgaactgctaattcatgtntacaataaacatgaatcagagatgcctcaggaaaactggata

SEQ ID NO: 111203 - DNA, 2965 bp, Cannabis sativa
  modified_base (2898)..(2904): a, c, t, g, unknown or other
acgtaaaaatccttctctcactttcttacagctcaatagtataatcatattttattagttgccgaaaacctcggtcaacaataaccaactagaagacaacttgtagtttggtcacactccactctcctagcttgctaagactattacttctaacactcactcacacttacactcacactaacattcacacaaaaaacaaaaagaaaataaaaatattatattaatgaaaactctatgcaaagcataatatgcatagcacaactgaagcaaacaatcgtaactaatacttagcatcacatatcaacatgaaaacttcttcaatgaaagattagtcaacccatataaataacattaatggatgttatagcagacatatataatactaaagcataattctgaaatagaataagcttgtgaaactgaacaaaacacacacaaacacaagactagaaagctgtgaaatagaataaccctagtgttagtcctcacccaagcattcttaaccaaagcccacaaagattgtttaaagcatttgtctattgaaatgaaggctagctttgttaggtcactctttttaatttctttatatttttggtcatttgaaaggtttgaccagatagtaattttgaaactacagaatctctcttagaaattctaagtaaacattatgccttttatctcagtatgggaaatcaaatcatattgtttacagcaattacaattattctgttaattatgtctaaaagatgtttgctccttttctaaccaggccgctcatatacaaaacctcttctcctcaaaaaaataaataataccaacaacaataattagtttatgaaattttgggcttagagaaacatatatagaatttacctgagagttgaaagagggaataatctaacgacccaataaatcagaaacccattaaacctctccttgagctctcctgtattattttgtttaggatgcaaatttgaaagagaaaaaaataaattgaaatccttcgatttgaagtgaagaacgaaccatagaaaatgagagaagagaaaataaagacttgatttattatcatagctcccgataccctaatatatgaaattttaggctaattaaaacttatgattagttggaagatgtcgcaataacaaaaatcatcttagaaataaaaatcaaatcagaaacctacagcatttaggacacatctcttgcaaagtactgatttagaaaaataataataaaaggagctactacaatagtggatatttgaaagtttacctaggaaaagtatcaacttttcaattgtcattagcagagcttccatccttgagccattggaggaagctcaactacaaggcaacgaaataataacattcaaaatagtgaacattttatcattttataaatagcaaaaaaaaaagttaatacaaaatttaacaaacatattaaacaaaaccagaaaagttaatctacataatcatcaatagcacccaaagaaaacgagatctgggaaactaaaaaactccattaaaaaaaataatcatcataataaaaaatgagctagcctgtaaaagacgattcaagtaaacaaattggcagcttggcctttagctgccgatttcggtggcaacggagacacagttggggagagaggagcacaggcaaggccagtttggggacgagatagtgtccgggccaattcagggatgagagacacaaagggaggagggggtgagtgagaggaggttgggtcgccaggagaggaggcgaagggagatagagcactggggtttgaggtagcttcgaggtctgcgcgcaaagatgaaaatgagagggttcaggggttaaatggcgggaaacgaaaatagccaaattttgagtgtctttggtctcgtttatgaaacgacatttaaaagaggtttttaacgataaaaaaaaaaaagtttatgggactttttttttatttttttttattttttatgggtatacttttaagtgtcgatttataactgagaccaaaagttttttagtgtcagttatgaatcgacacttatactcaatttatatgtatattttctttgaactttttttggtcttggttatacttttagtatcagtctactaattgacacttaaagtccttataggtgtcagttataaaccaataccttagagttagggtgatctttagtgtcagtttttaaaaaaccgtccctcgaactgacaccaaaaatctattttgtagtagtgtgagtaccctcttatatatagtttgccttcaatcattgtgtagcgaggctctatttacaatagttttcgcaactcattattgtcatttggaagttgcccatcgattaaatagttgacaataggcgtcatccatgttggagagctacctatcatctcgacgtcttcatttttacatgtacttggctcactcaatatctctaccgggaccagatttagttcatccaggtcattttgcgaggccagctttgctaaggtatcggcgttggaattttgttctctgagaatttgttcgattttaaagtaatcgaatctttccaagttcttctgaactttctctaaatacttcactatttttaagcctttggcctagcattccccgaggacctggttcacgattagctgcaaatcactatgacaaatgagatttttgactttcaaggcctctgttatctttaagctggcgatcaaggcttcatatttcgcctcattatttgatacatcaaattggaacctcagagcatagtgaaacttaaagccttccagcgatattaatattacccctgcacccaaaccttgttcattgcatgcgccatccacatataacttttaggtttcctcgtctcgctgatcaggtgggatttcttctggagnnnnnnnttctatcaagaagtcagccaaagcttggcccttaatggatgttcaaggatggtatgttatg

SEQ ID NO: 111204 - DNA, 3500 bp, Cannabis sativa
cctacgaggatagggatggtatttcaagaatagtcctcgatccacactattgctattcctaattgagcgtataaaaaaatagttgctcgtgcaacaaaatatgtatatcttattatcggttttataaattaaaaatttataagtagtccgaataactataatatacacgattatgaaataaaaatgactaaaaatctctttcgtatgccgaaataaatagggagtctactaggggcgaacccacattgcagcgagagggacagtcgcccctctcaaagaaaaaattgaaaaaaaatatatatgtattttaatcagttacaatatatatttataataaaagataatatttatagatatatgttagaggtcaaaaagttaaatattcccactagctaataatatatactttttttctttttaagtttacttttgatttttctgttttacaaaaaaaaaattatgtcttttctcactttaaattctgagtctctcactgaatttaccaaaacacccctactataaaacttactatactttttcgttagtgaaataatatgaaagaatataatacatagatatatatcacaataattgagcatatatgctataacaatataatatatcccatccaatatggtcatttattaatttttcaacaacttctcacaagaagatctgcctaatatatttttatatatttataaacatgtttacagcttgttgttcctcaaagatagaataatcatataaatatatcgcctaactttctttaacttcaaaataacaaaaactaattaaatgacatgagtatcttaattatgggattatgttttgtaccatatattcctctttatttgtcttataataatatgtttagtaacttagtatatttaattacaaggaaaacttggatttatatatgtttctgcatgcatcgattgctatgcatgatttttatatttataataatttgttttttatattcttcacttactcttggtctactcaatgtttagtcatatcctcatcaagaaaaaccaaattaataatgtttgggagaaaaataaataataaagaagcttgaaaagtttgtattattatttcattgtttttttagtcaaacattattggatatatattcctatcctcatgggcgcacaatcagctcccactaaaccctagattatcataatatatataaagagtgcacatattattaagacaaaaataataagattaaatttggataataatttattaaaaattaatagcgtgttcatggatttacagtactggttcacattattggattagattttaactaatgttttttttggagtattttatactcttggcttttcgttggccaatcactagatttaaaatgtagatatattcaaaattttgtgtttgtgtttgtatttatatatatgtgcatatgtttgttaagttacttatttaaaactttctacattttaaaaatttgaattcaaattgattggtggtctatgatcacctaagttgaatgtcattgatagctagtgcccactgcaaatgggttttataatttatttctgaattgtactagatgtgccttcaaaatatcttaattaattaattctccttttatttttgttttatactttatatatatactataatattagtgataatttcctttaaaataattagtaataataagatttgagtagcatgaggcgtgattataatcacgcctgtgataaacaattattagtgtacatagaagaacacttaataagattagaatttgtaatagatattaaataatatgaagaacttgatgaaggggattaagtttgtggtttcttaattaagctctgtagatgtcgctctttgtttgggtgactggaaaatacgcactattatgatccttaattcgaaatcatacaagccatttttttttttttgctaattataatttttttttcctaaactttaacatgtactaaatcatatatctcttgaacttttctagtcgttaaaaatttctcttgaactattgagattcttaaatttaaagacttttattgtgatctaatttcatttaattttattatttccgtgattgtttatgtaataaaccatgttctccagactttaacatttaccaaatcatgtctctcgaactttgatatgtagtaaatcatgccccctaaacttttatccatgttagattttttttattaaaattggacaaaaattattaaattcaacaatatcaagttcaagagacatttttaacaaccttcaaaagttaagggggcatgatttaataaatgtcaaaatttaggagtaaaaatcataattagcctttttttcttttctaaatggacatggtttgtgacttcaactgtgctttgacccagcagaaagttactgcaattggaagtagttttagtttgtgttgtaatttgcggtataaaaatgtggtagttgaatttgattcccttaattatgtttgtgcttgaaaaatggttatgttattacataaaataatttatttctttgaaaactgtaattaaaaatgtatttgtaacaatttgcaataatagaagagaaacaaaaataaattgtgcataatttaaaactagacacaagagaattatgtgttattagtcttctttcgaacacgactagtccacggaatcacgcctagaaaaagaaatcctttagtaaagtcgtaaaaattataaatacaatttgacttaaacaagtttagactcaatctaaaattttgttgcaatcctatgtaatttattttgcaagtttgatctctgaaatcgtgtttactttctcccaagtatgtcttggacaagtcttttcccaaagagttattttattgttaaataaagctcttcactctattctaacaacagtataagaacaataaaacagaaactaaaatctaagtagaacactctagattttttcacaagaaactctcttcacacaaatatgaaaaaggtaaagaataagtctagaaaagatgaattcgtttggctactctaggttttaattatagaacttaaaaaccctataaacaaccacaaaaacatttttacatctgttaaaaattttcttgaaatattgttggacctttgaatttcgtagctttataatatattctcataaaagaaaaaaaaacttttacaatatattaatatcaatttttctattttatttttaaataatttcaaatattatatttaacaaatattatgaatatgaaataatattgataatagaagtatattacattcttgggaataaaacatgaacaagtttaaccgttaagtgcacaaatgtcacttatttataattgaagatatatttgtatcaatattttggtttatattactatcaaagtggtataagtctgttgagaaccatggggttccatctcaaaactaattggcaatgagtggacaatatcactatctgtataggtgcggatcgga

SEQ ID NO: 111205 - DNA, 2799 bp, Cannabis sativa
tatacaaagaataataaaatatttttgtcaattaaatatgccaaaattggaattaacagaactgaaataatataaactatcatcataccaagtcactagaattagattccaatacaagatttttctcgatctctttacatgtatataaaccaaagtgcatccaaatctaattaaaaggtaaactaacaatcacatgtttctatctctctttgcttgtattagtttttctttgttctaaaattatcatttatcatgctgtcattactttttttatatagttttagttgcttgaagtagacacaaacacattaaagaagagctgaaatgaaagagggcatttgtagtagtatatcccacctttttttagctttattaatcattatagttttatttatatatataagggattaattattatagtttatttgtatcttttttgggataagaatttatttgaatgtgtttttggagagatggatggaaattggaaaaggaaggagtgttgtaggcaagataacaaggagagctttcagtgtcctattatatgcaattatgcatgatttaagctctcatatttatggttatcttcaataaacgacattataacaaacaattatatacatatttgacacaagtgcctaaaaatgattttcatatatataattaattaattattacagtttacgaggatattaatcaaatatgttcttatcacaaatttcacaaaactttgaaaatggtgataatttgtggggaaaaaaacgtaaaatgacaataaaatgtacatatatgtaaggctaggcgagtatagactttatagtaacagatcacgaaagaaaaaaaattaaattagggcagcattataaaacaaagaaaaaacgacaatagttcagcaaaaaaagactacaaaagtttaaaagagaaaaattgaaaaaacgacaatcaaacaaaaaaatataggatcagtcttgcaattatctcagaaatacttaataataactaaaatttacgtttttatggaattttgactttttttttatatatttttacatttttttttacagaccattatttttaagttgttttaaaaatgaccgttgttttcacactgcaaaaatataaataatgttgtaacaacataaaaataacgttgttttcttttttaaaaaataaaaatgtaaagaatatgtgattttaagtactttcaactttgtgtaaatttttttgaataaaaaaaaaaaaaaaactttgtgtaaatttctcatcagtcttagcacaaaataaacgacattgggctgtaataagctgagtttacaaggtttagcccagttgcaatgctaattgggccttgaatctggggcatctttgaaaaccatcatgatttgattttgaacgtttcttctttcggaaacccccattatataagcaaattacacataaatataacatacttttatgtgataagtggaaccaatcttaaatatggatgattggttgtaattactctaatataagtgtggcttaatgtatttttggttttggtttacaaatagataattaattttctctatggtatgaaaaaaaattacagtttacgaaaatgttgttatatcccaattttcttttttcttttttttttttaaagaaaaaatactttcttttatatttttttagataaatgttccaaaattttaaagaactacactatatttttaagtttaattttgtctaaaaaaaattcttaatattaaagtggcatttggttagtggtaatgaaaaaaaaaataaaaaaactggaaataattttcattctattcattgtttagttgtatattaaagttttagaatatcattcactattttaaaatgaaaagaaaaactatttcaatatatgataaaaaaaaaattaataatttttttattaattttttttaatatattttaaattttatttcattttattcatagtcctattactattctcacttatttttatacttttatttctcccagtcccaacgaaacgccatattagtttctttcggtccaaacatgagaaaataaaattaacacaattaagagatttaaataatgacagtactctaaaattaaaatttctcaaaaaaaaaatatatattaattgaagaaaagggctaaataaaagtttaaacgaaattaagtttaaaacgacagatgttatatatatgaaagaaaaaaggaagtgttaaacgacaggccttttattttttttaagataaatttataattattttaagagtaatttatcgtataaatacttaagttacctctcagttataaataaattagatttaatttttgatagtaataatacctaagttatatttttaaaacttctataagtatctagctgttaagtgttaagtaaattatcgtggcaattgattggtccacatcattaaatttttatttttttaaaaaaattattttaaatatactaataagaaaatgacatgtggataataatttggcatttaacagtgaggtacttatgaaattctaaaaatataactgaggtattattactacaaaaaattaaacttaggtatttatttacaactgggagttaaacttaagtatttataccgcaaattactcttgttcaaaaatctataaaattccactatatttaagtttaattttgttttttggctaattagtaaattttctcccgaattttgactgtttgacatataccaaatcataccccctgaacttttttggctgttaaaaattcaacctgaactattgagattgtta

SEQ ID NO: 111206 - DNA, 2466 bp, Cannabis sativa
  modified_base (2416)..(2418): a, c, t, g, unknown or other
tggaggcttgaagcggggacgttacaacttgtgcttcagatttggtttttataaaataaacttaggaataccaagagtgatcatccacaatggtagtattaaaatatctattttcctcaatagttgaagtcttatatggcacccaaaatatcaacataaattaaatcaaaataagcttcagcaatattgtgattagaaacaaaagatattcaattctattttgtataatagcaaatggaataagaactattctgaaagtttaattttttatttaataattttaatttgatacaagaaggaagtcctaaaatatagtgcgatattgtgtcattgaaaatctcaaaattagaaactgaagaaaatgcacaagaatcaatttttgttttaggaagatttaagtgcaaaattttctcacgtctttcacccatcccaataaactggatctttaacaacacatgtcttgaatcatacattgttagatttaaatgttaataaacatgtactagattccattaaataagtgacagaaagtaagttgtattgaatgtctgatacttgtaaaatgtttgtgagaataagacctggtgaaaagacaatagttccaatgcacaatactttagcagaataagacctgtatctatgatccaactagaggagtgattagaaaggattttactagaaaattatgacagcaaaggctaaccaaattgaacaagattaatattgtcttgacctttttgggacaacaaagtcttcagtttctgacattgagcaaggattgactcgagatcttgttcaacattttagaatctctagtttgacactttcttcttaagctcctgagaagttgacagccgatggtttcacaagttttccaacattttgattcaggaactttccatacagtttgtgacttggagaatatccatgtagcctatagaacttttccataatatgaccaaaaatttcatagtgtgtgcataccatttttggcctatgaggatgaaaacctccatcaaatttctctaaagatgatgcaacaggcttattagtctcagtctaaatagatgtaattcctcactgcctctcttcttgaaaaactgaagcaaaggccttgttgattttggaaaatagatcttggatcaagatttttgattaaacattactataagactcatttagacaaattaaaaattcaaaaacttgatatttctcttgatatttctatatggtcttcatagcaccataactataaacaagttgtggtctgaattcttgaattagatctccaaaaatttcaatcaagtaaaaaaaatttgtgatagaattaggatcttaatttgaaatctacatagctctcttagcttcaaacactctagtagaattcttctagtgatatcattcttaaagtttgaaccaaatcttagctacattgtaaagatacattatgttctctttgcacaacatgaagtagtgaggatattaccaaattgttgcacctctaccatagatcataattttcatgtcttgtataatgttctggtagcttttcattgatgaatttgatcttatttcttccaataaacgccaccatcatcgaacgcctctaagaactatagttttcatagagagtctatttaagttagaccatctcaaatggaagatctaaaatttgtgctaaatttggcacaaaaaatgagtttgtgctatatttagcccactatttacaattgtgctccaatgcacaagatgcaaaataagaaaaaaaaaacaatgaggaaattacactctataaccactttattgtatccattttattttttacctcccttttaatattctttaaattatacccacttttttagatttgttcccgttatagccttaggttagtaaaaagaaataaaattcaattacatcactaattaaaaccataacctctgccacctccttcctttttcgaacaatgatcagaaaatgggcataaacttatacacatatacataggcaatacaaaccataataaatagaggattgaatgagggaaaataagatttaaagcgacaaactaaaacaaattcagaaagcaagaaaatagaaagaaaaggttacgtacataagtagcgattgcagttgtaatcggtggtagagtaactcgtggtggagcttgcgtgagttcaatttctatagaggagtctgagtctgcaattcgattaataaaatttcagggtatattagtcagttcaattataaaatacggtatattttaattaagtttgttttgtagctatttttggtgaatgtataacaaaaaagaggtaattatcaacttatcccaaaaacaattgaatatattgatggtcattttgtattttttttgagaatatacaaaatttattattttttattcttttannntttaaataatggtaatatggtaaataaagtaaataaagtttagtaaaa

SEQ ID NO: 111207 - DNA, 6665 bp, Cannabis sativa
  modified_base (519)..(519): a, c, t, g, unknown or other
  modified_base (5767)..(5768): a, c, t, g, unknown or other
aaaaaattaagtagaaaaagtataaatataaaaattctcatgtaaaagtataaatataaagttggagcaaagttaatatttttttttttcttcaagatgttctaaatcttaatgtatacaaggttggttctatgaataaatgtctgtatttaggatcctcacagtacgaggctaaagaaatatattttatttataaatttaatgtaatagttaaatatatatttataccattataaacataaaactctttaatctcaatgctatctgtatgttgaatgattcttgcttgtctgagttcgactaccagagtcttgttgcccttttttttcttaataaatttcagttcaaaattacgaagtatagaaatgtcaaactaatggcctcaattaaaatcattgaccatcttaccactacaccaaactaattttttgtttttagattattatcttcttatcttattttgtggttcattaccaaaaacagttattttttgtgataactttttagtcacaatataanttttttgtgactaaatgtaactttgaactacatgtaacaaaaaattatttgtgattaaaacataatatttaaatataagttatcacggatttaatgttggtaacaataaatattatgattaaaaacatatttagacacaaaaattataactttttaattacaatataagaatgatattaataattatcataattttttttatttttaatcataaatttatttgtgattaaaatttaaaaaatttgtaataattaattattcactcacaattaatattttcgtaatctacaccaaaatgtaggactgacacacatttatatgactaatttacctgaatttttataaaagtcaattttctcttattctttttcaaaagaaataagtcgcattgtgcctcgaatttcatattaattaggaaacagatcgtgtttcgcgtgacgttgtattttatttagtaatatttaagttataaaactatattaaattttaaattttggcatttttatataattattctaatagtaagtagctattaaaaattttatttcttaactcttaataacaaaagtgtaaaattatttattgacatatttgataaaatagacataaataatgttgtggtattttcaaaattgttcttatttatttattcattattttcgaaaatatggttttcttttcttgtatgaaaaggcttttcaaaatcagattgtatactcttttgtctttatgtgaattaaatatgagttttccttttatataatatttgattttattctttgctttttgctttttaagaaaattcttaatcatatttatattccttttatctgatttcttgaccaagaaaccgtgtacagctatgtaatttaatgttgtcaaagttgccttattcatttatgaaaaccttactgaaaaactgtccagattttttgtatttgtttaaacggactgactgtctgtttaaacagattttgactttcctttttgaaaagattttcatttaatgacctaatcatttcttggttgtttgaccacgacttagagggtttctaaagtgtataaatacacccttaagtcgctagtattggttagatctctcggtgtatcaattctatattacttttcaaagttaaagagcgttttctttgttgtgtgaagaacttgagttcaacaagttcttagtattttattattgtgttactctatattgtttcttgttgaaattgtacaggtcgaacaccttggatattgttaatcaagcttcgggagaagtcttgtttgtgagtgaccttttcaggaggaaaaagtgcatgtgagtcactcttcgggagaaagattgcaagttagtcactttttaggaggaagattgcaagttagtcactattcaggaggaagattgcaagtgagtcactcttcgagaggaagattgcaagttaaacactcttcgggaggaagattgaatgtaagacactctttagaatgaagtgtgcaagggctacaaattaaagggagttcaaggtctcgacacttcaaaaatttgattagaagaattagttacaacagttgcggcaaattcaatgatggagtctttatttgtgtaagtcaatttggttttgtaaccacttgtgattcatctaataaatttccttctctaggcgtggcctcgtgaactaggagcaattcgaaagagttattgataccacgtataaaatatttcgtgtcattttaattttctacattttactttctgcattatatttatgttctatcagattttgtgtctaatagaacagagacaaattctattcaaacgattttactacacttccagattatttaaattgtttgataattcaacttggtagttattaaaaatagaatttcaattggtattagagtagttcactaaaatcttagtgagatcttgtatttaatttctgtttaatttatttcttgtgtgaaatgtctttctttaaagaaagaagttcggtatctcgtcctctgctactcaatgacacaaactatccatactagaaagtgaggatgagagccttcattagagcacaagatgaaaaagcatggaaagcgattttgtctggatggtctcctccctcggagaacaacaatgatggtagcacaaagataaaatcttaacttttatggaatactaaagaagagaagttatctagttataacaataaagctcttcatgctatcttgaatggtgttggtaaatatttcatcaaacttgtttctacttgtatatctgctaaagatgcatggactattcttcaaactcagtttgaaggagctgaagattttaaaagatctagatttatcatgttacaaactaggtttgatgatctaagaatgactgagtctgaaacactatctgaattctatgaaaggttatctgacatttctaatgaatatttttcccttggtgaaaaacttgatgattctgttttggtgagaaagatagtgcgagtacttcctgacaggtttaatgttaaaactcacggctatggaagaggcaaaggtttttagtactatgaatgtggaagaattgatgggactcttcatacctttgaattgaatcagaagattcgtcaaaaaggtaaatggagtgcttccaaagaaaaagagaagaccatagctttcaaaagtattgaaaaagaagcaacagatgatgaatatgatgataatgaaatggcaaccgttgcaatgaactttcaaaaatacatgaagaagattggaaataaaatgttcaatggcaagtcatcaaaaggtaattcttctcctcttaaaccgtttcaatctaattaacaaaagtattcagtgtagggagtgtaaaggatttggtcatatcttgtcagaatgttcaaataccttgaagaggaataaaaaaggtatgatagcttcttggagtgataatgactccgagagtagtgaagatgaggaaggtaatgttgctttaacttttgtcaagccaaattctgtgtctaaaggtaaaaattttgtgtgtttgaataatagttccaaagatgaagaaaatttagatagtgttgaatctgaattgtctgatgaatttttatgtgaattttacaaggagatgtataattcatggttgaaactttgttctaaaaaccgatccttggtaagcaaaagtaaagaattgtcatttgaaatcaaacaactttttgagttaaatgaaaattttgaaaaagaaataatttcaaaaaatgatgaaattagtaagttgtcaaaggatttaaatgcaattgagaaaaaagtaagaatgcttaatcctagttcttctgtttttgaggagatacagaattcaggtcaaaggaatcttgtgggacttggagcgtcaaagtcacaaaataaaaagaaaacgtgtttgtttccggtggaattctgccttctggtatgtctgttccaacttctcagaaagttgttgcatcaattggttccgttgtcttaacaaattagttacggctagcaggtaaaaaaaagggtaagcatgaaaagtttattccaacctgtcatttttgtggcagaaaatgtcatattcgacctaagtgtttactctaaagaattttgccaaaaatgattttttaagagatacaaatattttgaaaaatcatagagagtaaaaacaaaaaatgttcagaaaacatgggttaaaaagaataaatgctttgctggttttagttctgaatatgatagaggaggtgcttcacgtttttggtattttgacagtggatgctcgagacacatgacaagtgatcggtctatccttacagacataagacctatgcattgtggatatgtaacctttggaaatggagttgaaggttatgttctcagaataggtactcttaactttaaagggttacctaagattaaaagggtacttcttgtggaaggacttaaagctaatttgcttagcataagtaaaatatgtgatcaaggttacactgttaactttgatagagacaattattttgttttgaacaaaaatggtgagaatgttcttgaaggttttagatctaatgacaatttctataccatgttgcttcaattatgtgtcaatctgtagtgaataacaatactaatgtgtggcatgctaaacttggtcatattaatttcaaaactttgaaaaaattatctcatgcaggtattgttcatggtttacctaagttagttgaagagtctaatgctaagttagttgctaagagtgatgatggtatttttcttggttacttcattgataatagggcatattgtgtttatagcataagaacccaaactgtaattaagtcgggtaatgttggtattgatgatgctagggattgttctgaattctctagtggggtagaaatttataggtttatcgatgatccaactgaaaatcacaaaggagctgttgtcagtgatgatacggttgcaacctctgttccatctattccaaaaaagcacaaatttgctaaaacaggttctggacaaacaaaagagaaacttccagatattatgaaaaagccatctataagagtgaaattaaatcttccactagatttaaaacttgagaattctaatcacagtattgtcacaaaaaaaaggtttagtaattttataatgaccgcattagtaatttggattagaaaaggcagttagcactaattttttgatatttttataattatttatgaatttaattaattgtggccccattattagaaatgggcactggagttataatttctcaattctcgagattttattaaactctaggagtattatttgacttatatgtgaattatgcaatttttgtaacttttgttcggcgacaacaaaaaatgcgatgaatgactagtttggtcacataggtaagtctagaatcttatttcttagtggaatatattttggagaaaataaaataccgaggttgtgcagggttatggtttttgaccattttacccctatgtttgaaataggctaaaattaagcattaagggcattttagtcttttgccaagggaaatggtttggtggctgccttagagtgtgacaattggccttttatttttcagcaaggattaagttagaaaaccctttttcattttgaggaaattaaaggaaaaatcaagaaatagaactcttttcttcttcttcttcttctccttctcttcttcgaaccagccacaaaattagggaaaaaccattcaaaatcctcatatttnntggaatcaagctgagtatcaagtgttcttgaagttgaggtaatccctagttccttgctctatgtgtttttaagctttgaatttggtttcataaagtgttttttagtgttggtggctgttagggtaaaaaatgcttagggttcggtttttatgttcaatttaagttggataaaggttctagtagctggttttactgctttgtgttggattttcacaagtttgtgctttgaaacctaagctttgatctttaatggcatatttgaattcagtggctttttctgggatgtctggttggattatgttgtgtatacattgtttaggtactctcgaaagtttggttgtatttggtggagttttgagcaagaaatgagatttttagggaaactggtataaaacctgttaaccgatcatgtaaatctggttagccggttttggcaagtttcccgaacgacccattttctcaattctcgttcatttcagtgccatagttgggtgtttccatatttcctgagttagtgtaatccctagtgaatataacagagcctagagttgtaggttcgagtttccagattagggttttcgagcatgtgatttacctgatttcaatatgtgactagggcatccatttagcacaagactttccgttcagttcggccaacacacttgaatctggaaaggaggtaagaactttatataatatgtgatatcaatatgcgagtgtatgtatattttaagtgtatatgcatgcttatatgttagttacactaccaatacttgtccagttagtatagagtgcattggtatagtgtatattgttaaaaagtacattacagtgtaccagcacaagtacgggaaagtacatggtgtgtgtggtatatcactcactggtactcagggt

SEQ ID NO: 111208 - DNA, 3876 bp, Cannabis sativa
ttttttttttttttaatgtttaaatgaaaagtttgagaaggtatagccctaaaataccctagatcattctggagttcgggtcagacagccgccgcacactatttcttccgcttcgccttcttcttcttcttcttcttcttccacttctggtctcatctatctttcgattcttcactccttcacaaggtaaacctccaatttctttctcatttcgacttttttcttccgacgaagtattctcctttgtgatacaaaatatataaatattgagttcacatctcaaatatctcatttacaggctaactatttgttttcttctagtcaaaaaaccggagtaacaattccaattcaaatggaggactggggtaatcttttcgtcttcctcatttttatttatttatttttcaatttttatctgttggtttaatctttgaatttttgctttaatctcagaggatgagcatattccgcctgttattactacagagccacttagtagtaaatgggctgatgaagatgtggatgagaatgatgtcaaggattcatgggaggatgatgatgaatctcaacctgctactgtaattcttttttattagtattgtcatttattataattctattctaaacatgcatatgtttacataaataacaacttttatatgtatgaacacacacacaacatgtttatgattcgttttgtctctcatatcaatattaatctcacagtatactcagttgtataaagggcgggtagtggtctattcccatatgcgaccatagataaatttatttttactcctagtcttggattggtgaacaaccccatctattcttattttccttttatgacttaaataacgccatgtaacaaaatatcactcaagaaactttataatttttgaatcaatctttgtttgtttctttacgtgtgggttcttgggacatgtgttatatattttatttcacattgttctagtttgttgctttgttcattttgtaaccttctcatcttggcatgggaccaggaacctgcaagaaatcctcctgctgataaagcacctaagaaatcttcagtaaaggctgctgataagaaagttaaagccgttgagtcaaaggaagagccactagatcctgtagctgagaaacttcgccaacagaggtaatgttcaatgcttaatctgatttgcctaatatgttttttttttagtttctttcttttattcgcctttatctactgaccagaccagcctatttgataaataaatgagaaaaaaaaacatattcggtgaacgttattcatgtatgtaaacgagtctaagatcagcatatttgttttcttgtaaaaatgcttgctcattttgatctgttcttttctgttgctttaactttttaatttttgagttttttttagactggtgcctcttgcttgatcctaatactatatatagggagctttgaattatagcaatttctattttggtgtcaaagagaaacttgagccttataacctgtgtgagcaaaccatagtttttatttaactaaatttagtcaaatttcttcgatgggacacaatgaatcacagtactttatgtaaaagcagtggtcacataggcttagagataaatgagaagtttgatttttcattgatctgaaaactaaatttatttgtttaaatattgtttagtttcatttaatttgtcatatttagggtttttggaattagatttccaattttccactttgaaatattgtgggtttgttgcactaaatcgattataattttgtgcatgtgttgtgagttaactgcatagtatagtttagtttttgatactaggtacttgagctgaagcttttatttgtcttttcaggcttgtggaagaagcagattacaagtccacaaaggaactgtttgctaagaaaggcgaagacaaaactcttgataattttatccccaaatctgaaagtgactttcaggaatacgcagaactgatctctcataaactattaccgtttgaggttatttctgaattgactaacatcacatgtgactaaaagttaggctgattttagtgattttctaattttagttttttattacagaaaagttttcattacattaatctgcttaaggcagttatgagactggcgacgacttcattgaaagcggcagatgctaaagatgttgcatcttctatcacagcaattgcaaatgagaagctaaaattggaaaaggaggccaatgctggtaaaaagaagacaggtaggtgtttcttatcgtttgtgtttttcttctgtcttttgtatgttttaatttggtttagttatattgttcttaggttgatttggaagcgaagataaaataatttagattagaggcagatgcattagaatattaggtactttataatatccatcagtacaatgtttgaaattgcatttctattgcgcgcctcgttttgaggcaaaaaaacgcactattgtgtgcacctcagtatttgtaagagaggcgtacgcctcaaacgtgtgaggtggtggaaaatggtctaaggcgtataaaagagtgaggcgcacgccttaaaaaaacaagatttaaggttttttttagcccattttcattcaacaacttgaaagatagcccaataacatttaacttaagaaaagggcccaataaagcacaataaaaacccaataaaacaaataactaaaaaaaagcttaactaaaaactaaacctacacaatttatatcaacagaacaaaactatatttctcagggttagtaactgtgtgacaccccctccatcttctcaatcgcacagtcagagaagaaaagaaaaaaaaaaaaaagagaaactgctgctgttgctttcttattttttttagttactctaaaagtattattttaattcaataattgaggcttatgtctcaatttactcaatgtgccttgaggttcagctcacagaaaaaaaaaggccacgaggcttaaatccgcaattataaacattgcatcagtagtgtttgttaagattattgttcattgttctattaatcgaataaacacaaattttactctaaatgcatgtttttcttagtattgatagttattgcctgctggctgaacctgattgatacatggggcaattctggcaacttgagtttcgtactccatctgaaagattacatgctggctatttaagtttagcccaacatctaagagttggttgatgtttgatacaagctacattaggatgctaatattttactgacatgggtatttttgtcaattgctttcgttactgcctttcaggtgcgaagaaaaagcagctcctcgttgataaaccagatgatgacttggttgccactagatacgatgatatggatgattatgattttatgtgagtgcatttttttccagcaaacggtggaagaagcaaagatgtttgaatttcaacactacaatagaggagaatttgatgggtggtattgatatgttagaaaatttgattatgatcatgtcatgtgtttattcttaaaaaaggaggggtgtattttgagaaaataaaagagtcccagatgccttttgtatctaatggtcaattttgttatatttgtgttgggtcgtgattgacatgttctttcttgtgcaaaatatttattatctcttcatccacatttgagagaggcaggaccaattaatttgtgattatgttttttttttcttcattcaaacttggtaaatccagtcacataacacgttcgggacagctaattagtacaatttgatttctccttttcacatgatacggggcttcaactgcaaaatattctccccttagcctaccaaatgctttgacatttattttttttttttttttt

SEQ ID NO: 111209 - DNA, 3626 bp, Cannabis sativa
tttatttttctaaatcttgattcgagaccaactttcagaatcaccacctccagagtccacaccaccttatccagagataatgatgggaataagaagctcaactccttttcggtaagaggcaagttagacctaaggatgtaaatgggggcggaactgacccacctcggcctcaccccagacacataaagatacaaaatcatggccattcacatatcccatttaataagagtttgtttgtgctttagtaactgacataaatcaaaatccaaagctgcataataaagtcctatggcctgcgccagtcgaatgttcaaatttggataaaagcagttaaataccaagttctactgtcataattcaccaatatactttgaacattaatatagtatttcttcaagacaacaataaactaatcaaaacatttaagatatattatccatgctctataaatctactacccctatgtaaacctataatcaaccactttgtatcactatcaccagactgtatcatgttcaggtccttgatcggcgaataggtgagcggctgcaagtagtgaggtataagaaatgagaactcaaatatttggaaatgaacaaatgagttatagaaaacagttatttaaaaccaaaagcaatgaacatatccaacaatataattaaactggacagcgcgtgcataactacaaacctgcgatatctgccatattcaggactgatgtttcgaccataatcgggacttcttcgcctatcatagacagggccattgtatctgtcgtaagctgggcttcggggttgaccatagtcaggacttggacgcctgcgatacgcagggctaggtgatctcccataaggactatccccatgcctactgtaacttcctcttcttggactatcatagcgatcaactctctcatcatcatccttgagagcatactcaacagagaccaccctgtcctgtatcttgctgcaaaattgaagtgtttacgtcagaagacaaatgggaaaaacacatagatgatagattcatatcataaataacatgaaatacaattatgatacaagttacaaccttttccaaacaaatagtatatatatatatatattactcacctcatgtgagtacactcaagcgccttggtagcatcttcctgagtctcaaactgcacaaatgcaaaattccgtctaaccctaacatgaagaacctttccatatggttcaaagtgtttttctatatcacgagctcttgtacgaagagggtcgaagttgatcacaaacaaagtttttgtaggcctctgatttgacctcgatccatcacggtgtcgaccacgttcaccctggtaaattaagctcataaaaattaaaagataaaacaaattatgtagttcagcccttgtaacagaattatacagatcacgcatatcattgttagaaaatagaaagtacacacaaaagctgaccaattacaagacaatcaaacaaattgtaccttagcccattcaacggatagcttgcgcttgtcgtatccaaatggcctattgtcgagggaacgaatagcatcttcagcatcccgctcgtcatcaaaatagacaaaagcaaatcctggaatggaaaaaagaatcaaggatagaagagaaataaaacacaagtacatattatcaagtcagcaggcaatacacaagccttgctacttgtcttccctcacacaaactaaagaaatacaacacctgcatatgcgtcaaagtctgaagcacattaggctgtagagtcgttgcaagaactaaatcatgttggtacatattaaaattataatccaagtggcatacttcaccattcagacagcacgagttcaaaaatggaagtcatggcaagacatgtttcaatgcccatgtttcagaaatggaaggcatagcatgacggatttcaatgatccaaagtttcagaaaatggaaggcatggcaagacaggtttcaatggtcttcctattatcagaagtaagcatgtccacatttcattggtcccctatgaacaatagtggtaggcatgtcaaaataattgagtgattcccaattaacaattcatgtgatatggcaactttatgcgaagagtgactgagagagttagagacggatgagcgagtgaggaaaatgcagagtgttgatctgtgagtaaaggagacggatgagcaagtgaggaaaatgcagtgttgctatctgtgaataaaggagagcaggcaatcaggaaggtttgctttccaaaattatatttttttgcacagatgttggcgagccagatagaagctcaactcattttcccttagcagaagaagatcctgcgtcaaaaaaaaatcttaaacatggaggttttctccaaagaaaaaaagcatacttgccgtgtcaattcctcttccccaaggaataggtactgcggatatatatacatactgcataagtagtaatatatccatgtgaactgcacttaataaaatagcttctctagtaaaaaaatcattaattgacagatgggcccttagccgggtaccagaagcagcggcaactaaagcttgtcaccttgatcaaccgacaaaggcctagaatttgtttttacataatgtaaaattaaatcaaagatgaaaggatataacaaacagcattctccatggaagacagaaaaaaccgttaagaaacaatcaataaacaatgaaaaaggaaataagtaaacaaaatctaagaaaacaagtcccttgttgagctcgaatcgtgaccaagacattgggctggtgtacaagcatacataaatttgaaatttctaagttatccctacgtttgagcactctaccacacgccaaccttagcaatcttcgaaagagaaccaaaaaaaaaaaaaccatatttaaaaagatttcttaccagatttcatgtcgacacgctcgaccctcccgtacttggaaaaaaggcgctccaactccgattggcgagtatcatactcaaaattcccaacaaatatcggcctcattattttgacgaaattcccctatgacaaaaaccctacacaaaccaaaatattcaattaaggaacagtaacatactaatatgaatactatgaaatttataggattttatgatatcggtagggttttagatttcataaactctaaaccttaacccatattaatggtgaaagtttaaaggacaccttattaatcaaatcaaatgtctgtaacgagaaataccaaaaaccctaaggggctgttcttagtttgattcgatttttatagaaccttgaattatggctgactttttaggaaaatagtccctaacttagcggggcatactctcttcaccatccgatcttaaaatgaccgacgtggcacgatcttaagatttgggccttcataatgggctcgggagttgtactctggatccccttgtactcagtttggcatttatgcttggcccgataagattttaggagaaatcaataataatctctttcacaacgttttcttttctgtgtttttttttttttttggtaataagataatatttggttttgaggaattctttcattattttaattattaaaagggatttttttaggaatatactaaattatgtaactttttac

SEQ ID NO: 111210 - DNA, 1614 bp, Cannabis sativa
attttggtcttcaagtgttttcttacaatgagctggagagagcgacagagggattcaaggatgagcttggaagaggcttgtttggagcagtttataaagggactttattgtatggtggtgaaaatagagcgattgctgtgaaaagactcgagaagtttgtggaagaggggataagagagtttcgagcagaaatgtcggccattggaaggactcaccacaggaacttagttcaattgcttggtttctgtattgaagattctaaaatgcttcttgtttatgaattcatgagcaatggctctctttcagatctcctcttcaaggccactaaacaaccttcatggaaagatagagtgaggctcattcaggaagtggctaaaggggtactctatctgcacgaagaatgcgcggtccatatcatacacggcaatttgaaatcccaaaatattttgctagatgaaagttggactgcaaagatctctgattttggtttctcgaggctattattgatgccaagccatgtccaaatgtccaaggcgttagttgaagaaagagcagcgtactctgctcctgaatggcagaaaaatgcagtaatgtcagttaaagttgatgttttcagctttggagtagtgcttttggagaccatcttttttaaaatgaacacagatgtgaaggtttctgagaatgaagagatggttctctatcgtcgagtttataattggtacaaggctggagagttattaaagctggtggaaggtgaaagaaatgttgatgtaagaacactagaaagattggtgagagtgggcctttggtgcactcaagatgatcctgatttgcgccctttgatgaagactgtcatcttaatgttagaaggcacggtggacgttcctcgtccccctacttaatttctcagagcttagctagctcccctttatatattaacagctgatatgaatataatgatatgtagtttgtgttatttattttggtgtattgaattgcatgctttgtgtaacaaagtttgttagggagggattgaaatttacgtacatgtatttgtttcaatctttccattgtctaactattaattcagaagcttatgaaggtaatatgtatgtatatttttatattaaagggatcgtagctaagttggagggttttcgctatcatgggtatgctgctactgcgttgagatgtgaaaaagtctttattgtttatgtttatatcctcaatattttattccttcttcatatacacgttggtggatgtaagttgtccctatatatatgttttgagagtacctcttcattaccaaacttcattttgaatcatacataaggaaaaaagaaaaaagaaaaatccaatacacaatggacaaaaattttatatgatacaaccaaaatatggaaccattaagagaaaaaagaggtctattccctttttgatctccaatttgctaccagagttgtatcgaaaaacaatacatacagggagcaatgaaggtattacttttgtccttatgataagaaatttgacaaaagaaaaaaaaaaaaagactagatcgattgttgtctgtgtttgttattgtcatgataaattagtatttgattgaggtga

SEQ ID NO: 111211 - DNA, 3124 bp, Cannabis sativa
  modified_base (676)..(692): a, c, t, g, unknown or other
attaattgattaataaagtagtatttttcaacttacccctaaaaaataagggccttgtgcaatggcccaagctgcccaatacttaggccggccctgtaaatatgtatatacaaactttcataatttattattaaactgttaattatgtatttattttttgtttagactcttaaataatttaaattaacattatattagtgttttatcaataaattatttaaataaaagatcaaaatacaactccatgaaaaaatttgtaatgatttttataatttaaggaaaaattttgcaattgaaaaaagttaaatggacaaaactctaagaaggtcataggattaatcttatttattctattatttgtcttctccatttctctctccatagcaaaccatttatttttgttttttatgttttctagattcattgaatctaatcctaattacatgaaacaatagtaatgttacgtgtactttacctcaccaaacaaatttaatggtattattcatttttttttttaaaaaagtaaatagaattttttttgataacaagtaaatagaaattttattaatagataaattatatataatctagtattaatttttgattccacacacttagaaattgtatttttcaacttatttttattttaggggaattattctatatattatttttnnnnnnnnnnnnnnnnnaatttacggtttgagtttttaaagtggtcgcagcactagttacaataggggtttctatacaattttttgttgcaatttaggttgcagcgctagttataataaggatttctatgtaaaattttaaagtgtaaaaataaaaaagcccttttattttatcatttgaaactagctcaagtgtcaataaagaattattgggggttgggtgtgtaaggtttaagaatcaaatcataacttgagtaattgaaaaatatatttgttagacactttaataaataaaatatttttttatcataaataataactatatggattaaaaaattattatgatacaaaattaaatgactaattatgttatgggtatcaaaaaagtattaaattatcatgaaaataatgtgtagataccataagttaatttataatttattaaggggccaaattataaatacctaaaactcattatataatatatgtatcatacgtaatgacataatactgaagtaagttatataaacatttaacatattatcattcttcagcaatagctttaagttagtgtttctactcatcttttatcattttctttttctttaatttaacaaagattttataaatttatgatttagagttttttttacattaaaacacttttaggaatacgtttagatcagttatatatatttttttgagtgttttataaattctaatataacacacttaaattatatgtgtaattaatcttaattatacaagtttgttggacaattttttacttaatttttcttgatattgattataattttgctcttttttaatgttgctagtcttttttattgttcaaaacttctcatactcttgttaagctttatttatctattgccactagcaacttatgttagacttgcaatatgtaaattgtattcaaaataatagtgtcatgcctcaaacaacactgttgatcaatatatgatgttgcccccattcctcattctttagaacactttgctcttgagggaggtgattgagattttcttctaaaagaatctttcacacattgtctagtatttattgtgtaaggttgcctaaaaatgatacataccatttattttattcttaatgattgtgatttttttaatgaatatttaatttgtgacacaatgtattgtgattggaaaagataagatattttgtaagttgatattttttattaaatatagttgatagttgagcatggaattgaattgggacattttgtcctatatatataagtaccccatattggaatatgatttaatgatgaaacaattgtaaataaataataataggatgggatgtacttattatatgagtaatactacacaataagattacaataggatatttagcaaatgagttagtaatcagtaataacatgttttttaataacataattatttaaaatgataatatattgtaattacatggtataacgctatgaaaattagaaagtataattgagatatcacagttatttttaattatacaatataattatatagtttaacaaacacgtcaaactttataattactctaaagtacacttaattctaaattctaattacacaataattttctaattatatatgcccttagtattgtttttgactagaagtttagatgaagacttaatttacacgcattagttataattaataatatagactgaattgtatttttttttttttaaaaaaaagactcaattgttataataatgataataataataataataataataatagactcaattgaataatttattaaattataaacatgcataacaccttggttgacctttaaattatatttcatacaatacaaacattagtacaattgtttgttgttattgtttttttcttttttgcaataaataagattatttatgttagaaattataaggaataattgtggctaaaatgttaattttatttatttatacactcaactaataactaatcataattttttttggatgataaatactttagtagattttatagcacttaacaacttatctaaaaataatttttatataaaaatagttaatagtattggatttttaatttaaattatttttccattgaaatgggcaacaaagtggtgtgggcatgaatttgagtgtgcatttcttgcaagagagagagagaagatagcttacccacttaaccttctattttatttaattaataattaattgaggtgtcccccacaattgaatattcttcttggaccccacacttctatctttccactctcatttttcatcacaatttaagtatttattctttattataagggtaaatggcggcaaaatccccaaaattttcattttggtttcacttaacccccacaacccaaatttttgcgggtaaacccccaaaaccactattctgtta

SEQ ID NO: 111212 - DNA, 3695 bp, Cannabis sativa
aatatatacatctcccattagagatggtcttagagtagtagtttttcttaagtgtactaatgaagttggatcaaatcatttgagatgaaccaaatgaagctggagtgaatgatttggtcaatccgaagcgctcaaattctctggttcggtcacgatttttaaaatctcggtagcaatcaaaaccaaatcaatcattataattatttatatataattttttgacgaaatgttgatatttgaaaacaactttagttagaatattgatattgacttaatattattatgataataattttttttattgttatttatgtattataaacttattaaaagtaaaaaatatgataaaaaaatgaacaattattgtaaaaaaaaaaaaattaaaataactacaaaatacaaactctattttgaaccaaactaatccatttttgagtggttgatttatctgatttgatcatttaattggttttaaaacaccgttatcatgatttggtttaaaaaaattgaaaattcagactaaatcaatccgtgaacaccctaacattcatgattccatcttctgttcagttagattagcaaaatattgataacttgcattttaaagtagtagaaattccttaaccaatatattggttctttaccaaaatcacaaaaatatgtcattctaagagcctaaaagttattaaatggttatttaagcaaccaaacatcatatcataccaccataatgttatatttaagtttgttggttattctaaaatataatgaacttcaaatttcacagcaaattgctaattctcaagctggcaaatttttatttatatcatcaatactaagaatgagtataaacgcagacgatattatgacagagagccaaaccaagatacagacctaattggcaaataagttattcagagtcaataaaaatcggaataccacagataggtaatttaaataaaaaaatacaccgcatggtcggttcacaaccaagttttcgatcttaaatattcttcaatcaacatgcaaaacaaactccatcccattatgcagcaatctgaccgcagagcagcttgcggatctgaaggaaaaaaaagtaaacaagaaacttaacttggctcgatttttattacaaaacaaacatctcactctctctgagttcacactcggtacatgatatatcatacctaagcatgaaagttcaaccatggtaacataagcaagagaaattaaaagctaaggactggaaatctatcactttcctatgataattttgttagtttttcctactattttccatttccttatttaggtttccactattgaacattttctattatctgttttatgtattcttttgcaccttttactaaagacaggaaagcaaacaaacatatattaaaaagatatataatatgttttgttgttgcgtaaaattacctctggaagctttttacggaatacaacatccaatcttgcatcaagggtgttctcaaatacaatctttccatctcgggaagccagcaccacacctccagaactgcagcaaaaccaaaagaatatcaattagcaggctgtacttgtataagaaagtctcacaaaaagaaactgatcgaaaacataacaataaataacagcaacacaacttgaatcttgtactcgggtgatggcttaaaaaacagctgcattcatataggagaatataagaatctcggaaaggatagattaccaggaaagaccatgggattgattatgagtaggagcaggtggaagatagactttgtggtcaactagaatctctggtggactaacattatctttctctgcatactcctgtgcagctgagtcaattactgactcaaccagactaagatcagcttcacgacaacgcaacaacacagcaggctcctttaacctgagcaaactctgcaaaagaaactcaaaacatttcagtattacgaaaggctgcagataatcctaaattcccatagcccttatcaattgttcataaaatttatatcaacctgcaactagatacaaataatggggtaaaaaaattgtatctgcatagaaagatagctttactgacctgaacaataagacctttcagaagcttcttatagacatggtgatctcggctgacattcagaagctccttagaggctacatccttcatggaattaacaacatcatcttgagcttgaaggaccttgattcgagaagcattgagttgcatggagtactcactgcagcagaccataaagaaaaaagtttagtatttctccacatctacatagcttctacaataaagcaaggtaaagcaaaaagagggcccactttcttatatttctacatccagattctaacttggatcctatcattataacaaaaggaattgagtaaaattacaagaaagactttgactcatagggagaagaaaagaccaaaattgaaagaaaaaataacattcagctcgtggatccccaaaagaagaaaaaagaaaagttccatggcacattcatgaaaagttacaatcagtgcacctacacaagccttcatccacgttgcttattgagagcatcccaaattaatctaactccaccacacaaattgaacactgctggagattgatcatttgtttactagtgcatcaactcaacaaataaataacacagcaaacaagagtgaatacagtagccgaaaacaaaataaaacttttttcccaaacagtgtattaacgtcactacactgttttcaacaaacccattgtttcaattccccaaacagtgttcaaaatttgcagcttactctttctgaatctgaatttcactgataagcaacagatatccctaatcaaaatctacaagaaaaatcctataacaattcaaagaaaatcaacaagattataccctccgattcaagtacgaaccgatcagatctttcaattcacaacttttcaacactaatcccaaacctgactcttacattcaatttcaaaaccacttcaactacaaaacaaaattcaagtaaaaatcttacatcttcttccgaacatcaacctgcttctccttccgttcatactcctgtctgatcttcttcttctcagcctcaactaactgcaatttctcaatgttgaattcctgacacaaaaaaaaaacacataaaaatcaattcaaagcaataaactcatcagattgaaaaaaattgaaagaaaaatccgtaactacgaggaaaagtaaagtacctcttcagcggagactgagatctcgttggccttctcctccgcctcctggcgaatgaatctgaccatctgctggatctgcttggagacatctgcgtcgttcatcttgatcggcgatggattcgaatcggagaagatcggagagagcaaaggggattgttatgagagtgagagcgaaacttctctcgaccacgattattgagagagagacaaaaattacagaagggctttcccttataaatataaatactttcacaacgtaacacatcaccagtttattattattattattattattattattatcttttttaaaaaaatatttaaagaaaataaatatattcttatcttattgaaaaataacacagatattctttttaagttttggctaattgagaaatcgtccttaattttttaaaaaattacaaatatatatcatcaaatttaatttact

SEQ ID NO: 111213 - DNA, 7003 bp, Cannabis sativa
tcggtttgtattttttttcggttttgtcggtttggtttagtcgggttattcgggttgggcggtttacgaaaatttctgtacagccctacctttttccgtaatatatctctctagttctcactactacgaggctcaaacttcatacacttatttatcttaaataaatacctataatttatcttaaataaatacttataatataaaaaattaaaggtgctatttagaacacttttaggcagcacctttaaattctttaatttttttaaaatagaaaaattgatatatgttgtaatataaaaatttgatataaaataaaaaaaaggtaaaatttcagtaatatattttaaataatagagaaaaaaaataataaaagtgctcttagctcaatgagatgccaaatccaagtcgtcatgttacttgctttaatcaaatacactacaacatttttttacttttcattataacaaaacttgtgacttaaaataaaaaaagattgtaactaattataaatcattattcgtatgttgttactaaaaggtacgtgactaaaaatattagttacagaatttataatttgttgtcactaaatgtatttttagtaacaatatttgttgtcactaaaattaaattagcgacaacttgtatctaaatactatattttagtcacaaataattaactttttgtcataactaaaagtcatatttaattacaaaaaatttatattatgactaaaaaattgtcactaaaaataattattttttttagtgaatgcagaggtagacactagcgtacctgcctaaacaaagctgctcactctaattcatttcttctttaaaataaaatgttccaaaaaaacaaaataaaaagattatgtgttttttacaatttagttcattttatgtaagtttttacttttaaaccaattctatagtgtgatttttcgtatttatactattttttggggataaatttttacaattatatactctttcaagacacaagatagagattgttatattagaaataaaaagttgcatatgagaaacacaatatacatattcctattatcaattcctttgagataatcctaattctcaatctcatataatggttttagaatacataacatacatgttcatatctaacttacctaacacactaaaaatttttacttttaatcaaaatgatgaaaagttgtgaataaaaaaaaaatatcatttagtagtactctatgttattacaaaaatgtttataggtaaaagtaataattacaataattataactataagcacaaacaatactaaaattaaattagttgtaacttgtatttaaatttttatttttatttttattttttaggcacatgtaacattttgttgaaactaaaaactaaagtgtaactattttatagatctcagcacctttggttaatgaacttttggttctttcaaaaaaaaaaaaaagaaaatcatttattttttgtcatttttctaaatctacaaatacaaagaatgagatgagaatgctaattttgtctataatttatctattttcttaaaatattttgataatattgtctataaatataagataccttactatgtcgaaagagaagctattcaaatgatcaatgggccagtgtttaaggtgacggacctaccacacagtacagaataagtggagtacaaaccacggaagattaacaaatgaattgttataaaagaaaaaggaagggacgaaacttgggtcaccggccctatctacggtccccatggtatgctgcagatatgaaatgggcccaatgggcccacaacaaaaaactactcgaagagggagaccaggacatactataagagtctccttgtctccatgtttgggaaagaagaaaagtattaatttgatgaaattatataagtgactatgcatgtatattgatactttggtcatatttgttagtgacctgtttaaaactatatattattgcttttgcttccgacaatacaaaagaaaggctatctttgctcgtatcatttattggttttgtaataggttacagggcccattatgctatctagaatatgctcaccaccactttgtttctccatatctctctctttatttttgctaagaactagaagaaaaggtctctattgtgctttatagtttaatacaaaaacgaaagcagcattttttggggactgtgtccgtcgtcagagtatagaataagaaaagaaagtggatttggattaaagatgagtccaccgagttaggaataaactaacaaaaaaaatatagatattatagaagaagctcatacatacacattcgttttgtttactcttacatgatttttatttattgtggacatagatatatatagcgtgggagtaggtgatgatcgatcatcgaacaaaatagttatttttttttcaaaataacgaaatattattttattagtagtctttttaaagccgctctagtatcgacaaaccccaccacctacatttgattcaatcattatgatttcacaaaatctaccattttcagcgaattttcaattctctccaaatataatattctatatgcccaaagtaataatatatatacatagtattattaagttgataatataggagtaatgcaaaagctgtcataaaatcgtccaagacactaagacacatgagagcgtgataataagtagtaacatgtagttatgtagcatcatgggatgggtagaggagtgtacatttccgacatctaacaatgcactatagattagttaacccaaaagtaatgattgaagagcttgttattggatcaagtgtagtcgatgatgcattgtgacccacccattttctgcaacgtggggataaagtttgactacttggaattgagatatacatatatataagtacctctgttgggacatgatatctgtactaccacgcaaattttggaacatcccacacttcctactattttttaatactagtattacaacgttagtagcttaattaaatgtgagttggcaaagtatttctgtcccaatttcaaccttctcctcatgtctttgggtgggtcttctgtctatggactagataaaacttaattgtgatatggcagttagagagagttatgatgttagcggtagtaactggtgaccatgtaagaaaagtgttgtggtttgatactaagagactaccttttgctaatgctcttagtaaggtagccactttttatttgatggtgttgcaactaacaaaggaatctacaatttgttattgtgaaatgtgaatgtgacagttttatcaaacttgtcaaggaattaaactctacggtagaaagttgataactatttaattcattgtatgagctttttgcactcattttttgggatgtaataatttcttgaaggtacgtttggagattttttaatttttttagttcataattattattttttttacgaattttttagttcataatttatgtagatggacttttaattaaaatgtaattggttaaggattgttcaatacgagataatattatttataatggttagagttggcaaagtattgtaatcaataatttataccaccagagtatacaaaaaaaaaaaagtaaaaagtattaatttacccaatttaaggtaatctagattatttatcttccattccacctgtgtctcacaatttttaaaataaataaataaatagaatagtacatagatcacttacattctttctactttccacatcagatatttgcttatctgtcccttattattaataagacatgtcagtgagtcagtacaagctctctcatgcaaaccaaaaacaaaaaattacacaattcacaattcttgcgaatctctccaaatatggaaacccgtcgtaaacaaagcatctccggcgacgggttctctttcccgagcactcccgaacccgataacaaccaccacagccgcggctcctcgtccgatttcgaattcggtagcattactccagactcaccgtacagcgatgaccccagcaaaaattcccccgccgaccatctcttcttcaacggaaaacttcttccgcactcgtttccattccagccaaccaatactacctccatttacggcgtcgtatcggagaattcatctcgatccatgattaagagtcgaacaagcagtagtaatagcagcaaagactcaatgatgtcgtcccgaagcaacagcaccaacagcaggagtagcactagcagttgcagcagtagtagcgccaggaccagctcctcctcaagcgacaattccgagagaaggctgttgtactgtcagaggagcaaaacgacgtcgttatcagttatggggagagaatccagatcagatcaaattagatatggcggtggaagtaaagcagtgtcggctcaagtgtacggttcttctcaaaggtggcaattcatggctcatcctgttccggctttaagccgagagacatcgttgcggcggaggaaaacagaggtttcgggtaataacaataaaactcataatgatgaagagaggagatcgataccaaagaagaagaaaaagaggaccgttattgttaagcggcttcggtttggtcggactccgaggattttccggtggttttttgctgcctgtagagagtgccatgctattgaaccctccaaaaagaaaaaaagttaaaaatgtcaaattaaaatgagttttcatttttattttttttctgtttactttttcttaattcggtcgttctatctctctctcactctcctattatgttttttcttatgaataatgtctgtaactaataatttagttaaacggtattaatttatttatcgaatgtgggttagtgggaaaaggaagatttgttatgatcatactggcatttttggacatacgatatgtttacctttccacaaatttcttcattagtctgggtacaaccattaatgttcatatcataactgtgtgtgtataccgatcatctttactattttattcttctcatcgatcgtctaatgttttttttagtttcttcatattttaaggaaatttttcgtaagaacgtgtacatgacttaagttatgaaaggagtaaatgatcagaaccaatgagcctcttctctatcaacgttttaatttagagtttttttttttttttaatgtcatttctattatcgttattctattttaaaataaaagaaaaacattctacaatttaataattttttatcaattttcttacacatttgttaatcctattcttatattcattctcctcccaaataaacgcttcctaatatattgatattgattgtttgatattgaacctcctccacattctcagccagcgtcaatggcagaatcgcttcaccaaaattgctagtcgaaagccttttggtttcgatttttgctatactgaagcggaagtgacggccaaaatttacgtaattgtcatataagatgagatgatttcgattagttaattacattatattttatttttatagtatattttatcatttacagtcctgtataaattaaattaaattaaattaagatttaactatacttaattatagtaatcatatatttagtatgtataatcatttaatttatttttaatcttttcttttattaatactcttcagctcgtcatagtatacatttttcagttaatagtaatttatgattaatttcattttttaatttaatgtaatgcttattttaataatttaattaaattatataatcttactctatagtcttatccaatatttaaaatatctttcttatattttttttgttgataaaaatctttcttataagttttttttttttctccttaaaaggaagactttaatccaaaacaaaagtttagaacagattatatagcaacaagggtaataactccttcaagttaggaaaaccagaaaccacaattcaaccttgcccaatttaaaggtcaaggacaagctgtcatttatgagtttgcccaattcaatctttcttataatttatgagcttttttagtgctgtaatttaaaggttaaggacaagctgtcatttttaataactattaataaataaaaaaggtaatttagctaattgagatcttttttaagtatgtagaccaaaggtaattaacttatttgatatgtattgtcttaatgggaataggttcaaattttcagttgtggaaattacatcaaagaactattttttttcataagaattacgataataagatgtacattttattatttgtattaattgtaataattgattcaaatataccacattttataaaacattggtatgttttaattttttgatttataaattattggatttttttgtctgatttatttttgataaccttttttttttattgttgaatatttattcttgtattgagattttataaacatgcatttacatatgctaatccaattttattacttatgttttctatataaatgttgatatggactgttgattatatattttttttattattgttgttgttgtatttaaccgtaattcttgttttctttatataatttcattacttatttcttttttagtattagattttcttgttttgtatttttaattattctcatttattgccttgatttttatgctatcatgtgggcttgttttgtgttatttttgttggctattttggtgtctttttgggctagttagtgtaattttgttggctcattttttactcatcctttctatcccaagaacttctagtagataagtattttatatttttatttattattttcataaaattataatttagattgtttaattttattttaaattatgttttccttatataaaaaaatagaatatacaaagttttgaaatgtatttatataactaggtgatcgttacgtgccaagccacgtactgttagttttatttaatattttaatttttttattttaattaataattaaaatagtataatt

SEQ ID NO: 111214 - DNA, 13151 bp, Cannabis sativa
  modified_base (13115)..(13126): a, c, t, g, unknown or other
cagtataaaagtaatttctgccgtatatcattatttttgtaaatattgagccaaaagtcagtatttttgtaaatttccctacataaaattccctttttgaagactccgaaccaagtccatattagaaagcccatttagggcccatcaaataatggactctctgattctgattatatgtctctgtcactctccgataataaatctaactgaagttcccccccttttctgaacagtcttcccgttctctcgactgtcattccccttctgattttaatttcagaaccctaactaaaccctagcttcctgtttctccccgaattccctatcgtttgagtgccatggacactcttcaagccgcttacaaggaggaagacgacgaagaagatgaaccttcaaaccattctgcttctgccactaccgaagccgccatctccgtcgagcctaccgaagctacgggcgccgggccactcggccctccgccatccgaacaactaaacggcgtcaagaccgacgcggaagcctccgacgatctatccgagtctgttaagtcccaagacaatgaggacgaagacgacgaagatccacctccaaagaagcagaaacatctatcagctttgactgagcaacattcggacctggaccaaactccagtatctcatcttattgcaagtaacgatggccctggtagtgcggcgattacggctccgattactaccacgaattcgaagaagtctaaaaagaagaataacaatgtgtgggttactaaatctacccgtaaagggaaaaaaaagactaaggctaacaaccacaatgctcctgtggaggacactgtattgattactcccgtgccaagatttcctgataaaagcgacgatacccctgatatgcaaatatgcttgtcgaaggtttacaaggctgagaaagtggaattgagcgaggaccgcttgagtgcggggagtactaaggggtatagaatggtgagagcgactagaggagttgtggaaggagcatggtactttgagataaaaatagtgaagttgggggagacggggcatacgcggctcggttggtcgactgagaaaggagaccttcaagcacctgttgggtacgatgggaacagttttgggtatagggatattgatggaagtaaagttcacaaggctttgagggaaaaatatggagaagaaggatacagggaaggtgatgttattggattttatattaacttaccagatggaggtaactgtgccccacagcagccgcatatggtttggtacaagggtcagcgttatctatatgcagcagactcaaaggaggatcctcccaaagtagtaactggttagtagttgttctttatcttttacttccatgtatatgaagtgttattttcgcttcttgttaatgtgataatatattgtggaaatagggtcagtgctagaaatagcaacgagaggctcagtattattaggcaaatttacgtctttatttccacgcctagttaaagcttttaagcgtctatggaaataggatgtgtatttcagatggttatcgaatgtccccagatggattaagtagttagcccatatgttcttaatagaattagattacctggttaacaatttctgaatttgtttctttgttttgggaccagcttgtcttactttgtagctctgtactttcagtttcctatttgctttggtcttttgattctttgcttggacatgctgttaccatctgtatgcttgtcttgtttgatagagtagatattggtattttcctatgtgcagatagtgagatatcatttttcaaaaatggagtatgccaaggggttgcttataaggatttacaaggcggtcgctactaccctgctgcttcaatgtacactcttcccaaccaaccaaattgtctggttaagttcaactttggccctgaatttgaatgtttccctgaggactttgaaggacgtccacagcctaaacccatggttgaagttccatatcatggatttgacaaccgaacagaaaatggagcaaccgaggagaagaaaccttagccaaaatgctgtaccactcaaccctactattgtgtgctcgtcatctgagttctcattcctccatttattgcggattgaagttaacttatagagatatggattaggacactaatcaagaggagagaaatctccatgtgatataggaaactatttaactcatgatcttttagttttttgtgcacttgcgtctttgtcttttaagttgtttagttaatatcaatttggtccttacagaaattagtcatgttacaatcatttttgaccacgctgtatacataccatttgctcaagagctctcttctcacattaattttaaagctaactgttccagtcatgttgtccttctgttttcttttgaatgaatctcttttatttatttatttatttttattgcgtcccatcccatgttttagctagtgggctaaaattgtccaatggtgtactttggtctgtcttatgcagggggtatactttggttgttttgttttcagagacctaatgtgaaaatgatacatgcatgggaacctttctttccatgtgcgctcacacacacttctctttctttttattatacgtgcacatgcactgttaacaattttaaacttatcaactcccagtctctcatacccatattattgaaacaagcatcttgtagtgattgagtgcttcatacttggacataatgctcttttaacagcttgtgaagacaatttgtgctgtgcgttaaggtgttagtttagactgggcgcttatcaatggaaaagaaattgaaagcaacattcagactgagtaattttactgccactctaaatttttattcttttctgtgtactgcatatttttctcctgttattaaaagggaaattatcttggtggcagttgtgattgttataggtattctactgaattgacaggaagttcacatcagacccagcgttcttcactgagattggttgtcaaatgcaacttatcttgaatttgcagcagaatgaacgaaaggaacatgctgagattggtagaattcttttgatcatagttgaagggacggataaaactgtcagcaaaatgatattgaatctccatgtacagtagatttgttcattttgagagtcaaaattctcctttgctctcacttttttcaacatctttctgttgttaaattgaattgaaacaagtatttatgcaaaacacttttgtgcaaactatgtatgctattatgcttttaattgcatgtcataatcttgcaattttaacagtcaacttggacatcggtattaaaaatgaaaacatgcaatagagttaattcctagcaagaaggatcggcagtcttatttgcaagccacagttaaataaagctcaggacctgtatgttcaccttgttaaaaatttcattgtgatttttttttttttgaataaattgtgaatacaaattaaaactacgtacttcaagtgggtttcgagtagtcaactataattgaaaacaacatataggctccatggttaagtctttctacactacctctgctaaactacataggtggtctttgtagagaagaactctaacgacaaccccatttcacaaccgcctttttactttgttgaacttgtattttttctattatttttttatatctaagttgaacttgtattgttgcctgctagtaatgtagaggagaattgagcccctcttgaactgacaatgggtggagagactgatgcctcttggaagggaaagacggtgttttcctgaacgaagggcgcttcttcagatgcttcaaagttcttttggtgtaaaatgttctaacataaggcgaagctctctccatcaacttgaggatggcaaagaagataagcctgaaggacacaataaggaaaacaatagctgccaaatcccaccactttgaatgattcagttttatgcctagcatacttgtgagtataaactcgccttttagcttcatcccatcaggtatgaaggcatcaaattcaaggccaatcatatcattcttgtatgcgccctgtattgcaaaaacatatgaacatcagtccttttttctttttttcagtctgtgcttaaaagaaaatttccacatatataattacctgtaaaccccaagcaccatagttgatgtatgaaatgggatagcgccagagtggtttgggaagatcaggtatggggcggaaaaagccagaagtcatcatcataatcgcctgcataagcagatgatggacagccatatgaaaaataattttagtttgctggtatgaagatgaagattacttgaactatccagtgtgagaataatggtgaaaaaagtttgtttcttctttgggttaccagatatccagctccaactgtgactcccatcaagaagttgggaacaagagaagctacaatcatcatggcactctccacagttgcaatgcagcatagaagatcgagggcaaagtataggtaacattcgaattcaggcctaaatttcaccatgtagtaaactatagttgaagtggcaaacgacatcaaaagcaggaatggaaaagcagataggaagttcgatatgacataaacaccaaccccataatatccattcagtctttccttgttgaacacctgtttcatagccaaagaataaaacacaagagtattggaagatcgatatgctgaatagttcttcattgtttttggtctgtggaaactaaattttaccttcatttcttcaaggaaagatgggaagcctccaatagacatgaaggtcataaaaccagctatgaaacccccacaagctccgcgtgccaagatagcagtgaagcttgtgccaacgttgaagaatatggagccaacacaaagagacagtattatatacactatgattcttacccagtagtacccaacatctcttgacatgtttttgaaagatctacaagtcaaaactgagagttgcttccaccatttcgcttggctcccacgtctactttctattacaagtccttcctgcaatactaatagttgttataagttcctatgtaagaaaatttagtttaatatcatagaaaatgatcatatatacttacaatggatgagatttctctcatcctagctttagctcttgttgcgtactccgagttcttgtaattttcaactagagctgtttttatctttcctattggtatattcgttaaaggatccgagtcctgcagaatcagacatattagataaagaaatcaacaagtattgactgttgagtaacaggaagactaatcaaaatttgaagatagcaccatacatgaattttgcgagtgcccatcaaagtgtttgtcacctggtcgaaacccgaattaatacatctaagaaagtgatcagagggatttcttctacttggacatggaaatcctgctttggcaaagaactgcaccattgtatcacaaacattttctttaatgtttagttcttcacaagcttcaatcagtacatataatgaatatagttaaggttcacagtgcttttttcttcttttttacctcaacagccatctttgcttgtccaaaatacactgtttgaccaccagaaagcaagaacagatcatcaaagagtgcaaaaacttcagagctcggttgatggattgaagagataacagttctgccatcaagagaaatgttcctaagagtttgaataacaaagaaagctgaggcactgtcaaggccactggttggttcatctagaaacaagagacgaggcctagtaaggatttcaagagcaatactcagtctcttcttctccccaccgctaatacctcttatatgccagtttccaacaagcccatctgcacaatcttggagtcccatttccataatggttgcctcaacagtctcattcatctcatgttttgatagagttcttggtagccttaacatagctgagtaagttatggtttccctcactgaaagagttcccagtagcaaatcctcttgtgtcacataagcctgttacatcaaaatattacacaagattttagttctaaaaaggaaaagaaaaaaccagctaatatcattaaagagagtacttcttacagcaacaccatagtctagtcttcttctcttcccattaagaagaacatttccagtcatgacaacatttcctgaaagtcttcctacaacaaaagatagaaaatcaattaatgactaaaatcaaagtaatacttaacaaggtgaccaactaagccatgcaggttataacctgctaatgtatcaagaagagttgattttccagagccagaagggcccatgatagccatgattcttccaggctcagcaaaaccacttagcccatcaagcagcctcctactatgtccacttccaaagtttggaagaacaacacttagatcttcccacaccaaatacatggctgaatgttgaaaattgtctcttccccaacttggtaaatccaaatcatcctcacctgcaccgctagtggcgccagcaaagttctctatttccatttcattcatctcatcaaattttctgcagtatggctaagctagcaacacatagagaagtacttcactgatatatacaacacatactagcatttttaatactcacagttgagaaattactaggatagttaatattttcaacaacatgtaccttgttttatatagaggaatcatagcgggaaaacatgtagagtgtctaacggttcacttgaataaatgtcctccttatagattgactacttttgctgtaaatggcttgaaatatatgctgttataatgtctcatatatatacacaggacaagttggaatggctactatatcatcagtgacttagtggtaattaataaggcaggtaaaaaaataaaagggttagtactggtaataagtgtgactgtgtgagaagtgcaataattatgctcaccaaactcatcatgttactgttatcatctatctatctatacacttgttcaaagcagaatctcttctctcttcatgatgacgtataagaatatgatttttgttttctctttgactatagtttattgtactagtatgtgctattagaaatattgttcttatttttaaagtagtgaggaggaaaagaatacaactatatatataattaaaataatcaaacttaactcaaatcgagtctagtgcttcattctatgcactaaaaacaattacgcttcctcaccgggtgtgagagaaaagctaacaatgttggtctcctagattaaaacggtctatgagcaatagttaagcaccttacttctacttcaacaaactgaatactgtctaagaagaccaccaagatcaggctgacaattgagatggctttgactaccagatggaaaaactctaaaggagcttctaacccatgaccattttgagtaatattagtacttaatttttttatatataataatatctcactgatagtgagtctcaataaaaatcaaacctcaaaatgcactttatcatagtgtataatgtatcactatttttcaagatatgccacctctctcatccatgtttacagaactgattgcttgtattggaaaagtggtaagaaatcacagatggcaccacttcatactctctagctaaatatgaaatggattatttgtagttgtaaatggtcttagttcaaacatggtaagtttcttctttcaaataaccaaaaagaactaaaccacattaaagtaactgtctgtttgtgtgtaaatagtcataaacatacacatgaactaatcattataaagcaaggaattattgtttataagagacaatattatggccatatgtaattgttgctcactagtatttttagctttaaaatgtgagatattggtaagtagttaaatttctacataaaattaaggtgctataaaagtgtgaaatcgatcaggctgaggataacagatttcaggctaatacagctagaataaaagggtattggggaccttgatatacaagtaaaatgtgctcaaccaatccatcataatctgaataatgatatacctcatgtaccgttcatgtaatacttcacatatacgtgtacataggcagatatgtacacaaattattcctctttttggactaattgaatttaatttatcatctctattttcgcacccatgtgtccatactcaaataataaatgctggcattattagaacgggcataccaataccatgtcagattagatatcagaatgccactttatctatctttcatttttctattttttttaactaggaattcatagcgtgtagaggggcttttattaggtgggaaattcaaccttggtagttgacaaaataataacaattttttagcaggagatctcagttctgtactccaatcaggatagcagtgttgcagagtgcaggctgaagagtttccatattctagagaatccccattagtataggtacaaaagataaagaagctgccctttgtaaaggggaatttattgaaattgtttgcttctgtttttgcctctttcactgtgtatttctttctagtgtttttctttttaactattcaactttggctcagaagcataatctctgattctctatatacacacagacatatatatataataatatttcggcttatgcgcccaatgctatgagcacttgaatattgacaccttagatggttcacaatgagatagacggcatataaataatgtatatttgagctatacaagtagatgggaaaattcccaagtgtgacagtaaaaatatttaaaaatagacaataattcatgtatgaaacataaacacactgaatgttgttatgttttttgtaagaatgtgatagtgactaactactcaaaactgcagaatctggtttatttcagtggtagtgtcttgtactgcagctcaacttatattaataatttttgctgaagaatgtattaagggagtggagagccaagaccctcttgagaagacagcgagtagagagggttgtggcgtttggaagggaaagagggaattttcctgaaggaaggccttttgtcaagatggtgtagagctcttttggcataaagtgattgaaacaatggggaagctctctccttgaacttgagaatgatgaagaatagactgcggtaaagtatgaggatggccacaatagcaactaaatcccaccacttggaatgacctactgaaataccatacatctttgtgatgacatactctcctgtcaatttcggccccggaaatagtggctcgaattcaagcccaagcaaatcgttcttgatgccaccctgagtaacaacaacaacaacaagcacatttttcagtaattagagagacaagataatactcttctttgttcataacactttttaggctaagacttgacataataatccttttgataattctttgcatagtagccttccagacacggtgtcaagttttcagaaaaactactatgtaaagaatcataaaatggagtgctatatatgaccatttcacttgcagtatgttgttttgaaatgacaatgttcctagtttttcatgttaacctaatgaatcaaaagaagttacctgaattccccatgagccatagctgaggaatgagaccgggtagcgccaaaaaatcttgggcagatcagggagcaagcggaagaatccagatgtcatcatcagaatacccttcatttttaaaagaggtaatcttgattaagatgccaataacaagaagaacaagcatttaggagtaagagaggaaagtatttcttaccataatgccggctccaactataattcccatgagaaaattggggactaatgaagctacaaccatcatgaggctctctatgacagatatggaggtgaaaatgttgagacagaagaatacataatgagaaaattctggtctgaacttcacagtgtagaaagtaatagtcccagtaacaagagtaatagcaaccaaaaaggggaatgaagagatgaagttggctaagatgaacactgaaacaccataatacccattaagcctttctttatagaagacctgtgttcaagaagaaaaaaaagaccaaactacgaaaattatggattatgtttcactatatctatcaatgtatgtatgtgcttcacattttaccttcatttcttcaacaaaagatgggaagcctccaatagacataaatgtcatgaagcctgttataaaagccgtacaagctgaacgagcatagatggcagtataactatttcccacatcataatagatggtaccaacacatatagatacaactatatagataatgatcctcaaccagtaatatccaacatctctggacatgttcaaggatgatcttcgaatcaatgtcttaagctgagtccaccaacttgcttgacttccagtttttgtgtcaatctcaaggtcttcctgcaaaatacacaagtattttaaacaagttttgaaactgataatatgtgtgtttaatgttgtgttatggagcagattgcttactccaatggtggatagttcttgaattctggctctggcttttgctgcatactttgagtacctatatttttcaacaagcaaagctctaatttccgctgtcgccacattcatgagagggtctgttgttggaacatcctgttacaacattgtcaattgtcaaaacaactgaactagaacaaccacaacaaacaaaagagctcagttgaaggaagaatcgtactcgcaattttaacgatcccttaagcgtggcagtaactttgtcgaagtctttatttacacaacgcaagaagtgatcagaggggttccttctgcttggacatggaacaccagattcagcaaagaactacaacatcacaagaaacacacagataacttcagtcacaagtaaacataattttcacataactaattctcttcttcattattacctctacagctctctttgcttctccataatatacagtctcaccacttgacagcaagaagagatcatcaaagagagcaaaaacttcactactaggctggtgaatggatgagatgacggttcttccatcgcgtgcaacgttcctaagtgtttgaacaacaaagaaagccgaagcactgtcaagaccactggtgggttcatcaaggaagagaagagaagggcgtgtgagaatctcaagagcaatgcttaatctcttcttctcaccaccactgatgcctctcaagtgccaatttccaattaacctatcagcacagtcatagagccccatttctgagatggtttcctccacaatgctgtttacttcttctttgctcattgtagttggaagccttaaaagagctgaatatgatatggtttctcttacagttaatgttcccagcaatacatcctcttgtgtcacataagcctaaataaattttcatgtaataataaaaaaagaaatgaatataagcctttttactatgcatacactttcaataatatctggaaaaaaaaaagaagaaagaaacttacaatagcaccatattcaagtcttttcttgctcccattgaaaagaatacttccggtcatgaccacatttcttgacagtcttcctgtgccccaaaaaggaaaaatatataaaaatgacttcattttgtgaaaaaagaaatatcatttagtctatgagcgaaggcacaaagttaattcagagtttagttagtactagcttcgtattgatataacaatctgataaacgacttgtgcacataaatagaattgtgacacgcactaattccttaaatatatattttgaatagacatagctccaaggaccagtctcttgcactacactatcattgtacaggtcttttgttgttgaagtcattcaaacaagacttattgttattgattctatgatacaaataagaccgtacgtaatcagtccttatgagatttggcaatattgttgatcaattctataatgagtaatgtgttgcctactccatacccccaaaaattctattttcctctccatggcctgaatgaagctgggatgaaactaagtggaaatcccttgtccacaccggctgatgttaaagaaacaagagattagtttggttcaatctgaaatgacaaaagggatatgtcataagcgtgtctatactgtaaatagattcaagtttgttcctagaagtatttaaagaatgggaaccttttttcttctaagctacctacaaggtgagtgattaaactaaacttatacaatacttgaattcttggcaaccgaccgactatcatttagtagttgactgatgttgttcagttttagcccttcaatcgtattggctagagacataaaacattttactatacaaaaaatgttgagagagatttgaaaaaaatgtagttgcttgagatcgttgattagtgtacgactcactttttttatttggtttgagagtgtttttgttcaagggagtttgagcaaactggagactgatttgggtgttgatcagtggatttggctcttatatttctgtcccggcttcaactgcacattttctgatgatcctaactaagtatttactgatggtattatttatgcaattctttttataaatgatatactttagcatctcctaattatctcatatgttttacatacatacacacaaatatatacatattcaactgtgaaaaattgttacattgacaaaatgtaccgtgatttcatcactagattgttgccatttcaaattataaacattaaaagtttatccttctttgttttgcttcattgcatttccctaagaaatttccgatgtttttttttaaaaaagtaaaaacatggccaaagaaaaaaataaactcatagactaaagttcaatcttctattttagaccaaaggagtagtcacttgatggggtgtgtagatattttttcatataaataattagattggattagaatcattagatgagatgttgatgaagtaaacatctttaagtgttaaaatagtgaggtaatactatacttttacaaaaattagctctcggtgtgttaaattttaggctaattagaatttttgctccctgaactttgacnnnnnnnnnnnnatgcccctgaacttttaagatcgtt

SEQ ID NO: 111215 - DNA, 11187 bp, Cannabis sativa
  modified_base (515)..(516): a, c, t, g, unknown or other
tcggattataattaaattttattttgacaaaaaaaattgatttaagatcatatttgtaccataatacagggtctattttgtcatttaacaaaacagatgatccaataagtaacttttgcaaaacacagagtccaaactggtatttaccctaaaaattatatatacaattaatattttaatgcaataaaataataatttaagaatctaatacatataatatcaatatatttcaaaagattaaatttattttctattattatatatggaaaaaatataatttaaaacaaaattaataaattttttctacatataattttttgggactttttcattttcacactttaaaataattttttttgcatttttacgaaattctacatagaaacctctattgcaactagtactgcaacctaaattccaacaaaaaatcgtatagaaatccctattacaactagcgctgcaaccactttaaaaactcaaactgtaaatttgaaaagaaaaaaaaaagttaaaannatagtatataaggtaattcccctaaaaaattttctttttgaatttgttattaaagacataaaagaacaataatttattttgttttgttattagttatgtaaaaaaatatattttaaataaatattaaataatttagtattaaaaagtaactaattcaaagtaaccaatccaatctgcacttttatggattgaattgaattagatttgaactattgtgcagatcatattagatccaaaatataaaatccacacttaatacaaatcaaatacaccatgagtagaatagtacagtttgaaatgaataaacacccctaatttaacctaccatacaaataagccataaaaatatacactaacaccaagtattattatctaattaacctccatatataacaattcaacttttcttctttccttgttcaaaaaaaaaaaaaaaacttttcttctttccttgaaataaggatccagtgtttctaatttttgccataccagcatataaatgtaaaacaccacgagtgaaaacttgaatgatataacacagaaaaaaataatgtattttgactatctaacaaatatttatcaacagaatatatatatataaatattcgaaaatattatccatttgaagataatcataaagctcaaacctgacaagttcaaaattcaactcgtccccatatgcagaagcgtgtgcacgtactgggctgccaccagtaactaggcagctctaagctaggacagattaaaaagcacaatacacccccgtttataaacgcctaaagcaattatacatatgatacagacctaattatctaccaatgtatacaagccaggtaaaggaaatgctcttctaatgtcagtctcattgtctcccactcaactccaacggttcaatagaatctttgcatttccttaaagcttctcttatctctttcaacatttcttttacattgatgcctttcctgcgaaaagaagtaacaatgaaataaagatcaataattttaagggaaattcttactaggaactctcttatcataagcagtaaatatgtatagaattataatagtcaaaagataaacatatataaattaagcacgtctcctgtggagctaaatctacctatgaaaatttgagcaagaaaattgaatttgttagacagaacgaatttgtatggttcacataatttagctttcacgggctggtcttatatgcatcttaaagttgttcatcaaaccgtctataccgcacaaactatccacaccgcataaaaaatacattttttgtaatacggttgtagtttgtatttttgtcaaaccacagtgtgcaatacaatttgcaattttagataaaataattgctctttaaatcgcacagcaccgccctaattttactattttctatattgttttgatttaaatttcaaaatatattgatctaagttttgtctcaaaaaaatgtatatataaaagattatgtatgtataaaatgtctatttcaagtctttaaagatttatgtataaaaaattattgacatacttagtggggtttgaaacttttaacattattttttattttatgtactaaaagaaaaagattatgtatgtatatatattagtttgaactttgctgtatttttattacgtgttgttgaaactttaataaaatgatgtatttttattgtgatactaaaattatatcaatagtgtaaaccgctacactgtatcgctttttttggtgtagtttttgctgttttgaggtgttgtagtatgtcacagtttgaaaaattgtaaaaatcatggtttagtttgaaaaattagcttaaatcccatatcacacaccgcaaacacccttagcatctatgccggtgcttgggcattgcaacgctgttcaataaagatgtgaataatatgagtcaaggcttaggcaccacgatgccaacctagaatgcaagcgtatcaggaaagtaagtctggtgggaaaatcagtttggttaattgagcgggttctcactttcatttttctattggctatcttgtataatatgatcacttttgttgtgatatataaagcaagggacatagttcttggagatgttcgggttttgaggaaaatctctaaagaaacagctgttgtaggggtatgcctgaagcttgaaggcttgcacgtgacaaagccaatgttaaatcggttgtatttgaagcaagctctttactccttcaagattgtagagaagaagtcaatagaatgacagatttcaacaacttcatcattgatcatgagaacattgttgtatcaattgaagatgaagatcaacccttactcctcagaagttctttgccaaaataatatacaaacttaaatggaaccactatttaatggtagagagtccttgtctaaggatgaagttcaagcagccttaaactcaaagacattaaatcggagaagtgaagccaaagcaagtaataatggagagtctacttgctagagcctagaggtagctctgacaagagagagaacaaaaatgggagatctggattgcaatcagctcgaagaaagataataataataatatagtgttataattgtcccaagataggcatatttgaaggattgtgtttgaaatttaaatggatttgagccaagcgctgcgaagtttagagaacatggtgatgctgttgtagcaagtgatggttatgagtcttcagatgccttgttagtctcatcaccaggttcagatgagaaatggctacagaggatgttccatatgactgcaaacagatcatggtttgaagaattcaaggaagaacaatgcgtttaggggtttcttgtagacaagaaatcgtgcctgatggttggaactggaaacacgagacttggacttcatgataggatggaagatgggtgttgaggaatgttagatatgtgcccaaaataaaacaaaactttatctcagttgcaattttggatgatcaagactttattgtcaaagtagagaacatcatgaatgtaactaaagtctcttgttgttatgagaggaattaagaagaaccgaatatattcacttgatggcaataccctattttcgagaagaaaaaaaatacaactctttggcacaagaggcttggacaagtgagagagaagtttgactgaattgagcaaacaagtattgctatgtggggagaagttggacagcttagatttctgtgaatactatatgtaaggcttgtagagtcaactttggtactaggcaacaaaccgaaggggactatatatttatattcattcagacttgtaagggccttcaagaattccatcacattcaagttcaaaatatttcttaatttttgttgataatttttctcgaaagctacgggtcttcattttgaaacgtaatgatgaagtgtttcagaagattaaacattggagtattgattgaaaaccaggccggtaaaaagtttaaaaagttgagaactgacaatggtcttcaatatagtgctaataaactgcagctggtacacctcaacaaactagacttgagagatgataactccatgaaagtaaagttatttgacttttttgtgtattaatgtaggtttgttctcaataatttatggtttaatttagattgaattgtttttatttcattaagtaattaatctaccttaattatgtgtattttaagagagctcaattgattttaaaggctcatttttggtgcagaatttggtagcaatgctgcagcattttgagcaaagttgctattgagggatcaatgtgagaaacaaggtcagtagtcatttaatgagcttttcttaaatttgtttgatgactttcggaaaaataaagtcatatgtaatatgattaaaggtggtctaaaaagaagaaaggagctgacatgtgatgaaaaagataaaaggttccctaattggtaccctagtttttggaaggagatgatatttaaaacaaaagcaccagccgccattagggattctctcacgccattcttttcagcagtcactagagagaatacccaagcgatgaagaaaaagaaaagaatgaaaataggaggcttgcaagggagaagaagaaagtacaaggaggaagaacatgttaagacatcattaatggcttaatttctcttaacctctctttatttggtatttaaatcttcatgtaatcttttgagaacacgaatatgaatattttagctgttttacagatttaatcataagcaaattttttagtagctagaattgttgatgaactgtaatatgtaattttggtatgttgttgggaggtagcttttatttggccatcaattgagggtaattcaattattactagtgctgaaaagattaagattaataaacttgtcacttgaatggtgcaagactactcactttagattgtgatttgtaatagtatagatgtatatttcaccttgcataactaaatggaagtagtgtttagaaatgtgttgaaagcctgtgaatttgtttggaattctcagttagtaaagcccaattttttatagcatacttttcttagattttaggtttaatcaaatcattatcagttgttttggtccaagttggtaggtgttaactttacacaatttgctactaacacaattcatgtcaagacaagactcgtacttatttttgactatgtacacttgcacgtgtattaaaattcgcaacgaaatgtttaatagaactatattggagagggtaaaatgactgtttcttagtgcaagtttaccgaagattttttgggttgaagttgtgtcaaccgtggcatatttgatcaatagatgtccataagctacaataggtttgaaaacataagaagaaatttggtcttgctttagctatgatagactaagggtgtttgattgaattttttatgcacaattaaggaaagacaaacttgaaccaaaagcattgaagtgggtgtaaaagcatacaacttgtagtgtttagaagcgaaatttaagaagtgaatcaatagtagtgatgtcattttcaagaagttcttgtacggacaaaaacaatcaaatggaaaatttctgatatgatttattttaattatatgtggatgacatgttaatagcaagcaaagacggatgatttgacaagatgtaaccagtttgaagggatagatgcatgacataaaacattaaatattatataagaacatagaatcctagtgtctactatcctaaaacaacatgaataagggaagaggagagtgtttgtcaaaaagaagagggggcaggttccaaaatgaaggcttgagaacttgaaatctgggtttttttagtataataagaaattgaggtaatgtctcacacgaaggaagctaacacctccctgctcatcctcaaggtgtaagccttatgccttgagaattctgaccgtccctcaaaacaccatttcaaacagttataaatttatgcgttgatcttatacgtcacgatgctggtgcctgtatgacgcaatgccatttgctgaagatatgaagaatgcaagtcaggccttaggtgttgcaatcccgacccagaatgctgctagcatcacgatagtatttctatgtgttgcaacacccatgaatcctttggcctagtatttagatcttacgcgtcacaacgttgtccttgtgtcgcaacacccaagcatattttcaagaaaggacttttttggtggggaaaatcaacttggttagttaaggaggggttccaacttcatttttattggttcacttgtattgtaaggtcactttgctatgatatataaagtgagtgatttagttcattaagggttcgtttaatatacttaatacaatactatgtttgttattgacttgtatattaatagattgtctaaaattatattatctaccataaactcgagcccagccgtggaccaagattccatctctagccccgggccacaaatcccggatcgacctatacccggaccctatccccaaacccgaacgccaaatcgaggtccaagtctggagtcttaagtccaaggccaaatctaggtctaggtccagggctgaatccgggtccagggccgaagtctgagtcggggccgggtttaggtctggggtcggggtccgggtctagggtcgggtttaggtccagtgtccgtgttcggggttcggggccgagtccaaagttcggagccggggtccaagatccaagtctaagtccgaggccagagtctaaggtctaggtccccaaacctggattctttctaaatattataatataagataatacggattattcgttatgtattaaacaatacgattcgaattgcgttaaaatttatggtcgtaataattaatactatacaaagttttattcaaacatagagttcattgttatttaatacaatatgaccgttatacggcctaccaaatgagccctaagagaataacgtgattacaatttgtgagtatgcaacacttagagaaaacaatagagtttgtgataggtatttttcttgagaagggttgcggaagagagaatctcaattggtgtaaccattattgaatgaatagtaagattggctgctattccaaggacatagatgatcttggtcaaacctcgtaaatcctatgatcttttctttcttgcattgctattggtgtggtatgaaggttttcagtgtgaattttctagtttgagtttgatagggctatgaaggggattcaaggtgcttgattgattgttgtatttccatgggttttccaaatcaatttttttcatttatgaaagaatgacaacaagttagccaaatagaaaatttcaaagagaaataatgaacttacagaacactgactcccacaacagcaagaggccttggatagtcctcaagttgtttctcttttctctcttcattatgatctagagcatcatgaacttcaggggacgaaggtttgagtgttttgtcagagattaactctagtttagatgttatcctctcacatccaattccaaatatttcttctttcaaagaggaaagactgtcccttgcctatatatatttattgccaacataagaattccagcaacagaaaaacagaagttaaaggcaaaccagaacttgtataacccattcaaaaaaaaaaacttgcataacaagagaaaagatggggaaacaatagcaaaacaaacctcaggaaggtcaattttattcaaaactacaatgtatggtcgctcaagataattgggattgtacattcgtaattcctgaaaattatacaaacagcattttagcaaagttttagcgtcaaataaacaagtagcaaaagttatcacatacatacttctttaacagttctgtagtcttgtataggatctgcagctgctgcatcaacaacatgcactaatactcgagttctcctcaagtgccttaaaaaattgcgaccaagaccctaaaggtaacacaattataaaacaacttgtggaattttaattagcaggcaagcaagataataagaagaatttacctttccaagatgagccccttctataagaccaggtaaatctgcaagcgttgcttcagaagaatacatctctgcccctaaacttgggtcaccatcaaggcgtccaaggtttggcattaaggttgtgaagggataatcagcaatatctggctttgcaagtgttatggctgccaaaagagttgatttcccagcatttggaagaccctaaagtaataaaaagtagaaaacttcagcatctaaaatctcaatcttaccttattcagcatcaagatctatgaacaaagtttgaatattaaactcagttaaagacagaattaataaacaaaatccacaagattgcgttataaacaaataatcggttgaaactgaatcaacagtgtttataaatataattgtctcaattatctttttaacaggttcaaaccttctactttcatggaacacaaattgtaaacggcaagacttccagaaaaagtatcagattagatcatattgcctgttccttggagggaaaaaagaaaagcacctagttttttttttttttttggaaggaaggaaccaaatatttcatattgcctgcagattaacatgaagattatttaaaaataataataataatactaacaataatattatgagtatagaacagagtctagaatttggccaagcaggtttatccacatatctcatattggctggtctttagaaagaagaaaaaataaaagcaccaagtacttcagaacctcaaatattcttctttgacattattaaagttttcttatttgtaatcagtgaaacccaaagatcaattctttgataccgaccaagaaaaaaaaaatcaattattaaaaaattaataatgaaaaagtgaagtgatacttacaaccaaaccaacatcagcgacaactcgtagaatcaactccaaactaacctcttctccaggttgaccaaggactaaaacctatgatgaagcataaagaaaaaatatttttaaaataatacgtatatatataaactaagaaaagacagtaagctagtaaatgcctgtaccatgcatttttagactgcaaaatctgattatgtaattagtagacagaaaccaccaatcaaattacattatttgacttcaaacacattcaaaaattaatgatgacaatcatatctcaatttatgcatcatgaagcatgatgattgatagccaaaagaaagagatatagcaaatgttctcattgtgtatcaatattacattcgctttgggagttaactttgccttgaatcttaatggacattttaccagaaaatacttgtttatcaactagaagggaaaaaaggggggacaactttaccttatcactatcgtctctcatcacatttgtggttaaagccatcaccttttgttttctgtgttgaggcatgtctaacaagctaatctgccacaaaccaacaaaacttacatctgaatcacaaaatgatattgaccaacaatgtaaatattgcatatagtacttcctctcaaaagcttggccatacaaaaacatgcaaacattactaatcacacatttttcatgtttatacatttatttgtttattaattatatttaaaggcaattgtaaattgtattgctttgagtgttatatcagttgagttcactcgctatgacctaaaatctgatgaaacgtgagactacaatagaagaagagagactacataagtaagccctcacaattacctacattgagaaaattatagaaataaataaactaagcaaatcttcgctaaaattccactacatttaaaatgcaatgttttgtgtctcacccctccttgaccaccccttgccacaaggatttcatcacccggacgcgctagatcagctaacaacttccctcgtttatgcttaactactgtgcctgtcaagtttatcaacaaaaaataatgaggcaaaacgatagaccagatttgaaatgcatagtactccatagactcctcaaacaatttacatgaaacatagacgtcctataaagataatgaaaacataactgacatacaaacctacaggcacaggaatccgcaaaattggcgcaggaagtccatcccgcaattgcgagttcagaacacccatggcattaacatttccaccacgtttggcattagaccggcttttcatatgaagttccaacaatgaatctttaccctcgtctgcataaattactacatctcctccatgcccacccgcgggaaggataagagacccatcaaagtcccttttgtacgaacctttctttctggcattttccttgtcgcgttttccttgcaacttaccacctccctgttgattgggcatattgaggacagcaccatggcctccatcacctgaacgaactgtaattatgacttgatcaaaatacttgtgaggttctcttatcaccatgtcttgttttgcagaagaaggctctttggctcgggcaagtctgcacttgatcgtgtagtatcgaatgttttcaaaattccatgaccgtttgtcacacctatggaaacatatggaatgttactaaaatatgaagtgaagtaacaatggcaaacgaaatgaacaatagactgactaattagaaatcaatcctcatgagtattcctaacaattagactaagaaatctgcattatcggtgtatttattcgcttctaaattacaatttgcaagttttaccgaattgagaaaaatggaaaagcaatcagttttgagcaacggaactcaaagccataatggtttgatgttttctcgagaaccaaacaggtaccttttgtggaagaagacggcggagaagaaggaatgatcccgggaaaaagaggaagttaatggcggcaaagagaggagggaggccatgtacgaataccaaagctagggagccaacggcaactagtgagcaaggaaaggaggtggctttgcgttggggcgggtttggctagtcctatccaaaaaacccagccctatactcaattggactatttatagggtcggcccttttgggttcccattaataccctttctttcattagcttaattaaaaaataaaggctaattagtaatttttccctccgaactttgacatactaaatcgtgccctctgaaatttttttgccgttaaaaatt

SEQ ID NO: 111216 - DNA, 2415 bp, Cannabis sativa
ttggttttgtaatgaaaagtgtagggttttgtcacctctccaattatttctccattaggtaggatttttttggcccaagcacttatttgttgaggagaaactgatccaattcgaagtatacttccccttccccacaacacagttcacctattggtccgctcaatactactcccccttctcatgcatcttcaacatcatcctccacagcctcccctcccatcattcctgtgatagtagatttgcaaggcccatgtactcatcccattgctcatactaatgtacatcctatgattactagagctaaatctggcattaccaagcctcgtttgctttttagtgttgctgcaggtacaccgattgaaccatctaattttcgggaggctagcaaagatcccaagtggcttgcggcaatggataccgaagtggtggcattaaaatctcagggtacttggattcttgttccaccacctcatggctttaaggtcattggttgcaagtgggtgtatcacattaaacttaatgcggatgggttcgtggaacgctataaagctcgcttagtcgccaaaggttttcatcaaactcaaggtcttgactatcatgaaacgtttagtccggctgttaagccaaactcaattaggttggttctctctttggccacttctttcaattggattgttaagcaacttgacattcaaaatgcatttcttcatggcgacctcaccgagacagtttacatgactcaacccgaaggctttgttgatcccgatcatccacatcatgtttgcaagctcactaagtcactctacggtttaaaacaatctccactggcctggtttttcaagcttagtacagccattctccaatggggttttgttgcttctcaagctgatacttctctcttcatctatacatccgaagctgcagtgattgtactcctcatttatgtagatgatattatcgtggctggctcatcttcttcagttattacagaatttcttgactatctcaacactcgttttgcagtaaaagatctcgggcctctccatttttttcttggtgttcaggttcattgatctacagccggtttccacttgtcccaaacaaaatatattcgggatcttctcatcaaaatagggttgctggatgcaaaaccggtcaatactccaatggctcttgctcctttatctctctttgatggtgagcctctcaccgatgctacttcttatcgaagtcttgttctggcattgcactattgtactcttacacggcctgatatttcgttcacagtcaacaaactgtgccagtttctccatgctcccactaccatccattaccaagctgcaaagcgagtccttcggtaccttcatggcacagctcatcttggtcttcttcttcaaccggacaattcacgagagctacattgtttcactgatgccgattgggcatcatgtcccgatgaccgccgcagcactagtgcttattgtatatactttggcttaaacctcatctcttggtcatcggcaaaacaaaaggttgtctctcggtcaagtactgaatcggaatatcgagctcttgccaatggagcctctgaagtttcctggcttcaatctctccttcgtgaactcggcttcccacttactgtcccgcctactttgcattgcgacaacatcagcaccctacatctcgcttccaatccagttctccatgctcgcactaagcatgttgaaattgactatcactttgttcgcgaacgagtcaaaaacagtcttctacaacttcgctacactccctccgatgaacaagttgctaattgtctcaccaaaccgctcgttgcctcttgttttcaagacctccgcaccaaactcacggtgcttcccaatcccgtgagtttgaggggggatgttaaaccatgaaattatcccttcgtacttaattgtattactttcttgcttttattatatggtgacatgtgtccttcaatgggtctcttctattataaatacaatgatagtgtgtactcttttctttgaggaacagtaatacaattttcccattctttctgacaggcaagatcaatctgcccaattatgatgccaaatctgcccaattatgatgccaggaactacaatttcaatctttatatcattaacatcattaagatcagattttttttttcagcgggataaaaatgtatattcaaattcacatgataaacaaaacatctactaattataatgaccacaaaaatagccaaacaacaagtatagcatataaaattatatgtaagaatcacatatagtcgattattgtctatttttttttttttgaatggaacttgaagcttcattgaaagaaaaagaagtacaaagcaaacaagtccttacaaggaaggtaaagaaccattccataataact

SEQ ID NO: 111217 - DNA, 9397 bp, Cannabis sativa
tgggtctgttcgtgcggctgtttagccgctgcttccttcagccagtccccaactctcttgtggacttgtattgggtcaatagctattgggcctgggctatcagtgtgggtgcacaagcacgtgatgtgaatgctggtatctatttcagatgatgtgcgcacggcgtacacacgtgggtgacatgacagttaccaaggactatcaaaagagatgcacgtgggcttaagatatctctattggtgaacaagcgcaatagttcaatctaaaggcttgaccatgcaacacgtgggcgtgttagtgatgattaacatgtgatgttgatttgttgtaagctggttggtccaacaaagcctaggcgtttggggttgttaatcgtactaggagtatttatttgcttgtatgcgcctgagtcgtcggggtgtaatgttcaccacttgaacaattatattctttgatattgtgattaataacaacattgggaaggggtttccgtacattatgtgtgcttatgtttatttatttgataacgagtgaatgttgttaagtgaacgctgggcaaaccttgaacatgagtgagtgtgtacaatggagtgttgggttgactgacaaaattggggaatctaggccatcacatggaaaaatatctagtgagaaatttaccctgtgatagcaccatgttcatctagtatgaaactttttttgaaacaaactctattgattagccaaacgaaaacaactagtctcaaaacatatcaaatataaatgagatggtattctcaaaattaaagtgcacgaaatgatattttagccagctcctgctgtgactgatggcgccaaattcgtttaagcaaccggctgcacttttattgtgggaggccgtaatgtagatagtgttttcaaagtactttttttttggttgtggcatgcatataagaagctttgaaaataactaatttgtgggaaattccaatgcttattctaaaattctacaggtacttgatgatttagatattccagaggagttgagagacatgttcatcacaatagtgaaggccactgtttatggtttacatacatttgatgatttaaaatgatttttcattagtggtgtgaagatttagagaaagaaactcacattcgtattggaataaaagatatgagagttgcagatgcagatcctgcatttgcttgtatagtgttgatgaatcttttgttaatttgtatttgcttttgttattctatttcgtgtgtcgagaagcttcgcgccaccagccctgggtgaaatgaaagcgaatcacaagcttggtgaagccatagaccttttgtactctcgtggatgcgcctcttccgaatcttacacacgcctcctcctcgaatgtgttcggtcccgcgatgttgcccaagccaagagattggagtctcacatggagcttcacttattccatcccaccaatactttcctccataatcgtctcctccatctctacgccaagtccggtagacctgaccatgcacaaaacttgttcgataaaatgcccaaaatagatgtcatatcatggaacgctatgctctctgcttttgccaaatccgggtcggttgagagtttggaaaaggccttcgaacaaatgcctgatcatgattcggtttcttttgacacgatgatcgctggttcttcagggaatgagcgtccaagaaaggctctagagatttttcttagaatgaggagggaaaattttgagccttcggagtacacttttgttagcctcttacgggcatcttctcagttattgaatcttaggatcggaaaacaaatacatggtagagttgttggtggtaatttggctgggaatgccttcatttggaatgggttgactaatttgtacgctaagtgtggcgaaatcgacagggctcgttggttgttcgatcacttagtgaataagaacttggtttcttggaatttgatgataactgggtatttgaaaaatggtgagcctaggaaatgcgttgatttatttagggaaatgcaactgaaggggttaaagcctgaccaagttactgcttcaaccattatcagtgcctactttcaaactggatgtatagaagaggcaatcaagactttccatggtaccaaccataaggataagatttgttggacgacaatgatagtaaattgtgcacaaaacggtagagaagaggatgctttaatgtcgtttggagaaatgctagcacaaaacatcacacctgacagttttaccatctcaactgtggttagttcctgcgccaaattagcatctttgttccatggccaagttattcatgggaaagcaattttgatgggagttgatgaggatttgcttgtttctagttcactcgttcatatgtactgcaaatgtggagttactaatgatgcttacttagtctttgaaacaatgccaactcgaaatgtggtttcttggaccgctctaatcgggggttatgcacagaatggacaagatttgcaagctttggccctctatgaaagaatgctggaagtaaacatgaaaccagataacgttactttggtaggtgtcttatcagcttgtgtccatgctaatttggttgaaaagggtcaagaatattttgattcaatcagcaaaagacatggtatgactcccactttggaccattacgcctgtataatctgtctcttgggtcgttcaggtcacttagataaagcttttgatcttgtcaaaagtatgccccatgaaccaaacagtctaatatggtctacacttctgtccatttgtgcaatgagaaatgacattaaaaatgcagagatggcagctcaacatctctttatgttagaaccttttaatgctggaccttatattattttgtctaatatgtatgccagcttgggaaaatggaaagatgtcgcttccattagatccctaatgaagattaagaatgtgaagaagttctcagcttatagttggatcgaaatcgataacacggtccacaaattcgtatctgaagaccgttcgcatccagagacagaagaaatttatgaagagctgaagaaattagtcaagaaagtgcaggaaggtgggtttattcctaatacaaattttgtgctgcatgacattggagaaaaggaaaaaattgagtccatatgttaccatagtgagaaacttgctcttgcatttggattgatcaagaaacctcaattatgggtaccgataaggataatgaaaaatattcgtgtctgtggtgactgccatcagtttatgaagtttgtatcgaagattactggaaggtcaatcatattgagagatttaaacagattccatcattttgaagggggggcatgctcctgcaaggactattggtgatcaacacttgtgttaattgaaaattttgccaagttatacaaacactacctcgtttgtttttagcggtgggcccaatttttaaatgaaataaattttttaatcattaaaaaaaaacttagtatgaaaattgaaagaaaaatcaggctttgaatatcattatttgtaattatttgacattatcctgtctctgaattctttgtatacaaattttaatacggtaaaaccaagcaaaaaatatatcatagaattagtcatcattaaagtaatatgatcatatgagggctaaaaaaacttaatgacaaacatataatacaatgattagttacacaatccaatatttttatgctcactcgtacaagactgcctaacagaataactcaaaaaaccaaaaattgcaagactttgcaaataatacactccaaaaagataaataataataataaataaataaatagaataattatatattataaatatatgtacatgtatttctttctctgtgtgactcggttcgtcagtgtatgcattgccctgtataatatgaggttaatttacttgaaagttgaaagctgaagttttctacacattccattgggtggttggctgggaagaatgattctcatgttatggaagaataattcttccttgagcatgaaagacccagctcatgtatgtcttcacgatcctttccaacttgaaaacttggaagatttctgaacaaaagaatgcagccaataattatcaatacatcagacatgtttgtttagtcttgactcgggcagcagtctgagaaaactatagttagagctgtgtataattaaaacgagatcgccatggactcacgacacccaatccacacctatgaattgtatcttttccctgtctttcctcaattcaacttaaagtttcttaggcaagttgtatgttttcttgagaaactttgcagcagcctcatcgtcccgataacacaaaactcggagaagtgtgtttggttcattcggattccactgacctgaagttggaggcaaaggaagcctggatttagcagaagaccccaagttctccagagtcacatgtttgaactgttctattaggctttcggtatctgtgtgatataggggaagaacatttttcactaccttagaaaatttatctattatttcagatggcaatccatctccattggaccagaacagatctgtgagaaacttaaagtcctcctctattatgacggaatcttgaagagtgaaagcccgagaaggaccaccagctagtaaaactaataggaaacaatcaaaagaagctttcattacatctgtgataacgcgtgttctgaccctgtcatgcactgttgtagaaataacctccaaatattgctcgagttcctgaagaaaaggctcaatcctagatgtagaaacttcacccatgtacaaaccatcccagagaacatgagttagctcatggaagacgaccttgtatgctgttgcttcgcagagttgtaggattccttcaatgcaagcagattctgaaagttcaaacattttgcccaaacgatctgcaatatcagattctgggttccccagatgagcaactatcctctttttaaacactcccaactccaatcgaatgagctgcaaagtacttatgcgaacacaaagttggggtaccccaaacaaggaatccccatttgtgttgccaacctgggattttctctgtgttaaatgtgacttgtccttcttcttgaatacgccaaactttgatccggtcgaacatctagtcataggaggcagagtaggaacaaatgaacttcgagaccctggagacaggagaaaaggcggtcaccaaagagatttttaatctacagttaaagcatcagatttctaccaactaaactacataccacagccagacttgatctttgatacatagtgttggagacatctgtcaagagccttcatcaaatcaggaaccaagaccgagtgcataggtattggcaacagaaagaatgcttctaaagtatcgtctataatgcgtagtacttcaatagcagagggagcaaaatgttctttatttgcttgcggatcccatacctgtagaaaacatattattctcatggtcagttaacaaagattaaatcaaaacaccaagaagttttccaacagtgtagtgacaccaacactgcaacaacacaaataaaaagtagttggtgaatcccacaaattcaataattgtgtagccaagctggaactaaatagttttttagtataatggtgtttcacttggtcaaaagttggtcaaactacattattaactcttttttcctttctttatttctaaagtgtaaagtttgacctctttaagtgatcctaaaacttattattagtttctaaaataactgagtcgcacagaccatcccaataccactctcaaatttaatcaagtcagatacaattaattggttccagtaaagctcaacaaggtatgcactattacctctagttgtagattcctgtcaatccattccttaagtctgtccactcttgtctttatccaatccttcaccagagtgacaattacagcttcggcctcataaggaggcatctccctaatgacggacttcccaccatcatcgctatttacagcatcttcaacagcaatctgcacaagatccttctccaatttatcggcagctttcagcacttgtaaagcgtcaggcgtcaactcactaacactggccacgaattgcttcagctcattcccatagcaagaatgaagggtagctacagaaacacctgctgcaagggggtgccatcccttcaaaactggactatatacagctttctcactaaaagccagttcactaatgtcttgtgcaaggatggctagtagagggatattattttttttgctcttagatgaacgctggctcgacttcaatttttcaagtttctgaaacagaaaagttcaaacaagatcttgagcaaacgtaaaaaagaaccaaaaatcaccatttacagttaagcaatgctaccagaacttgcctgaacaaaagctttccgcaatgaggatctaatgtaagagtcaaccctgtctcgagccacatcagtgtcttttctcttcttgtgatagttatgagaaatatcttccaccaatatctttgctgataacaccccaagagaaactacattctgcattgattcaatattgtcactgtcgaatatatctcggtaagataggagccttttctcagcccaacccataatcgaacttaaggtagaacttaatatcttagaataaaccgaatcaacagttgtcctggcatctttttcaacttccaccagaagattattggaagccaacagcaaatcactctctacttcaccagttgtaacaaaacgatgaaacaaaatccataagaaacaaagattatgcagcatttggtttattccaaggataggccaagtcttcttcatgagttctaacacctcatcaacctcttcaatcacagacgtttcttcattcacatcaaaacatgattctaaaagcatttggtaaagcttaagattcaaaggatacccatcagcccaatggcaagtatcagaaaccgaaccatctaatgatctgcaagcaagagacataacaacactgcgaagtgcttgcatagattcactgttcttaccagtttctataggtttctctaacgacgattgaatgatcattcggagtcgtttcggggcgctatctgtcttatcaagtggcacacaagggtgcaaaagtagtcctgcctctaaaatcttcaaatttctcctctgccaagcttcaaattcttgttgttgattgggaaaatctgaggccttgaactgttgtagaaactccaatggcagaaccatagtctccattcttcttccgagcttttaattatcaattaaaaagaaacaaaaaaattacactaattcagttcatcatgtttagtcaaaaaaaaaaatcaaatttaaaaccatcactgatccacattcctaggactcaactacatgtaaacaacaaagattcgttccttaattgtctcaaaaaaaaaaaaaaaaaaaaaaaacatttccacatgcaaaatttgaaattcataacttaaaaaaaacacaaattgaagaagttaagtcaattgacagacctgaccagcagcgaccctcaacagagctctcctaatcctcgaatcagtctgctccgaaactctcatctgaaccctcatcatctcacccacagtgacagaacgtttcgacttcccctcactctcctcccctctcctcttcaaactcgcagacgatttcaacccaagcgcctttttcaccctactagccgccgtcgaagttagcgatctctgcagcgacggcgacgccatgagggtcgccgccggagcccggtcggtcttctcggactgtgagatgtaagtcaacggctttccgcctgtactccggcatgctccgactaggatctcgtaggccgtttcccggaggtcggagtcagaaatgtcgagacccagttggccaaacggggaaaccaagtcttgtggttgtgtgtaaacgggcatgacggtttcagtttgagattgctctctttggtattttctcgagctcccacctactctctccttcttcaccatattatgagccattgcttttgagtcttcaaacacacacaaaaaaaaagactcaagctttgggtatggagaagtagccggtggggttcactcgttttcttttttgaaaaaaaaaaaaaaaaaaaaaacttcttcctggtaaatgagagagaaaaaaaaaaagtagagagagggattcttgcttgacttataaggaagagctaatatttttgttttaggaaagaaaaaaaaaatcttttattttaggaaaggaaggaagacacggaatttgagagggaaattgatagagaatttcactttattaaaggtttgtttgttggtttattaagaaagagagaaagagaagttgggttttgttggttggtactctcaaacaaaacatggtaatgaaatttggaaaagatggaaggttggcttaccatgcaataataataataataatcattaactaatagtaatacctttttagagaaaaaaataaaattataattatttaatgaattaatatcttaacacaattaatttaagatagagtgatagtgggttctcaacacaattatatttagtgccaagaaaaacattattatatttaggaaaaagagagagatgggttgtctttttgttatcatccattttaaagctttattttctaattggtttgttaatgggtcacaaacaaacattaaaattcatgaaaaaccataaagaaaaagttgcactaaaagtaagattattttgcttatttttgtttctcaagtatcaagttgatttttcatgtattattgtattaacattaatgttctacaatgtgttttaagcgattttatcaagaggaatagttgtggatttaataatagaatgacttaatataatcaaatctcaagcaagaaggtcacaagcatttggaccaagtccagtccattggattatatgtacaaatttgacctcaattaattaggaaagttttttttatcaaaaaaataaaaaatactaggaaagatttcattgatcatgatgatgtatggatgggattttattgttttggttcggaaacattctagtcttgaccaatcggaccacaaactcataactcattattcgtaatcatattccacacatttagtatatccatgctgataaaaaaaaaaactgactgactgagtacttttttttaatttttaatttttaaaatggaactgagtgagtattttagaagtatatgtagttgtgtttcattagaatttataaaattctaggataaggagatggagtaggaaagccactgactgagacccagatgttagacttttatttgggcttacattaaattttattggttttattaaaacttgggttgattggatagttctttgct

SEQ ID NO: 111218 - DNA, 2479 bp, Cannabis sativa
ttgaaagatcataatattcatctttgtgactcttacattatttatcgtgctcttcatgcattttctgtctcttttagccttatcaagacaacatacaacatacttataatataataacacatgaagtgtcagtgatcttatttttcagtatgtagccgaggaaaacactatgtttctcaactcaagcccaacaaaggataagaaaaattataaaagaagcaagcacaacacaggggctaagggaggatctcaggaagtcaagtgagagggagtcaaaacttaaagtgagcacttatgttggacttgatattcactatgttggcaaatttattcttcaattacagtttagagttaagattgtcttgaataatataccttctatgttcctacttttaatagaaatttagtttcgtttccgcttttagttaaacaaaaatattcttttattttttgccaatcacattgttgacattatgtttgactgaaaattattaaatttttttattctgatggtctttacaaattgttattgactcccttagcatgtcctcttatattaagaaaacatatttattattatgacatatataatagatggcgttatattttcaaacaaagaattgatcgattacttcgagctaaaatttttcctcctcttgataattatggttgtgttacttgtgttaattgcagtggaaaattgactaaaataaaaaagaagactatcaatcgtaatctatctttattagaaattattcacactgaaatatatcttacaaaataattatcatatactatagcttaacttaaaaggataacatattataaatattaattttgactattttctatttattctattatattattacattattttattttgattgtgaatatcgtataggaaaagtgaaatacaaattttataagcaaaaaaatgtacaagtacaaaaaaataagttgtctcgtataaaataaaaatatgaaacggtgggcaagagaaagtaacgtcgtcggagcaatataaaacggcgtcgcatgagtccccgcggttaaaggctctaaccaccaagctccacgcgttagtcgttacttagttttgaatgtcgttcagtcttttcttctggtttgacatttgatatgacacgtgtgaaaatgacccatgaaactttgttgatgacgaacttgacccttttttatgatgcttatgtgtgtggtgacataatctctgttggccttttgtgagaagacttttttattttttcattattatctattttatttttctattttttttctatagaagaagcaacttagtaccttcaaacactctagttaattgccatttgctactatcgaaaacacttttcatgccctttattttattaatttcacccctttgaaacgtggtatattaaactataactttatttaattagttctaaacttctttttttattccattctttgtaggaaaataaaaataaaatattgaaacttttttagatagtataattgactatgacatgtattgtttaggcgataaattatactattaatattctagttgatcattattttaataaatactatgttctccttacaaagtttaagattgtaaagggttatttctgtttttgttttgggtaggtaactatgaggtattttgtgtttttaaggttattaagatatatagtatcaattccagtgaatatacaataattcatttcattattgagttatggataaattaaaatatatatataagaaataaaatttccactaataaatccaataaaaacaatctatatttaattttccaaagaattttaacaacctcaaaggccatttaaatttataaaaagagattaaagagcatcataatcataatattaatggtctaaataaatattagatttcacatatttatatttaatttactagggatgagatatcccataaagcccccctccccccaataatatataataaaacataattatttatataaattaagttaatttgataatgtatattaaaaaagatatatgtgtaatataaacatcattaatttaataaataaaaaaatgtttaaataacataaaattccaaaaaaaaattaatgtttcttaatgtaaaagtttaaaataaaatatataaaatttagtgatactttttaagaataaagtagacaaacatttggaagaactctaataatgctttaatttataggccacctcaagacaaaactaattaatcaccgattcaccattttgttatactgattttaattttaaaattaactccaaaaaaatattttaacaaaagaagctcgaccgtaatatttgccaagattctaattttcaattggcttagaatgcgtctctgaacattgttattagacattcactacaaaaaaaataactacttttagtgacaattttttagtcacaatataaattttgtgtgactaaatatg

SEQ ID NO: 111219 - DNA, 4617 bp, Cannabis sativa
  modified_base (4589)..(4591): a, c, t, g, unknown or other
tctctctctctctctctcttcttacctttgttgctagcactctctcaccacctctcaattttggcaggtggttggtggctcacagtttgagcgacgatggttggtgacagcttctctacaagcatttgatttgtgcattacacaatataaatctgataattttcatgtaaaatatattgtgtaatatttgtaattatattgtgtaatatttgagatctgatttttgatttgtatttatttttatttttgattgtgcttaaatttggttggtatgggctcaaatctgaatttttttttactgcgtctatttagtgtgtccgttataaactagataagtgtaaaaattattttttatttttgtttgcaagtgttgaaaactggcgaaaatactttgaaatgacgattgataactgacgcaaatacaaatattttttgcgtctacagtatccacattggttgggggaaccgaagacaaaacttttaattaatgccaattaaaaattgacaagaaatgtgctttttgtagtagtgcttagagcaattaaagcaattttagcagagatttgactatcattattgtgatccctcttttatatggaaatagaaaagtatttataggctaaagggaaatcatggatatgccaatatcccgcctagggtttttagaaaatgcccactaatagggtaaattacatgcaaaaagagctgactatttgacccattgtatagtattatgctcgtacgttgaagtacctggacaatgggggatcaccattcgtgcaggacgtgtgtcaccaaaagtttcaccttgaaaagtaaatgcataaaataattgtctggtaaaaaggtgtatgggatgcgcgcactaacatgttttggcgcatgggacaagatctaatcttgtgtcagagaaagtataacaatagtcgtgtttgagcattttggggaggaacattattattgcgcccgatattattatgagttctccgattagcgtgctcaccacaagggtgactagtagcaccatcgtcattaaaattggggtaagattccccactacgagacctattttggccatgccttggtgggatgtcttccttcctctcttaatctctgggtagggcttaaaatttttcattcctgccatatgccctctcgggcaggatttcatcatcattatgtcaatggtgagtcggtcttatttgggatgcagtgggccccattggtcgtaaggctttcccgtgatccctagagcgttgagttccctctgggacatagagacttttttcctgaacgggatccctactgagtggtagttcttccaatcagaagccgacccattcattaaacagtttgatcagttcattcgcttctctattccagcggtttagctctgcctgatgggcttggaggatcacagcctgccagtccatccactcttggaatttgcatctgtactgggtgaaagcatcgctcacaacagcaggtgtttcttcttgttcatggtggaggatgttggtgtgaccctgaacctgtcctacgacctctctcaacctggccagttcagaatcatcccgtaagtctacatggagatcgttgctgccaggttggccaacccctagcccattttctctagcatacacctgggggtaggcttggtcaggggaacccccatggtactctgggcaggttgtccaatattggtcgagacttgcccgccacctgttggatcttgcatagcattaattagagtgttgagtctagtcattgtagatggaactgccttaggtggccatgcaaggttggtcgggttatcaccagttggtggaacctagacattaggatccacaactatttgatattgaggctctgtggacctgttcctccttgttagagccatagtgattagcaggtgattagatctttgcggaatattaaaactctcaatgaaaacaccaaaatatcggctagaaaaatagccaactaactcgaagtcaaataaatgtcgattaatcaccaaggtggaggttagaatcattaataaataaaaaagaacacacatattaaagaggttcgacccccttatatatggataatgacctactctcattttagttgtattacttttgtgagataatactagggagatcattgaggaagacaaagttatttctagctacgactcttaaagtgtttacagaaattatctttcagcaaagtgctcttaggttttttggctccctccccttgtgaatgccttccctatttatatggggagagttgttacattaaagttcgtaaaaggagttataatctgttaaatctcctttattctctgataattttgctgaatacgagtttgtaggattcagttgtggatatttatagaagcttggtgaagacgaaaccaaggaatcgtgtatctttgtccagtattcttggcagtgctatatttggttggcatgttggtcatccagtcagatatctcgatacttgtcttctttatgagtttggcttgtagaatcacccttgcaaggtgtttctctcatcttatatagttggcaggtagatgatctggccagatgcttcatgggacatttgcagtttatggctatcacccttgtatggacctgctaagcatatttttgcctggaggttgtctgccaggtaaaaaggttggttggatcatgccacatgtaagtgtcatgtcatttgtgcaaactttaggataacaacaggtacaaaaattctccttccactagcttcaataagattggagccttagtcaagtgctccttcaacttctagaaggcttcttcacattcctcaatccattcaaattttttatttctccacaacacattgcaaaatgggatgcatttatccatggacttcaaaatgaatcgactgaggactggaattcttccagtgacactttccatgtccttgtgcttcttgggagaaggcatgtcgatgaattctttgatcttctctaggtttccttcaatttcctaggagttgacaataaaacccaagaatttcatggaggagactccaaatgtgcaatattttgtgttgagtttcatcccataattttaggggactgaaaaaggcctcctctagattaatgatgtgctcggtggaagttttacattttaccagcatatcatccacatatacttccatatttctcctcaattggttcttgaacatcttattaaccagtcgttgatacgtggctctagcattccttaaaataaaagacattaattttgtaacaatacaccttcttatccatctagaaactggtgtgctcttgatgcgggacgtgcattttaatttggttatagccagagtagtcgtccatgaagctcagtagcttgtatctagaagggacatccaccatttggtctattcacagaaagggaaataaatatttggggctagctttgttaaggtttgtgaagtcaatgcatattctccacatgccattggactttgggataaaaactaggttttccaaccacatcggatacaatgatacttggaggaagtcatttgcagttagcttatccacatttgccttcactgcctttgcccttaccgaatctagtggtctccatttctgacgaataggcttggcgtcttctttgatgttcaaggcttggaaaatggtgttagaattgatccccttcatgtcaaaatggctccatgctaacacattttgatttgccctaactgtattcacaatcttttccttcaccgatagatgcaagtttcttcccactttgatgatcttggtgggatccacttcgtagattctaacttcttttacatcctccagtggctcaattactctttctatcccaatcttggaatccaactcatcttcatacttctcttgaacgacttcagcttccacctgaatatccattttggtagcaaaaattacttcttcctaaaccataaacacagttcgaacagaaacattgtaacaactcctcacactcttctgatcacctctaactactctaatgcttccattatcacaagagaacttcatgcataagttccttatagaattcacaaccccaaagttgactagaactggttgttctaatatggcgttgcaggttgtaaggtaatctaccactatgaaggtgcagcgcttgaaggcgcatacattgttttctcccttgagtgtgattggaagcttatatatttttctcatggacataagagaatctccattaaacccttgcaattgaatgggatagggtgataagtcagcctctatgagcccaatcgcttggaatgcaaacttaaatagaatgttcactgcgtttccattgtctcccaagactttggaaactcttttgttggcaaggtgggcttgaaggactgaagggtcattatagggggaaatatacatgtttgtcatcatcctccgtgaacgtaatgggcaagtttatggtctgaggatgttgggttggtgattgcaccagtgcacacatttccccttctccatctaattcactcaagtatcttttctaggaattcattgtacttcctgttgggttttatgcccnnnataaaactctttacaatctgattagt

SEQ ID NO: 111220 - DNA, 1580 bp, Cannabis sativa
  modified_base (77)..(77): a, c, t, g, unknown or other
  modified_base (796)..(801): a, c, t, g, unknown or other
acattaaagaagtaatgaaattaataaatatgtttctttattgataattgaatagaaaaaattacattgaaataganttttatttagggcacaaagctcaatatatcccgagcaactacttttcccgggaccattttcagtgtattccttagcaactctttcttggacatgccaagggcgcttctccaaggccaactgtcatgcatgattgtggaatttgtctctttgtttgagggaaagtttattgatccgcttggggattcatgtgggcctttcataggtgagtgttgcatcacttgtactttccttagtgataacacatgtcgagcctatatcatttatgcttagaaaaatacaacataattatttcatatttatgtttaacaaatttacttgagaaaaagagaaaacatgtacaaatttaggcttgtataaaaataaaaataaaaactcatattttggtccgtcaaagcttgccacatacattatgtgaccataagtcgggtgacttttacctcaaaatatgagttggcttggcataattcttatttttacatgagttgggctaggcctatttaattttgaggaaattacactctatactttttttaatattgttctcttttatttttaccctctttcttaaagtctatcatttttacctctttttttaaacattgtaccaattttgtccctattacttcaagatactctttatgtgattctcttatgtcaggttattttaggtataatacatataaaaagaggttgttttaattaaatataaaattagagnnnnnnttgattaattgattaataaaagtgatatttttcaacttacccctttaatttttacgagctttttaatatgggctggatgacctatatgtataattgtacgtattgtatatggttaaatttgtagtacactcccttaaacaaatattttagtacactctttatcgatttcgataattatgagagttttttagttttttttttttttttgatcatgtatgttgtagttatttagaattacttataaatttttatataaattttaaatagtttacattgtcaaaaataaggtttaaacaattatttaacacaaatataataaaagtaattacacttataataaaatatttgaactttatttttgatattatagactgttcgaaactttctagaaaatttactaaggatcctaaataattacaacacacaattacgaaataaaaaaatgattaaaaaactctcatggtgattgccaaaaaagatggagggtgtaccgtaggagctatactatatactccatgatttatttcagatgtctttgtggtaaaggtgaaaagacaataatgtaaaaaaggagaatttcaggatgtatacatcctaagtatgtacatttttgaaagagaaaaaaggattaaaatggcctattcattcaaaaccccatctatctctcaagctttcccctttttagggctgaacattttgagcgggtttgacccgaacccgagcaacccacccgaacccgaactggtgaacccgccaaaaaaaaattttaaaaagtttcg

SEQ ID NO: 111221 - DNA, 4932 bp, Cannabis sativa
aattccgtgaaaccgtatttttgttgtttttttattgtttttgtgtatttgtgaaattaaccctatatattgtatgtatgtataataagatgcggatttcgggcccagatctaaaagaaaggggatacctaaaatcactacaccaaatcacttgtgctattttcacactttgttgtgaggttttgttggattgaatccctgacccaatagagaggatatccttacaaaatacatcccgttactaactaggctaaatggattgtggtttcatagcccagtgagcactgttatgtacatttttcttttacctcttatggacttaaatgtgaccaaaaatcaagaatcttggccttgagccaccaatcaggaaagttgcaattttcaaagccttattatccttgagaataataactctacttgtaataatggaagaacatatttgggaagcacaaaggcctggcctatagctacaaagttaagggaattgataaactatacaatatagggccaaaactcagcatggttttaagttttttatgacattatataattacttaaaagactccactcaaatatatattattatatatgttctttttaatgagaataacaaacaagaatcccaaactcaaaagcataacaagaaaatgagagaagccaataggtgatttcctactctactttaaactttctactaatcaacagatatattatgcatttacaacaaagataagctgaggtgattagcctttaaaagcctttgatttttttagtgttgttgttgcttgaacgtaggatttgaatttggatttggatttgctggtgtgacagatgagattgatgatgctgtccaaaactgtgcattctttacctttgatatgcttgccaatacactcactggggtcacatctcccactactgtcaccttctttgctgcaaagtctatgttgaaagatgtcactcctgcactcccacatttgcaaaaataccataagaaacactttattatctgtttttagtaaaattttaagtaatattttattctcctcctttcctcctcctcctcatataatcaaaaaattcattcatgggtcttctaaacagagatgatttgcatgaaaaggatggacttttttaatttaaatttctgaactataacgtaaagttgtgaggttgttattaccttccattctagatagatgttttctgacttttccttcacagcctctacaatgcaaggacactctcaggaccacaacctgcaaaaaagagaatagaaaaaagaaaactcaagctccattaaaataccctcaacaattaatggaccaaatcaaaactcatttcacctggtttcacaatcttctacaatttggtgcttttaatattatatgcatacataaacaaaaaccatgattgaattttcaaactggattcttcttggtcatacaaaatcactaataactactattaaataatcagtacatataacaaaggggtggtttagctccaagtacctggtcagaagaaggtggtttggagtggttagaggaagagtctttggtagtagaactgggttcttcttcttgtttcactggagttagctgagtcttcttcttgtttccaagtgggactaatgccaaaacaggatcatagtcagtcaagccatctaggaaagcagcatcactcaaaaggtatctagtggagcctggaggagtaaccaaatcagctgccttatgagcactgctcttcctagctacatcagtaccgtgaatagaggaagaaggagaaggagatgtgaaagagctggtttcgatgtaatcaacaagcttcgcgctactctttctcttctgatgatcattttgtttagaggaatggctgcttttcttggcttgttcatttgtagcactacttgatttagtcttggaggcattggaagagcttttcttggtcttttggagttgatgatatgacttgggatttataggtgggtgataagagcaagggacactagaaagaattctaccaccaccaccaccacctcttctgttgtcactaatgattggattgtggcggtcaatggctttgccgcctagttggatggtggctgtcgaggaggaagaagaagaagcttcatccatgcttaaacatatagcagttgaagcttgggatgcacagaatatatctatgcctaaacctttcatctttatgttttgatataatgatggtatagcaaagaaagatagaaagaaaggaaaagaaaaaggttaggccaaagccaattaagtgtttagagaatctgaataaatttgttcatgtaaagtggggtagaagtagtaaagagagaaaacaaagagcttcttcacaaagtttcttattcttcttttgaagcttcaatctcactcactcactcacccaactcttaaaaatgattaatatttgtaaacattaatgaagtattgtttttgttgtttctgtacggaacttataatatcaatatgcatctttatgggcttataataacccctttataatatcatgccaatcacagtttgcaatgtttaataacagcagccaccaatgaaaataaggaaataatttatgacctgcaactaacttttcaatggttttaatgggatgaaaatgatatgtatatatacttctttatttatatattttttactttcaagtttgtatggatgacccaataataatgtgaacatttgtgaagtaaataatgtagaaaaatttgaggttatcctttgaaagttttcatataggccagagcacagaatcattttgtttagattgtaaaaaaatgttatcatttaaggcttaggaggagagatatatttcatgtctataactacagaatattttgaagcaatacgcacttcacatgctttgttgctgctattttgtgcatattatttcattcaaaattaagaaggaaaaacaagggtaattagcatatataaacataaataaatataatttaatgtatatatgcagatttttgtttggatttgagttgagttcccgtgacatatccttatatatataatatatatatttgtatatggggtagtgttaattaatgcttggactgactgggcatggcatgtcctacaaaataataataacaccaattttcatatttgaaatgaaacatataggtcagatgagtcagtcaatgccaacggttaaatctccaaacatatcttgctctctcttttgtttaaacaccaaaataaaatatagtaaaaaaaatgacaatatcatagttatttctatcaacattatttcctagaaaaattgactaattaatgtgcctaatatgtatgcataaaaaggaaaggattgtttaatttttaacagtggtcaatttacaagctggcatgacaggaggtaaagctatgtatatttatatatgcaattgtaaaataatactggttactcatatctcaatgtgaaaataatatcatgcatgcaatggtaatagtaaagttattttctttcaacataaataccaattcagatggttgttgctcttgcagtttatcaatctaaaaggtggtccccaaacagaacacagtcgatttattaataaatattatttatttattttatttgattaattttctctagaaacatcaatagtagtacaaagtaatattgctatgaccatatgatgtttacaccacttgacctcatgagagatatgatgctgcattatttagattccaatggaacaaattttgtcactacaaagacagatagatatatagtaaaccatttggaatttgtgctccttatttctttctttctctattcataaaaactctccttcacatatttgatggatggaatcagatgctcatcattgtttatttccctcatcttttttctttccttttcttcctttcaatctccatatctgccgaccctattttcgaatctaacactttcaaaccaaaacgattctttatatacatacacatataaaatagagtaattgattgaaacaatgatttaatatataaatatattttaaagtttgttttgctaaataattttatttttgatatttttttctacaaagttgacttatgagactctctcttgtaatatcaaatgttttaaacaatagttattttggaaaaaaatcgtttagagaatgttgaccttgaatttgggccaactgacaacggagttttatttattattgataatcattacgtgtaaattataataacaaataataaagtgacacagtaatttatagaggttcgaccttcttgtttggcaggtaatgacttattctcctttttgctgtattaattctggagataatgccatgcagattaaatgtttaaatcttataatttttagttatggctctcttgaatattgtaatggtaagaacagattcagaacaattaagagaaatagactaagtggcccactagagaggaatggcatgtgagaatggatgagagagagagcttgagagacatagtattaaggttccttttctaagtgcctaaggccctttatatagtttaaggcttacaaaatatcactattcaaatagattaatatcctttcaaaatagaaaaaacaactcttttatcttttattctaatatcttgaaaaataggtggataatttgatggaaaatccctatccttttgaattgttggtgatgcccctgattttgcccaatatacgtggactaaccacacagggacacgtggacacgaagatcttaacatttaaattaatggctaagtctttgtaaaagaaaggcgtcatccgcgatctgcctcccgaagaaggcatacggagtcctttatgctcccggagaactaagcggtatctaagcatctccgggagatgtcaggcttattctgagcagtcatctcgcatttaatg

SEQ ID NO: 111222 - DNA, 2783 bp, Cannabis sativa
taagttaccctttaatatattgatatgatcttctttccaaattaacctagggtgtagggtgtagggtgtagggtgtagggtgtaggcagtaggcattaggcattaggcttgaggtaaggtcttaacacgggtcttgttctagactataaatgacaaattgggcttggccttttctatctcatcaaatcataggcgtgattcaaggccctaacttcggcctagctactctaccatatagcatgtaaatgtaaatgggcccatttgttcaatgaactccgattacgacccaaaatgtttttttcccctttttaataagagttcatgagaatagacctttatgccaattaaaataaatatattttttcctataaaagaagaatgacataaataaggatgggaagggaagggtggtgtattatgttctaagcggtccaatcgtatatttggaagatattttagaaaaaagttgtacaagtatatatatatctatctaattgatagaacatgtctatggaataaagaaattaaccactaagtaagtgttaaccaacctatttatggagttaattaatatcacatggacactaaatttcattttatatgttactcattgattcttcttttccacatataataatattactcattaaattaacaatagtatatataaaaaattaataatttcacacacacccatcaacttcatatagaaagttactgagattattcctgtatatctttgtttgaaagtgtcaaaagaattttcttatctagataaggttaacaaaacattgtatatatttaacatgatcaatggtggccttgttttctttatttgtgtgtgtgtggatcatgatgtggattattaaaaattagtctatacaaatatctaaatatattaatcccattacaattttggtagattattaatgtaatgattgtcacaaccttaatccttatataagggacaaaagatctagtacttctcttggataaattttgaaaatctagttgaaaataaaccaaatcaaattcgtatacaatgagagatttagcttgatttttctatatgattatctagtgttgaatttaagtatatatttgaaaaattgtacacatatctttgtttctcaatctcacgttatcttaacttagattttatatatctaggtttgatcatagcttgatctctaaaaaccaccaatttaattatttttatttagaacatataagtttcactcaagaaagaatctcaaacttgtccccacatgatctgatccaatactaagttaatttaaagttatattagtccaatgtatgtactccatgttcatttggttgcttatatttattttaatattttttttttaaaaaaaatgaaatttagaagttattaacaaactcattataaaataataaagcacaataggaactagtcatgaaaagactaagatacatagttgtattattatagatctagaaatttatattaggtagaaaaaataaaaagaattcatatgagttttatgagagcaaaaccgtgttgttctatataatctatctatctatatagttttaaggttatattatatatattgaatcaacacgcttttatgagttgtaacatgcatttgattggatatatagaaatatatatatttatgtaaggaaaattaaatcaaacaatacatttttgtttggtggcaacctttgatggtgagaaaagaacaaaccatacaaaattgaatgagtttccatgaaagtgcatattaaaacaagtacaaagaactttgccaaagagtttttattttttggtacaaggtggaggttgggatggattggcttttgcaataaaaatatataattgattcaaatatatgactaataaagacattcttggcagttctttcaataccattttaccacaattttgtttgcatataaattaatcaatgcatgattgatttgacattgaaatgtaggtgtgtgcatatatgaatcacattatgataatgtccagctagctcctagcatttcattctagctgtttctattcttaaattattcactcaaaaaaaaaaaaaaaattcatgaccaaaatttagtggtgaatacaagtttaatttgattggtatagatagagtaacatcaaatagtactattaggaaaaagttgagtactaatgataaatattatatagaattataaagattatatttcttttttaagatgtttttttttttgtttacttaaaagggtatagatggatcaaattgtgattaatataattatatattaatttataagaaaagttaaaattctgttatagttaattttcataggttgatggaggtatctggctcctgcctaaggattcgagctgaataattcttaaaagaaaaaaaaacaaagataatatatataaatatgtaacatgtatagtcacttcatcaactatagtagtacatggatcataatatagtaatatacagataattttctctcactctctctctcccccctaaatttttaatgcatggttgggaaagtttttaaaggagaaaaatacaaccaaatacagttgtccttcaaaatatgtgacactatatatattataggataagttaatcatcaccaaataatgatgggttctaaaatagtatgtcaccctttcctttattgctctaaatatggattgagtttttttttacatgatacgaaattggtatgaacccaaaagacacgagtatgactagacacgaaaaaatatagatttgagcata

SEQ ID NO: 111223 - DNA, 4153 bp, Cannabis sativa
tttatgcattgttattaacaggtataaatttttagttattttttttttcttgtgacaatatactttggaagttttgatttttaagcaacccaactacccaaaaaaccgcataaaaccgccctctaaaaaaccgccaaacccaaacttttattgggcaggtatgggttgtgattttaaaaaaccgccaaataaaaaaaccgccaaaccgcccaacccaacccatgtgcaggcctactcttttctttaaaaaaaaaaaaaaaaaaaagtgaggaaggaaggcaaagtttcggtgcggttagttttttattttttgactagaaacggtgcgttttagttgagattcgtaaaaccccgaaatgtggcagaaagctatatcggcagcgtcgtgggggtgcttgagcttacctgttctaaaaccctacttcctctgcaacaccaccattgttagagcatcacccaaaccccaaattaccatgaaaaatctcgacgaatcggacgtcggcgtattctgctacatctccaacctccctggctttcgcggtgttcttaaacaaaggtcaaatgcagtacttgaatctgatattgttatttctctgggaaaatatagaaacgttgaatgttattgaatttgtatccaaaaaaggaagacacactttaagagaatttggtaaatttagaattagcattgtgctgtgtcttaagtaaaatggtagcttcatcaaattaacattactgtcatgtaatgcattgtataaaattccatctgaaaaaaaaaatgaagacaatggagggagtcattaatatattattatttgtattgactcgtttgtgatggtataattggtggtgtgtgtaggtattctgactttattgtgaatgaagtagatactgatggaaatgtcgtccatttgaccactatggaggcacctccagaggaagtaaagtttattcttccctaaactatgcattccatttactttacaaatgtacataattttcatgatggcaaccttttttttttaaaaaaataaaccattcagattgctgaggaaattagaacagaaacagaagcaaatgatgcagctagcaaaaattatacttctgaatttgaatcttttagaagtcttgctggtgattcggatgctgagagctttgaagcttttatgggtcaaatcaattctagtgatggtaaagagagtgtttcacctattgttctttcgcccgattctgataaacttcatcgaacggttagttctgatttcaatatctgtatatttgtatctttatgagattttacagtgcagacatcacaattctgtatgagtgatttgttgagctgtattgagtttgcagtttgaatcttaatagacatcaaacatggtatttttaaaacaaggagaaacaaacttgttataactaaatattgagcagcctggtgagaggacttctcctgaatttagataagttgtaaatgtagaatagagggtatataccattagagtaatgatcaggattcgggcacttaaaaattgctcaaaatataaatacaatggtgttgcatattttccatcattagttgggacaccattaaattcaggagtggttatgaaatatgccatgtcattgaatgtaaatttttagtgtaaaatgctgtctctactttagcaatctagcatatcttaccattatgagaactcggaggttgagagtcaaattaaactcactttgatatttgctctggtttggttttgctttcagcttcattaagttggattctgggtcttatgaagatttccattggttaaaacttgttttgttttagtctcaagctagacctagtgaattttgatttttcttggttgaaatatttttgtaaattggttgaatctgttttaactatttcaggccatgcacaatttttttaagaaaaattttaagttccttgtcactgataccattgacgggccagatgtttcctcaaagtgcattcgtgtgagattagattctggtgggcacgggaagaactccaggaaacggaaagatagaggtggtaaaccttttgatagcagaggttcagatgactggcaagagaacattggcaaattccttaggtaaaggatgcataaattgtatcttcttcattcaacagatcagaaacatatgattacttgttagctgttttcttgcatagtgcttgatgaattacacacttatacatagttgactgtttttcttccaatttttttttggttcaggaagatatgggaatatggaaagatgttatttaaagacacttacataataaatttgtaatataactatactcatccattggtcttattgaaccatttatttagatgttggatgtacttaacataagcactcataagttacagtatcagatacaatatccctagtatcctggaatttacatttacatctggttaggattcagtactagcttattattagtctttcgctgcctcacacgcatgcatatacatgaaagctcagctgaactgcttaagctgtttttgagcctcgattgaaaggttattttcattcttcataatcaggtttcatatctgcaaggaaaacaaggattcacaggaggcattaggagtaatagcaaagatgcttggcatccaggtacttttttctgtgtcttcatcttcttttacgatcttaccattttttattcttatttcttttatatacttataaataaaacacatttacggggacttgaaccctgaaccataaaaagcagtggatcacaaatgtgggcagctgtttttgaagtgctacttatgtccatcagtgttcattttaatatcgttatattgtcacctgatgtacccctgcacaatagaacagcagaaaatattcaaagcaaccagaaatgaagaagaaaaaatgggtctgagttaaagaagaaacttttcagtacataagcaagcaggtattcgagagacctgtattctatagatgcaagtacagaacactgaatttctgcataactcactctcgctccctgacctacttatattctttttgcataacttactctgaatctgaaatacagagatgcccataatgattcattacaaacctgcctaaactactcctgagcagcaacctgccctttcctcttagcataggtgaaccgaatcaagggtctaataccaagaactatatgttggttcctgcaagtgggaatgagatgttaataggtttcttttgttcttggttgaaatgttcattgttcttatagagaatagtctactcattttaaaatttaaacattgcttataggacagatatgtcaaacttctcaaatatactggttaactaagtaatatcttgtctgcagccaaggtcatttgggtttgctgggacaaaggataagcgtgctgtgtcgactcaaagggtgatgttctaacttgcagttattctgttgataagataatgattctgtggatacattgatattgctgagttatggtaaaagtataacattttacatttatatgccaagtgcacgtgtatcttaaaataaatttcttcacaatcagtgaaaattaccaaaggacaactgataagttgaagaagtataactctttgaatagataaagatgaaaaatgatgcttaaaatggatggtttatttttcaattcaggttactgttttcaagcagcgtgctaagaaattagctgctctcaatgataggttgattggtattaaagtgggtgatttctggtaagataaatgaattctaagttgttttcttctgttcatgcttagtttgtatatttgcatgtgtaaattctaataaactggattgttcccagctatgtcaaggaaggacttgtccttggccaactctggggtaacagatttacagtcacattgaggtgagggtctctctgagatcttattattattattgttattgtttagatgctcttaaaatccacttaaatttctccagtatgtactcattgcactgacatatttttcagaggagttgttgcagattgtgaagagaccatcagagctgctgcaagtgccttaggaagacagggctttattaattactttggtctacaagttctctctctctctctctctctctctctagatcggaagagcg

SEQ ID NO: 111224 - DNA, 7203 bp, Cannabis sativa
atcgtgtcagttctagacactatctgagtatgctcgtaattaagagaaagatatgggatagaacgagactctacttcttcactgtctcactcactcctaataaattaaaaatcagagccaaattcctatttcggaaaaaaaaaatatatcaatggcgatttcttcaatttccatattctgtcagcggagcagcgttcacctaaccttgaacaacgtcctccgtggaggaatccgatgcttctcaatagctgcagccaaacagcaacacaatccaaacagcgtatccaggaagctccaccagcaaccaaacaagaaactcctcagagccaaacacaccttcaaggactattcttcactcgctcctgtactttctcctaacgacaaaccaccgctctcggacacccaagccatcggcaccgtcgcctccgctcaagccaactttatgcgcgtcgtggttcaatccgaacactcttctggaagcttcgaagagggttcggatgattcttctagaattggagttgagttactgtgtgttgttaaagctgtgttgaagaagattaagaggagggttttggttggggatactgttttggttgggtccattgattgggtggaccgtaggggaatgatcgagaatgtgttccagagaagctccgagattcttgatcctccagtagccaatgtggaccatttgcttgtgctcttctctttggaccagccgaaggtggagccctttacgctcactaggtttttggttgaagccgagtccactgggattcctcttacgctcgctttgaataaggtggagctagttgatgaagaggttagtatttggttatatcttaatgctatgttttgctccttaattgatggagaactaagacttggatacccaattagtgtaattaatcacatttgtaggtcgagtggtcaatcccatacttggctccaaacctcatgacttcgatggttcatggaatctttgtgctagaatttcatatagttatgaaataatgagaaaatgcttttgacaataatgtatattagaatgaatgagattagctgaatcttttctatgctttgaaactagggttcccaccctatactaggaaactatagcaattgcaatgtaggttcccaggaggtttctaatggagcaaactaaaaacttcatgtttgatcatttgagctacccttcttgggttaactgaaattttagttgcttgtttctgctctaataagcttctagatgattctcgtagcaaacaaaagcttctagatgactcttaggagattacaatgatgttcaataaggtagtttattagaacctaaacccttgaatcagaatggaaggtggccttgtatgcaaggataacttaaacacagctgttttaagatggggtgtttgacctcaatcgaagtattttttggttctctttggattcgattctgtgcattctattactacctgacatttgatactaactttcgaggactatatagggtaatctctctaatattgacgtgcgattcaatctgtctaacgctgacaactagttatcgatgtttattgtgcaataccatacttctatgcagacaatagttttgtggcaatctaaactgcgaagctggggatacaaaccagtgttttgcagtgttgaatccaaagttggacttgattcccttgcttttattttaagagatcaaaccactgtaattgtgggtccaagtggagttggaaagtctagcctgatcaatgctttaagaaacagccaacttgcttcaaatgctacagacgataattggtttgataccgtgagtagtattatctatttcttattattttattcttcatataagtgataatggtaatatcattcccccatttcttcttatttgtactttctttttttcttctccagattctaggaagcaaatggttagaggatcagcgggttggagaagtttcaacaagaagtggcagggggaagcatactactcgcaatgtttccttacttccattagctggaggaggttatcttgctgatactccaggatttaaccagcctagcttattaaaagtaacaaagcagtctctagcacaaactttcccagaggtatgcttgtttgttagatgcactttgtttctggtttcggtttcttttgcaccgttttcttagcgcaaaattcaacacacctgtttcagctgacatgtctgtatttcttcaggtccggaaactgctcaatgccaatgagcctgcaaaatgttctttcaatgattgcctacatcttggcgaaccaggatgtgttgtcaaaggggattgggaaagatatccattttactttcaactccttgatgagataagaattagggaggaatttcaattaaggacatttggaaccaaaaaagaaggtgacgtaaggtatttgtccaaacttgttcttcacagaaacgtaaaactcttgaattgtgactggggcaaagctttgttcaagtaatgaaattactgattctgacaggtacaaggtgggagacaaaggagttcaacaagcagaaccgaggttggaactaaagaagcataggagacaatctcgtaagagaattaaccagtcatttctcgatgaattagatgagctggatgaggacgacgaagatggcgaaaacttactagacctggagaatcattctgtaaattgatcacctgggagtgaaagaccaagcattgtacatagatacgaagaagaccttgttttgtttgagaaaaggaatgcatgccactcaagcaaagtgtgcaatgcaactgctagagaccagatcttgactcattatgttcatagacctcagtactaatacctatccggtgttaaacagaagaaaccaactcttttattttccaataataaattgggatgccttacataatgccttacataaccttgttatgttcatgcattttacttttggatggctaacagaaaataaaatagctgaaatgaaatccgttaattttaaataataaaggtgtaataaaatcccttatgttggcgaaaaaatataatatatttgtactaaataaaatatcaataataattattattattattataataaaaaatgtaataaaacatatcactaatgatcatgcaaaaaatattgcatttaacgcaccattaaagctattttaaaattgctaccacttttatacattagagatgctcttagaattgcgaaattccattacatatttatctgctacgaattaaaacaataaatttcatccacagatgatcttaaagtctggtagcctaatcttaaatcaagaacacgtcgtcgtttaagctgcaacttcaattttagcttatttaatgctgatttgggaaaatgaaccacaacaatataaaccgaaaagaaaatgccaaaaaagccgcaaaatatttgggtaaatctagatacgctaaccaaataaatactcatcaaaaattctcaatgacattgagctaaacacaaattggaagaacacaggatgtctgaaaattgtctagataacatttagttgtaaaaattttaaagcaacaaaaatccacaagagaacaaaaagaaaaatctggtgaccctccaaagtagatgtaaattaatgcaactcttaagaagaagcaccgctgcgaagttgggttttctttgatttgtttgttgccaactgggtctcggcctgtaatgatgaaagtgcaatttttgagaaccaaacgcaaaaatattatcatttttaccaatattctaaaaccaaattacctctttcttgacagcttcttctttctcagacaaagtcaactcaatatggcaaggggatgacatataggctgaaaagaatatcattcatacattaatattgctgtaataatcagggagtgcataaaagtaaatcctgcaattcagatacgtacggttgattcttccatgagcacggtaagtacgacgtctttgcttctgtgcttggttgacctgtatgtgagatacgaatagggcatcgacatctaaacccttcacctggaaatgtataagaatatgagcacagcaaggaaaattaagatcaggaaatagaggggaagccaatagagacaaatacctcggcgttgctctcggcattcttaagcaaatcaagaatgaacttggctgacttgactggccaacgaccctgtccattggaatgcctgtttttagcctgtgcagtacgcccaacaccccgacagaacctacggaagggaatggcttgtttgtgaactaggacatcttccaaatatctcttagccttgatcaaaggcaactttctgatggcgaacgctgtttccctagtgttctgttaatggcaatagaagaaacataagttaaaatggtaaagatgaaataaatacaggaacaaacgaaaagaaatggataataaacttcataaaaagaaaacaagattctacaaatcagataaaaacaaattaatacatgtacaaccatttactaacctatattcacatataacacaggttcacccaaaaacaatgcaattaatttcctgaagtttacgagagcaaagttcacaaaaggcaacatacccctgctatattttttatcagcttatggaaaacacaaacacacagtaggaagtacaaccatcacataacaagataacaaaagctaccatgatacacaaacatgacaagataacaaaagctaccacgatacactatgcaactgcaaaatgttgcatcattaactgaacatgaagtcacaaacatcaacacagtggttcaccccaaaaccagtcaaatgatttaacaatcaaatttaacgatcagaacatatctgaaataagaaaactagctccaaaataaattcgagaactcaagataagctattagtttttagtaactgtttattctaatcttaactcaaccaaatcaggcacaataaagaaagaaaaacagacaaaaaggattaactcgtgcatttaaaaaatgtcgcgtcatttactgaaccttcagccacggtaaacaaattacagaacagaggttcacccaagaacaaggctaataatttccctgacatatacgagaggtctattcacaaaggcaataggtccctgcttttttaatcaggttcaataaattctcaaaatacaacaaaaatgcattccataatttaaggtagggtaaaataaatttgagaactcaaatgtttaataactgttttttaattaatgcttatcctaccttaaccaaaccaggtacaataaaaaaacataaacaagattaactcgtgaaattaaaaatgttgcatcatttactgaaccttcagccacggtaaacaaattacagaacagaggttcacccaagaacaaggctaataatttccctggcatatacgagaggcctattcacaaaggcaatagatccctgcttttctaatcaggttcaataaattctcaaaataaaacaataatgtattccattaatttaagggtagggtaaagtaaatttgagaacttgaatgcttaattgctgtttatcctatcttaaattaaccaaatcaggcacgataaagaaaaaacccagataaacaggattaactcatataaataaaaatgtcgcatcatttactgaaccttcagccacggtaaacaaattacagaacagaggttcacccaagaacaaggctaataatttccctgacatctacgagaggtctactcacaaaggcaatagatccctgcttttttaatcaggttcaataaattctcaaaatacaacaacaatatattccattaatttaaagggtagaataaaataacaactttgaggtagaaatagaatttaaaaacaaatttcaaatatcaaaattaaattattgtccaacttaacctcaaacaatggaacattacaataatagataaagaaaagacattagcaatacaaaactatgcaactacaaaatgttggatcatttactgacccttcagcaataatcaacaaaatggaggttcacccaaaaacaatgctaatatattttcaatgacatttacaaaaggcccattcacaaaggcaagaggtcaccgcttttttaatcaggttatacaatcaaaataattatgaaaaccccatcaaaacaggtatgattcttatcactaatttatcatctgattcggcctaaacatgcagcaataaactaaaagactaactaaatcaaatatcaatgcaactacaaaagttgcaacatttaatgaaccttcagctacaataaacaaaacattggttcatccaataacaacgccaaatgactttcctgacatttgcaagaggcccattcacaaatgcaagaggcccctgcttttatcatcaggttcaacaacacaaaaacaactactacaacagctcacaaaaccaagaaattcacagcaataacaataccaatcaacccctaataaaacgagctagtaccttgaagtgaactctgaggtcggaacctcttgccttgcaggctgcaccacgcaaaatttaatatcagcacacattaaaatcaaaatacgaatacaaaatcgattccccataattaccaactgagtgtgaaaacatcgaaatgtgggggaaacaaaaacaaatgtatataaattcgagttaacatcaacaaaataacaaaaattcagacagtagaatagggttgcttacacttggtgatattatcaggctcttttgagtatttcacctgaaacggcaatcgatgaagttttattcagaacactaaagataaagaaaatgaacttgttcatgtatggaaagagaaagaagagtatgtaaagaagtaccatggctgccggcagtgtgcagcttcaaacctcagtgaaaggttttataaactccccacagcagagagatcaatggaggcggtagggtttgaacttatagtaaaagaacagataaaaccctagacacttgaccagaacttcggccaagttaatttaagcccatcatcgtttatgggctacacagccttgttgacggcccacttaattatgtagacacacttaaaagggatatgttgaaagttgcttaagacattaatcaaatataatttcaaaataattttaaaggataaatactcttttttataattaaagtaccaaatataactttacatattttgttaatttttttttttt

SEQ ID NO: 111225 - DNA, 2152 bp, Cannabis sativa
aaagtagagatagagatttttacgcgatttaggtattagtgaatcttaatctacgagtcagtcgtatttggttaagtagtcttaatatattatagtggagtaagaaccctggctttttgctatactgtttacaacaaatttttaaccctttgcatgagggtataatgtagtatttataggttaagatctgagctcgatcatacccatgacctgttaaggtttgcatgtaaacatgacccactaatagagtaaatatataaatacattgattgtgggcccatagaccgaggcccaactcgtggggtgagggtgatctgtatgcttggggaccatgtgatacttgacagatggcatgcgagcgtcgtctttgtgtattatagtgttagaataataatcgttagacaaaaatgaggtttcctgacacaagggacaatcccctgatttggtggattcagtgttagagggttgtcacgtcatcttggactaggttttcagggtgcctcttggaatgtccttctaaatgtatcccagatgctcatctagagggtcttaactacttcttcttataagggcggaatgtcttttcagattcagagagatccagtctgagaggtaaatatcatgggccttggataggtgataggcatatccttccgtacattttctgtatctgtttgtggtagaatttgtcttaaagttagttatattaaaaaataaaattgttaaaaatttagcttagagtcttatttttactattttaaaaaaaaaatatatattttatcatttaacaaaacagaaaatctaattaataacctttataaaatacaaggtccacaataatatttactgcttacttcttatgtaattttttgatcttttgaaacattctatcagaatcaaattgtatcggtcactaactattgtgaagaaagaatccaatcatagtgagctaagtaagtgtcatcaaaatcaacaaagtttcatcatattgcgtaacaaccaaagtccttagctgttattctcaatattggacgaatcatttggaaaatgattgcatttaatggtatgtttgctttggtgtaatcaagattagaatgaaatagagattacaattacaatgtttggttggggcttttaactttacattgtaatgagtattacactatttggatgaattctgattatatgagtatgacaaatgaatgaggattataattaccaatatatattacaaaaaaacttttctacccttcttttattacctctttaccaaatgtagttggcaataaataaaataaggatattttgatcaatatattaattattcaattttatttttatactaaatcaaataaagaaaaatgattacaatgttcattacaaaataaaccaaacatggtaatagtaatcccattactattatcattatattccattactattcttattactattacaattacattctagtaaaccaaatgtcacctaacttcttacttgttaattgaagaaacaatgatagaaagaaatttaggaaaaggaactgccgtagagcattttagagataatacttgttgataagtatgcaaacacctcatccacattgattgtactttgtaaccaatctcgaagctaaacaaataggccaaaggttttcaagatcgttgattcattatattgatcttccatttccattccaaaccaaaatgtcttgtttttatttttaattttaactagttataaattgagttagaatttttgacataacaaaatatgtacacaaacttggcacaatataatattacggtcgtgtagacctagatatcaagcataaagacatgccataataaaaaaatatgagttagccaataatttgagagcatacttcaactccatacttaactgtattaataagagtaatttgtggcataaatacttaagtttatcttttagttgcagattaatatctaagttaaaattttgtcggtaaaaataccttctgtcatacttttggaacttccgtaagtacctggctgttaaatgctaggtcagccccagatgtttcactcattggtccaaattatttatttatttttttaaaagtaaaaatcattttaaatatttaaaaataataaaaaaaataaaaaaataa

SEQ ID NO: 111226 - DNA, 5010 bp, Cannabis sativa
  modified_base (36)..(57): a, c, t, g, unknown or other
  modified_base (291)..(299): a, c, t, g, unknown or other
  modified_base (332)..(340): a, c, t, g, unknown or other
  modified_base (366)..(374): a, c, t, g, unknown or other
aattttaaaaacaaaaaaaaattactttcaatattnnnnnnnnnnnnnnnnnnnnnntaatcaatattttggactctgacaagacctggacccaaattttctcccacggcccttgtgctgaactcgatctctgacccgaaattgaattcgactccgggcctagacccgacttaaataaaatcaaaaaaatgaaaataaaaattaacttacataacacacttttcttttctgtttttaaaattgaaaagcaaaagtggttacagaacgcatttttgcttttcaaaaacaaannnnnnnnncatttttgcttttcaaaaacaaaaattttactnnnnnnnnnttttcaaaaacaaaaattttactttnnnnnnnnnattaaaaaattagaaaacaaaattttaacccattttagcaccactactttttctaatttcctactagacaatgactaattaataagaccggcaaatctgaacatcttcccggcatagatatcttcatctattttaaaaatatatatagagaataatttctgactaaaaataataataatagtggaatcattagctctatgattatgatatataacaaataagttaggattgtgtgattatatttatttaaaatgatattttgtgcctagaacgtatacacgtgccaaatgaacatagaagtaaggttatatttcctctgaattatataagccagaagaagtgcttgtatatgataaatagtattaattaattaatactctttattgcgatcggcatttatatgtacataatcagtagcatcatcatgaagaatatcattagtttcttaatccttggactgcggcacttcaaattttataatgaaataaggaatgaattatagatgacagacccatctcagcaatagcaatagagaaataataataatataaaagaaacagatattaagaaaaaggaaggttaaacacatgtgctaagcaatatatatgagtctttggtggggtgattttcaagagcacgctttgggttgtatcaaggagacaggaccactgactgggactcacaagtttaagagaatgtctcgtgcattggttagccaaataaatgaaatttaaaacaataaaaaaccaccataaaagatctccaagaaaggtgagctttaagtacattgatcccgttaaacaaataatacaacagagtctaaagtgacaaatcactttctagccccttgatcataatcataggtgccataattacttacttttttttttcctttttaaagaaaaggcagacatccctcgtgaatatatatacttataactctttgtacatttagtactatttccactcctctatcttatatatattctacttccacccacatataatttctgatcatcatcgcaaaacaaacaacttaagaatattatatgaaagtggaagtatcaaaagcagtagtgaaaattgattgctgctgacccggccttttgatcggttggtgagactgatcatgatcatgatgatgcatgattatatttgtagaaccctttatactccttaattaattattaaccatatatcagaagatgtaatgatgaaattacataaatatagagttttctacttttcttttttgggccaattaataatatagaaaatgggttggctttgatgagggtgatctggaatgttaatcattggtaatgaaattaatgatgatgagaatgattaaaagggctactacatatggttaggttatcataactaatgaaaagggtttttcgaaatgatgattaattagtttttctttcttttttcttgatcatctcaacactggtagtggccgtggtggacatgattagggttttggagttgtagtagtgatgatgggacattatgggtttgcatgggaaaagaagggttgaaagagaaagcaatgtttgttggaggacaattcatggagtcaattttctgaccaagattttcaagtgctttgacctgtgacctaagaaacttaagataattggcagcttcatcaagcattgatgcagtgtccatcttgctaccaccgggaaccagcttctgcaaaaccctaatcctttcactaatcctctctctcctttgtctggccgccaccgtctgagggtccgtcgagattctgacattcttcctctttggcttctcaaccaactccaaacccaagttcaccggcctaaaagccgccgcccggtatatcatctctttcatttgggctatggcctctggatccggctcctggtccaccgatgaattcgaaatcgacgaattactcggctgctggaaattgatgttggatgaactcggtggacgtttctctgttctgggtttcttcgcttttggcaaatgatcatggtgatgactttccgagattaaacgaaagccagcttgaccttctttgttggtagtcggagaaattcgatcatctctctggtggagaagattgaaaaaactcatgttgttgttgttattgttgttatcataattctgatgatcatcacggcttctctttgtagaattattagacaacaacttggactgatcatgatgcaggctttggtcaacctcatgatgatgattagtcaacggacaagtactcatattgtggttgtcgttattattagtagcattctcggactctccagaagagactgctgcactagtactcccagctccaatattgttgttccataagcttctactgtcggagaaaagcatggaaatcccatcatcatcatcttcttcagctgaattagtgtctgtgttgctatttgtacccgaaagcaaacaatccaacgactccagatcggagcacgttgttgtcgtagtcgtcgccgctggagcctttccaatattattattactactaacaacttgtgaagactgcaccacttttcctaaatcagtagtattagcagttctagtactactgatgaaacgaggattgtagatgttgtaaggcgaagaacacagctcacgagaagtcaaagtttgacccctccaagctcctgttgttgttgttgttggtggtggtggtggtgatggtgctcctacagatttgacaaaactacgagtactactgatcatagattgatcttggccattcgagaagctcaaatttgagataacatcagctgatgttgatgatgatgatgagttattaaacatgggaaacgtggacagtttgatctgatgagtagttttattctggagtagttgtggggctcgaatagcattaatgttgttactgaccgaataattggagttagagataaagaacctttcatcgatctcgcgttgatgatgatgaagatgattattactactccatatggccggagatgtatcccaacccaaatccatgttttgatgatgatcgaggatttttgaaaactgtaataatttcagccacaggaataacgaaaaatgtaagccatacaaaataaaaaatatatatattatatatacttttaattatgtgattgcgatgatgatgacctgtgctataaatatatattaatatctatatcagtctggtacatgcatgtcaaatatatatcataaactgatctaaaaaatcattattgctattgagtaaattcgaggatatatatatatttataagacgtaccaattattccaggattgatttagctagctgccacttgatcgaagaagacgacaaaagaaaaacaacagggaaagtttgaagattaattgtttcttgatatgatcacttcgatgctagcttattatatatactactcaaaccaacattaaatgtagcctcagcttctggttttattatatgtaactttgtctgtgcattctggtactttaacaagccgccatatttgattggatgacatcaaaactgtgaaagaagcaaccaaataataaccatatatataaagctaacgtcaggctctccttgtaaacagggaaataaaactcaaagaatatgcgtgatccagcaaagattttataaactgaaacttcatcatcgaaaacactcaactcaaagactttacatgtatatgatagaaagaattaattaaaactagataaggatatacatgataattaacaaacttggtttctttgcttataaatatatttgattactgggattgaagagctaattaagctgatcgataatgattaatttgaaaaagctagctttctaatttctacgtaccttgagctagctgctgtaatggaagtatcaaaagtggtatagtattattatgttcgtttcacaagcatgcttatatatatagatatagggaaaacgaaagctgaaataattaatagaatattatatatatatataaaagtattggtattagtaacatgtattgtgatatgaaggggaggaaagaaaaaaggaagccaaataaaatatatattttcgaacacagttgaaagagtataatgggttttaaaaagataaggctttttggtcagtttggtgggtgtgtaagagtatatttttgcagatggggagcatgagatttcagagtagcattttgtatcttaactaattaaattgtttaatatatatgtgtgtatatttgtattcttttagtggggggaaagctctgacctccttttggttgtttatgccattccatgcgcacactgtaaagtgaataataaagtggcagtcagtagtaaaaatattacagtaatgagcatcttttactgtgtaccacgctttattatcccctttattttcttcttaaaattaacaaaaattaattaaatttaaattaaaaacagaattccattaatcatagttttaatcataaccatattagtactgttctacctttctactacagtacttttttcttcatcattatatttgacgccattatatctaacttgtaaatctcaattattagtcttaattagatacgcagtctcagtttgtgtaaagaagcaaagtcactttttataaagctaaaccagacctctt

SEQ ID NO: 111227 - DNA, 2737 bp, Cannabis sativa
agagaatactctttgaggaatcttcaaggtcatactcttagacattagatttgtaagatgtttagattggggaatcgagtgcattcccgaatttagctatgatttctaaggctaagaatgagagtattttggagttagtagctgatgagtgggtgaagggaggtagtgtcgcgagctggaatctcaagttcacaaggaatttaatggaaagggacattcctagtcttacatttttgatgtagcagttggaacatttaaactactaaatatcgtggacgattgtagaatttggagtacaaatccaataggaattttctcttgtaaatcagcgttctactggtttacatcaattctgatccatagacgcctggtttggacaaagattttatggtttaattggcttgtggcattaggcaaagtgaatgtctatgataaattacaaaataggagtttgtaaaagaagtggggaagatgtggaacatctatttttggaatgtttttttaaccgtagattatggattaatggtttgggtcttgcctagcttaatcccacaaatgttagttaatttgcagcaaacaaagaacaaattgtggaggactgcaattttggcaacgatctaggctgtttggctggaaagaaattctagaattcttgaaggtattaaaagttctacggtggctctttgtgataaaattaagttttggacaacaacttgaattttaaaaccaaacactttgagggttgtcatttttagatctgagtagggaatggaaaacattgttgtaatagcaattaattgttttactctgttttcgctactataggttttgtgtaattatagctaaaaaaatgtgtaaccacggtatccctcacccacaagtgagggttttcaagtgttgccaagacagcattggtgttcttgttgaacaaccacagagaaaaccttggacagtggcgaaagacagtggcgaaagaggatcaaagagaataatctgaactcgaatgccccagtaagattcattgaaaccaatcaagaactgaagaatctagtctctggtgtagtaatcttgaactttttgcatagcataagtgcagccacaagtgcaaggagagtttgttgatacttgttgagttcatcccagagggcttgtaactgggtgaaataagtagtgaccgagttatcaccttgtttaacattgttaacagaggtcttaagttgtagaatacgagagtcgttaatctaatcgaagcgatcatgaaaaattgtccacatttcatgggcagtagttttgaacatggtgctagcaccaatttcgcgagacacaaattgaagaatccatgacaacacagtgttgttgcatcgatcccaagctaatagagagtgatcattcaacgatggacgggtaaagtgccgtctatgaatggggttttatttttggttgcgatattaatcgaagtcgctcgcctccaagactgaaagttttcttgaccagtcaagagaaacgaagaaatgatgtttggttgatctccagttcccaagtgataacgatcatcttgagaaggtcgatcgaaaaaggcacgagataggccttgatttgcaagaaaagcagagttatcattaaaagccataggccttgatgtccaagaaaaggattgttaccggttatgaaaggagatgagttctggacaggtggaaccgctcgcttccaagactaaaagttttcttaacaatcaaaagaaacgaagaaatgatgtttggttgatctccagttcccaagtgataatgattaccttgagaaggtcgattgaaaaatgcacaagataggccttgatttgcaagaaaagcagagttatcattaaaagtcatatggccttgatgtccaagaaaaggattgttaccagtgatgaacggggatgagttctggacgagtggaaatgtgaacgatggggtcggatccgtggtgctgccagaaagaatggaagtcagtgagggaaccgtctgagccaaggtcggagttgaggaagaaaaaggcagaagtatggttgtgtgagtttgtgatgccatggataccgacgtcggagcagagcaagagacgaacggtgctgcggaatgttgtccaatcagtccagaattggggatatcggcaacataatcgaagtcgagcacaccagtagtggaaggatcaaacatggaaggagtggcaccgatcgtgttcgagagagagttctcaagcaacggagcaacgtcggaggtggtagcatcaatgtaagaagtatcttgaccatggacgacagtcggagttagcagcagaagagatggagattcactgatgtaggctacggcaatgatggagtttctggttctaggagccatgggagaagagactctggctttagggttagagtttgaaggaggcgggtagggtttttggtggtgggtaggggtgggcatcatctaatccaatctaattgaatcgaactgatctgatttaatccaatccaattacaaaaagttggatatccaattacaattggattggatgctaaaagttggattctgattggattggatcgactattggatgtcaatctcaaaatcgaattaaaaactgatccaacccaattacatttatagaagttaaaaaattatttataaaataaaaaatattaaaaatataatatatattaattatatttttattagatatttttttgtgtgttgaatttgtaacattt

SEQ ID NO: 111228 - DNA, 8007 bp, Cannabis sativa
  modified_base (7577)..(7577): a, c, t, g, unknown or other
ttacatttttacggaattctatataaaaactcctattacaactagcactacaacttaaatcgcaataaaaaaatcgtatagaaatttctattacaactaacactgcaaccactttggaaactcttaccgtaaattaaaaaaaaaaagttaaaagaaacagtatattgaaataattcctcatttaataaattacaaaacatgtaattagaaatttaggttcaaagttatacaaacagaataatcaagggtcattattaatatcaccgtgtgattcaaataatttctgtaacaatccaagcgaaacagaatcactaaacaggctttaattgtttgtccccgatcgtacaattgtgccaatggtggcatttaatcgtttttttcacactttgtaaaattatttttttagaaatcatgaaatatatatatatggttctattgtataatttgaccaaaagaatcagtgtgagtgtgagaatcttctgcaggttaattcgtatagcatctgtggaaagcctttggcttcctcctctgggagcttcaagaggcttgcaactttggaaaatgcagcatgttgtctagcatatgaatggtcttcttttacgtctttgtaattcatttcttgtttagtgatcttgggctttgtcaaggcccattgcatggcccatatggccaatggacgcatgtagcagagagatctgtatcggtcatctacgttccaactttccggagtctgaaatgagtatctgcaaccaaaaatcatttgataaaattggggtcaactgacttggacagcatgaaagtgagtcataaacacaaaatatggtagatgtgaaaaagggttcaagtcccggattgctgcttaaagaggaagaaataaagtctctagctgcttagctaaagagaaaactaataagatgcaagcaaatttgtaaattgagatgtggactcctgtggactttggtataaataaatatatggtaattctcctcatttttaaagtgtcgctttcttaatttaacacctaatgaaattactaacccaaggccttgttgagaccaggctgcttggtgaacaccggctgcagtcttgaatgccatttcaaccattccctcctgaatcatcgtagcagcaacagaatacgttacgccagcccatatttcctttgattgcatagccgacttgtcaactcttccgtcaggcagcattccgttcacagctccacgtgaacctcctttcatttttagcacattgaaactgtaaactttctcaagtgcaagcttcactttgtcttcatcaacaattggcgaaagaccacacacttcggcatacctatacgagtataaaacgagtatcagcatgaaaagtgcatatccaaaatccatatatatgacacaaaatctaagtaaatttctggttgaaaataaaaattgtgaacagtaagtgttccacctaatagtttactgattctcttgtgatcaaaatcaaatcaagaagtgaaatcataacaatgcaaacttagggccgccatagttttataatctttccagaaattgatacgtataattataaggtcttaggaggtggtaagcaaacacacttgtctttttttaactgaatacttaccattgtccagccaactgatcagcctgaatagacgaacttgaactaccattgctattatcataattgaagtaggaaccattccataaagtgtcatagacacctcttgccttttgatatctaatccaaaagtagtttgcagatgcttcatctccaacctcatgagccatggccgaagcagcctggagagcggccacccacaggccaccacagtatgcactaacaccagtaacagaccatgcatcatatgtctgatcaggaaacccttcattctcaatcattccatctccatccttgtcaaattgatccatgaaagccattgccatgtagaccgagggccaaacagctttggcaaaacttttgtcaccagtagcaaccacatccctgtaaacttggagaacaaactttgagtttaagtctttccatctgtctgtgttaaacaaattgtaagcatttaactcaaaccaaggatcgtttaatcctatatcgtgtggaacagcaccaatagcttttcgtggaaccattttcccatcactcatgatcttcatacggctaggatcatgcatcattacagctgctgcaaagtctctctggatggttagttcaagttttggaaatagcattagtagagaaaaagatgaataaaaatggacatcataggtattccacattatgtattcttgtccttcaagataaaggaattgtcctatactttcttcttcatcattgagcaaatatgctccgaaagcagaatttttcatagcaggaccatgtatttgctcaaggacagatgtcatcctttcaaggatttcaacagcagtatcattgttacgggacatgtctatggtgtctttggcaattagtttgggacttctaagggagaattttgtttctccaacagttgatatacgttgcaatgcatgcgatccatctgcaaagagaaaagtgttaggccttaggataaataaaaagggtatatgggtcactgtaataaggggtattgggagagtatatataggagactctaagaagggttttagggggaatgattttagttaagtgagctcttagctcttgggagagagctgggtctcaaatacccagcaacattgtcatcctctttttctatatcaatatacaactcactattttcctataattgctattgttatactaaattgatagaaaattcctatcaaaaagttgccgtttcataaatagagtggaaccagatatttctcctcctaagaggtatttgaattccgtaaatacctgtccaaattgtccctcctgcattgagataatagagctcgttgaaaagagtgattggatacctgcggagacacttctcaccgtttaaattttttccaaaaagctgcatctatttactttactataatataaatcatatatttgatcaagtaccattcaggaacccttttgtcttcaagaataggtctttgccattcttctatttgagattcccaatcagcatgctctgttttagaagtagaaaatcaattgtgtgatttgtcagttcacaagttacaaactgcaaaatcttctgtttagttcaatgaaaattgtcagaaaattgtctatcctatataaatatgttcatgtattattttcttaaataataaaacaaagttgcgcaagtagtactaccaaggatggcatcgcgggcaatattggcagctgcatcaccatgagaaccataaaattttgtgtaccgcctaccatttaagcttatgttagcaaattttataactaaacacaagcaatgaggtatactctttagtcagactgaagtgactagagattgagatatctacctatgataagttttctctatgaatctcacttctgggcagtcccatgccaatgaaaatgtcacagagcgtacagcaccagatgggatagtcaaagttgctgctatggcagctccaatagttgaccctggttttgaaggcactgaagtctcattgcagtcaaggtgatcaaacgttccgtactaaattatttaacacatgtattaagttaataaaagtgattagaccttggatagatgcttatgaaccagagactaggcataggatgtgtttaaagttatgaaatattgaaatgtacactttcaaaaaaaaagaaaagttatgaaatatttcatataaaattgtcactacataaccaataagaaaattatatgtttgttcagtaacgaaaatttacatgaacattaaaataaagaaaggaggatagttcagcagctaaccttttttatttcattccacatttcttttgctgtgatacccttggaactaccagatattaagaagtaggggcacttagaaacatggacatcatccatttcctctgctgctatggcaaaagtaacaggagactgtccatctgcagttctgaaagttcacgattggatgtggattagagattcatcaagataataagttgtaaaaatttaatgagttactgtttcttgaactaaattaaagattacttgtggtgtagaagtactccatgcactccattctctgtcctgataagaattaagcattgaggaatgtttaagttttagcttaattaacaaaatgggactgagaaacagcatagatcaaacgatgatgttaaagaaaggctaagataaagaatgccttcatcttgaaatctgaattatccttaactaatgatactctttagttataatatgcccttacttcatttctgagttataatgatcaccagaagctccagagatcccaccaactgaattctgtattatcagaaacataaattgtttaaaattataaaagattatgtgaatcatgcaagtgtttgactccactttgtcactaaattataccacaatggaagggcatacagcatgaaagaaattttactcatgggaactgggtttattatttagtattcaaagcctattcacaaaaaaaattatgatgtagttaagagcttaggattcatgttcagatgggaaaggaataaaaagttaatgtcagaaaaaattgcctaacagagacgaaaaaagaatttgatcttggagtatagttttacaataaccaagtaacaaacaaaagctccttggtatttagtggaaaggaaacatctgaatatgcaccatataatctttctttactcacagcccaagtaaacatcaaggttacatccgcagaggtccgccctttgttagttacctgaaatcatagataaagaaacttcttaggacttaattcaaagaaaatgctactttttacaaaatttaataaatatatatatatatataaaatatatttccatccctaccgtgaaagtaaatgctgatacaggaaaactggtttctttgtaattgtggggaataaatggtgaaatttgacgtgaaacaattacaagttctgggtcaggttcacctacatttgaatatgaagcaaaacataagatattgcaagcaatattataagttctgccaaacagaacactaaagtctaataccatcatagactgtccaagctctgggaaatagagcatggtatgtacacttctctgcatccaaattccaatcccatgattcaatgccagaatttttgaattctctggataacaatcactagtcaatttagttgagatgtcatttcaaaaaccttaaagagtataaatcaagtcctgcacaccaaataactcacttggccacctctaggctcttagggcataatacagttgagtatctctcaccactgggccgtttaacaaaaacctgcgaagcaagggaattctgatggtcagtttgtattaaaacatttaggtaaagcaaaattagctgctaaaaaaatatgttacatgttgatagtacttgataaatcatttctccagacatggtgaatcataaaatgctaatctcaaatcagtgtccaacacttctataatctgattactgtctatgtttttggaagctatatttgaaccaatgaagaaaaactcactgaaaactgatttgctaaaactgggacttcctcatattttgtgggaaatagttgaaaacgctgaaactcgcctctgtaacttcttccaatgcttcctgcactaaagttcatggtttcagccgtaagaataaatcagagaatgaacttcaaatcaaagtttcgctatactttgactactaagtgaaaagtgttggttttccttgtgagaatcatctttaatgttatgttttcatcaactaagatttctcagtttcttgtgaaaaccatcatcagctaaagtctccaacaactaatgttactggacgtgtactattcttagagttgatttaacaggattactggaatttcaactacatatatgtcacctataactatttgtgattacaaatcggcagcaacattaagttgttttctgtggggaatgagtacctacccaataccacctaaaggaacaccgtggttacttgtaatatggcgcttcttgaacatgtcaaacattgatatctgaaatttggtaggaaaaggtgaatgtgaaggaaaatatagctgaatacagaattcttatcttcatacaaacgaaaaagataccaaatcattagtttcaaatttcaacttgaagtgagatgattacttttccttctgctgcttcttgtctaacaagtctcaacatccgaataccaagaggggccttcagagttcataaaattacacaaagtacagaaactagttataaaattggagaataatctaataagaaaaagagatcgctgatctcaagtaattaaattataacaaaatataaacttcttcatcctttcctagaaaagtcaagaaagtcacatatacattttccctttaccatctgaactgtctcactaaaattgacagagaactctgaaggaactttttcaatactgtctaatttccgttgccaagtcagggcagcaggtttcccaggattaacctaatattaatgaacacaaaaaaaaaaaaaaaagaattagtaaaaggtacattactacaaatacataaatttgactaaaaaaaagcactctttataggtaatacaactagacaatcagttaaacaaaataagatgaacacaaatttcaatttgaatatagagatatattgcaaatatacataagcagaatacatattagcttaccttgtgtgaagaaaactgagaaggaagttcaatttcgcactcttcttcataaccattttccattttcctaaagaatcatatagaaaaaagcaacgatttacacaaaatctttctaaaagtaaactatctccacactagaagaaacttaagagtaaaaaaattgatctagtaaatatagaatattgcactgtacattttatagcagtacaaacaaacattaattcaatgatatttcaggaagacccaacttcataacaagaatatatatttatatatatatgctcaagagataatgtactactagtacttgtctttacaggaaatcaaattcccattttaaggatcaaacatgtggtggtattaatggaccactagacaatttgatttgcccttttatcactttccattctcaaagctttaacccatcattttttgccataaaacagccatcataaatacaaatatcccattacaatctttctgattaatcaatcttattcaaagaaacaacggattcccagattattcactttgaagccgatttctgtcagaacgaacagatgccaaatctaacataactgaactgatagaagcagaaactgaataattcatcggagagaaaattaattaataccttttttgaaaaaaaaaataaaaaattgaggctatcaatttgagcagacaaccaagcgaaatgagggcaactaagagaaaagcagagataacatttaaaatgtatatacaataatacaagtgaataatgttttttttttttttanatatatatatatatataaagactatttaatatataaatatatattgggaactaggggacggccaatgggagcggttgggaagctggaacttggaactggaagtgggtcgtacacgagcttcggtttgttagatatttttcttttgaggatggatttgttagatattaatattataacatttcttcaatcttactcttcttttcttttgttttttctttttcttttataaaaaaaaagtaaagaattgattattcaatcatcgaatttttgtagaagaagtattactagttctaactttggcttccctagaacttcaagtcttcacgtgacatattcattatatatatatatactagtaaaaaattacgtgcgagacacgtatactaaattttatgttaggtattttttattatattaaaaggtaatacac

SEQ ID NO: 111229 - DNA, 4389 bp, Cannabis sativa
  modified_base (2667)..(2667): a, c, t, g, unknown or other
ctctctctctctctctcatcaaacaaccacgcccaggcgtgacgatggccattctcgatcctccaagctcaaaatgaacccaaaaaaattaaaacccaaaccccgaccttccaccctcgagtcccttgcctgtccatctttctccttctctccttcttggatgtgcacgacagtggtgctgctccggtaaccgcaggccaaaatggaggccacaaattgtggttgtgctccgatcgaactctcgtggctggctaggttcatgaaaaaggtgaacaagaaaagaaaaaaatacaataaaataaatttatgattttaaaatatattttttattttaatttttttaattaaaattattatttggaccaattaatttaagttttttattttatttgacacgtggtattttatttgaatttaacgaatcagttagaaagagtgaccaacggacttactgaaaaacgtgacattgtgactatttgtaacgcccgaacttgaaaaccacttggatttaaactttaattatataaaccaactataatcatatatagatacacatgtaaggtttaaaaaactgagatcccgtattaaaactgctttcggtaaacgcagtgtatacatatatattttttttacatgtcacgtggtggtgacaacaaaagctaaacccaaaatacattaagatcgaaaccctccaggttataccgtcgcgatatgcacaatcattgccaagcctccaactcactgttcctccactttagcatttcccttacctacacatggtagcaaactaatgagtcaactgactcaataagatatgcaaaaaaatatatataccaagtaatattgacttgtacttaggccctcttgtgcctacttacaagacttaccaaatggtcaagaacgttcttaatggaagtacgacctctataccacatggactgaagtaccacctctgtactagtgttggtagggccaaattgtacttccagctgctactaggtgttgtaccacatggactccgtacttacttgtactcgtgttggtaacactataacattcctttaaacattatacattgtaccaacacactcagtattacaactattccagtattggtagtgtaaaacaatataaacagcatgcattcacatacatacacacatacataaatataatttatgctaatcttacctcgctcccaaattcaagcgtgtcgatcaacttgaatggaaaattcacgagctgaatgtaggtcttatgtcacattacataaacgggtaaataacttgaacaactcctccccaggaaccctaactcataactaggagtaataaacaacaaggtaatgctctagatatcagggaaacaccaaactaggctctaaaaataactcaaactggaaagatcaagttttttggggtcgtgcatgtgaaccgattaactggttttacaggtcctgtaaaatcggtcgaccagtttacactaggaatccccaaaaatacgagtactcagccaaaattttcccaaatgcaatcatattttccagaacacatgtatatacattctagaacgatttccaaacataaacagtaagaaaaacacccaaggtcataatatgccatagatgaacagaaccaaaattacccaacaaaaacagttcaaatgaacctaaatcatccattataactcacataaaatagccctaaccaagactcaataaaacagaaccaaaatccttaaattcaaccctaaacctaacaatacactcataattaaaagagtagagtttatctagggttacgtttaataaaaacacttcaaatcctagctaatactcccagaaaaattgttgaagcagctagccaccctctaatttgtactgaatcgaaaggataagaggaagaagaaaggtggcttctagactttttttctttaattttctatctttgcaaattatgtaatgttattattattttattattaaatcaagggccagctaccaagaaagggagaggacacctatatataccataaaattcaaaaagaccaaactacccttattttaatgtcgaactcaataaatcgcttaggggtaaaatggtctaaaactattaccctgcctaataataagaccgtaaattaaaaaatatttactgggctatttggaaatattattttgtttattttgagggtttaatgttggaatattattcccttagtaatataactaccttgaggagggtaatattaacaccttaaaaaaaagtatgcttgaattattcacttctactatattaatttgaatagtatttttaaattaataaataaatttaaacaacattaatattatgatttattataaataaaatattacgatacgtatttagtctgtgagagtagtttttttctctctttttaaaagtgagttacttttatgttattaacaataatctatatctgcattatacataaattttatgtgaatgttgtacataaatgacaaatcaaaatatatggaaatattcattttaattgataaaaaaatacaataaaatttaatatttactaagtaataaatatatttctttgttgaataattattttgtttttatgtataattaatattaaatggatataataaaaaaatattttttattttaatttttnaaaataatatataagattcttgtattcatgttaaacagtgtaattcaattggcgagaatatgattatatattaccctacacatccaaacacaatttacatatttttctacaatcacattctccttcatgatattccctatgatcaaattattgggtttccctttcatgtgcatgtgacctggtcgatctactctgaccacgcgtcctcgacccacttgggacggtacttgattctgtttttatgggatcttctcgagtaggcctatgcctctaaaagagatttgagacacggtccctactcaagtaggtatacatgtatctcttttgttttggtttggctcctgtgagtgcctcggtggacgccctcacccgagttatccccttggattcctcacattatggtgggtgaatccctggtcaccatgttgtgtttgtttggtatttgcattcaaacaagacgactttggattgttaggtggtacatttccacaatcatgttgccgcgagaagttcctggatcattgggccgagtttccctagtgttagtgtttcttggattctatggacctcttgtatccactagaaattccctcgtattccctggttgatcatcctgtggtcgtcttgtggatgtgtttggttggttagggggtgcatcactgcgtgtcgctcttacagttgcaacctcgcgttccaactcaacatttctctgatttaattttgccaatctctgttggagttttctattttctaactccaccaatggcacatatcttgtaggatcgtacgcatcctgactacgtgtttcgggaatttcatcaccagtttattcaaaaaccccttcattttttcccttcccgagcgtgggatctcagtcgcatttgtcttgttggaatttaagggttctttcccaggacgctgagttgtttccctcggctgattgtcatcattttgaggggtatcctcagacatggttggagggaaaatgaaagtttgaatgttacttaagagaggtgttttttctgagtttttttttacaaggctctaaataaaagcactaaactattaacgtagatttttattaaccaataaatgagtcttaatttaataaataaactttagaataatataaataataatagtaataatatatataaacaagaaggttttttgtgtaattttaaagttaattcttcatagtccacaacttcatcttattatcagaacttgataagttgtttacaaaatacagaatacaatattcaacttgttttttatcattctcaatttagtcgtacttcattctaggagattttcccctatttataagtgttttggattgacagttattttcttgggatcttatcctcgtaatcgttcatgaaacgtgattaatgctcatatttcatatttacaacacatggaataaaaaaaactgctataactgcatttgtctttatctaaacatggttgtgctgactaagtttctacgcctcgcagtattgattatcatcttctgatgtttaccttaaagataattttcgtgcctaagtatgatgttttaaaatcaaatttgtgaagtgacctacaaaggattgcgataaaaatttagatggagtctaaacgtattttttttttgaaagaagattctttattaatcaactgtccttcaaaatcaaggacattaacatagtaggaatggaatccctactaataatacaa

SEQ ID NO: 111230 - DNA, 4451 bp, Cannabis sativa
ctttgttattgcattaaacttaaatatttgcatgaattgtctttggggtttttaaatttctaaaattagcttaaatttccaattcacccccctcttggaaacatatcttgggctaacagatatacccatctatctactgagccatatgaagaatccatggctcagtagcctcatcctcaatatgatcaaccctaatctctgagggcgacccttgctgtttagaggaactccagcctcatggtaagagtccagggggttacgctagatcacatcacactccttagggtgcctctgagcagccctaggctctggttcaggctcagcctaatcaacttctgtctgttcttcctcttgactggccataggcttctcaacttggttggcctcaagctgttcagcctcctcaacttaatgagctccccccttgctatgagttcggggggatgggaattggtcagaggtgccttgtgataaatttgatttttccttgccaagtttgaatgttgctcggagtactagcaacaatcatagcaatcgctgccacaggaagatctctagacgcagaagatgcatgtccaataggcaatatgtcaagcacaccttaccgaactatatacgtccaagacttaggtaagaattgtctccacccttggttcagttcccagatgaatctcccgtagatctcaccacctatttgctcagaatagtagtgaagttgaacttcaagttccaaagaaccactgctcgcttcaaagtcacctaaagagctgtctgacgtgctctcagaggaagaactaactgagtgatagtcttcgtacaaaatacggagtaagtcctcatcgatccggttatcacctccccaatagtcgcacaagttcagctatccagaaagacaaagggaggtgaacaactggagatcacaaataagacaaggataaaacatgggctaacagtccaataattgtgagtaataactagcaagcccatgaagtgtcaagccatgaatcggccagctcagggctatttcacaatgaatcagccaaattttggaaagttcaccaagaatggactagattatgattagtccaccatgaatcggccaagatagattcagccctcgaagggccggacagagttcctggaaaggaaccaagtactagccaagggtcttaagacaagactaagaaccaatcagggtctctaatagacccaaagtgccggccaagtccctaaatgaatcaaaaatcgtatttttaaaaaaatcaaagcgatgttctttgtgttctttgaaccccaaagatcaaagtgtcaaaataaagctcaagattcgatctttctcatcaagaatttatacattatgcatcctaaagctattgagtagattataatgcataaaaactatccaaagacataagaatcaaaaagttcataaaagcttgaaactcaactatggcaaaagcttaaagaacaaaaaagagagagaaagcttcgaacttacccactgagaagatgtaagcagcatcgagctagttcacacaacaagtgtgggtgttagaaactcaaaaatccatgaagaactcaagctcacaagatttcggctctaaggagtctttgagagaatttttgttgttcaaaagtgaaaagtaaaaaatgaatagaagaatgaggcttatataaagtttctacaaattttcttcccaaaaacttaatggggattcaatcccacaaaaataggcaggtatgggaaggaaaatgccaagagttgcaacatgggaaaatgttgcagccatcacacgacttcctatattgattgacgtaaaattaataactaccataagacaagtaagtcgaagagtccaatatctagccatgcatacatgcacgacaaagggagttgtaataccagatagagtgtaaagttcctactagaccaaactttcggacaaggacttgggggcaaatgttatccaaaattttgtccacctgacgtggcccctccacatgacaaaacacagaaaatacgtcgaggataggtcagcactaacctgccaagattagtgtcgtacaacctgtcaacctttaagattcaatggttgcatagtggacacaagcaaagacagatgtacaaacctgccagtaaggtcttggccagacctatagctagtcagtcaagagtgacagcttccaagcaccgggcagcctttaatagggctgactggccaagtgtatagaaacacaccagcacttgtatttttctcataagcttctaactcgcccttaacattcccacgacttcagaacaatttaaactacccacaaagatagggactctccatcaataaataacaaccttattctttagggattgttaattatttactttgtatttttaatatatgtgtaacttccctattttctagggatatctctatgtatagcttgtaagccctactattatataaagggcaagatacacactcagaacctaagatgcaagtacgctcaaaagcactatagtaataagtcctctcttttttctcatacttctcacctgcaaaacacattctcattttaatattgaagagatcctagctagaaattacaaggttttagcctgtaatctgcttggtattatctaaagagtgaatacaactaaaagggagtaggtcattacctaaacaaaaggggccaaacctctataaatttacgtgtcttctacatttattatcattctcacgtgatagtcataagcgagatccgatcctaatcagactccgtgtcgattggctaaatccacagtcaacaatatatataagatatatataatttaaaaataagatatatgtatatttatatatataagagtgaagacattgtagtaactgaacatagtttttttgagattgaaaaatatgattgagaaaatcttgtttctctctcacacacacacacactctctccctctcctagtctcacacgccactctctctcgttgtaaagaattggtgtttttctcaatctccattacaatgtctcatgagttgagaatacactgtaatgagaaaagtttattcatcttattaaatctataagctcgctcttatcttgggtgttggggttgatctggaagatctgatttagatttttcatcaagcccattaagctttagattggatgattgaacaattataggaaaagatacaaggatcctttaataggcatcaaaaggtaaaatccttattcttagtagtttgatttaatttatgttatattgtgttgagatctgaggtttaagattcatattagattcaacaaatatttttttaaaatcttgatcaaattattttgtgtttctgctgtgtctctaatatgaaccctaaaaactaacataggtagataagaaaaaagtcctttagtttcatcttggataaggttaatcatttccttaattcttggaatagcaaatgtttctcccaaggtggtgaagaagtgcttcttaaagttgttgttcaagaaattccttcttttgctatgtcatgcttcagactccctgtatccacttgtcaaaagattgaagccttaatggctaagttttggtggggttctatgggaaagcattctaaaattcactaaaaaagatagtcaaggaaatatgaattttattgagggcttgggtttagattccttattcactttaatcaagccatgttggccaagcaagcttggagaattctcaccaactctaactcactactttgtaaaattttgaaatctaagtattttagcaaaacaaatttcatgcaaggctgtaattgtcattccccacctttcaattggcaaagtatcctttaaggtagagagctgcttgagaaatgtttaatatggaagattggcaacggtaatttcgtacgcagtatacatgactattggattcctcaaactcaatttctttcctataatacccatcataacctccctctgattgtgtcatttttcattgattcctcgggacattgagacttacaaaagctttataattactttgaggatgatgatgtttcaacaatcttatctattcatattataaatactaggggtgtacatcaaaccgctcaaaccgctcaaaccgtccgcaccgcaaaaaaaatgcggtttgaatcttcgcggtgcggttgcggtttgaatttttcccaaaccgcccggtgcggtgcggtttgcggttttgaattattaaaccgcgattcaaaccgcaccacaccgcatcttttaaaatttcaatttttatatttattttattaagcccatacatatgagcccatagaaccccaccaaaacttagccattaagtgagtaaaattcacaacttaaattgatactaaaacttagccattttttcaaaccaaaacttagccattaacacttggtatattcaattatttttcacaaaaatt

SEQ ID NO: 111231 - DNA, 1032 bp, Cannabis sativa
gccacgtaaatctcatctagtataataaaaacatatatatatataaaaactctgttaatcgggttggtcgggttagttcgggttgattaggcggattgatattatttttcaacctgtccaatataaagattgggtaggttatattttcgtcgggtttttcggtttgcattttcgtcgggttatctcggttttggtttagacgggttgttcggattgggcggtacaaaaatttatgtacaaccctatgaataatcttgagtatgccttgctcgttttctccttcacgacgtgacaatcgatttctatgtgttattcttaaaagaaaaatgttaggatcatcttaaaatgtcaagtagtataagagatgacaaatcattattatatatagtgtattttaatattagattacattttaatttaataaataatacaaaaaatcgctaacaatattgagaccccacattagtgtagtatttagcaccttaattaatgtggcaaagcaacacctaatttttagaaatataaatgacaacattatcagagtacaatatgactggtgatgcaggggtaagggtaaagtcttgtaaaataaatagaatccatataactttacatgcgacaatggtgtgtgctcgatattcgacttcagtagaatgtgggttgcttctttgatttccatgacatatataggagagtcaccaatattgagcttcttgtattgacaactactccagtaatagtagaaaacaacttgagcatggactaaacttcaaattgtgagaagctgtatagttaattagctggaatttgagaaattatctattggaagaaaaaactaaccgtgagtgacactctaagtgaaatcaaatattgacttaattagtttattgacagcatgtaattaaggtatagctattggagcaacagactcttaatcatataaacaaccctaggcgtttagttgggaggaatgaaaatataggaatgggaataggaataggaatggagtgaaataaaatttaaaatgcataa

SEQ ID NO: 111232 - DNA, 3422 bp, Cannabis sativa
aatttcgtggatctgcattgagactaattctgtattcattgtattattttatgttgtgtaaagacagcgttaatgcaagcgtgtcgatatgggcactgggaagttgtactgactcttttgctcttcagatgcaatgtgagttgcagagtagtttttattatgattttcattatttcaagctctttcacagacttaagaacatgtctatcttgatctgatctcctaaaattatatctattagctttttattgtgtgatttctttttctcttttatgtctttcctacaggttaccagagcagactaccttagtggcagaacatcacttcattttgctgccgtaaatggccatgtaagatgtataaggcttcttgtggctgattttgttccaagtgctccaaatgaatccatatgtactcagtcagacagcgaacagcttgatgatgccaatgtaaggatcaagagttctcaaaggtataagacttgttttattattgtcttaagcttgataattttataatagtttcaataggttattgaaatggaatgttagtagttaatgtattgaacatggtagttgtataacttgtattacttcatgctggtttgagttcagagctgcataattaaatggtagcttccatgaaatttggggttcgattactcatgtggatctacctagtaatttgttactgtttcctatctctgcctctcaaagattgtactgttcaattgtaggaccccatataaaataataataaaacaatctgttagaatattcttctttttggctaatgcctaactgtataaatgaaggcagcttaatcctctaataattatgtttattcttgagaaataaactaatactactttgtgtaggtttggtggttacaaattattttgtctttatctttttattcctgctatttatttaatttattccagtgcagtgcgttgtccaagtttgttaataaggcagcagatggtggtgtcactgctcttcatatggctgctttgaacgggtattttgactgtgttcagctgttactcgaccttcatgccaatgtgtcggctgtaacatttcattatggaacatccgtggatttgataggtttgattttcatcagttagctggaatattaattgatgaataactatttgatgattttcctatcaaacttaaatgttaaagttaatgactgtaggagctggaagcaccccgctgcattatgctgcctgtggggggaatttaaaaagttgtcaggcaagaattatataaattatggtggattctgagtaaagtttgggtcattctgaatctaaactgattgtcttcttgattctgtaggttctccttgcaagaggtgctagtaggagaactttgaattgcaatgggtgagaatctttgtggttcactattttaatttgtataatttacatgaatgactattctaaatctgaacactcgatttctacaggtggcttcctgttgatgtagctaggatgtgggggcgccactggcttgaaccttttctagcacccacctcagattctattataccagcattcccatctaattacctttctttgcctctcatgagtgtattgaacatagcaaggtaaatttcaaatggaattttactttatatcatttaataatgctacttataatagcacaatagtaaatctcaactgttaccaagaccttgtgcctcgtgtgattcccctgattatccagttagataatgacacctgaggctgaaaagaacagtcttatgtttgcttggtgtatttctgtgtagagatatttattgtgggtaaaaatgaaaaaacaatagtttttggctgcacatgggcacttagaaataagttggttgacatgggaacatgcctagtttaatagaagttccgagccaagcattttaccggacaaaaatctattttggtgttctattagaaggaatgtaaatggcagagttggttgtttctttttgctgcagagagtgtggatttaaatctgtggcagcaacttcttctgatgattctgatctttgtgctatttgtcttgaaagaacatgttccgtagctgctgaaggttcatatcttttactagtaaattatctccttttgtttttcccttgagaatgatttagatcacattcattgcaaatttatgactggtagtatactttatcctcaggatgtgcgcatgagctttgcgtaagatgtgcgctgtatatttgctctacaagcaacattccttctgaaattactggcccccctgggtccattccatgccccctttgtaggcatggaattgtctctttcatcaaattgccaggctccccagtaaagggaaataagcaacaaatgtcccttggtctttgcaccccatgcatacttcatcctcgtgatttagagcgtcagtcttcagcttctaccccagatatccgaaagaaccgtgtagcttcagtttcttcagaaatattctgcccggttacctgtagcccgtttccttctgtggccattcctttgtgcacatgcaatgatggtccatgtccatcattcgaaccccgagagacagaaactgaaggtgagtcacctaatcgttcacaatcaacatcagttgagcaggataaaatggaaggaccgagatttgacagaacaacctgttcaagcatgttctggggcagaagaagctgcagcagggagcatcaatgcaattcagaaataaatgcttgaatggtttgggaggggcaatggctccctgttgggtccttgtggaaatgaatttttggcttccaccattgcagagccctcggtattgtgtttaattaaatttctagtgtgttaaaactgtgggttatacaaatccatgtttgcttgcagtttttgtcccgctggctacatggtccattgggggttctcacagcatattggctatcattttagatttgctcttatgattttggagaggaatgtataaaaggaaaaatgtgtttgcaagttaagtactattgtaattgaatataaaaaaacagaattattcaccatctataattaaatccaccatggccggctttggtttgcaaatgaaatttagagtttatgattttgtatatttctccacaaccctcagtcaggtggagaatctctcgtatttatttacttatttttttaaatggagggcgctgttgctaaggaaaatttgattttctatactaaaatatatgatcactttatctaaaacccaaaaatattcctatcaaatttttcatacttttttttagtgcaaaaatataataataatagaaaaaatggtagtccgatggtggtccgatggtcacctgatgctacttttgtacgtacaaaaatattaaaaaaaaattggtagcagatttagtccgatggtcacctgatgcta

SEQ ID NO: 111233 - DNA, 2618 bp, Cannabis sativa
tattacaagtttattttcattctatatgtatttaaagtttaatttccgcgctaattttattagtaatcccagaaaggggattagggtttcttaagtatcttgggtaacgtgcctaatagttagggcgttacatagtcagtacctttttcagcttgattttgatctacaggatctttgtccgcctcaacctcaataggttttccactaaagcattcacttggttttgtcttggtctttgatttcatagccatttaatcttctctaaagataacatctctgctcaataagaattttctataacctgactccaaacaccaaagatcgtaaccttttacaacatctggataaccaaggaatagacatttcagagcccttggttgaagtttatcttgctttatgtggacatatgttgtgcatccaaacacccgaaggttttcatagctgggtggatgccctgtccatttttcttctggggctttgaatcctatggttgcaaatggacatctattgatgagatagttagctttcttcacagcttcaccccagaaatgtccctcaagaccagcactatgaagcatacatccgactctttcaagaagagttatgttcatcctctcatccaagctattttgttgaggattcttgggcactttcttgtgtctgtctataccttctcttctgcaaaactcaaacaatttattagatcagaattcaagcccattatcagttttgagtttcatgaccctcttatgtattttgttttctactatctttctccaagtgaaaaaggtattgaaaccataatctttagatttgagtaagaaaacccacaccgtccttgaaaaatcatctacaatgcttaggaagtagctagcaccaccaaggtttttgatccttgatgccccccataggttagagtgcagatagttcaatggttctttgctggtgtgaatactttttgtgaattttgccttgcagcattttccatagacacaatttttatagtacccgatttctcattcaattttcactttaataggccttgtttttctagttcttgcagacccctttcacttacatgtccaaacttcaaattccatgtctggtgttgtcaatttcttgagcagttattgcaggagaaaccttccctataacagtttttccaattaaagaatataattcattcttcaattctcctttcatcactactgtagaacctcttgagatcataagagttccaccttccaccttaatggtgcagccaatactatctagcatacctatagacggtaggtttcttctcaaatcaagaacatacctgacattttgaagtgttcttgatatgccaccaaacatggtgatgacaatcgtgccaataccaagtatagttcaggccttgttttttcccaatagaacagtacctcctgcgactttcttgaagtcgctaaagatctccatcttgggacacatgtgaaatgaacaactagagtccataatccactcttcttactagaggataccaacacatctactgaggtgtagtcttgagaagcaatgttagcttctcctttcttcttgccttgatatctggcaagtttagctttgagtgctatgcactcatctctgaagtgtccttctttctgacaataataacacttctttcctgacttgaaattagacttggattgattactgtttttggatttattgttataattatttgagtctccctttctatcacctgcctcatcaatcttcttttgaatttcttttgagttaagtgcagactttacatcattcaatgttagagattcttttccacacaaaaatgtatcaacaaaatacttaaaagatttaggcagagaagagagtagaattataccttgtcctcctcatcaatcttgagaccaatatgattcaattctaaaataatcttgttgaattcatcaagttgccttcttagttccttgctttcatccattttcataatatacagttttttcttaaggtataatttgttagctagagatttctttaaatagataccagctaacttctcccataaaccatcagcatctctcattttcttttatactaaactcttagaaagagcaaactctcaacaaaaaggctctctcaccatctctcattttcttttgaactaaactaaaagcacggatctcttttttaatcacatcaacagttcacattgtaagagtaatctttgaatatgtaagtgtttctattattccaaataggataaacagtggcagcaaatacagttgttttaatctcagcaacagatcctctcttcatttcgtcgatctagccaagccagccatcaaaatttagaggccagcttctgccaatccaaccatgaagttgtccaagaacctttatgaatagagacaactaaaaaaaaaagatgattgtgatcaggggtggacccaaaaatattgttcaccatgggcgaaaaaaaattagaggggagagtaaacataaaaattaagacataacaaaaattaatttagaaaaataatataatatagaagaaaatacaagagtaatttgcggcataaatacttaagtttaactttcagttacaaataaatacctaa

SEQ ID NO: 111234 - DNA, 4272 bp, Cannabis sativa
tagcaaatttcgtgatcctttcatgataggaaataaaattaaatttatgaacttgattttatatggaaagtttggaagaacttgtcggtgttgtcactgcagattgtacttatgtcgttgcaaattatggtttaaaatgaaattcaaaatcctatttataccatacaattttggaaagtacaatgtttatttaatcatttaagaaaatattaatttaatcagtaacttttataaaattaaagatttaaaataatattaattattattactatgtaattggaagagggttggttgtcagtataaatgagactatttcctttacgagacctattaagttttttcttaatgaaaaattatatatatgtaatgtgtaacacactaatgtaatgttcatatacactaattttattttatattatacacgtgtaatttgtaatgattagatcaagtgatgtctggtacagattacagagtcatataaatatactgacaaaatagccaaataaaggaaaagggtgtgtaggtgaggtgaggtgtaaccatgcaagtcaataaaattatattaattaattattaattattcatattcttaagcccgcggattaatacgttggaccagaaaaacaaaattaatcgcgtgcagaaagtggaaggaaacttgtctcaaccgcaagctgtattattaaatactcatatactaactcctataaagttttgaccaaaacacacaacacaaccctatctatacctctctttcttcctctcatcctctctcatttccaaatttgaaatcatcacctcatcatatacatatacatatatataggggttaatatttgagagaccaaacaaacaaaaaaaagattttgtgtaagatggagaaacaagcaaaataccaagacaagatattgaagttcttgcccagagcagcttctgtgatcacttttcagaacccaccgtttagtccaaacagagataataggatgatgagatctgagaacgcaagtaagcagctaaagctggctcatggaagaggattttcaggcccaataatctccatgattcatgacgaggctcgaagaaagcccaagaatggtgatgagacccaagatcaagacccaacttcgcccaaaatctcgtgtatgggtcaaatcaagcagagcagtaagaagaagaagaagaacaagtgtgaaaaggttaataataatgttgttatgaacaacaacaaacgagtttcgtcggtggttcatcaggaagctaaaccggtcacgcggtcaccacgtgaggtgaagaagcaggcgtcggccattaagaggatctttatgagtagtagtagtagtagaaaatctaataatgcttctgttgatgataaatcaacgcttcctgatagagctccttctttgagtcaaatgaagcgattcgctagtgggcgaagtgatcctttttcgaattttgattgggcggcggctcaggttacaccactggactcggatcaccggaatatttgctattccgatcacgaaggaggtagtgatcaagacgatgaagatgaagagataaggattccgttctcggcccctatggtggttggtgaaggagtggctttacagccaaggaaggaaattaatctatggaaaagaagaaccatggctcctcctaggcctcttgagatcagagcaaattaattaattaataaattcattttctttttcttctcattttggaagtctacttttgtctatatcatgaatttgttatgaaaatgtaataataggatttgttggcatgtaataatgcttacttaattatatacattttatataatatataatattattttttttttgataaatttaaaataatttataatatagaaaatagagtttaaataatttatttgaaagatatattaaataaaacaaatacaatttgaatattactttctacacaaattaaaaaaaaaaaaattaagccacgaggctttcctctatgctaggattttgcctcattctctcttagtttcttttagggtttctcatactcctatgggtgccattggccaaatcgggattcgtggtgcctgggtgccttgcctcatttcgttcttgtgcaaagtcgaaggtctcagtagacgggggatcatggttggaaggtgagtgttggtgtcgagtctcgctccttggagccaattttgtcatccttagcttttcaggcgagtggctgtcgttctcggtggttgagcgtctctggtgagatgtctatcatccttggccagaccgaccatttgagccgcgagacagcgacaatggtggacttttggcggccctctttctctcgtttttgggattggcattttgcgaaggtcttttttcaggtgtgtgcttcgggtgtggtggggtgctgctctttcttttatttagttcttgaaatactttcttgggttacttttcaagcgtctttgccccagcacacaatggctcgtaatgagctttcagagttttgtagatgtagaagggggattggggtttacccaaagggatgtgaattccttatcccatcaccttcaccatttgaaaccattataggaggccaagcatggatgtttcttgtcagaagatggcaatgctctggtgcttgtggtttgcctgtctcgcgtttgcgtttttcctcctgtgtgttagggggatggttgttgaaactgttctatctttattgttgtttgtatattttgagttttttagttagtttgagttgtttcaatgttaggcaccttttatccgtactgggccttttttagagtgtttgtccctttttatgctctagtgtgagccttgagcttaatgctcctttcgaatagttggccgacagttgttatcttttagtgacattgtggtttatccgttggacttgtaggacttttaccctttgatcaatcttaaatgaagcttccatttcaagaaaattaaaaatttacattcttaaatttctataatttgtgctatcatatatttatataagaaaattttcagttaggatcccaaaaaaatcccccacgtataagaccttttctttggcaaatcttaaattgtgacaccaactttcttaaataggcgcgaagcacctgattgttaaaattcagaatgaaagtggctaagatgaatctcaaaatcaattggttatgagaagagtagctcattcatcttatatatgacaatttatttgtacacattagcaatgtgtgactaactctaataaaccctcttcacatttgggcctgaaaagtgtgggtataacgaacgacctttaagaaaccacatggtcaaacgtgacatttaaaagaatctcataaggccaaatatcgtaaatttgtgggtgtacacatcgggaaatttgtggattttgaaataggtcaaagatcccaacactgaaaatagacacatattggccgaaaggtcctaaatgaaagttaaaggggagacagcggaaatttttatgtttggctcgtcttttttggatggggatcacaaatggctttttatgactcacctttttggaccggcggtactttaagctcataacaaatcacaagaggctttaatatcatattagaatttgggataaggtgaatgatgttctatctcaaaactaattgataacgagaggagtagctcattcatcttatatatgacaatttattaacacacattggtaatgtaagactaactctaataggttacaccacccacaaaaaccgtcacacataagccccttttatttgttttaattccgttctttttttactaatttaggccaaacaagagaaaatattaaatctgaacagttaatttttgttgttattgtataaggaatttcaagagaagcaccaaatgatttgacatttgaattgagataatcttcttgaactctcattgtagtagtagcagacctagaattaaagttgaggggatgggtttatgaggttgcttaagttttccaagctcggtgtgaagctctgaaccacacaattgaaaatgatacgatcgtatataaatatgtatgttaaaaattaaatgcagattattaaatgtaaaaagtgtgtataaattttgtatctctataactcataataactattatgttgatgtcgtggttttgggagagccaaatcttctgttccaattttttcatgtctctctatcccaatccaattaaaatgttccacttcaattaaattgtatatttcctaacagagtgaatatatttttctttcca

SEQ ID NO: 111235 - DNA, 3349 bp, Cannabis sativa
aaaaaaaaaaaaaatacatgttatctatggcgatggaagcaaagctccacaaccctccaccattttcaccccaccttgtatctctttcttccaatttagattcccttcccattattctccaaaacttctctatatgctcatatcaaaccctccaatcttgatttcattttaaacctcttctttcgactcttcaaaatggtaggttccgagcttgcttactctaatggagggccacactctcaggtggcgcctccattttctttttcttcgaattcgagtttctttgttaacggtggcttgtttctcgagcccacggtttctaaatttcttcttggttcgctgacaatggtggcggaggaggaaagacagtgttcagcttcgattggggtttctgggtctgtttcttcgtcggcttgtcgacctaaagtggtggtcggaggaaggttttcttcggtgagcttgagaagcgacgggattgttcgggaaacgaagaggtgtttggttcagagcggatatgagggttctgaggaagcagtggtcgaggaaaggaagaaggaggagaaaattagggttcggggaggagctgccatgaacaccaccaagcatttatgggctggtgctattgcagctatggtttccaggtatatatgttctttactagcctactgtaaaaggaaaatgtcaaaattgaggtcaattcagtgaaattttcctgtttgagatttgaagctaagattttctattgatgattcttgatatcgttttcataattggtatcacttcgtatttgaaaagattgtgaatatttttgtttcagaacttttgtcgccccacttgagagactaaagctggaatatatagttcgtggtgagcagaagaatctatttgacctcgtcagaacaatagccgcttctcaaggtgtgagaggcttttggaaaggaaatctcgttaacattcttcgtactgctccatttaaagcagtcaacttttatgcttacgatacttacagaaagcaattgctcaaattttctgggaatgaggagaccacaaattttgagagattcattgctggtgctgcagctggcatcactgctactatactctgcttaccacttgacacagtaggtgaagtttacaatggaatttgcaattagatttgtatttattcagctactatttctatgtgttttaaccttatgtgttctgttattagttgtatgggccacatagtttgcagacataacaggaaattatatgcttaaaatactgaatgtttgacatggatctgagtttcttaaactagttgtttgtttaatgaagcttcactttcatttctgagagtattggaagtaacatgtggattgtggaatatcattttagtttgctcttgaaaacaatcaatcaacatgtactatgccctagtccaattaatagactcttgtttagtcccttagtaaatttattatttaacatcagacattggtgaataagttgttctctagtgattatgtggaaaacttatctgcacatctttcagcatagggaagggagaaaatgaaactatgaaatggtcagagtgttagtattttgccttattttttagattgtgcaacttgttttcttaccatttgagtttacatttcttgaattcttctagagttttgttttatgttggattacatttaaaaattgttctaatgccctttcaagagtcctatactttgggttaaaaagattttaggctgtcacttataagtaatatactatactaaattttgtatctttcagatccgaactaaaatggtcgcacctggtggagaagccttgggtggtgttattggtgcttttcgctacatgatccaaactgaaggatttttttccctttacaagggcttagtaccctccattctaagtatggcaccttcaggtgcagtattttatggtgtatatgatatactgaaatcagcttatctgcattcaccagaaggtaggaaacgaattcataacatgagccaggggcaggaactcaatgctttcgatcagttagagttgggaccagttaggacattgctgtatggtgctattgctggtgcttgcgctgaagctgcgacttaccctttcgaggttgtgcggagacagcttcaattgcaagttcaggcaactagattgagtgccctggcaacttgtttgaaaattgtcgagcatggaggagtaccagctctctacgcaggactaattcccagcttgctacaggtatgcgattgcctggttaatcaggccattttgaggagtgtaaattatcttttactttttttaaataaatttcaatcacactcatagtatttatccaattaccaaagtcctatcatttaaatcatcttttggttgcttctctgaatttgtgatatagggtcatcattatagattataagatcacaaactcttaatggtatatgcatcaaaaggttatcaattatgtagagtagttatttggatacttggcactacaattacaaatatttgtttgaagaaatcaacttgctaaaattgttagtaggtatgcgaagtaatttgttgttctatttatgtccatctcagtagtttttctaggtagtgttcaatttatctccttccttgttctttcctggtttatactattaggtctcgcaaatattgcaaattttatatttcggttataagattcctttatttttcttcatcttcaatgtcaggtacttccatcagcttcaataagttatttcgtctatgaattcatgaagatagttcttaaagttgaatgaagagggaaattgatatcggaaaaagaataggcgagggaggttgtacaacgagtgaaagagaatatatttgcatggaaaaaggtaagaaattgaatctttctcacgattcctacctatgacaagacacttgatttccattgacaacaaaagaaagttgatttttgataaggaaataaaatctcacccccacgaggcaggatcttattatgctcattatttctgcacattaagcaagataaggtcttttatgcttttgacatgtggtaagtgtttgtgagcaattatttagattatattgtatattacctccatttttctatccgcacaaaattgaattattattattattatcagaaaattgaatttgttatactaccaaaaacccccgttttggtgtctgagacactaatttgagtcaattttgtgttttttacatcactaaggtctaaggggagagaggtcatatcatatcagcatattgtattttcaaatatatatgaaggattttttttatttttatattttaaaggagtttttttttttttttt

SEQ ID NO: 111236 - DNA, 10162 bp, Cannabis sativa
taattgtaattttatcatcaaatttttaactaaaagaacattttgttaatttttttaaaaaatagacatttattaacttaattgttaaatttaagaccattttgcatctgggccctcattttattcagtttaatttcggtaatttacttagcttggcctgcacaccctgggcccattctattttagaggcccaagaaagattttgaaaatacacataactatttagtagttttaaaaataccaccttttttttaaaataaaacccactaaagggttggtttgtaattttttttaaagggaaatccattaaacagacccaacgaataaaaaggaataggcaagttcatattccaaggtgaagctttcgactccaaagccaagttagctatagtgtagctacactatgagctagaagattaacatctctacgcacaaaaaaaaactcaaccgacacaaaatttcatctcaaatctgagatttcaacaagcaaattgtccacatcacttactcccctatgcaatgtcagtaagcaaatctaccaaggataaagccaaattgattgagctgacgactatgtctctacattattatatggataataaacgagagagaaaaatacaatatgcgtactgacatttcgttttattaataataataataatacacaattgttaataagtattaccggttattgcttcagtaattaaatattaaattttatataatttaaaaatataatttttaaaatatatcgttaattaattggtgcggcttataaaaatggataattacataatatactattttttataaaaaaaaattatatttttacgttttaacaatttttttttacaattttacaatttttcataaaaacaacacgaaaataaaaaaaaaactacataaaaataatatctaaataacatcaaaattataataaaaaataatacacaaataacaaaaaatcaaccataaattaataaaaatacaacataaaaagaccatataactgtaaataaaactaaaaaaaatcataaaaatatttaaaattacgttaaaccgtatttttataacttttttgttgtttttgtgtatttgtaaaataatccttataaaaaatgctgaagcccaacagcaattctcgtaataataagatgagattatcgttaataaccgagtgaatataatcgtcgtcatcatcatcaaattgataaaatttcccgagaaacaatcgatatgatttgatggtgtttctcggctctaactaccaaaccaaaagtggttgttttggttgggttagctgtcagtgtcactgagctgtggtcctgtggagtggagtggagccttaatattatcaatgaaataaaagctttagtttaagaagtagttagttggctataactaatcattccattaaagggtttttttgggttgctctgcattctcactctgtgtcttcctagaacctcagctaagctatggaaggttcaactcaaactacagggaagcccattcgatgcaagggtatgtaccctttttctttttcatcaaatttcaattccatggaagactgactgataatagctttgcattattttcagctgctatttgtcgagagcctggtcagccattagtaattgaggaaatctttgtggcgccaccgatgcctcgtgaagttcggattcggattatatgtagctcactctgtcaaagcgatgtcacattttggaaaatgaaggtttcttttcttttcttttctttccattttgtttttctagcactacattatcaaatttcatttgttgggttttctaatgaaggaatttcctggaatatgtccaagaattctgggtcacgaagcagtagggtaagtcaatcatgacctgaacttgtacttttttaatttaaaagtcgttttggaagaagttaggatttgtatattaatctttttcggcttcctatgtttggaccaaaccatctgctgcagggttgtggagagtgttggggaagatgtgaatgaagtagttgaaggagatagagtgatcccaacatttctttcagattgtggggagtgtttagactgcaaatcaaagaagagtaacctctgttcgaatttccccttcaaggtctcaccttggatgcccagatatgagtccaccagattcacagacctcaaaggagaccctttgtaccattttctgtttgtttcaagttttagtgagtatactgtggttgatatctccaatcttacaaaaattagctctgaaatccctccaaacaggtcctgcctcctcagttgtggggtttcaacaggtaggactcctcttggttatgccactaatatatatatttattttgatttgaacacaaccaagttagtattccagcttttctgttagaaaatttataatacactaggatacaatattgcttataatttagaacaatatgaataattcaatgatatagaaaacatatctcatgttctataaaaattaattgagaaataatagagtttggtagtgcaatactaatctactaattcttccttcttagatctctaaaaaaaagctgatgaatagatcaactaaaattgtgacgagataatatgtatttatagagttcgggagggacctaactagacttcacacttctatttcaactagacttcacacaaatgctaatctcattaactattaatcatctattcatcgacccacattttaataaaacaattaaaatgttaatgtaatcacaaataatagtctagcaatttcccctctaataaaaaaaagtttcatggcaacttttgttatttgtaatttttggctttgctttttcttatttcttttggattgttatgtttgaatgaaaatacatgtggatttaaggggtgggtgctgcttggagaacagctgaggtggaggcagggtctactgttgtaatttttggattgggctcaattggtttagctgtatgatcttcctattatgctttgattcatcttccttggttgtaattggaaaaaagctaattgctaatgggtttttttcaataggttgcagagggggcaagactgtgtggagctgccagaattattggtgtcgatgtgaaccctgataaatttgaacttggttagtaaatctcatctttaactttgaaccctttatttttcattgattaacatgctgtggttggacctttacaggaaagaagtttggggtgacagactttgttaatggagcaaactgtggggacaagtctttgagccaggtctttccttaaacttttgctttctatctacttcagttctgttagaattgtaagatgcatagagtctcatctcaaaccaattgagagaagcagcccatagatcttatatatactcttatctttccacactagagataaagaagcattaatacagttggttcttggaaattataactcttggtatgcataattctttatggacaagcaggtgatcatgaagatgactgatgggggtgcagattattgttttgagtgtgttggacttgcatccttggttcaagaagcttatgctagctgccgaaaggtcttttttcgcttttactccaaacacaaacataaaaagaaaaagaaaaatcggtactagtaggaaagcaatagtagaactgaatctgtttggttggttaatgtgttgaaattaataattcagggttggggaaagacagttgtgttaggtgtggataagccagggtcagaggtgaggcttccctcatttgatatcctacacactgggaaatgcttattgggagccttatttggtggactcaaacctaaatctgatattcctatccttctcaagcgatatacagacaaggtgacttcacttaatacttttactacttttgatgtaactttcttctatagcattaataatactcatgaatgttaaatctgtagttttagcatacatttttctttgtttttttttttattttactttatggaataattctaggttgagttgggatttgaagttctaacatgtacctacttgcaaggacagaggaagagtaaccaaaacacaaagaaattgaattttctactctaatctattctattcattttcttccaacctaagatgacaaatacttaacacttctataatgggactaaaatttctgtaagtccaacaatacaagaatacaaagaataacagtagctaattcgagatagtcactcccccaagagtctaaaaccgattattacaactactaatcacttattttattatgcatttggagaacaggaacttcatctggatgagtttgtgacacacgaggtcaagtttgaagatatcaacaaagcttttgatttactcattgaaggtagttgtctcaggtgtgtgatctggatggacaaatgactcctatactagcaactacttagttactgcatttgaacttcttcccattctcatttaaaaaaaatgaacacattcatcattgaaataataagggtttataattttattgtcaatgtatgcacaactaaattatgatatgcaagaaattaagagtactttacaaaaattggtgatatatgcttaatcagttgctttttgtgaggcactacaacaaattttacttttagtctttagtcacaataaaacttgtgactaaaagcgaaaaagttatgattttataaattattattcttatgttattattaaaaggtctgtggcttaataatgtattagtcacaaaaatcacaatttattgattaaatgtgtttagtcctaatgattgttgtgactaaaattaaactagtgacaacttgtatttaaataatatgttttagtcctaaaattatatttagtcacaaaaaatttatgttgtgactagaaagacttttattagaagtagtttttattttagtaggagcttctttatttattattattagtattattcatatataagctttataaatctgattagtatgctttttttttaacaaatctgattagtatgttttaaattgtaaacataatagaaaagtttgatttgggtttccaaaaatcatgcaaattaaagagagtgaattattattattattattattttgctgagaaataaagaggagacaatgaattaattgtggggttgagatttactgttgattttgttattgaagtggtgttggatcacattctatcacttcaatttgtggtgcctatatcttattacaagacaataattgtactatgatctaaatttggatcactttttgttatgtgataaattcgcatcacaatttaacacgctattggagtaaattttgttacaaaggactcgtttggtaggtcatataagagtcgtattgtattaaataacaaatatcattatgtttgaataaaacattgtattgttttaattattatgatcataaattttaatataatgcaagtcgtattaattaataaataacaaatgacatatattagcttgtattataatgttcacaaagagtctagggtaactctcgaccccagccctagacctcggacatggacccataccctaactatggaactggacttggaccttggaccccgaccccgaccctagactcagacccgacctcggaccctagactcgaaccagacccagacttggacccattccctgccacggaaccgaacatagacccagaccccgactcggacccagacccagaccaggacctggacttgagacccggacccccgaccccgaccctgattcggaccccaaacctggcccctaacccagaccccagaccaggaccccaaacccggacctcagacccgaaccctagactcaaacccagactccaaacctagatccagacctcggacccgaacgacctggacccggacccaacccagacctggacccggacccagagccgaaccacgtaccccaaaccccggatccctgagcttttaaattaaaaaaaaaatcattaaaaagtataacttaaacaacatatttttgtaaactactactaatactaaagaagctatttttttgttaattttttttaatgtttcaattgaaaatcaaatccatgacttaaactcactttcatttaaaaaaaaaaattaattgaatattttgaaaacacatctatgtttaattattatatatatccaaaattttttaaatcaacattttgaataaaattataattttaatgatgcttaacgatgatgtcatgaaaatttattttttaggcaaaaatgatacttaacgatacttttgcaatattacttaatgatgatgctatgatacttgatctttgacgcaaaaacaatgcttactgatggttttgcaatggtctgcgataaaatttgataaaaactcttgtgatatgtaaattttctctagaatatcagtttgagatgtgcttttttaaattatagtattttctttttcaagatttacatgtttaaaatgtgtaaaaccttaaactataaagtgtgtagttaacaagcttgaagttcaagaccataattaaaattgttgctatgtatactccaaatgaagattctacatatattctaaatgtcaagatttcgagaagagaaaaatacaaaaaaaaaaaggaaaaatcacctcaaattaattaatattcgagtggaaagacatgtcttgcatgaatttttatcaaatttcatcgtaaaccttcgcaaaccaattaattattataaatttatcattaaacatatcgtctttgcatatcctatattaagtttccatagcaccttcattacaaatcttttgcctagaatttaagtttcaccatttcatgacacaacagtacttaaacatcgttttgctctaaagtactttatatatttttagagtttaggtctttagaaaggtaaaaaaaactaaaaccatagatcatcatacagagaaaatgttgcgttttcgattaaaagcataaaaactgttcttttaatagcgtttcatgttgtcaataggctctttcctaattaagtaaataactttatctatttgttttttaaaatgcatagtttgcttatgattatacaaagttggcatatactctgttatgagcatatatagagcttcaagttttctatatcaagaggtttttaatggtaaaatatgaaaatatattaagaaaaacaatgggaaaatcaattaatttgaaaaatatggcaaatttttcgttatataattcaagaagataacaactttttagtgcaagccgtacgttgacatattattgtaagattcccatatttttcaataaaaattatctaaaatcataataaacacttgaccatcttctacgatgtaaagtgtgtgttaaattaaatctcaaaaaatatgttaatattatattagattggggtgtgttttgtaatattttttaatcagttttttatttttttaattagaaaagtaaaaatattttttaaaaaaatatcttttataaaactgttttattttttaattttaaaattgagaattaaaattttgaaaatttaaaaacaaagaaaaaatatttttcaaatttatttaaatagtttttttttatttaattataatatatttgtattttctatcattaatattttagaactagagtagaccctaacctcagactcggacccgaacttgaactcgaacctggtcccggcaccgaattcgatcctggatcctagccacggaccacgactcgaacccggacccaaacccctaacttggaccatggccaaacctagcccctcaactcgtaccttaaccctcaattgggacccgaacccccgatttggatcgggaccctaaactctgacccagacccaagcgcatcaccggacacggacacagacccttgtcctatagactggaccctgatcctcgtcctcgatcctcgactcaaaccctggacttagaccccgaaccccagaccgacgagccagacctaaacccagacccaaacctggaacctgaccctggacctagactcaaacccagccctgaatccgaaccccaaatccaaatcccagacctgaacctagacccgtaatataatagttatgaaacacattttttatttttgttgttaaaattaaaaattaaaagtagttatggaatatagttttgtttttaaaattaaaaaacaaaagtagttataaaatacaattttgttttttaaaaataaaaattctattttcttttttgtgattaaaatattaaaaaataaaagtgttactaaatgctatcttaatttttaaataaaaattagaaaactaaactttaaattagtctaaaggtgacaaaagaaatacaatacataacacgcatttattttacacactctcaaaataaacacaataatttggtaaaaaaataaaatatttgattgttatgtgaattgacataatctatttaagcataaaatacaaaagaacaatttcaaccaacctagtctaaaagtctaaataagcatctaaaattgggcttccgaatgaaaatatatcaagcccaccattggaaagatcgagaacaaggaaaatgtgccaccaccaaagcaaacggtcaaaaagatgagaagagcaagccaccatgaatcatcaatcccctattccatatggaaaacctaattgagagtaggttaaaattatgaaattgtgtttggaagcaagtgtttacttataagatagtataattatcagggtaataattatacaatggctaattaagatttttgtcccctgaactttaacatgtactaaatcatatccctgaacttttaaggtcgttaaaatactcctaaactattgaaattattggatttaaggacttttttctaattttattcaattttactatttcagtaattgtttatatgctaaatcatgctccccatattttgatatctaccaaatcatgacactcgaactttgacatgtactaaattatggcctttgaactttcatccatgttagatttttttactaaaaatagaagaaaaaaaaatcattaaatccaacaatctcaatagttcatgggacatttttaataactttaaaagtccaagaggcatgatttagtacatgttaaagttaggggtcaaaaatcctaattagtctttacaatattttaaaatataatatttatttagatgtcatgcaataattacatatgaatttttatttgtaaataaattagtaattacatggtgtaataatattaataatttaaaaatagtaatgttatataattatattcaatttttatataggtcataagaattagagagtgtaattgaaacctcttaattacttccaattatataattagtgtgtaattacttaattgaagttaaacctggtaataactctcaattaaactcaattctagatacttccaaatgcggccctaattgtatataacatatatcttaagtttaagttgtgttgggatagtttaataagcaaatgtaacgcaaaatcaagtcacattaatcttggtttaacaccttaaagtcgtaccatcttccttaaattactcaactttgtcaccatgtgaatcttcatgttaccaataacaaagtagttttcacttttttacagcctcggttaaaatctttttttttttttttcttgaaagaacaacaaattagacaggaataatcccttcacatgcacttgcatgtgacaacgttaagatcaaaatgtacaaaataatttatttatttcccctatttaaaaagaagtctgttttatgtctattttttttatagtattcttttgagtttctaattaaagaatttattctattaaaaggaatagtttttctaatttaacattttcattatcttcccaccttatatatttatacatgcacttgagaaactactcaaaattttgtaagttcgataaatacttaaaaagatattattgggacaaaactacttcattttttttagtgtaacagatacatgtatggacagattcatacagaaaaagcgagagggtagtcgcctcttaaattttttttgagaaatatatatatactaggtgattgttacgtgccaagccatgtagtgttagttttatttaatattttaattttttattttaattaataat

SEQ ID NO: 111237 - DNA, 7373 bp, Cannabis sativa
gtgagatactacttgattgcgtacacttgcgtataaacataatttttcgtaacaatacctaatttaaattgaataggaactcaagatttatttcttattgatctatgttttatgaatctgcaaattgaatttatgagaattagtatagaatttgaattataatttagagttgaatttacgtttcaatccagttttttttgcatatttttgcatcaatcgacaatggtcgttgttcggtttgattttgttcttattctcaagtgacgtcgccagaattagtggtatttcttggtccgctgaagtttatttattgttgtcggccgatttcaatcacaagaaggttttgtgtcccttaagtttggatcgtgtgggttgaaggtgcgtgtaagaggtatttgtgtaattttttttaattggattgtataagtgtttatttggcagacccacaatatttgtttaatattgtttctttttttttttttgagttataacagaaaaaagtcctaaataaataggtcatttaagatttttgccccctaactatgacatatgcattactgtgtcccttgaacttttcagtctattacaaatagttcctgaactatttacagtattgtaaattggtccttatgtgaagttttgtcacacgtgacaaataaaatgatagcatggccacttagccaatcgttatatcagcgccacatgtataatttaatattaaaaaataaaaaaatatgtatttttgaaaaatcattaaactaaaaagtaattaatgatttaaaaaattgcgtaaagtaatttaaaaataaataaattatttttttcaaattaattatactcgtggtggcattgacatagcactgacgtggcaaccgactaagcaatcatgtcattattttatttgccacgtgtgacaaaacttgatagaatgactactatagatgaataattcaaggacatttctaacgacatgaaaagttaaaaaaaacaaagctatgtagagtataaatattaaaaatagagtagaaaaatagtttactttagaagaatagtgtttacttcctctcaattcaaattgtattgtgctctatccattttgtcatttttctgtaaagataaactttaagaaagctaatgcattattaacttttttaaaaagggaaaaaagtcaatttgaagtagagtccttcctacttggaacgcattatttatgtattcctcctggcttaagaatccattagaattagaataagaattgggattagaaatctggtacaataatagttgccaaatgccattgatgtttacaatggaatccaggagaattcagtcaaaaataatccctcattacttactaaaagaataggttttcctttacaatgaaagaccactaactactttgactatacgatgctctaacaaaaccaattaaaaaaaaggatatggtgttgtaatgtcaacttgctatctcatactttggtcactcctaaagctggctgctaacttttcccaagctgggattttagtgaaggaattaaaggtgcctcttcatccactcgagaatctggaccggaactattccatccacttctccccacattgctcttcttcttcttctcatcttcgtcatccggtgtgtacagatcatatgacttctccatcttcagatcctgcaccatacattattttattattattattctaacacatccaaccctaaacatatttcccccaaagcttaatcccaacatagtagatgtagatgggataggactcataagcctaacacatcatagaatatgaatacaaacaaatctttaaggaggatttttggatgaatggagagatggaaggacaaagttcaaacttctaaagtgaatataaatccattgtttggcaagagagaggagagatggagggagaccttcaccctccaaatctatacaattaaatccctccattattggaaaatggaaatatgaagaaaagacataaatataataaatgtgaaaattttccctgcaaaaattaatcattgtatatgttacaaatggtaatattgtcattttaataattaatacttttatggtttttatggtgaacattacttttataagtactcattattagctttgttgtcattgtaagaagtttcacactcgatcaagtagaagcaatagaattgatggtagcactagattgggctcttatgggagaacatctttcggtgatacaagtagaacttgtggctttatttgtagctttgtattgggctctcacaattggttttactttactttttattgagtcggaggatttttttcaggtattgatactatttcttaacaaccttccttttacaatgatctatgggtcattgttagcggatttagcaagtttgatgttgaatttttcagtagtgtccctgattcatgttcattggtcagccattatagttgtacatgaattagttcggcatgctcctcaactggataaaaaacttgtgtgtggttagctagataagatcccttctcttttcagggattctcattctatcaggctgtatgacaatattatttctatttaaggatatttgtaacataaataccttatattttcaattttatacacttataagttatataccacatgtttcttttgacaaattaaatacctaaagttacatttccaatactatcagttcgttaatttctattcaaacatgggaattttttgcagcataaatacttaatctttatagttttatacatttatataccacttgtttttctttttcacggtggattaaaaacctaaaattaaaaaaggacacttacattttaagagaagaaaaagaaacagggagaaatatatctatctataaatagtatttttgctttcgattatttttattaattaaataaataatttttagtttttttattttaaaattatttaataagtaagtttattaaatatatgagtggaccattgatatattaacacatgccaacttagtgaattttaataagttttaacaggctgtaagtaacataaatataactttaggttattaaatgtcaaaaaaaataataaaaatggtatataagtgtgaaaccaaaaaatattaagtatttatgtcgcaaatactcttatatttgaataggatttaacggactagtagtgacggaagtaacacggaaatataaccttaggtatttaatccatcataaaaatgtggtatgtgtataaaactgaaaacataaggtatttatgttgcaaattttccttcattttaaatgaatttgttcattgcccgaagaaaaaaaataataatagtaatattgtaattttaataattaacttcctcatcatccctcctaaatagccttaagcttcccatcattttatcgttgttccctatcatacataatccctcattctttcctatcaaacatagcctaaatactgtaggccacatactgcagtgatgtaattaatgaggcaagtcaactaagaagctgctaataaagcaatgacttggctttttgaaacaactacccattgcattttctcttattaagtttgaagttagtgtaaaattttataagccaaatccattatgtgaataagagatatacttatcagataataaagagaaataacaagtttagaggattcacctgcactgctttatctgggataattcctgaaggaagttgagcggatcgagagtccctcatctttaagtagttgtacacaacaacaccacataaagctgcaaaacatatccaattgtgtcatacaatggttcgagatatggatgagaatataaaaagttatgcaaaagacatacctattgcataaccagttatgttgagacctgttatcatggactcaggaaatataactgttgacagggcaatcaatatccaatctttcatgactccagcaactcggatagttactgctccagttctaccaatgactaggaaagttgaaatattcaatgccagtgcagcaagtgcatttgagaaaaaaatccagaaattaaattgaatctgagaaacttctaatgcaggactctccaaaatataccaaggaatagagagaaacacaaagctgcaaaagaaagtagacaaaatgagcacatcattggataataacacatatttgaaatgtaatgtgacatgcactaagatttaatgtttttattcctgatgcaaaagcaatacatgaaatgcatataccattgcaggaagaatgttgtgttaataccccagtattaggaagaaaaaaaaaaaagaggtgatacccccacaaattagtacaacaaagataacaccttaaactagaaggtcagttcttcaaaaaaaaaagttggcaacaatcccgaaactcagcaaaaaattgatgtaaatatccaaacaactagatataaacacatgtgtgcacaaacactggaaaagaacaagacacataaatggaacacttgaggagaaattttaagccggctgcagccaagtacctgcatggtgctatgtaataaagagtggtaacaggatttagagttaaacccttgttctgaagaagaacttgtgtcaatacaagcctgagggcctctccaacaattcccatgacttggtaaacagtaccagtcatgttaaaatgaatttccccatatgaagatacagccactccaacactgataagcaccatgtttaagaacacatcacaccttaaaacatctgtgccacaaaacacagctactaggaatgttgccacaggcactgcaaattccaaataatgatgaaaaggacacttatttagtagcattcaaacaaacaagaaaaataaaaacaagcaattcacatacttagggctttaagcatctggatgaaggccacagaaatgaacaaataagcagtattgccaaacctgtacatttatagaaaaagactttaataaacggtgcaaagtgagaaagttgagcctgaaaaaaaaaatgcttggcagcaagaatgtctaaggaacagacaagtatggctttagttgacataaatttcacatttacgagttcattaaaaacaggaataaaaggaaaaaaaaaaaggaattgcaataaaaggacatcggtataatgatgaaatgtcaagatagaatcatcttatcaggcatctgtagtagctcataagcataaagattattctggattcatggtgaggaggaaatatagtagtaattacttcctcaaaaaaatgccatgaaatatgttagcacatgacgtgagtgcttatatttctcgctaaaatttataaactagattaatgaaaaactcctagttccattagctcaaaatacttataaagccacattgacctaattgaaagtggagaaacaattattaataagcattagaatgcattcagcagtaaaaaacgcttaccatagacttgatgcaaagaaggcacttatgggaaccacacaagtcatgtatctacaaaaaaaaaaaataataataataagattactgaagaggataaaattacggagacatgaagaaattctgctgcttattcaagaatttacattttgaaggtcattttgataggagaaacaacctgcacaagcaacagaagataaatatcttatatattaactagaattaagttaaagacaagtagcagattgaaacagattgccgatgcacacagaagatcaatggaggcagtatacctaagtgcaacctcatttgatagagataaaactacagaagacacacataaaaagaaaagtattcaaagtggaccaacaaaataaagagcaacgcaacaatcataaaaattagagatatgttctgggaccaactaatatttgtctaccctattctgcaagacagcaaggctaataactgattttttttttgttgaaaaggaaggctagtaactgtcgaataaaaaccatgtcagcaacagattatttgatacatagacaacgatccatgagttttagcagactaacaattcgtactaaaaggtgagaatcagaagcaggatgatggccgaaagcaagtaaaaggtagtgactaaaataagataatgaaatggaaagcttgaaagggtctcataataccttgacaacacggataagaaagaaggccacagcaccagaaaaacccatatgaatcatggtgagtgtgattggatatggaaagttgaagtaccttgtagagaggaaccactgcaaataaacaaaagaagacaatatacgtataacaaaaaacattgattcacatatattagaggaataatgccaaatgtatcagttagaatatgaattaagctttaccttgttgtagagaataaccccagatgaaagggtgatgtaaagtaaaaggtatatgtacgttaacagatgctgcttgccgatcattgtgtactgtatagtgtccacaattgactttcaatggtccaaatcataagcctgattttgtgcagataaaacaaattcaaaacacaagagttgtgaagccaatccatagacaactggactcagatttaggggaacaatggtgagaagaagcttcaattttaagaaagctgcgatgccaagcatggatccaaagcaacggtgtctcacattttcactaacgctacttaaaacgtatgcaattgtttgactctcatgaaaaccccgagtcattgatcaatggaacagactcttacttcttacttaggtcgtgaaaattttgcaaatgcatagcagaaattagaggaaatcaacaagaaatatgaatgttcgaagaattgaataagaagattgtgatcacaaatgagtagcggcgttgagaatagaagttacctgacctgcaaatctgatgatccgtattccgtacaatggaagaaataggagaagaagaagtagcagtgggagtgaatgtggtgagaatgggagaaggaaagagtagttggtttagagaaatgggggacgaatcgttgagtcgactcgttcggattccaatgaatcttccataaatgtcatcgtcgttcccatgtgatgatctcggaatcttcgtcgttattttgttacgcaaacgcaacgccgcttcctacacttcatcctttatgggcccttaggcccaaccaacaccattagtaaaagtaaaaatataggaaaattttagaggaaattagactctatactctttttatattgttctttttcatttttaccctcttttttaaaacctatcatttttacctctttttctaaacactttagtgattttacccctgtcacttcaatatactctctatgtgactctcttatatcagggtattttgagtacaatacatataaaaagaggtatgttt

SEQ ID NO: 111238 - DNA, 5598 bp, Cannabis sativa
cccacacatccacttctgaactttcaatcaaccccttcaaagactctggcatttctctccaaccacacagacacttaaaactctactaaacacgtttcgtcaataaatttattgcacaagaaccaaaacttgttctcagtttcttcgcacaacatctagaatttaccatattacatcaacataatcaacaataaataataaacgaaccacagaagagaaacaacaaccaaaacatttcaccacaacagtaaagctataaacaaaatggcgtgatgatgcaattagccagccaaactataacgctacagccacaaaaacaaagctaacatacagaccaacaaatcaacagaacttttccgggaaaaataaaataaaaaatctagacctgtgcttgagccgtctcaatacgacgtcgtgcgaggggaaggaagcgctggaggagggcatcaacgatgagcttagcagcacttcctgctttcattttgttttttggactttaatcgaatccccttttctcctaatttacctccgtgagattcccctcttcagcttcgagccctcggctcgcattcggttgaggccccaattgacaaaccctagaaaaatgcagagaaaattgaatcagttgaaagtgatggtccccagtggtagggaagggagaattgcgaagctgggcttgaggagaagagagagtcacctatgaattttgggagccgaatgctctaagctctggtttttggagaaccagatcgtgcaactaaattaataacggctttttttatttattttattttattttattttagaaacattattatttatttaaattaaaataaaaataaaattttgtatgaactgtgtgaccttttatttttttttctttagatgagaagaatggcccgacaattctcaagaatttgtcattaacagctaataataacaataaaaataaagtgggaaatgtctaagtaagataagcacaaggaatattttgatgaatatataaaacattgtttgaagttaatggcgatggtaatgcctgtactttttttcaaaaagaaaaattgtacgtacatgttatcaatttttatttttataatttctaccaaaaaaaagaagaaaaatatttttataaatttaattttgttactacaacaacaaaaaagaaatcttataattctaaagaattcctccattaccctttaaaaaaaaagaatttcttgataagtgttaatgattttgataagcaccttttaatttaatatctattaagctattaaattaagaatataatcacctatataactagataattttatacaacaaaactaaaggtaaataaaaattatcttgtctaagtgacatggtgtgaaagtttttttgtttgtttttttgtaattgaaatttttgaaagtttttttctttctttttttttttcttggttgttccttcttatggatacttctaagaatcctactagttttgttagtgattgatgtacaaatatttcattgaaatatgaggaagagtcaacggtcaggataagtcattaatccaggatgaagagattgacactcgttagagtatagtggggcaatttttgacaaatactgcaattgattttatggcaaagcaaaacttgatagttgtgctttggaagcttgggatggatatgtatgtaaagaatctaagaagcaattgttatatctttcaattttatcacgaaatagatattaagagggtgataaataggagtacttagactttgaaaaatgctctccatttatttttgaaaggctgaagccaggtgatgttctgaaggcggtccgactgcatcatttagaaatataggtgcaattacacgatatcctttcagagttcaaaactggacgagtggttagtgatgctgaaaattatattaggcaatttgtaagcttgatgagaataatttagtggggtgtggagagactatttgtgtgtccgagttcacatttgatattgagaaaccattgaaacaaagaatgaaactgtaacaaattggagcatattggatttggatcaatttttaatatgaatttgttcctacttttagttttatctttggaattattaaccacactaaatagtttgctcctctttgtttatttagcctattacttcgatcgttaagctgtatagatttttatgaaggcgacccctaagagaaaaaaagtatgacatgggtgccaaatgactacgttctagttcgtcgagctcaagtatgtacggtggtccgacagaagagagtggcttgctgagaaaataattcttaggggattgacagattacatgttgcaattaacccacaatctgagggtcatggatggaatcttggccatcaacaatatcagagaattgatatggaaattatgggaagttatgtgggagatatgaatgggaataatgttgggaaaagggcgggagcgaatttaaatgtaaaagatgagggggtggtttttatgaactctataaaaaacacgaaagaaaattaatattggcatgttaggccttaagagtctattgacttggatatgggtcgttcagatggtacactttcaaaaaacatcacattggtgggctcgaaagattaggcttatcaattattatgagcacattaagttggaattgccatgggcttaggaacccatggactattcaattccatagagatattgtgtatcaaaacaagcttaatcttattttcttatgtgaaactctttgtactaaacctatattggagaagttatctagatagttgggttatgagggtctcttttcggtggatgctcaaggaaggggtggtggtatttcaatgctatggaaggataaggatggagctgaaattcaagggttttctcaaaatcatattgatatgacagttcaaacggagaatttacaagagtggtgatagacatgtttgtatggagaaccaattcactctcttatgaggaatacttgaaattttatgcgacaattgaaggatgaatttgatcttccttggtgtatcattggagatttaattaataatattggtcaagttgataaaaggggtgggaacccttattttaattggttgcttaaagaattttagaaagcttttggctgattgtgatcttgtggatttggaacttttaggtcatcagtatacttgggaaaaaactagaggtatggatgggtggaatgaagttagattggatcgggatcttgctaattctcattggatgagtatgtttattaacgcttgtttgtctaatatgatttattctacttctgaccatagcccaatttttcttaatcattgttttcgcacacaacctgtttttaagaaagttctccgcttcgaaaatgtgtggcttcgtgaagcctcgtgttattgtattgtgaaagagtggtgggaaaattgtggttctgctatggttcaagataagattgcagctgttctagatcctcttagtgactagggaaatgatattattgttggaacttattttacaaggatcttattttttatcacgtatgttgattataaattaataatccaacaaactagaacatacttttctaaaacagaatataaacaccttaagtttgggtatacttacagtgttatctcatcgaataattgactatttccattcagtactctaacctttgaatcctttcaatagtagaatatcgccaagtaatgaatctgaatcttcttttcttagaatatgtgacatgtattctacatagtcttccacaatgtcttgggtatcacacatgactagtgtaggcaatttctcaatcactaagaataagatgatggcaaaaaaaaaaaacaatgaggaagagagaaggaaatattttaattcccatagcaaataggctattaaaaaattgcatagaaagagaagaaaagaaaaccaattgtgtgttgtatattgtttttatccatccgtgattctggacgaatgacagacacgtggcataaaatgagaagcaaaacctcaaatggtcactaatcaagtcctcttaattggactaggtcacgaagaagccttgtggatccgggaacagatcaagcccaagggctacacggggatttgtcatgcaacatattgccatttgggttctggaggcgtcatcatatctctggaaccctggagaagaccaagctcgacatatgtccacacaacacctggaaggcgttcgaagagtttaacacggataccaatcgcacaaaagatgtaacaccctagtctatagggacgccacgtgtgcgattttataaactagtttagtaaaatagaataattaattattaaaatttgtaataatatcaataacttcattaaaataaaatcctaataacggacattataactacactaaaactttgttccgggaattcttgtataaaagttttatcaaaaaggactacatacaataacaaattaaaatacacaacagatatagctcaaaacaactcttgccaactcggcacacaggccggtaggatctatttgtacattcgccatagaagaccgtgaaaaacctaaataggattgccgacaagtgaaaaacctaacaatagtttcagtttagagtcatgacttatcaaagttgtctcacaggaacaactcggataccgctcccctatattcatatatcatattgcctaattaggcaagcccctgccataatctggcatccatatattgcaccacctaatcaggtggcctgtgtattacattgtcaatacctaatcagacaatatatatcgcatcacctaatcaggtgagcccgtgtatcacattgtcattgcctaatcagataatcgaccatcaagaaacctatcatgccatgtggtacattatacttttcttacctcaagtctcagtttaggtatgtcagtcgacctgcttggagaacgatcaacaatcccgagccctatgtcataacaacaaaaaggataattaaccaagtaatctaaccttattccaagtccaaaaattcattctaaggatcccctataggtctttagggtattctcacctcaaattgtgggaaaatacaaaaaacggacttcaaaaacaccaacagaaatggtctgccgtttgtgaaactgttaatcattttccttggggtttcctagcaagaaacggttaactatttactccaaatggtgaaccgttttctataggaaatgtaaatctcgagttttgcactcttcgaaacaccaccgaaacctatccaaatcattccaaactttacaagatacatgtataccatatataaaacagtctcaatgtaatagaaattaaaaacgagcccttaaacagaaaacaccattaaaattcgggctttgagttttataaagctcaaacttgatttttacctcaaaatcatcttaaattcaacaagtaaacatcaaaactagtcccatagcaacccataaacagtttcatgaagtcactgttagaaaaaatagagagattacaatggaagaataaaaataagatgaataaaagactaagacaattacaactctaaacaaaatattacaaggacaatata

SEQ ID NO: 111239 - DNA, 13643 bp, Cannabis sativa
acaatctcaatagttcaggaagaatttttaacaacaaaaaaagttcaaaaaacataatttggtatatatcaaagttgagaaaaaaaaattactaattagtattttaaaaaatatcattaatcaattataaacaccatattaaacacaagtagcaatgctcttaaattattcaacgtaaaacaacacagcaagtcccgaagcaatagcattaaatttatcgtgtttgccgtaattgtaaaccagcctttattgattttagtacataattaaatacaaaattacgcatgtgaacaaataaacgtgaagaaatgtgccatcaccggtggtcgtggagcacccaacacactatctctcttttcctactctttatttttttaattttgttttttcttggtagagtgaattcaatccaaatcaaacttcccttcccttatatcataattaaataaacaatcaaatgtaaataaaataatgttatttataatgttaaataatgaatactcacatgcccacaccaaaaaaaaaaaaaatggaaaattaatttattaagtattccaaagaccaattggaattgtgaagtacaaatattatggtaattggtgaaattttttctaatcgaataacatattttgggtaggttaatagttactctcaaattaaaaataggatttgtgtaacgccctattagtttagagatgtcattgtgttttttaaattattgtgctaaattttatcaattaaagagtttagtgtaaaatcgtgtttaacaaattttttttactataaacataaactttgctaattatataaatacataaagtttacagaaatcctgaatctatttttaaaatgtttacaaaatacaataaatcaaaagtatcgccgagcaactaacaaactaagcccatgtcgtcccaaagatctgaacatcccaaattttgctttgaatgtggcctccttggtcatccttttgagcattgtgtttcttttatggagcgcatcgacagtggcaatgatgacaaacttccttatggccgatcgcttaaaggtgccaaactttcgacaaatggttacgtagctaccgtactgattttgcaaaagaaaatgcgtgaccttttattacgaggcttgctcgccatgctctcacaaatagtcacccaagcctatactctcgaggcttgcctcaaccacgacctctatttgaagggaaacactcaaaccaacaacaactttctcttagttcctgctcaattagtgtaaatcttccaagtaaccctattgcaaatgtttctaatgctagggttttgtcaatatataaatacacatatgtttctcttttgttaccaatcacttccacagtcactaccaacatttctatctccaatacagataaccacagaagtactcaaactccaccacctttctcttcacaatttcatgccactagttctcacattcataccaataactccattttaagtccatcaaccactgaaatagcctcttctcatcatattaatcaaaccaaaacatctacggcctccatagcatcgatacactcgtgcaccaatccttcaatcactgatatctctcacatgtacattcttgatgttggccctcattcatcatctctaaatacctttgccacgtaccctccactcactaatttcattcccacaaattcaccctcccttgcaacaactataagtagtcactcgggccctcaatacacttccacaccagcaatagtcactacaactgctggtgttattcaccaaactgaccctctctcaattattgacaaggaaaatgcatcgccaaacttaaatgttaagaggccaaattatgctttctcaatgagaaaaatactaaaaagatgttgtggtattaaaggaacaacttcttcatcgttgtcaagggaagaaggttttgagatcttagtttgactttatagattctagtttctctcatgactcaagtgtagaggttgctatgcagtcccacaactcaccatgacaatccttagctggaacgcatagggtttggggaacccgagtgcgttcatatatcttcgattacttgttcaacaataatcgtcccatgttttgtttctcatggaaacaaactcagttttaattcgattactcgtatctgacaacctttacatttttgaaatggaatagaagctcacagggtagggctaagtggtggcctcatgcttttatggaatgatgatgttgatgttactttgttaaactatggttgtactttttttaattgttatatcattacttctaggggctcgagtttttactttactagtttttatggtgcacccaaaacaagtaataggtctgcatcttggactctttttcaatgctttgcttatgttgctcctctcaaaccttggttcactattggagattttaataaaatcctttcaaacaatgacaaatctaattggggagtcacaaatggttactttttgaattgtgtttgataattgttttttacatgaagatctttatgatggtgatccatacaatggatcaagagttgtacagctgtaaatacaattaaagaacatcttgattggtgttttgtcaacaaccattgtgagtctttttttactacacctaaagttaaacacttagacatttaacactcggaccatcgtgctatttgtgcaactttcactcgtgttttagctaccgatctccctgttaagagtaagattagagtcagattcaagaaactttggctgactgatctagaaagtagcaatattatttccaagagttggatttctcctgcccaaactaacccaattattgctgtacttcgaatttggaatcatgtgctacaaaatcacaatcttggcatacatgtaaatatggaaaaatgaagaagaatattcatgaattacatgccaaagttgctgacttgaataatgtcacatctcgcgccagcaataatatgtcagatttgaaacattctaaaacaattcttgaggatttattggaacgaagaagtttattggcagcaaagtttgagggttgattggctagcttgtggtgacaagaatactaaattcttccactctatagcctctactcgtaaatccaacaattaaattaagttcctttatgatgaatcaggtcacaaagtgcagtcaaacgctgaaattacaatagtaattcatgattattttgaagatatttttactgccagtgttattgataaagacactcttgctaccactcttgattgcattcctactttggttagcgctaatttaaatgagaaccttataaaatatttctcagcagctgaagtatacacgactttgcattcaatggggcctgataaaagtcccagaattgatcgcatgttggccatattttatcaataaaattaggttgttgtgggcaatcttgttaccaaagctgttttgagtattctcagtgatggtgctaatccttcgtgtttaagtcgaacaattattactctcattctgaagatcaaaagcctcaatgcatgaaagattacaggcccattagtctctgcattgttatcttcaagcttgttacaaaagtgcttgttgcaaggttcaaataagtcctcccattggtaattattctgaatcgcaaagtgcttttttgcagaatcatttaataactaataacattttgatggcttttgagttggttcatgctatcaaaaattaaaacatcaacagaagggcatttccaccttaaaactcgacatgagtaaaacattttaccgagtggagtggaaaattattgaagaagtcatgaggaaaatgagtgttcatgaaagatggatttcactaattaataactgtttaaccaaaaatattttttttctcttaaatggggaagccattgaagctttaatcccaactaagggtcttagacagggttgtcccttgtctccctacttgttcttaatatgctttgaagtctctcaaggcttctctaatatgagcaaaattttgacaaccttaccgatttcaaactcacaagacaagcgtctccaatctctcatttgttctttgcagttgatagtattttttttttatcaagcaaatgggagatcttgcatagccatcaagaggcccatggacacttatcatcgtgtttctggccaaaatctcaatttggaaaaatcgttgttatctttctccccaaacacaactttagcggctcaaatatttttcatcgacatctctccatgcctatttgtgaataccataaaaaatatcttaggttgtcatcttattctagatgagataaaaaggaattgtttagcaacattaaagagaagatttggaaacttatgcacacttggattgagatttatttttcaatcggggtcgtgaagtctttctcaaagcagtggtccaattaattcgtacatatgtcatgagctgttttcgtctaccaaggtatttttgtaaacaacttgagtcaatgatggctaacttttagtggagtatgaataaaaacggttcgaaaatccattacattcttagaatcttctttgcaaaacccaagctgatggtggcatgggttttcgttcttttgtccactttaatcaagtgttgttagtaaaacaagcttggagaatcctagagaaatcagactctcttctcagtaaagtgcttaagtgttgatattttccaaataactcttttcttgaagcatctctgggtcactcatcctcttttaacttggcagggtattcattgggccatggatcttcttttagcaggcttgcgttggaaagttggtgaagggagaaggattaagtatagttttgacccttggattccaagacacaacactttcttccttatttgttacacaggtccgaatgatggggtagttgccaatttgataacagatgaaagagaatgaaatgttcccttactggaacagtttttttctcccttggatgtggacataattttgaccattccgctcagttttttcagcagcaaagacaacttgatttgacatcattacaactctggtttctacacagttcaaagctactaccatttagcatcaagtcttgatgaaactaatcaaagtttaagttcacactcggcatcaacttggtggaagtttttctggtctttacattttctttcgaaggtcaaaatttttgcatggaaggccatccacgatgctctaccggtttctacctctttagttcgaagataggtaatcacagacttaactttctctgtttgtaatcaagcatgggaatctgttgagcatgcaccttttagttgtaaatatacccgagtagtatggcgacacttgagtatggtttttgattggcatttttcccacttaatgcatacgtgtgactatttatttcatctttcttcaatctactccaatctggactgaacggaatcaagttggacacggtcaaaaggcaaaaccagcaaaagaccttgcctcttttgccacaacttatttgagcaacttccgatcagttagggataaataccatcatgaagctactgccaagccattgcagattgcttctcttgctgcttcccaaccccgtagaaatcctctatgattggtgattttaaaatgaatatagatgttgttgtagatgtatcatgaaatattatttgtgttggtgctattcttcaggactttaatagccagatagtggcagccctatccatgtcgctaattggcaattttagttcccataaaatagaggccaaagctctttattttcacaatctaaattggactctccatcgacaattaccaattgcacacatggagatggatgcaattatggtttcttctgctttgtgagctcccttcaattcaatctctacttttaatgatttgattgtaggcatttttagtcttttattctttttccctaaacctaatgtaactatttttcatgtcaaatgtatagtcaatatttacgttggggatatatgatgcttacttttggttggagaatatttttatgcgtatctactctattattgtaaataactcctttaatttttttaatttataataacaggtattttactaaaataaatatacaaaatatataaatatttatttaataaataattttaacaatatttatatattctacttattaaaataatttatcacacaaataatatctcaaatttattatgtttaaaattatacggtggacgtaccattactattgttcactgttaaatttaaattctatatattataatttttttttttgaaaagtacatatataatttttttaaaaaaaaaattattaagataagagatggatgatatatatatatatgtattataagagtaatattatgaacacatatttcacacgtaaacttaacacaacacacctatgaaataagtaacttgaaccaattacttttatttaagatctcacatattaagagtgacttgatatatataggtgtatattatatttgtttttataaatttggtaggaatatatcactaaagcggaaacccccacgtgttacatacatgcaaagtatgtgaatgaatgaataacatgcacacatacacaacacaaccctcgtaataataagtttccatattttcttatttttaattttttaacactaacaaatttccaacctttgcctttaatttaccgccttcggttatcgccgttggctttcgtcggaaagaacccacggcaaatcctttgttctctactccatgaccatctgatcattcagtagtatcacataataatacgccaccgtttttggttcctccgctgatagccaacgccttcgcttttcttccatcttcaaaccaccatttattttatataaaagtaacctcgcttttattcaatggtggaagacaagccagagtccgtggtttacctccacggtgaccttgatttgaaaatcatagaggcacggtgcttgccgaatatggatttggtctcggagcgtgttcgccgatttttcgcagctttcaaaacttgccattcgccattttcaagcagtcacaagcataaggttcaccggaatataatcaccagcgatccctacgtcaccgtctgccttgccggagcaagagttgctcgaactcgcgtcatctccaataaccagaaccccaaatggaacgagcgcttcaagattcctttggcacatccagtctctcacattgagttctatgttaaagacaacgacatgttcggagccgatctgatcggagttgcgtcggtctctgctcagaaaatattaaccggcgaggcgattagcgattggttcccagtgatcggctcattagggaaaccgcccaaacccaactccgctatcaaaatcgagatgagatttacaaaatgcgacgacaacccaatgtatcgcttcggcatatcgtccgatccagacaattacggaatcagaaattgctattttccggtcaggcaaggagggtcggtgacgctgtatcaggatgcccattttccggattcgatgggcaacaaaattgaattggataatggggctctgttcaagcaggaaaagtgttgggaggacatttgtcacgccattttagaggcccatcatatggtttacattgctggttggtcaatctatcacaaggtgaagctggtgcgagagccaactaagccattgcctagtggtgggaatttgaatttgggggaattgctcaagtataaatcccaagaaggagtacgagttcttcttcttgtttgggatgataagacttcacatagcaaattttttctcaatacggtattaatgaaaaatcttcttttaatataataaataaattgactttgaaataaacttgttgtgagtcaatcatggatggtacttacttgaaatttcttcatagcataagaaaacagagtttctttaagctctcaatatattaatatcatcatatattctactttttatcttcttttgagattatttttctttgattttatttattaattttttctttgaagaaattatttattttataaatgtgatggactaacaaatggatatattatatgtagactggagttatgcaaactcatgatgaagagacccgcaagtttttcaagcactcgtctgttacatgtgtgttgtcacctagatatgccagcagtaagcttagcattttcaagcaacaggcatgctttatactatggtccagtaattgtttcaccatttaatttttctccattcaaaattcttactatatctcattttataaggctacttttcttttgcaatatcttgatcatgacttgccactttccttaatgcaactaaagttatgctgttaatgtcaaaagaacacaaaaagataaaacaaaaaaattgatgtatgcatcatagtaaggtttttaggcaaagaattaatattgaatttttacttgctatgctgataatcgagttcaggtcgttggaaccctctttacgcatcatcagaaatgtgtaattgtggattcacaagcaccggggaattacaggaaggtaactgcctttataggaggtctggatctttgtgatggccgctatgacacacctcagcatcgactatttcgtgatcttgacactgtatttcaggatgattatcacaatccaactttttctgtgagttttgtttcatttcttaccttattactcttgtacttgaacaaaatttttatatggatgccatatttcctatgtattttctgaatttgtttagtttgatattgttttgtttatgtgagtgtataggctggaactaagggtccaaggcaaccatggcatgatttacattgcaaaattgaaggtcctgcagcatatgatgtgcttaaaaattttgagcaacgttggagaaaagctacaaaatggtcaaaattggggcaacattttaagcgggtttcttattggcatgatgatgctttgataaagttggatcgcatatcttggattcttagtccttctcctggaattcccaatgatgatcctgcattatgggtttccaaggaagatgatcctgaaaactggcatgttcaggttataaattagtcccctaattgaattctttcatacattatatgatcttagcttgtttagttctttatcttattacttgaattttcttgaactgacaggttttcagatctatagattcaggatctttgaaaggatttcctaaagatatttatgtagcagaggctcaggttcttcactctggcatattttatgtaaatttgtcattcatttttttgcatttatatatgtcagattgtttgaaattattctgtattgcagaatcttgtctgtgcaaaaaacttggttatagatcagagcattcaaacagcatacatccaagcaatcagagctgcacaacatttcatttatattgagaatcaatattttatcgggtcatcgtatgcatggcctgcttacaaagatgcaggttttgtaactatctctaccttcactgtgccagacatgcccaaatatgagtgaaagcttagttatgtcgaaatttgttgctgccattgctctctcgctaagacaaactttttttttttgttttgattcaggtgctgataatttaatccccgtcgagttggctttaaagattgctagtaaaataagatccaaagagagatttgctgtgtatattgtgatgccaatgtggcctgaaggtgtaccatcttcggctacagtgcaagaaatactattttggcaggtaaaaaaattaaattacaagtatagaaaatgacaggttgatttgctaagcgaaattctgtcacattctaaatgcactttactttggtagaggtgacaatataactagcaatttgatgtgtttgagtttggaaattcaaatttatttcagggacaaacaatgcaaatgatgtatgaagttgtagcagaagaattgaaatccatgcacattgagaatgcacatccacaggactatctaaacttttactgtcttggtaatcgagaggaattgcccaaaggagagacacctaaccatacttcaaagggcggagacacggtaagaagaaacaaatcaatttttctcttttaatcattcaattagtagcacaaataatctgttatgtgaaaattgtgtttatggcaacaacccttttcaggtttcagcctcacaaaagtttcaacgatttatgatctatgttcatgccaaaggtatgatagtagacgatgagtatgttataataggttcagccaatattaaccaaaggtctatggctggttcaagagacactgagatagccatgggtgcatatcagccttatcatacgtggggtaagagaaaacgacatccacatggccaggttcgccccctttcctaataacttccttcatcaattttgaccacttttattaacttgtgtcatttaacataaaagaagcttaaaccattgtgctgctccttgtgtgtaaaggtgtacggatacagaatgtcactttgggcagagcacttgggggtggtagaagatggattcaaagagcctgaaagtttggattgtgtgaaacgagtgaaccaaatagctcaagttaattgggagaatttcgtagcagaggagtttgcaccattgcagggtcacctgattaaatacccagtagaggtagatgctaatgggaaggttggtcccttgcctggacgagagactttccctgatgttggtggtaaagtgcttggatgccgttctaaccttcctgatgctctaactacatgagctattcattcctataactcttctcagttttggtaacttcaccccccaaactactaatcaatatatttagttgactaatttatatatatatatatatatgtatacatatgtatatatatgaccttgtaatatgttacccttcatacatagctgtcagtccaattggtttcacattaactgtccgaagtaatataggtggaaatcaggttctaatttcactaaacaaattgttcaattgtattgtttattatcaaaatttatatatacgtacgtacagtatgtgtttgaagctactcttgcaattcccttatgatcatatccgaaaactattataacccttatattagaaaaacataataatttacctcttttctggtttctattggctgttgtatctcattttaaacgatcatcgacaatagtaagttgaatgcaaagtgtagtatgctggatttggaatgtgaattggttttattgacaaattattaccaattttttttggcttaacaccaatttattttatttacttccgtttcacttagtttctataagcatttttttagttttttagaattaaaaaaacacttctaaatgtgtttggataaaaataattatctaaacagtcaaaataaattgaagcttatacttatattattataatgatctaattctagcttaagtagaaactgaattttgaatcttcaaaatcttcacatcaagtcgtatatagcaaacaaaacacaaaatatatttagcataaacaagaattctcaaaattaacacactcgtatatatataatattgtcgtacttatagtcctaggagtgtactgcaagcattgtactgcactacaaattgtactagctagttagtacttgaagttacaagacaatataaaatcattcttcctatgtataaacatgaacgattatgttcttcaccctcctctgttcttcttagatccattattttcgtcaaatgatgctcgcatatcgatccaagagactatacacatatagtcgtgttattgcttatatatatagatgtatgtatatgtatatattgtaggtgagatggaccattaaggtgaattaggtgcggtgcagtggagtttatccaattccagatatatggcttcagatatcaaaaggtttgtgttacaacttagaattttcatttctttttatggttcttattactttgatcgagaaagcaaattgttcgatttgtggtagtttagtttataaggaagaccaaaatgtagaaaacctgatcttaatatagatttgtaggtccatccacataaaacttcctttcgtttactctcttttaatttgctacatatcaacaataagaataaaaattaaaaaatctgttaaaaaatctcctttaattttctatgtactttaaaactgattttcatagaacgttttgaggtaatttatgtcaagacacagcttgaaaatagtttaatatatccgaaactcacattaacaattatttgaaaagagcaataatgccattgttaaggattttagataaactgacattaacaataattatttgaaagtctatataataataatcctttgttctcatttttgttttaatatcaatgctaaaagaacagggcaaattggatatgttaatgtatatatagatgataaataaacaaatttctgaagaaaaaaacacacgtatagagagtaccggcctcacacattaattttcgtatgattattaagataaaaattaaggaacacacgaagtaaaaaaagttaagaagaaataaaagataagataattaaatttaaattaaagaaaatggagaacatatataaatagatctcagttacattatatataggtgcaacaacttaattaattaacagtgactttgccaaccataccagctccctggtgaggagcacagtagaaggagtaagagcctttctcagtcaaagtaacagcgtaggtctctccaggggcgttaagaaggtcttcctcaggcatggaaatctttgatgcgtccacaccacttggaacctcgtcctcgtcgaaaacaacgttgtgagggaaaccagcattgttcttgaacacaatcttatctccagagctgatggtgaagttgttaggctcgaataccagcccaccgtcactgcttcccaacaaaacgtcctgagccatggcgctgctcgcaagtatggcgctagctgcggttgcagccacaataacacccacgtccttgagcgaagccttgatcaagctcatcttcgccactggggtgctgactactttaacaccagtggtggtgttcatcattttggtggagccggcggtgaccttgaggccggtgaatgatgggatggtgactgatgcagatgtcatggtggccatggtaagtggtgagagtgtggattggattggattggattgagagaggggatcaaggggtgatgatagctagaggagaggggtttataaggatggtttgtgtggtatatgtttgaggaaattggataaagaatgtatgtacgtacgagagtttttatcagatatcttgggaatgagtttcattggttgctttggatactatcccgttgacgtggcttgttgttttgtgatgtgaggttgagaatatattccctcttttgggccattttcagcccaatcttttttactcgacccatcgatgggctcactgattgggctatattgccaacccaattatcactaccaagtccaaagagtcttattttgtcgggaacattaaaggggtaagttgaaaaatgcctcttttattaatcaattgaccaaatttgcctctaattttatatttatttgaa

SEQ ID NO: 111240 - DNA, 4151 bp, Cannabis sativa
  modified_base (1606)..(1613): a, c, t, g, unknown or other
ttagactaaattttttttttttgaatgccgaaataagttaagggtgcatcaatacatcctttttaagggggtgcattgtagaatcacccttaaaaatatatgggggtttagtcgcaaatttctcttactttttttaatttatgtttacaatattttttagcttatgattagtatttagtagccaatagaaaattgagttgatgatattatgagtgttgatgtacattgtcactagtaaaaatacatttagaaaattgccataccacatcgtcaaggttataaattttaaaagagaatctcaagtataaatggtgacttttgtaattcctaatatgaaaaggaataagtctaatacatgtcaaataattgaaagtttaataattcattattttgcatcaaattattattattacttactaaatcatcatcttcatgatacaactcttcaattaaaacaccaatattgtcatcaaaaaaattactaattgcctcattaatattaacttcattatctttcttattatccaatgtttgatggaaattagaagtttaataattcctttagaaattcttcaatattcatcaccttagtgatcatgttttttttattcatcattaacttaaacactaatcgagttttactattttatttaactattacaaatggattcaatattataataaagatagattcaaattacgaataaaatgtagtaatatatatattttttttttttgttttgtttacaattttacaacatgaactttttatttacaactttacaaatttaattttaactaattaaaaattttattcagaattataatatatactaaagtatattttttaaatgttaaaaattcttctaaaattattttcttaactatgcaatcaagtattgtaatgataattacacactaaaaccaaaaccaatgtaattctcattacaattaacattccattacaaagaaaagataacattttaataaaaatatactaaaaaaaatcaaagtctatattatccttttttttctttgaatattttataattataaaataaaaacaataggattattttggtcaatacaaattttattctattgcattctcataccaaaccaagcacaatgattctcattacaatgttcactacaactacaaactaaatattgtaatcaattcgtattaccattcttattccattacattactattactattaccattatcattctattacaccaaatcaaacactacctaaggtcctaccctaggttgtgtactctgcatttattttgacatagtcataacttaagtcacagccccatgcttggctgcttcctggtccatcacctgttttgatagcacagaaacaaattagagttaattcgtcggagaagacaatctgatggtgaatgctgctcgcccgccttcttcgttagataacaaagatgacaccaaaatacaggcaaaattttgaaacttaccgacagacactttaatttgaaccgtgccgtgtgtttcgcctgctttcttgaggtattcactagcagcagaactgaaaaaaatttccacacaacatcgtcaaggttacaaattttaaannnnnnnntcaagtataaagggcgacttttgtgattccgaagatgaaaaggaaggagtctaatgattacctgtcaaacaattgtggttctccaccatccattaacaaaaaatcccccaacaccactcgaagtttatttaggtcaaagggaactcctgcatagccagcagcacaagcaatgcgaccccaattaggatctcttccataaattgcagcctggataacattacaggtagtgagtgcattagaatttgctttaactaattctacacgatatattataaggctgaatgtcatgcctttataagcgaagaagatgctatggtgcgggctatctttgatgcttcagcttcattgcaacccccagtaactgtgacctggaaatatccatgttagtttcagaaattgaatatgaaagtagtttactcatagaagaacaagtcatcaaacaatatcacacctcaattaggcatgttgctccttctccatcccaagctattgatttcgcaagaccttgcattacctaaaatatatgttagaatattcgatatatactgaaccccaaaacccgttgccattggaaaacacgaaattccccaagagtgtaatgtttttggctgatctgactggaagtgtaaatatctttacacagtagatggttttggactatatttttattctggataatttggaatacagacactagttgaacctcagatgcctcttaccgcatcaaggcaagcttgaagttgcattgcttcatcactttccaaagatgaaatcctgggtgagccagataatccactggccaaggcaactacagtgtcattggtactagtatctccgtctacctgcattaaaatcactcctgaactggttagcatacaaaaactgtaaatccttaacacactggattaagcaactgaaacttgatcaacagtttatgtgcaggaacttctccaggctatgattttcactaaaaagaacaagaacttctagaaaagaatgaatacaaaaaagaaaaaattgacatacagttatttgattgaagcttcggtttacagcaacctgaaccatttttctccaaacgtcactggtaacaacagcatcagttgtaattacctgaaccatatattaatttgaagcagattatacttctattatgatccttttgaagggagataaaagaaaagaattagaagatacttacaccaagcattgtagccatgttggggtggatcattccagaaccttttgccatcccaccaatagttatagtttttcctccaacctgaacaattcatcatcaacaaacattacatttgtctagttccttaagttctgaaacctaagaatagaattgcaaccatgtacagctccagctcttttagttagagacaatttctataatatatatacctctctccagaaaagtagaatgtaatagttttttttcttcaattctttctatgcatctaagaaccaattcatatagaaacttgtgagcaaactaactaaatcaaatcaagacagcattagtcacatgaacaggactttctccacacctgagattctactgccacactcttggtaacaaggtcagtagtggtgattgcaacagctgcagaatcagccctgcaagccaaagcacattattcaagaatgttagaaaaaaaatatacttatatattatctacagacatatatataaacttgacatgcacatatgagttgatgaacagagttaagaaaaataaaaggacttacccttgaactgaagatgagagtgaattaaccaatttaggaagagattctagaagtgcaccctgttacaagttaaacagatagggaataagacaaagcttctaagctttttagctggtctgtttgttaggatttggaataagattaatgaagttccatctcaaaaccaattggctatggaaggagtagctcattcatcttatatatggtaatttatttccacacattaacaatgtgggactaactctaatacactctcctcacgtttgggcctggaaagtatgggtataatgaacaacctttaagagaccacagggccaaacgtgacatttgaaagaatcccacaaggccaaatattgagaaatttgtgagtgtacacgttgggaaatttgtgaacttttgaaacaagtcaaagatcccaacactaggaactggcacacattggccgaaaggtcccaaatagagattaaaggggagacagcgaaagttttaaggtttagctcgtcttattggaccagcgacactttgggcacacaacgaatcacaaacgactcttttatggctcacctttttggaccggcaacactttaggctcacaacggatcacaagcagctctgataccatgttagaatttgagataagatcaatgaggttccatctaaacaccacttggcaatgagagtatagcccattcatcttatatatagtaatttatttctacacattaataatgtgagacttaggggtgtgcataaattgatccaatccaatgagaaccgacc

SEQ ID NO: 111241 - DNA, 1583 bp, Cannabis sativa
actaactgcctaataactaacataactgactatgaactaattaataccctctaataagtagacacagtaaaacttcattcactgacattatgtttagtggaggagagcaaatttagaagagaataagaatagaaagcaattttacaacctaaattttttatatgatgatataaaatatagctccactcatgtcttgaacggtacaattggacttgctccttatacttttaattgttatgcatagacagtatatttagaatatatgagtatttaaggtctttaggaagtgaaaaatggccttaacattatcaatcattgttattactacctcaatcttcataataattttttttgttcacaataaattattttgataattacattatgtgtgactaatagcactttaaatggctgctatgcatacaacttttggagggctgttgttttatctcttctcacagggatgagtcccacacatattcagctttccttgaacatttgatgcatgtaatagactctaagctattacaattttcagagaattctaacaatacagaccatatgaagctataataagtccagagaagcattgtgattgccttagcagagtaatagagatagtaatagagatagggctctcttgtgctagagattcccctggtaaacgcatcagaatgagacttgctcttaatagtctgaaagctttcaaaaactcagacgtgaatggttgatttgtttcatcaacaaatatgcgttaagcattagggtgttaaaaggatctacgtatacttacagttgtaaagtttttttctcacataaatgtttattttgaaattgtagttataacaagaatgtgaagataattgacattggacttgactcaattttgagagctttgcaatttgatgccctgaactactagaagcaaaaagcaaacattatataatttctctttttaggtcctattttctatcatattatactatcagagtatagacagtttacttgaatacaaaaggctgaatatgcgtagtagcattgcaattttccttggcaatcttcagcagccatggattaatgcgattttctctgttgtcatcatcatcccagtttacttgccgttattttacacattaagtattaggtaaaatataataaaggaaaaattaaacattacaacaatcttcatttcaaaaacaaaatattacgacaatagtttcgaaggatgaatctgctttctcaaatggtttcaaattcgcccggatacaacaaaatatagtaacaagcgcacactttttaaaacaagattaattttgtgtaaataaatgaaagcctaaatgacactatttatagcctttaattttgccaatttttcacttcaaaattgatgtggaattttgccaattttcactttaaaattgatgtggaattaaaattcactaacttttcgttcaaacaaaattagtttacaaagtcaacttttttcaataatcccttgaaaattgacttgagaataaccaatggttctgctccaaatttcactactgatttttataattttatatatgttgatctctttaaat

SEQ ID NO: 111242 - DNA, 4304 bp, Cannabis sativa
  modified_base (4246)..(4261): a, c, t, g, unknown or other
ttttctgtttattgcttaattcattacttaaaacttgagatctcttaatttattgtttcttgattgtgttgagtgtttgttagtattatgactcagttttcgtttcgcaagttcaaactaattatgaatatacaactttttataataatgttatgtaaaactggttctagatttcttatagttgggtgtttttaggtgaacacaaaaatggatctttcagccacaaatcaaccatacatgattacaacacatatatataaatattattaaatcatcatataaaataaggttacataaacctgtcaactaaactaaaatctacctaaaagatatattgatatgatgggttacaaatttgttacttattaaaatacattataatttaatagagaaacataattaattatagattgaaagagatatcaataaacgtgtgggactcatttcactatcattttctttaagcggtgtagcttctatattgtactactcataaagcagctgattgcatttttccatcaaatacaagacatgaagatagaattccaagctgtctttttatttttaatcttatcaaaatggaattatacatagaaattaaaagaaaaatcataaattaattatttaaaatacatacaattaatttagaaatttatcagtccgtactctaataattgaattaaatttccagaaagacataaagatagaatcacaactgtatttgatttgatcttatctgaaaagaaaatgctttttttagtatactttgaagattgatatcactaactactagtcctctgcctacaaaatcgtaaatctaaagtagaaaacttcacaaatgaatttcctcaatttttttttttttgataattgattgtagatttattgttccagctcgtcaattttaataacattgttccccaaatatgattattcataataattgtttttttgttgaaaaaagaaaatcataaattgagtttcaaaaaagtaaaacaaaaagaaaaaaaaaactttagcgataaactcgtattaaaaatatttataatgtatattttttttttttgataaaaataataattaatcaaaaataaaaattagaatcacagaaaaaaaaattggaaaaagcgcgccaacaaaactaactttactgataaacagtacaaatatactaaaatcgtaaaactgattctcgagaaacaaacaaaagatcctactttctctctctatatcatcgtccatatcttcctttctcatccgaatccctccctaacagttattctgttttcttcctccttaaaaactcctattcgtttgtttggtttcgattgtgaattgggaaaatatcagtaatgggttcggtggagcagaggattctcgtgaccggcggcgctggatttatcggaagccacacagtggttcagctcctcgaagaaggtttttcggtttcaattatcgataatctcgacaattccgtcattgaagctgttgatagggttaaagaattggtgggacctgctctctccaaaaagcttcgttttcatctggtatatatgcctttagcttctttctcttactgattaggagtgtttggttcccaggaaattgataatattaataataataaaaaaaaaggggaaaaaaataactttctacatatgtttcattggtaagttttatgattaatttttctagaggaagtgagtttcaaaatttggaaattttgtttcagattgattcttcttaatagtcattatattcactacaaatgtgctttagattaaattatatggattactgagattgggttgtatttcagggtgatctaaggaataaggatgatctggagaagttgttttctcaaactaggtgtgtagaatatgataattaatctttatattttcaatttttacttgcatcttgtgttttagtgttccaaatcctagaagagtatattgttttgggttctaactttggtgatctgggctgacagatttgatgctgttatccattttgctggcctgaaagctgtaggcgagagtgttgcataccctcgtcgttatttcgataataatttgattggcactattaacctttatgaggttatgaccaaatacgattgtaaaaaggtttgccatccaatttttacaatcatcaattttgttttttgtcatgtagtagcgatttgtcttcaaatgtaacacttttgcctgttttgattttgtcatatcataacagcaatttgtttttgtgggcatttagatggttttttcatcttctgcaactgtatatggtcaacccgaaaagataccatgtgttgaggatttcccgttggttgctttgaatccatatggacgaacaaaggtattgtgtcatgatgcttcttttgagcatcaaaagatgagagtgaacataatgggtcggttagagctttctgtcttgactaatatatgttaattcaacctttccagcttttcctggaagaaattgctagagatattcataacgcagagccagattggaaaattatcttgttgaggtacttcaacccagttggtgctcatgaaagtggtaagattggtgaggatccaaaaggcataccaaacaatttgatgccttatatacagcaggtagctgttggaaggttacccgagcttaacgtatatggtcatgattacccaacaaaggatggtactgcagtaagtatacccatcagcctgaatctttggaaattactgtgtacgtagtgttatcttaattcatgttggctatttcttagacatcaatcttttctggtttgcaggtccgggactacatacatgttatggacttggcagatggccacattgctgctcttcgaaagctttttacatcagatgacattggtacgtttctctatcaaaaatttgagaacatggttataaataaattaattgactatgaacagctaagatacatacaaaatttcttaagaaactctaataggaccaaaagtagatgttagggcttggattttttacggaatggttggatgtcttaggttgcactgcttacaacttgggtactggacaaggaacatctgtgcttgaaatggttgctggatttgagaaagcttctggcaaggtgacttgcgcccttctttactttctccctctctagtctctaccccttctagagtttagtttttctctttttttgtattaatttctattaaatgttttagaaaattcccatcaaactctgtccaaggaggcctggagatgctacagctgtttatgcatcaactgcaaaggctgaaaaagaattgggttggaagtatgtatactaaaactctttacatccctatgaagaaaacaaataaaacacaatttagaaatttgtacaaattcatataacaagtcaactaacactgaactgttttagccttgttctcaagctaattctgcatcttttttacagggcaaaatatggcatagaagagatgtgccgggatcagtgggagtgggcaagcaaaaatccatggggttaccagtctaagccttgaatggcttgatttgctttttattcaagacaggctgagttgtactaaccactatctcagcacaagtactggtcagagagttagaagaggaaccccattgcataagttactggattaaattacaaatttcctggaagaaataaatgttaagagtttcttttggcgcctctgtctgttttcttagcttttgcttattattatgcaataagcagctatatgtgaactgtgaaaaggtgtaaaaaaattgtttttcttgctatattataattaaaattttattatttctccattttatactaagtccaaaggattctattaatatagcaagccagggacaccaaagactaaactaatttggtaatgaagtatgaaactcaggtgttatagtgccaagttttcgcttaaaaataagagtacagtctcgattggaaaaggatagcatgtcaatggatacctccaacagagctaatctcgcatgatggaaacttgcgagaaaatacaagcaagatagggtttaaactgcatactatgtgtaacatactcgaagcaaaagtaggaccaagagaagttaagttgtaatgtctccgcttcaacgagtacgccactctggctgcttcatggactgatgaatgaccttacataccaacacgagtgttttcagcgtgcgagtgaggaagcgtgtttgtcctcactcgcacgcttccnnnnnnnnnnnnnnnngaggtcacccatcctgaaattgcttcaggtcaagcacgcttaa

SEQ ID NO: 111243 - DNA, 6366 bp, Cannabis sativa
attagtagggtgtttgaattcggacttcgtttaagacttggtttagtccttgggcatggccttcggatttggctagggcaaaagatagacgatggacttctctagacctactcatttgggctcgttggagtgctcgtctatcgtttccaattttagtatgagcttgttgtgtagccctgcttaatgcttgaacttggatttgggttcggtttctcgtgtcgcgtcgggccttcaatatggcttgagttcgagctcgggttcgagcctgtcctagggcttgatctgtggctataggaatcatattcatcaccatatcaaaaaaataattatatcaattaattggtataattagtgtgtgtgtgttataattatgataatctctctctctctctatcatgacttatatatgatttgatttgtataaattagtatgttgccaggtaactactatatagccacatatataatatttattataattattaggaaaatattatgattattcacatgtatatatgcccatgcatggtaggtacatatatagatttaattattttatttgtagcttacgttgaaagtagtcaattacgatgcacacttaataatattattaatgatatatatatttatatgaatcaacaaccgattcccttgtatgcatctcaacaagaatattgttttcaattttattaatattggtcgtcatgtatttttgtgatgacttaattaacaaagactttggtaattaaataattgactctacaccaaaaattccagacatttcaaaatgccactattacaaatatttagtgatattttatagtttagtggcatttgtataaaatgtaaactatgccaatgtgactaaaaattcaagtgtcactaattagttttctagtgacattttaaaatgttacctaaacatataaattgtagcaattttaaatgtgactataatatttattatttatttatttaatgtttaaaaaataatttagtgacatttttaaaaatgtaaagaattatactagtgacattttcctaaaaggccggtaaaaattatcattatttatttttaattaaaataataagaaaataattaattttctttatatataaatccattacgtaattttaaataagttttacccatatttttattcctttttgactttatatatatatatatatattttaaaaaaaaaagaactctaaatataaagccattagtatataaaaaaaaaactctaaacataaatatttcaacaatataaaaatgtaatacattataattttgtattcttacaacaaacataaacaataacaataaaaattgtatacgtacaaactatttacacaacatcaatgaaaataataaaaaaaaatatttaattgagtctacttttctatgttaataaagtcacatcattgagtcatgaagttgtttatttgatttttgtaaaacctgcataatttttagcacaacaaataacaaatgaacaatcactcgtatacattataatgaaaactttaaaattgtattcaagttaccaaaaatgttgttagctatgcaatagatgctccaacaatttcaccaattatcttgcattgtccattggtctaattaatttcttgtcggagttgatacaaacttcaacaacaacttcacaataataaaattctatctatactacttttaaaatcataaaatactttaatgctcactgaaatggaaaaaataataatagtattcgagagcaaaaccattgaaaaagtaatcaaaattacttaaaacatccctcaaaagaaatattaatttatactacttttaacttaataattaactcatcacaaagactcaaagttgtatttttattaaattaaagactccacaaaataaacacaaaaacaatatatgtaaaataaatgaccttaatctataaacaaaggtagtaagccacactatacagtttaatgcaaaattggtaatagcaattaataaagaaaatatgaaaacatagaaaaaaaaatggaataaaaattttacactcctaattttttttttttgggacataacattagatctagacatgttctacttagaaacattttttctatttttgtttttcctatatatgatgcatatatatatatatatatatacatactaaattataaaagaagatgtatccaatattattgtagctcaaaactcaatagtactgttctgaaaataagagactccagacacattcaactctatgtaactaagcttacatatatagtttaaattttacttataatattatatattccaaattttctatgttcaacaagcaaagttcaagtattaactcaaaagaaccacaaaggttgaggccctataacattaacaagaccaaatttctctcaccaatctaaagtcaaactctcttcactcacacactcagtcaagagaaacggcccaagaatcaacaacccaagaagacaaaatagtaaccctagctagctaggatgccaaaaccctaatataaaaggtaattttctaatccctaatgctcatactcggcagccaccatttctctcaaagttcaaaaaattcaaactttctcttcttctcatcaatagcagctagaaagaaaaattctagggttaggattttctaaattttcaaaacaaactttcagtaaaatgaaattaatgaaacaagtcgtagtaatagatgatatattgttttttatcaaataaatggatagccagaaaagaacaatcagaccttttggaaaattaaataaaaattaaaacataaagttatctagtgtccatacccagatttaaaagtgagattgagggacagacttggagagggtagaagtcaattccaacgtcgacgccgaaaacaacctcacgtttttcatttctccttcgccattgcgacttgagactaagttagggttagggaaaattagggttagggagttgagacttgagagagaaagagagatgtggctggtaagtggcattttaaaaatgcgttactaatatatataattttaaaattatcttaaatatattttaataattaatgaaatatttaattatagtattattaatgtttatataatgttattactaatctattagatcaattatgataatatttgcattatagattcaatataattcatgttaacaattaatcacatataattatcttcaccaaatttaaccattttccacttatatatattaattatatcgactaataccatttacttgacaaaaaccacgtacgtatatatgtatataaaataacttttttacattgaacgttaatcatataatgatttttgggaacaaatatatatgcactaattaatcacctactttatatttatatatagctcgaaggatcgagcacaagaactactcataacataattaatttattcagttacacagcgttagttacaatactgctaacacaaccttaaacattttttacaacaaaactaccttatgactaaaagtgaaaaaattgtgactaattttaaaattattattcttatgtacttgtgactaaaaagtctgtgctaaaaagtattagtcacaaatgactaaaattaaattagtgactacttgtatctaaaaataccatgttttagtcacatgtaatatttttttatgactaaaagttacatttagtcataaaaaaattatattgttactaaaaaattgtcactaaaagtagtattttttgccgtgaagaatttatttcgacactaagggtctcagcatgcatcatctcggccttgagggccctcattatgtatttcaattctcgtgacttaccaacaacatatgcatgatctcaacatgtgttcatcgtgactaaaagaagccacatgtgtagataaaagatttcttcaacctttattattttttagatatttttgtttaaaatgctattttattattattttgaactttaaatttaacttaatataatagttgcgtggagaatattggagatgaaaatctcaacgagtcctagatgaacacctatagaaaaagggaggtgatatcaattatgtaaaggacactctgaataaactgaaattcattctcacgaactcccactctcttactccaaaaactcacaactctggaaaactatttcaagcatgagaacaataaaattataagtggattaaccgattaccgttgaaaggggatgaaccatgcactataaattattaagaatatatttgagcattatttatcattaattattaattataccatttagacttgtattttgctcgttcttttgctagggcatgatcatctttagctatttcatctcaatttcagctatctctttcttcttatgcttcttattctcagtttcttttcatatgcagtttcttggcaagttttagctctttttagtgagcatgatcatgattaagctcaatatcttggatttttggtgaaataacaaacacagtttttagctgaggctgattatcattataattattaatgcgaattaagtgcagctttaatcacagtacttgtttgccctgcataatcttgtgtgccatctttaaataagatcccataattaataactaatatactctctcaattaatttaaccaattagctatatatagtagtgtgtatccacaacaaagaataatctctcctttatttatatataaggtcaataaaccaagaattaattagtgatgatattaaattatatgttaaaatataattaaattctcttcctggcagtacgtacgtagcaacaaccaccacccaccccaatgaccaagtgtcctacatattttaatatatttgtgtccttttatgtagtactataataggtagctatgagtaggtggacatgtataacatttatttagtaacaatatattaattcatatatatatatatatatacgtattacttatgtgcacaaaagtacaacattctttctcctttcaaaaaaaaaaaaaaagtacaacattctttcaataattaaacttgaatatatatatatatatatatatatatatattgtagactacataaaattaataacaataacacaaattttgaaactcttttattggtaagtaaatgctgttccaaggatttgaacacgagaaaacctgaaagactatcgaacacaaataccactacgcttgcaaaattttgaaactttgaagccacatatcatcatatatatatatagaaacacacgaatactttggctattaaaacttctctcaaaatcccccttacctttaattatatattaaagtatacaacattctccactttctatttttccttgggtacctcgtttatctttcgcttgttgggcaattcgtgcagtgttagcctttttagcatcttgtttatctttcgcttgttgggcaattcgggcaatactagcctttttagcatcttgtttatctttcgcttgttgggcaattcgtgcagttttagcctttctagcatcttgtttatctttcgcttgttgggcaattcgtgcagttttagcttttctagcatcttgtttatctttagcttgttgggcaattcgtgcagttttagcctttctagcatcttgttggggagtgagagtcatatttggataataagataagtcgagagagaatgtacgttaagggattgatcgatatatttgtaagagtacttactatgatctcctacacgtatatatatatatatatattaatatatgttgtagtagtgtacgtaggtgggtacgtaatttcctaattttcataataattatgtttgcactacgtcaaattaagtagtaggaatttagtgatcaactataaattatgataaaataatttattataataatctaacaacataataatatattatatattcttctagacaatatataatataattacgtaataagatgggttaattaacacactttttgttgtatattaatgtgtatgcacatcaaataatgcaatataagattattgaccaacgtgcaatttaactatagcaaagacttttcctcattatacatatataaactgatattggcagcctgcaggctttattatttaggatctttttcctttctcatctcatctactacactttttaaatatttatttttactattaataatagaaataatataattaattagcctagttgatctatatagttttgttttttaattttaaaaacaaaaaaacaaaaccaccctaccgaacacactttttagttttgtttttacttttttaggttgcgtttggaaagccacaatgtaattgaatttgtgtgtaattgg

SEQ ID NO: 111244 - DNA, 4128 bp, Cannabis sativa
tcacgtaatacgcctatggtagttagggtgttacaatgtctatttcgatatgtttggtgcgggcaaaatacaccagatttgaagcgagggagccagctcctaagttgtcataccaaagtatagggcattgagaaagagggaaagagatttcattgagaagaaacttaatccaagttatttcagaagtggcaagagcaagtgctctgtactcagattcagtactcgaccgagctacaacactttgctttttagagcaccaactgatgaggttttggccaagaagcacacaatatcctgatgttgattttttatcatcatagctgccagcccaatctgcatcagtgtacccttggagatcaagttgagaagttggtgtgaatgaaagaccgagattggttgtgcctgctagatatctgagaaccctcttgcatgctccccaatgatttgtagttggagcctttaaaaattgactcaatttattgacaacaaatgctatgtctggccgagtcatagtaagatattgtaaagctcctatgacacttctgtattgttgagcatcttgaagtggttgacttgagttgagaaacagtttggttgttgcaaacatgggagtagattgaggcttggagtcaagtatattgattcttgtgaaaagatctcttgtatattttcgttgtgtcaggtagtaatttgacccctgtttgagagcctcaaaccccagaaagtaatttacagatcccagctttttcaaatcgaattttgtgtgtagatggctgattatggattggacttgttgagtatcttgacctgttaacagtgtatcatctacgtacactaggagtagtagaagctttccatttttcctactgtagaagaggctggtgtcggcctttgagttttgaaatcctagctgtagcagatgatttttgagttgatcaaaccaagctcgaggggcctattttacttgcatacatagtctgggtgctccttgtcaatgaatccttgtggttgtgtcatatagacatcctctttaggaatgcattattgatatccacctgttgaatgtcccaattttgttgagtagcaagagtgaacattatgcgtatggtgcatggcttcaccattgggttgtatgtctcaaaaaccacaccatgtgtctgctgaaaccctcgagcaactaatcttgctttgtttttgtttaccgaaccatctgcatttatatttaatcttgaaaatccatttgttagtcacaatcttcatgtcaagagtagggggaaccagctgccatgtgatcttattttttaaggctacatattcatgattcatggctttgttccactttggatcagctaaagcttgtttgacagtacattgttcctatctgttctgatatctgcaagataaacctttggtttaaaaatgcccatcttcgaactagtgaccatggggtgagtattcttgtttgggggtggtggggttgaatctggtggaggaaaatggtgatgttgaggttcagaagggccttggtgttgagtaacagactgagatgaaggggattcttgtgactcgagttgatattggcttgacatgggttgatgaatatggacagattgtgttgagttggaaggtgatggttgggaattggactgagtgtgattttgaggtgttatgttggctatttgaggaatgggataaactatggtgttgatggcaggaatatgattgttattgctggaattagatttagggaacaaagttttataaggaaactcagattcattgaaagtcacacttctagctatatatatttgaccactgggatgaaggcacctgtatcccttatgagtcatgttgtacccaatgaacagagagaaagagagagggagatgaagaagtgagaatgatgaaaaggctcacacgaaagagatgagcttagccgctaatatattgatcaagaaagggaagagcgatacaactgtcaagtagttagttagagcaactaacgaaacagaacctgactactttttcaactaactaactcatccctaatagaggaatctctcctttgcaggaaggtgtgttctagttaactctgtttttctcactattaatacatattgggctcaaattgttgtttgcctaaaatagttgttaaaagaatcaaccaagtatgtcgtacttctttgtggaaaggcaattcagattatgaaggtcctagtagaatttcttaggttgatgtttgtaaattaatctaagaaccatggtggctcgggtttagagatgtggagttgtggaataaatatgagcgatgataaaatatatttgggctattgcatttaagtaaagataatctgtaagtgaaatgggtgcatagtgtgtatataaaagaaagggattagtgggattacaaaaatctcactacaagtagttggtattaggctcacattgttaagattaaagatgatcttaagtcctcttacttggtcactgagtataattggaacaaatacaatattggagaggtgtaccataaactacatgactctgaagatgtaaattggcattttgtttttatttgggatagattgagtgtgtctaaacacaaatttgtttgttggttggctttgaagaggcttctacaaatgaaagatcgtttactacggtttagaattaagatagagagtcaatgtattatttgtggaatccataatgaatctcatcatcatttattttttgaatattcatttaacatgagatgtcttcttcaaattgttgattggctaaatattggatctcactatttttatcttgcctgagttagtgaattggataaagcatagtaaccattcaagatgtagaagaaggctatacacttgtgcattaattgtatcatatttggatggttcagaatgatgctttttggaatctcaaggtaccaatggtggcttcagtcatgattaaagatataaagagtgaggtttgttatagaattctttttttgaatacaaatatgattagcataagtgatagaaattgggtggggaatatacattataagtaatgattgcttgtaatttctttggtccacaaaatttcagctgttttaaaaagaaataataatgatagaaaaaaaattcaatgaatatgttttagcatacttttataatctaaaatatatatataaaaaataatttttaataatttttcaaattcaaaataaaaatattatttagtaaagaaacataaattcgacatacatttttttctttatgaaaatgctaaactttatgaaatattaaatgaaaatttttatttgcacccataaaacttataaaggaatttaattttaataattttttatataaaatatatatcattgatttgcactaatttttatcttctcttttctcatattatcaaaaatacacatataaaataaaataaaataaaatatttttttatttattaggacaataaaaattaaaatgaaaaattataagaaattttattaaaaaaataagaattaaatacattttttttaaatatatatatatatatatatgaaagtaaaattaaaattattattgaaactaacacaaaatataatatgaaaagacatgtcaaaaaaaaatataatatgaaaagaaaaatattaagaatatttttttataattaatttaaatttattttttataatatataattttgtgggggtgaaaattgaattcgccagatttttattagggagttaatcttttaaaaaagttaatttaattacaaaataatgttagtggttgtaggaaccatcctaaaattacactatgggaccctaaaaatgccatcatcaatgtggttttttttttttcttattttacattttttttccttgcttattttacactttgatgttgatagttgggcgaatttttctcacacgtgctcttcctctcctttcattctagatttgagtttctaaataatgtaatattcactaaatattattatatatttattatcatttttcattgtatgaatagatcaagatagtttgattcagaatatatatatatatatatatatatctttatatattaaaattgcctatctaacggcatttcttggtttaac

SEQ ID NO: 111245 - DNA, 3703 bp, Cannabis sativa
ctagtttaataaaattgtatattatatataatatatatgttcggtcagttctcagtttaatcggtcagtttgccattgacactaaaactgaccatgttaaggttgttttttcggttttcggttttttcggtgtcagttttttcggtgttcggatggtcggtgtattcggtttggtcagtttattggatttttttctcacccctaatatctctctctcacacgcccactgctatactcatgatctgagtagtattatctctcggcatcaatataactaaaaggagagtaggtcttcacctgctgactaagggggttgaacctctataaaatcatgtgttcatttactttattgttcttattgtgtaaatgtggcaagcatcagcattaaatacgactccgctatcggctgactaaatctgaggtcaacaataaccatacattaaaaaaataaacaaaatcatccatttacatgtatatcacatatatgttaaatgcaagaaagtcctgcaagatttaatatatgcatatatcgaatcagctatggatacgaattattagttttttagtattaaatcagttatgcaacaaaagcatttgtgattatcattgtaccgaccttaaggaccctccatataatacatatattaattcagattataacaatggtaatagaaaaaatacctcttgatgcctatcaggtttacttgctttcttttcgtattaatttcgatcatcttatgcagcaaggtagaaaatgatgatgatgaaactcacactgtgatcttccaagtcaacccaatcaatgattagtgtgggctagtaagattcacaaaatggtatgttcttatttttgtttcaactcatgagcaagagcagtaaaaatagataaaatgatacaattagttttcctaaatatatcgtatatataaatttatggttatatcagtataattaattataaccaataaatatattatttaaattttaattaattaatatatttatatttaaataaatatcctaactgattatgttatatatattattttaaatttaaacatttaattaaatatccaataactaaatgagagaatatatcaactgattggagagaatctctcaaccactttgagagaatatcacaaccatattaaatatctttaaccaacttttaaatttaaatttaaatttaaataaatatttgacttttgaataaattaaataatccaaattataatccagtggggtctaccttttatggtaggcgcctacactgttatgacacagtgtaagtggtgctacatgttgtcctaaagggacacctgtggcgtaccactttgtcctaacaaacaaaatggttccatcttctcttgtctatacaaagttcaccaatttatttaatattaaatttaatattatttatttataataaaattaataattactatttttcacatgcaaaataaattctcctttctcttttattttgtgatatccatacccttaacagtttgatatagagccaactcggaaccatggatctataacgctaagctccaataaattagattattaattgtctcatcaatcaaataatcatatttattaattctattattactctactgtaaatataaagttaaactcttagttattatagaattatatttactgagtttatttacagtgcccattgatatgatcaatactagtagtttgccctctttgtattgcttcataattagaattggtcaaattacatttttactcttttaattacctctttatcctttagtaccattaattcactagtagtagttaatttataatcatatcacaaatttgcgtgcaacttttcagtaccagaattaaaacttaaaggaaaccattattcgatctgttaggaaagtcaagatttcatattggaaattaagtttctagtcatccatattattagattccaaaacaaaaattgtaaaaatcatttcttgaaaaactttaatgagtgaatcaaagaacctaataacatgaatatgagttcatgatttctcaagatttaagttgatctactaatttctcatctttatgatatgaattaggtctttatagtaaacgactagtttgataaaaacaacttaattacatatttatcatgtcatatataatctctattgtatacagcaccttcaccgagatgtccatctacagctatctgaatcaagattgattgcaccgagtaagggacatcagtaaaccggtactaaccaccgttgactaaaataccataattttaatgtgttgctaactatttattcatagctcatgatcttaattcttcgtacaatataaagtcacacccttatatatgaataagaaactttcgatattaagatataaattattaataaataatttactcatgaaatataataaaattgttctgtttattcaataatcaaaatgtatttacatgctttttagggcataacctctaacacagtcattgtacgtcgctcacccctatattaggttgatgaactgtcagtgtcctgggcttgtccctcatcatcaggcattggactctcgccagggcgacatgaaatttcctccccaaagggttggggacgcacaacaccttctgcaacagggtgttgattaacttcgccttgtggggtttcaacatccccttcataacttcctcgtctggtactcaccattgttggacagaatagtgagttcagccgtgatctttagattactgacaaccagtctaatgctctcaatgaaagtactaaattgttacttttttcgtcaactggtctaagaagatcgtaaatgagaagattaaactaagactttaatagttggcagaaataaactaatttaataactgtaagaaaattacatgcaaaattgatagtaattaacccccattgatttgtcggtagtggactagtccacttgttttattatatcagtgctcaaatataccagagttatgttttcaagaatgtgtttaagtaattacaacatcgagatctcttaatgaagatctctttggtcggtctctgtaattgttcaatgaagattgtcaaaaaatactctctgttcaagtgagtaatggctaaggtttttgggaaaactctaaagaagtttgcagccattctcaaatatggatcttactaggtcaagaggcgaatgataaaagtggaattatgtcatggtcctctttcttaggtctagataatatccttatataggcctaggtttcaatcatcactcccctacaatctgggaggatggttacaaaatattttttgtttcacatttacattcaaataataataaaacaaaagtaaataaaattaaatctctcttcacttgcagagtgcttaagcttttgaaaaccttctaaatgttaccctcttcaaaaaaacatattaaagatgcagagtattggaaaacactttatgggcaaccactgacaccaggagatgtcagtggtcgcgtactcatatttattggctatttggattggagttgccttatcaacaccttgaaaattggttacactttttagggttttgagtttccaaaatgcaataataataataataataataataataataaacgatatcattaagatttgtaaaattataaaaaaaaaaaaaaaatctagccattacaatgaaatcaaaga

SEQ ID NO: 111246 - DNA, 1406 bp, Cannabis sativa
  modified_base (26)..(38): a, c, t, g, unknown or other
  modified_base (79)..(100): a, c, t, g, unknown or other
aaccctatgtctgataaatctaggannnnnnnnnnnnntagtcatgtttactttccaatgttgtcgggcacaaaacatnnnnnnnnnnnnnnnnnnnnnnatgacatataaaatgcattctgaaattcaaataaaatatccgtaaaatgataattcataactaacattcaagtttcataattaaatcctaattatatgctaatattcaaatttagttaagcggtctttacaatatgtgtaggaaatgccagcttttgctagcaggtcttaaatattgtgccagcaaaactaattttaacaacgcattacattcacagcattagtaaaacccatcacttttcctcacttctacgtagggactttttgcgcataatttgttcttttttttttttaattttcaattttttttttgttaaagatggggatttcacttgatgaacccaaaaaagttttgcccacctccactttgctccgcctagaggtaaatttcactctcttttattattttattgtagatataggtatatatgtttttttatatattttttatgaatatatatgtatttgtatgtattgtatatttgatttttttttaatcaagtgttgttgactaacatcgttaatggcttccatcgatcctgtgactctcaaaactccaaagattactctggcaacaacaccagatcctaatgctgctctaaatctaatgaactccatctagaatccattttcaagctccttaacttcgtctatcaccatcaaactcaatcgagttaattttttagcctggaaatcctaggttattcccactgtcatcggccatgaacttgataacattctcttattctgtgttcatcccccccttatgttggtcaccatcgatccaaatcctctgtatagccactggaaacaaaaataccagctccttctctcctaggcgcgatcgtcaatgtctaaaggagttcttgcctttgtggataacttcacctcctcccatttagtctgccatgctcttgaacaaaagttttctagccattctcgtgcccatctacttcaacttaagggtcaattctccaatattcataaggtagtctttcaatcttggactatgtggacaaggttcaatccttagatgattctctgatgaattgggttctctattaaagatcaagctgttatcttgaaaatgttgaatggtcttgctcccgaatatgacacagtggtatctagaattattggatgcagtgatgccctacatcttgaagaagtgaaagctcttctcttggctcatgatagtcaattggaccatcatagtgttgggttttgtgccctaaataaaatctattttaatataatcagatatactaattaataaaagatcagaaatcgttttatgttgcatggtt

SEQ ID NO: 111247 - DNA, 1843 bp, Cannabis sativa
ttgaaaaatttaaaaaaaaaaaatgacaaatatgagaaaattaagaataggtgaaaaaactcatatagagtgccacataaacttgttgatgctttcatttatatatagatatagatatggaataagccaataatagtaatgtatattatatataataatacaatataataatagtataataatacacataaaaatgaaaccatttttaagaataaatatagtgtatttcaaaagatttgatagtttgtaagaccatttctaaccatgctctctaagtatattttttaattaaaatagaaagtgaattttgaaaaattaagctccaaccatacaaaaataacttcctataatattaggaaaatttggggtaccatgcttaaatgtatagcatgaacccttaatatactacccaattaaaagtatactatctatactttcaatatctcatactcccgaaaataccctttcatttcaacaaaattctctctctctccaactctctaactctctcactcttcagcacagcatcccccgtccaccattggttatcctcactctctcgttatctctctctaactttcaccgtctccaccctagagcgacgaaaaccacaagttcaaccaccctaaaacccttgaaacgcacgagctcaagtgtatttttggatttaatgtaaagtggacttatttttaaaattttgaaatgtataagtttagggaattaattccccccattagtatgcataaataatcaaatttccctttataaaatgcatcaaacatgcccataatatattataaatattttactggatggaggtggcgaatgtggctttgatcatggtggacagagatggctgaatagagagaatggataagagacaatcgtcgctagcaactgtgaaaagagagagcaagagagaagggtggtgattggggaaatataaggctgaaggtggtggagggagcttggcggcgatgaagagcgagagaggaagcaagagagtaagaaagaaggttgcaaagggagcttggggggagaggaaataacagagaaaatggcctatcctaaattcgaattagagaagacaatcaaaatgaattgatttgatgccttcgagggggttagctgagaaaatagtgcaagcatccttggtggttgtgatcaaccaacaaatatgttgtttaaattttttcaaaacctacccaatcccatcgacttttctcatactttcagtgttctgacaacaataattgatcacttaattatgtcgcaattgatcactcaattgcatcagttaaggaaggatgcctcctctctcccgtgatcaattgcattggtcaacagttgaccaatgtgttggttgcagttggggaaatataaggctgaaggtggcagagggacctcggggcgatggagagtgagaataagaaagaaggtcgcggagggagcttggtcggaagaaataacaaagaaaatggtcaatcctaaattcgaattggagaagataattgaaatgaattgatctgatcgatgccttcgagggggttagtggagaaacttgtgcaaacatcctttgtgactgtgataaaccaacagatatgttgtttatttttttttcaaaaactcccacccaatcccatcaaatttctcctgctatcgatgttctgacaaacacaatttatcacttaattgcgtcacaattgatcactcaattgcgtatgttaaggaaggacgccttgtaatactctagaattaggaatggattagcaaaaccctaatggtaattatgaataaatgaggaattatattattatatagttcaatttatgtgaattaatat

SEQ ID NO: 111248 - DNA, 2158 bp, Cannabis sativa
  modified_base (2093)..(2112): a, c, t, g, unknown or other
cgcggtttaggaaaaatttaaaccccgaccgcactgcaaagaatttcaaactgcattttttttgcggtgcgagcggtttgagcagttttggcggtttgatgaacacccatactccaaagtttccttgggagtatgtgtgctacttgagaattttaatctgcgagctttgccaagcacacaggtttcacaaaattccaagtcggtgatctcttttgggtccaaaaatctcgtttgttgagatctatgagtcctttgtggcttatatgtcctagccttttataccatagttctattattccttgctatcgatacaccagcttcaccaaaaattatctttccttccaggatgtagagaccttgcttatgcttttctcttagaaataccatatatagtcaagaactccatcttccgccttgtagctatatccttttgaatttaacaaaccaagagaaagaaaatttctttttaggtcaggtataaatctaatatcagttaataccttcattgtacaatctcttattttgatcttgattgatgcaatcccttgaatcatccaagaattgctatgtccatatcatcacatggcttgcaatttcttctttcagatcacaaaaccaatcctttcttattcttagtgacatgtgaaaattacagcctgagtccatgatccattcatctctaggatctgtcaaagaaaaagttaatgcaaatgcataatcataggttatatttaaaacaccagcattgtcaaactaatcagaaatatttgtagaatcagtgttggaatttgcatttggttttttttctattatttttcctctgaggacaatcttttctaaaatatccttcttgattacaggtccagtaagctctcattccccttcactttgattttgattttcctctttcctttctacatgtgttggagttatctttcttttctgatatgcctctcacatttactccttcagcatggttcttggataattttttattggcattcagatctatttccttggagtatacagctccaataacttcttccagagacaatctctttggtatatttgagtgtatctctcaaattctcataggcttggaagagaattcaacaagaagatttcctaatcttcttccttaatcttcacctttatggactccatatttgaaactagttttgtaaactcatttatcttttcatctataaatttagatttgtccatcttgaatccatggaaccttcgcttcagatagattcgattaggcagagtctttgacacgtacaattgctcgagtttaacctacatttcatgtgaatattctcactgatcaatttcgttaagacttgatcacgcaaactaagaataatggtgttcttagatttcttaagcacttcttccttcctctccaatttttcgatatcttgttatcttcttctaggggttctttgagtctaagattccccaaatgtgcaattatcttatctttctgtaaacagaaattattttcccatcaaacatctccacctcaaattttgatgttgacattttgatgaaaacttgttcctagccaataaactagttcttgattgtgaatgaacatcaaaattctagagtcttggagatcattatttctggaaaaaatggaagtaacttgatgcaacaagtatcgctgcgctaatatcaatttattaggattcatagcctgtaattcacacgcaaaaccagtagcaaaataacttgaataggcaaacataaagaagaacataatgcaagcactaaataatcaaaacaccatgaacaagaaaagtaaaatcaaatggagatacaaacatattacttggttcaaatatgagtcgatgtgactggtctaactccaaggccaaggtagtgccttgagtcgaattcactatgataaaaatgtgttacacattcacatcagaatgatctttcacactcgagctcccattacaagtttctctctcagcattacaagttctgaatctgaacttgagagaactctcttctgtacattataatttttctagccactaagttaatcaggattaaaagtgtaacaccctaactagcannnnnnnnnnnnnnnnnnnntaaacatgctgtgcagctcgttgcgaatcaacgaggtttatggaaa

SEQ ID NO: 111249 - DNA, 1320 bp, Cannabis sativa
gtaaaccatttgttagtttttacaagcacctcgagtacctcatctttaagccactaataggctattacagtacctcaagagcacccctggtcagtacctcataagagcatatgtagaaactagcctatccctttcaaatgttcaagtttctatttttccgatgtcgactgggaaagctgtcgagacaccaggcgctccattttagggtattgtgttttctcggccaatcacttgtcccttagaaatctaaaaaacaacaagttatctctcgttcatctgctgaagctgaatatcgtgcaatgacaaaaatgttacttcaaaggtaacatggatctttgctcttctctaagattttggcatatctccaaaagttcatgctttactctactatgacaacactgctgcaatgcacatcagtgagaatcccgtctatcatgaacgaactaaacatgtcgagatagattgccactttgttcgagaaaaatttcagcaaggatcactcaagctcctccatgtttcatctcaacaaaatctagcacacatattcaataaagcattactatcttcctccttctctaatattgtctccaagttgggtgtcatcaatatctacactccaccttgaggggaggctattagaactagctagttataagctttagttcagcctatatttttagttagaggttgttattttcagttatggagctaactcaagttagttaaactccaactaactgtgctctccttcactgcctatatataggcatatactctgtacaaactgttttaattaagttgagatgataaaatattttctttctctctctctctcgaattctctcaccatgcataatttttttttttttgagaaattaaccatgagagtgtcaaatagaagattctctttaaagatcaagtagtgttacattttttatctttagacgttgattgtggttcttttgcttaatttgtacagtactggagtgtaagaagaaaaataggtgacagtagtaattaaacatgtctactttttttttctcttttgcttaggttatttttaaatagcttgtggttattgtgccaataaattaaatttattatctataagaaataaattatttctaggacacatttgagtagcaagacaatgaaccatttagatagaaaaattcaaccactgtgatgtatatatttaaataatattcaatttctttttgaaatttttacatgaaaaatcacttttgcacaatttattacctaaatactcctacacgcttatatctacttttttacttacaaagtttattttattacaca

SEQ ID NO: 111250 - DNA, 1542 bp, Cannabis sativa
ctctaactcttttgagttgagaaatgcattttcaaaactgtgtaattttttttactattggcatttgagaagaaagacttgcaaccatgtcgtccaattctcaggctccataagtactcacaaccactgctacaataggtgttgcaagcccgaccatcgttgttgttcaacccaactacactcaatcctttaataccctaaccctttcatctgaagcttgattgaaaaaattatgttttatggaagaccatggtttttactgttatacgaggtcatcaacttgatggccttattaatggtacaagaccaagtcttccagagttttttcatggtccaacaacagcacaaggagagcatggttttggagtaactatcaatccttagtttgagtattggattgtcagtgaccatctcttaatgggttggctatatatacaactttatcaactgaaggaatttcaacaaaggtaatgggatgtgaatcatcaattgcattatggaaagcccaggaaaacctatatggtgcacactcaaaataaaaaatggatgatactcaaattttgatccaaacaacacacaaaggttcaaactccatgaaagaatatctgaagtagaagaaggcctcgtatgactcactagcattagcacgagagccttatccaaagaaacaactcatatctaatgtcacatctggcctagatattgaatacttaccaattgtcttgtaaatcgcgactcatccctctactacttggcaagaattgtagggatacaaccatgtgtatctactaaaatcatcaataaagtgtatatagcatttggaaattttcctgcatcatcaataaagtgtatatagcatttggaaattttcctacatcatcaataaagtgtatatagtatgtgtatctactaaaattatcaataaagtgtatatcttgtcgcctctaattaatttttcaaataccatgtcaatggaaggcatataatttgagcgggaaagttttggcctatttgcaactattgcttatcaactttatattgtcgcccctaatactattttatcgcttcttgatttaacgcccaaaatgtgacttctactagcggtggttgtagtatagatcaggcggtcgattccacacggaggtgattatagacaaaagcgttagtagaaaaatagaaacaaaggttaataaataggtgataataggaacaaatgattgtgtggtttttgatttgataataaatattaaaaagaagtaaataaaggtgtaaacaatagcaaaagaaaggaaaggtttcaacaatcatccatatggttgtttagctattttgtacctttgattcacaaagttgataaatgatttaacattaaatttcattatatttttgagtacacaagttcttgcaaataaaagaaatgatttaatcttatgtagaaccaatgacggacccatgatttttactttgtgggggctaatttatcataaaaaaatatttatagctacattataatcacttttactaaatttatttaattttgtg

SEQ ID NO: 111251 - DNA, 4872 bp, Cannabis sativa
  modified_base (4812)..(4826): a, c, t, g, unknown or other
gctagagcgtcactattacatccttattgtactttcagtatggaaaacattccaactgatctgttacctgttttggtgactgatttcgaaggttaataaagatttgattttacctttcaaaaaaaaaacaagaaaggacaaaaagcggccccacctgctttatttttgaatcttctttagtcaaatcaaatgatctcttcatagcatccacacccgtagaccccgtacactcaccctacccacacccgctcgaacacgcccgcacctgcttgccccgctcacctgcgcccgtgcccgtgcccgatcgcctgcacaatacacttacataacgggaacaaacttcagttcgtctgaggtacaaaatggaaggggtatttttagtgtaatttaggattccaggtatgtgaggtcacttaggactctcaagtccattgtaaaggggaggatttttgaatttcttgagagcaatgaaattataacacttggaaaaatttatgagatccttattccaactactctaaatattctgaactttgttttcttttattttggagtcaagctatcttttaagtttattgtcaatcgttagttaaaaaagtctacttatatggttaacgagttcagactgttaataatttggcaccgtctgtgggaggtgacactcaaaagtgacgtcatttccttaccacaagttattgagaagatgctgaggcattctcgtcgccatcaagaggtggaagtacagctcgatgaccatcaattgatcacttcgctgcctcccgcgcctatgtcagccgccgaaagaagaggtgctggagataagacgccaaagagtagggggacaccaatggtcaaagaccctcaacggcggaggagaatgggcgactcgatgacaacacgatgaacaacccacaagatggggtgactccctccctcacgcttgaggaggacaatggagcttgatggtcgaaggctccatctctaataaggaacccactgcactggagctgaaagatccaggaacctctcaccatcgattggaaaaagagaagcaggcctactccgtgagttgcagctcacgaacttgactacacaatgaggaaatgaatgaactgaggcaaatacacctagtcgggcgaagagagctagaggctagggaaagaagagcgaacaagctggaggatgaaggggtattgaggtattcgacaaataagaccctcaagtcctcgccgcatgaagctttaactcagagaaatcctaagcttcctcgcgacccaagaaacagagtccaaggcgatccatggagacttgagggagaagctttgccagaaggccatagccgagaagagctcgctaatagtagactctctttgaaatgagaagaaggcgaagccagccaccactgatctacgggagaagttaacttagaggagaaaagagttagacaaagaaatggaagaccttcgacggagaatagctttggctgcatctgaagattgtaattgggaagaggaagacttcgacgaggaatccccttctcaatacagatccaaacagagcccttacccgtgaactttaaagagcccaacatgctcccatatgagggcttaatggacccaaaataccatcttgatgcctttaacgaaataatgaaaatgaagagggtcatgagcaaagcgaagtgctagtgctttgtggtgacgctcaaaggggcagcgtacaaatggttcagaaggttggcacccgggtccatcacctcttagaaataactcattgatgagttcctggcccaacaccatgtgtctagggactatactatccctagaacaagcttggagaatatcaagcaaggagatattgaaaaccttcagagctacatacaacacttcaataccgaagcgactagggtaggaaggctgaccaagaatgagcacaagatggccatcgctgcaggcgtcagtccaaaaagtaagttgtggaacaacatgcataaaagggaattaaaagacttggaggacttctacgagatggcaaaaaagtatatccaggttgaggacggtcatgaaaaatctcactaaagggaagactgagctcggtgggtcgaccaacccccgtgcacatgaagaaccacgaaggaaaagagagtttgatggaggcaggaatgactgaaagaagggagttaggagagaagagaagccccagcatagggagttcacctattacaccagaattacatgcttgagggagcacatcttcctaacgaatgaacaccgggtgctgttcaagaagccaccctcaatgagaaaggataggttgaagagagaccctaataagttttgtaaatttcacaaagacatcgggcacacaacggaataatttacccacctcaaaatggaaattgaggacttaatacaaaaggggtacttgggggctatcagggggagaagagacgccttgaagagaggggacgagaaggggaaagacaagaaaacccttgtgaggctctagagataataagagatgttatgactatctctggagggcttaggataggaggagccactctcaaggggagggacaggtatcccaaggaggccagacaaccacctatggtaatgagcctggaacaaagatcgttgaaaaactcgaaagaggaaagttactccataacattcaccaaagaggacgcacgtgggattcattttccccacaatgacctgttaatactagtagtatagctggataatgctagggtccatcgagtacacgtagacaatggaagttcggtcgatattctctaccggagcgccctaaaacaaatggggttgagtatgaaggatttgaagccttacacaatgcccatatatggtttcactggggactctatgcatcccctagggatgattgagctccccctcaacgtgggagagcgacctaggcaattgacagtgatggccacattcgttgtagtggaaagcccaacagctttcaacgcggtgcttgggacaccctcgctctactgcttgaaagccattgtatccacttaccacttagccatgaagttcctaaccctcaggggagttgcaacagcaagaggttaacagaagaaggagagagagtgttatcacatgtccctcaggatagccacgagagcccgcaaatccatggaaattgttgtatgcgacaaggaggcccacagcaaagagctaaggcagactttgacccaagggttaaggaggaggttcgtgcagaaccttacgaagaaaccaaagaagttgtgatattcaaacaccccttgaatgtggttaaaattgggagaggactctacgtcgccctcaaatgtgagctataacagtatgttaaagggatggtggatgtcttcacctggggacattgaagacatagtggggataaatcccacggtaatgtctcaccaattgaatatagacccacaggcaacacctataaagcagaatagacaggccctcgactcggtgcgatatgctacattaaaggaagaagtagacaaactcgacctgcaccgcttcatacgagaagccttctcatcgctgtgggtgtcgaaccctatctcgatcccaaagctgaatgggaagtgggggtctgtgtggacttcactaacttgaataaagcgtgcccaaaagacaacttcccactcccctgtgtagatcagatggtggacgccacgaacgagaatgaggtattgtgcttcatggatgcgtactcagcctacaatcagatccccatgaacccagcaaacaaggaacacacatccttcataacggataaagggctctactattatcgagtcatgccattaggcctcaagaatgctggggccacatatcagagattcattaacaaaattttcaccaaccagattgggcgcaatatggaattgtacgtggatgatatgttggtgaagtcaagaaaggcgggagacttgattaaagaccttgatgaaacattcaccaccttgaggaagtatctaataaagcttaatcccgccaagtgtgtttctgggatctcgtcgggcaagttcttaggcttcatggttaacgaaaggggaatagaggaaaattcagaaaagataaaagccctgatagatatcgaatcaccaaagaactggaaggaagtgcaatgcttgacatggagggtagcagcactcaaccgatttatctcgcggtcaaccgacaaatgtttaccgttctttaatatacttagaggaaataagcagttcacctgcagagaggaatgtgaggaagctttctggaagctcaaagaacacttgggaaggccaccactattagcaaaaccagagaaaggagaattgttattcctttacttgggtgtgtgaaaacatgccgtcagtgtggccctaataaaaagggaggggaaatagtagcaaccagtgtactacgtcagtaaaagattggtggacgctgagacccgctattggaaatggagaagttagcttatgcacttgtgatggccttaaggaaactaaattcgtactttcatgctcactcaatcgttgtgttgaccaaccgtcctttgcgctaagtctttcacaagctagagacctcagggtgcctcttgaaatggacaattgaactcaatcaatttgacatttcctatgtaccgcggatagcaatcaatgagcaagaggtcaccgactgtatagctaaattcacctattaacctgaagagttgagacagcaggaggtagtagaggaggacgtctgagaaaggtagatggaaatttcatgtggatggtgttggaaattattttannnnnnnnnnnnnnntactcacaagtatgttgattagcaccctaaatatgaacttctaaaa

SEQ ID NO: 111252 - DNA, 6685 bp, Cannabis sativa
tttttttttttttttgtgaatcaaaacaaaataaaacataaccctttggaaatcatctttatcatcactaaaatctgggtccacagagggcaaagtatttcattttctcttgtttggatccaaacgaaaagatgagaaatctttttaaaaaaaaataaaaaataaaacttaaatatcgtgtaactttataaaaaaaaattaaaactataaatatgttaaaaaaaatctcataaaattaaatatattctgtattttatttcacaaatttttccttgtaaaaaccaaagatttgaacaagccttttaagttttaacaccaaaaatgataaagaatagtaaacgggtagagaagttaaaacctttgctatcacaatagcattgctcttgacatgcttggcgcacaaccatgcaaactctgcatcgcgaagctcactttcttctggagccttctcagacatgactttaaattgtatgtcttcaggggtcaaatcatcagtgtcctgagctaaccacccaccaccaacctgtctaagggaaagctttcctttcttattgtttctcgcctcaaggatcctcaaagtctttgattttcctcggaggatctcaagccctttctttgtatacttaggcgcaaccacaatctcatagaacatcctggtttcaccatctgttgggcttctaaattctctgatttccttagcaagagcctgaaacacaaaataaataacagagcagaacaaataaaccaaagatattgacaagtaatcaccagtgatggcttctcaaagaatgcgggttagactctagtctagagttgaataactgagcagtaaattaatgttgaaagattgaactaacctcatcaacttctatgttgaaggcaacaataccaccaaatgcactcactggatctgccttcacagctagtctataagcttcaaggatatcatcacgagaagctacaccacaaggatttgtgtgctttacaactacacatgtaggtttcttaaactctgccacacaattccaggctgcatcagcatctaagtagttattgtatgacatttcctgcacccaaaagataataggtcgtaagcaatcgtggtttaactgattcacatttgtaaataatgcaagcaaattgttgatgcctttaactatgatttaagagcaagaaagaaaaaaaaaagtctaaacacaaaatgttattgcgtagagtcacattaggaaacacaaattcatagcttggttcacatggcaacagcttcgctgccaaactgaaggggtcaaaaaagcagtttggtgaaccaggaaagatggctccacagagaagccaagaccacaagtgatccaaacatgcacataggtaccccaattattgttacttgtgaaggaaaatattccataatttttaccttcattatttattctgtacccaattagttccaataggagtttcaaatttacattaattgtaagggagagcattatttttagcaggttgatcatcagattagtaaatcgaaatggacttcaaagtaagtaatatattattgatataatatattggtgctttcattgtcatgtaaaacacaacttctaattaaatatccacaagctgttccatttaaagtttcacatgttacaccaagatgtctttccggaagcaacttattggataaaataagattcataattgacatattataaatatttacagcaagcagatcagacatagttgcatttatcactgaccttcccatggtgttgaatagcagttgcaataccaccaccatcaacttcagaaagactcttatcagcataaaatgcagccttttgatgaggattttcaccataacgaagggagcttttaagtgtcatcggcaccgtgatattaggaggaaatttacctatgacaaaataaagaaggttctcagtaacacgtgagactggacatcagaaaaaaaaaaaagtatctttgttctagcagaaactattttaataaaacacctccatttgtctgcttccacaaccactctgcgacggcagaatcataagaagcaacatgctggaaagccttccatgcaagctctctacgaaattgttgattatcttggtttccttttagaaattctaaaagggcaggatagtcttgtgaatcaacaacaaccaggacgtctttatggttctgtttaaattcaggacacatatttaagttcagatatgagacagcataaccaaaatcaaagatgtcaactggattgcattttaaactgatatacagtgcaacgataaaggcttcatatattttgttcatgacaaggcatatgcctcatgattgactcacacgcatacaaaaacaaatttgcaaaatgattcagatgaaaaaccttggcagcagctcttatcatggcagggccgccaatatcaatgttttcaattccatcttcaaactcaatttctttagttgaagtgactgtatcatagaaggggtacaagttcaccaccacaatatcaaacacacctgtattacaaaaagtatcaaccaactgatatgttgcaaataatcacgtgtgtgagtgaaagaaaataactcatgcaaggagagtgaatgatcttattgcataactcaccaattccatgctcatttagagcctccatatgatgcttttcgtctcttctagccagaatacccccatgaatattagggtgtaaagtttttacacggccatcaagctgtaacagataactacagttatctcttgtgtacatgtttaagtattactattgaataatattttgctcaaagaaaatgccagactcctccctattttgttgtcttgtctgagttgaaaatatttacacacataagaaacaaagcttcgattttatttatatatatatcaacaaaaataaaaatgaaccacgtgtaagagagattataagacaggtatcctattcagtattaaaagagataaggcaattgcagcattcttgaacaataaattttgatatatgactatcatatctaccaaatgtccacgactgtgtttgaactttgaatacattaggtggaagcactcagcaacacacagaaagtatgaggacagacaagagctgtacgtaggggactaatgggaaaggtttctttaacagtagctatattgaacacataaaaatattcttgcaacagcttgggtgaataaaaaagttttggaagtcctatctattgtacctacgctttttaacagcctttatacctgaaattgtgatagaccccaaacaggatctccaaatacagaagtaagaacagtcggaaacagaaagaaaacagtgtgaagacaaggatattattgaatagaaatgaaaacacaagctaaaacaaggttttcaaaagacatgcactctcccaaaagcaaatgctcactaagtacaacaagtcatataccccactttgtccctccctatgccttcaaacttatatccaactaagcataacctgatagcaaactcaacaatccaatacaactcagccactagttcacctcctctgacattcccaaacaccctcagcatatatgtggtcttttgttcctcctagcataggcgaattctaccaagggtctatcaaattatttcaattttacaatagaacaaacttaccactttttggcacaaaataaaaagagaatactacataatccttaaatgtgtacaagcacaaaactttgaagatggaataagaaaaatataaacaaataagggagtacagaatgagtatcatattactttcttttgccataaaatgaatgcgataatatgaatgatctgtgaaatgttgaacagattttcaataaaattgtaggggacgaaaaccattgtgtgcaaaacaagcacaaaggcctctctagaaagctagcgacattgatgtaaaagtatgagtattagcaaatttatatattttgatctacacagttgaaatcagagagttcaattccgtaaatcacgtgagaagtttaaaaaataactcgggaaaaacaaacaaaaacatacaaattactaagagctagctttataataaaatttaattaagaaaagacaaacacgttttggttcaacattatgtaatgtttaaaactagaaaataaaaagcatggcaaaaaatattgaagcattaattatgttgaagattaaaaaaaatgttaaactacaaatatcgaatgtccctgaagggtcaaaggttaaactacaaaaaaagttcagaaaagacaacaaaatctaatggcaaaaggtatattcaaaggacgaaccaactcaccatctccggaaaacgagtcagttgttctacttttgtaacagacaccccagcagtttctaaagcagaagctgtccctccagtcgacacaattgtgtagcttcagttaataacaacagatatcttaatagcttacaaaattgaacagtcaagatcaattagtatcggctacaattttattccattaacccaactcaattgaagttacactaatgccagtgagaattttagaaacagactaattagcaggaacaaagtcaacatatacacgacaagaaatactaattataagatgaagaatttaccccaatttctgaagcccatcccctaataaggtgaggtctctcttgtctgacagtgatattaatgcttgtttattacctgaaagaggcccataaaaaattcgattgttaaatcttcatgtaaaatcatattaagtaataaaaaaaccaagacaaacaagaaaagtctaaaatatgaataacaagtaacccatataccagaatgagttagcacggttgtttcatgcgtcactgtttcctgagctgccattgctttgaaagtagcaggccttgagtgcaacaggtacaagcagttagctgaagaagtctgcattataacacgaataaaagttaacgtaaacaaaactctgagctgaactttgtccaccgtcaccccacagaaggggaaaaaacactgtataaaatttgtgtgtgcgtgtattggagcattaccggaaaaggacataggcttctatagtaattggagcaatttggtcgaagaaggttgatattggaaattgaggagttcaatgccgctctaagtgtagtggttgtgttgggagaaactgctgttaaaccaaacatacctaagacaaacaaacaaagcacaaaggtgaacagagtaattagcaggaacaaagttagtgagcgaggttgatagttctagggtacgctgatgagttagtgacagcacaaagcagaaaaagcccagagattgagtgaccaagagagaagaaaccagttgagaactaccattttttttattacacatcaactaaatatcactgcaaaataattttaaaggataaatactttcttttatattcaaattacaaaaaaatctcacataaattataaaaattaaataacacataataagaatataacctataaaattacatagaaattaaatggtaatagaaaagagtaaaacataaaataaaaaatacaaagtaaatatactgtctaatttcctcaaaagcccagattgccttatagattatagaattagaaggttgaaacctacactttggttttgggactgctatcatatgtgagcttatgatattgggctaacttatattgtttattggaggtttggcaagtttcgagtttacggatttcgggttgaaaaaattattcacaaacccagcccgtaaaatgatcatattagccgggtttacgggtcacaggttgaccagatcaatatgttgatcggtcaactcagtcaactcttaaaaaaaaactatatattcatattccataagctctccaaattagattttctccctaatttttcaagataataaatttaaatttaaccaaaaaaaaataatgcaaacaattttaaatttaataacctaatttgcatataaaaaaattaaaaacataattctgtaaaaaaaaaaattaaaattaatatattataatatttaattacatattacattttaaataaaaataaactaaaattacttatctacatataaaaaaaataataaactgctctcccaagtctcacctgcctcggctccgcccgtcggtgtacggtggtggtgttgggcttagactcgggtcgacgacgagaagagggaaaggagggaggaacgacgacgaacgatgaagatgaggagaggagcagaggtgcgtgtctggctgcgtgcggctgggaggtcggtcgggcactcggggagaggtcgacggcggtctgggactccgacgagtgcggtgatggtctgagactttgagactttaggatttgtgttggttggaccttagtggactctctgtctctggttcttcgtgcggcagaaagacagtggtagattgttaaggtttagtttgtagggtttttttattttttaactagtgtgagtagcacatacaaggtatatgtgctgcaattatttgttgagtattgttatatttggtaccgttttatctaaatacaagtttactagtttgtatttttaataatgctaatattttgtattttaaaaggaaaatttcaatttttgaccctaataatacaagccatatcaaaatttatacccttccttaatttgtacaaatttagtccattaattaca

SEQ ID NO: 111253 - DNA, 6409 bp, Cannabis sativa
ttagtcatcaataatttatattgatgtacaaatcataaatctctaatacataaacctggttgagtttttgtgattgaaaagctctatttacatatttatttgtgattaatttaattgttgagttatcatttagatcatttcaaattttgttgttataaaagtattctagaaaagttaataatggtaataataaaaaaaaatattctataaaagtatacagatctcaattattaaatttggaattcttatattagttttttttaaatgtattttgcaattaaggttctttttattgggtttactgtggagatttttatgtaactgcgtctggtattttgacctgagtctgttctcttcgaaacagagtatcagtttacatttgttttttgtttgttatctgtttggtgggctgtttatttgttgatggacaatcacgacaatatggaggtggacaatggtagacgtttcgaaatactgttggaaggagatgatgacgatgggggtctacggtatgaggctgaagaaacagagctatcgtattttggcgatcgatggtgtttagtgggaaggtttctaacagacaaggctcttgattttatggctatgcaacataaaatggcgtccttatggagactaggtaggggattgtatgtgaaagaattagatcacaacctatacctatttcaattttaccatgatgtggatattgatagggttatagaaggtaatccttggacctttgatagagcacctctggttttctcacgtttaaaaataggggaagcaccaagaaatgttgtgttgaatacattggatttttgcatccaattgcacggcatgaccattggttttatgtctgctaaggtagtcaaggatatagggaattatgtgggtacttttgtggaggcagaacaacttcatgggtatttggcgagactatctccgtgtgagagtttccgttcgagtggacttacctttgaaaagaaggatgaagttggagcagagagggggagagatttgctactgctatttcaagtacgaagatttaccgacgttttgtttcatctgtggcattctcagacactcagagaaattctgcccgaagctttttgacactcctctagacttgattttgaagccgtataatttggagttgaaggttgtggcaagaagaagacaacacaccattggtgcgaaatggcttaagcaaggattgatggcgaaaggcggaagttctagctgaaatgacgaaggggaaaggacggtgggggcctccggtggacagtcaagcggaatgacagccagacaggtaatcaatttccaatcacctattattatgggttttgatggaataatgaatagaggtgatatgaggaataatttggaggaaaatatggctaagaaagtgggttcagggtcaaacaaagatatgggtattgatgaaggtgaggtggaaggagatatagatactgatggggagttatttattcttgaaaataaaaggaaaagagtgaacataggtattactattgggctgactacaagtgggccgaataacaatgggtctatggagatgttagaagaaactttggaggtttatggtaacagtggcccaaaaaatgaatttggggcgggtgctggatttcaggcccgccaagagccatgaatgtcttaagttggaattgccgggggcttgggaaccaacggactctacaattcctaaaaggggcggtgtctcaaaagaaacctgagattatttttctttgcgaaacaaaatgtttgaaaaaaagagttgactatgtgggttggtatttgagttatgaaggtagttttgcggtggaggcccaagggaggagtggtgggcttgctttactttggaagtgtcaagatgagggccgagtggtgggtttttctcaacaccatattgattttatggtaggaagggagggtgatgttctttggaggttgacgggattctatagtgaaccaaggcaatgtcaacatgaggattcttggaatttgcttaagtctctagttaactcgaataatatactgtggtgtattattggagacttaaataatattcttcatcaaagtgagaaaagggtggtaattggtatccgaattggttaattgaaggctttgagaaaactttactaagttgtaatttgactgatgttgagcttgttgggtaccaatttacgttggaaaaaggaagaggtactagcaattggattgagcttaggttggacagggctcttgtttcatcaacatggtaccaatcatttcctaatacccggcttatcaatttagatacctctccttcggatcataacccgctttgtttggaattagaagttcagaatgtggtgcctcccatacgtcgtttccgttttgagaatgcttggcttaaagaaccactttgttttgaaattgtccatgactgctggaaccatcatggaaatggtaatattacttcaaagattgaggcgtgtgctactaaattagctacctggggtaaaggggtcacaggtaatttcaagaaacggattcagctttgtaggaaagagcttaaattgttgaagaataaaagagatgaggcttctattcaacggtatagtgaggttaaaaagtagttgttcttagtctttgatcagaaggaaattttttagaagcaacgtgcgaaacaattttggttgaaggaaggtgatcagaatagtaagtacttccatcgagcagctagtaaaagaaggagtgccaaccagattgtgaagttgaaagataatgttggcaattggaaggaatggggttcgggtttagaaggagttatggtggattatttctcacatcttttttctggtgagggagtgaagtgtgatgaggttcttgcaagtgttcaagaaagagtatcatcctagatgaatcaatgttaaactgaaccgatccaagaggaggaggttaaggcggcaattttgatatgcatccagataaaagtcctggccctgatggtatgacaccggcgttttttcagaagtgctggagtatagtgagtaaggatgttgtggatttcattcagcattttttcatatctggccagatagagcaggggtgcagtgaggcgaatgttgtgcttattccaaagaaaatagtaccggaaaggatgagtgatcttcggcctattgctttgtgtaatgtcttgtataagaccattaccaaagttttggctaacagaatgaatcatcagatgcatgagattgtttcagaaactcaaaatgcttttattcctgataggctcatatcggataacatccttgtttcttttgagattttgcattatctcaagaggaagaggaaaggaaaagaaggatacatggtgctgaagttggacctgagcaaagcgtatgatcgcattgaatggccttttctagagaagattttagcaaagcttggtttctgtgatgagtggatatcattggtaatgaagtgtgtatctttggctcggtatatggtgacacatgggggtcgggaaatgggccctatttttccttctcgtggcattcgtcaaggagatcctttgtctccttacctttttattatctgtgcggagggcttatcttcattaataagaagttatgaagctaggggttggattcatggttgtaaagtgtctaatggtgccctgagggtctcacatatgttatttgctgatgatagttacttgtactgtaaagcgacgatgtaagaagcctctcatgtccgcgagcttctccataaattcgaaagagcctcgggtcaaaaggttaattccagtaagtcatccattttctatagtataaacactgatgatactagtagaactagtataaatcatttcttacaaatgagccaagcggatgatagaagcatgtatttggtattgcctagtacaatgggtaggaataagacgactgctctgggctatttaagggatcgggtgcggcgtaagcttcaagggtgggactctaaaattctctcaagggctggtaaggaagtgttaattaaatctgtggctcaagctttgcctagctatgccatgagtgtttttttacttccttgggaaataagtagagatattgagagcttgttggctaagttttggtggaaaggttcaagtggtgatgcaagaggcatttcttggatgtcttgggataggatgtgtgaccacaaaagtaatgggggtatggggttttgcaattttagagatttcaatttagctctccttggaaaacaaggatggagattcataactaggcctaattctcttgcttcttgcatctttaaagcaaggtattatcctaggggaagtttctttaatgcggaattgggtaataaccccagttttgtgtgtcgtagtgtgtgggaggctcgtcctttaattcggaatggggtcagatggtgtgtgggggatggttcgggaattaatgttttgggggaaccgtggttacctgatccggataatccttttatcatttcagatcaccctgctcttcagaatgcaaaagtggaaaatctttttagtttgggtggcaaagagtgggatttgtaagtgttaaatgatctctttgttgatagagatagaaacctgatactaaagattcccattgaagttagtccttcctgtgatcatctctgctggtggaaagaaggatcaggtgtttattcggtgagaagtgcatatcagattttgcaagagagcaaaggtcggggtgatgatggggcggctacaggtttttggaagcagttatgggaattaaagatacctcctaaagtcaaaaatctggtgtggagggctggtgttgcttgtcttccaacgttggctcaattagtgacgaaaagagtagctgttaatattcagtgaccactttgcaatgatgtacctgagaccattttacactgcttggtcacctgcaaatttgtgcaggaggtttgggagagggtggggataggcacaatcggtgctgatgggggttcctttgccgactggtgtactgcaatttttctaaaacagtcagctgagatgagatgtttgattgcaacgttgtgctgggcgatttggggggcaataaatgatcggatatggcagaaaaaactggtgagtgcttcggctatagtggcttcagcaaaatgttttcttgatcaatggcatattgctcaaaaatctcaaattgagacatcttggtctggtttacaggtaaaggatggggtggagcaatgggccaaacctgttgaaaatagtatcaagataaatgttgacgcgactatctttgaagaacaaaaccattttggtttggcatgtgtgattagagaccataatggttttcttttgactgctctcacgaggttgtttcgaggtgctattcatcgtatggtagctgaagctttaagctttagagaggctttaagttggctcaaaacacaccaaagacatatggccgttattgaaactgattgtttgttggttgtgcaagccttgagaagttctattcatacaagttctccgtttggtgaaattattactaaatgtaagaatttacttgctcaagttagaaatgtttcatttaattttgttaaacggtcagctaatgtagttgctcatgaaatttctagcatctatgttacatcctgatcgtattttcattatggggaatgtcccaacttagttgcttccttgtgtgattgctgaatttgaaggataaataaagtttgacctttcaaaaataaataaataaataaataaataactttcgagagattgatatatcacattgcttaactcattagctaaatctttctaatagacaaatgagaaataataataaatggtcttgtttctccctctagtaaaagctaatgtcctttttttaaaataataaagtaaatgtccttttgtattttttgctatcgaaaatacccttaattatagataaagtattattatgttatagtacatcagttattttctaactatagttagagtatggtatatactataatagataggtatattctattgaatgaataatatttttttagctgctcactttttattaacaagtgttaatatacattaactataaaactaattatcgtgtatatatgaatatgaatttatatatttcatgctaacttagagaaataaaagttatgataatcaattgtttgtactaagataaaaaaaattgatggcacattaatttttagtttgtgatctatatattttgtattatggtatatactattagagatattattacaatgaaagataaatcaaaacatatacaactcaattgtaaaaatagtacaatgataatcaaagagattgattagatatatgttataatacacatatatatacactatatatatcaca

SEQ ID NO: 111254 - DNA, 7350 bp, Cannabis sativa
gtgagttattgatttataatatgaaagggtgacaatttgataggtgaatatggttcttcttactattttccactttcccaacatggcttatgtatcgatttttgaaagtatggctgataagcttagttaacactaatgccatgatgatgcattgtacatggaaagggcaagctttatttcttcttaacattctccatcagtagatagatgggtggcaaataggctagtgttcatttggactggaactcaacattcttatgtggactagctcttgcagatgagatattttctgcctattttgattttcaacctttgttgcaaatgtatatgtttattttctataaggggctacgggttgaaggtctatattggagacaattgacttagtaaagttctcatgtgcgaaattctgtggattgatgaattattattagtttttgtttttgtaaggatggggaagtggttgaggtgaaacatatgatgtatcacgatttagactattaactacatgcacgaatattcttgtgtacataaaataaatacataatagttgaataagtaccctttgctctgttaacgacattttctatctaagatagtttgagttaataatgcttaggcttatgataatggagtttctttttgaaactacgaccttggggaaagatgttgattagagtcatggcacagaaatgaagtcaggaatagctcaagtgttattatcactctgttgttcatacagagtgatttacaattcaaatcactgaaattttcgtagttcattagctgattaaatattttacaatatttttaaatatgatgtaggtatggttgattccatatcatgcttctgttggtctattacttgtgaactatcttgacattaccatcttccaattgcagagcttttcaggaatctttttaatttcaatggtgttgaagttgtgaaaaggccactactttgtgcatccacattctcaatgggacagaccttatggttgatttctgttccatttgcacaagcaagtgaaagtataaaatataatgctgtttatgaggttggcgagttctttgagttaggaatccagctctcgtatttgctgatattgttaggttttcttggtgttggaactttctttgtgattcgtcaagtccttgtgcgtagagaacttgatctttctgccaaagaattgcaggtaacaccagtctattctcatcatgtctttttaattttccttcaacaactgtctctattaaacaacaacgacaaacaatttagagagataataatccaataggtcatttcatgttttgctatcctagtagagatgaacaatgatggcaacctagtttcattgactttataatattgtgtttgttgtgaattcaggaacaagtaagaagtggtgatgccagtgcaactgagtattttgaacttggtgctgttatgctgaggagaaaattctatcctgcagcaacaaagtacttgcttcaggcaattgataaatgggatggagatgatcaagatcttgcccaggtatacctagaatttatcattaaattttttttgaagtattaaaattatgtcttctcgttgttaaactgtcaaagtaaaataagtgaattgaaatttcaatcaaattaaactaaacaattgaaaatgacgattgatcagattttagagaaacttaagattacattcttccacaatgtgttattttaacagagctgttcttatttagttccatccttcaatgcgaattatcaaccaagaaaccataatgattcgcaagcctcttcgatctgatggccatgcagaaatatttaattttatcagctatctatattcctttcattatcaaattaacgtaaatttcattgagcacatgttcttaaaaagtttatgcatgcctatatgagaaacttaaagatcgtttagtgatcgttcttcattttattcaaggccaatcaatattccctgtcccatgttcatttaaatttactaataatctaattaatgatcaagtaattagaaacaataagcatcgaatagaatgagaaatttatcattgatttcagcaaaccacataaaatatgttaaaacattatcattatcgagtttacaaggaaaagcaaaagatttggaatgtaaaagatgaaaactcgtggtagaaactcctaaggaaaagtagtatcctaggctgtgtgaatcagtttctctaaaacgaaaaaaactagtaaaagtcgacctctcatcagtcctttatatcctaggtcaagtcttgtaagaaaaataagcaaatgtattctgaatttttgctcttttaacactggttgtcgcaatacttagccttcgagttcacaaaattccattggcgtcgctactcagaagacggctgtcgcgatgatgctgagtgctgattctgcatcatgaaatcttattaaaactcaagtcatcaactccatttattggaaagaaatttgtcttcaaaatttgatatattttttcattttttacctttctgatttgaaatcgttttctccaacctttcttcttttcctttctcaccttttctttatatatttatatttttgcccataggacaccccaaacttctttatggattctcttcttttcctttcttttttcttagatcaactaactccacaatttcccccgaagtgatttcttgaattcctttccttttagatcattctttttaatggtagcacacatgaaaacattaaccataggcacattaagaaatagtcgaaagcatctctttaatattgcgttgcctagggttttgcctcaaaaattaatcaatcaagtttcgaatcaatgagaccacagcatatacaatagccacaaaaagtttattcaagcatgcaaaagatacaagacattcactttatgtgcagaagagattttaggaaaccacgcaatatataagttcagttctatcaacttcaaactcaccaaacattcacttttcctgtttcaacttatttcttattgacttcgataacaaacagggaaaaaataaagaaaaaactgaaacaattagactgaacaaagaaaactaaaacaactagactagaagacaagacaaaaacaaataaatcagaacattcctccaaacttgaacattgcaccggccgtaatgtagaaaaataaaagataatgaaagagaaaactttgttagaattattacacaacaatggaggcttcttgatgatgactctacattgtgctgccccaaacttgtgcaataacccgattcacacaaaatcaaaaataaatatatatttaaatggaagatagaatcacgggcttcctcccatgaagcactgatttatagtctttaactagactttcaaaatgttctattcaactcctaatcgacggttgataagttcatttattggatgagctacatctttagtgactagtctatggaatagaatttctagcgcagcatcgcctacaaaataaaaataaaagaagttgtacaatttaagtaaatatatagataaagtaagaaaattacaaatctgcttcaacttccctttttattagaatggaaagattaataggaacttttgtttatttatgagtgtcatattctcttctatggcttcatcatctgttccatcaatcaatttctctttatctgcagaccttgtttatagtagaacaggaaggtgtattggtttttcatgtggctcttcatatatgattttatccaaatatttctattcatccgatgtaatatcatggaattaaaaatcgaaaatgaaagaaaatcaacctattcctgcaattgcggtcagtctcgctacctctttagttgccgccccctacttgctcattcgcttactaccacaagaaagtagcccctttctctaagggggcttatgtactccacaactttcttgtgttatggggtctcgaagactgaatttagctgccaaccctagtcagcaagctaaaaaagtcctttttccttttcataataataaggcttcatagctccaacatagacaaggtagtttacttgtttatttgttagagtaaggtcttgaagagcctaagataccgattttttgaaacagtatatatttttctataaaaaacaaagacatatctccaaaatatccatggatatcgatattcatgaaatatccatatttctaaaatattcatgggtattttttatttgtaaaaaaaaaaccaaagataagatcgtttaatttatttaaggtggcgtttggtaatattttttttaattaattttctgatttttaattaaaaaagtgaaaatattttttaaaaacatattctataaaattgtttttattttttaattttttaagtgaacatcaaaattttaaaaattaaaaaaaaaaaatactttcatttttaaaaacaattttttttttttctaaatcaatattttggactctgactacgtggcccctgagattgggacttggagccgaaccccgaacccggacttcggccccggtcctagagccgaactgaacttgaacctcggacccggaccccggccttggccccggacccagacccccgtcccaaccccagtaccggaccctagactgggacttgaccctgaactgtgagtgcgacccctagacttggaccccgatcccggacccgaatgcgacttaaataaaatcaaaaataaaaatacaaataaactttactaacacacatttgttagtgtttttaaaattaaacaacaaaagtgattatagaacgtaaaatttttaaaaacaaaagttctacttttattttagtgattgaaaaattaaaaaataaaagtgttaccatacgctaatattttgaacattctagaagtttaataaattatactctatacgtggtaacaaattattcgtgtcatttcagcacaacccataaaattacaattaaaaaaaaaagattgatttatgaacaatatagataaataatgctaaacacctcttgactgataaattatactctatacgtggtaacaaattattcctgtcatttcagcacaacccataaaattacaattaaaaaaacaaagattgaatcatgaacaagatagataaatgatgatctattacgtgctaaaaccaaattattcctgtcatttcagcacaacgcataaataacaaattagagaaaagattgaattaagaaaatgtggattgggataaatttagcaattaattttttctgcaacaatgccaaaaatatttttattttgaaataacgcaagctacaagtaataaagtgaaaatagattatcgtcccacgaagagtatcactaaagtgtttaagtattaacaattaaatataacgattatcagattttagagaaatctaaaatagttttcctttaatatatatttaagttaaacaaatgtattctcacttaattgcctagcatgtgaaagatgaaaactcttggtagaaagaaactcctttagtattcaaagttttgattcctctctttctcgtcaatctctcgaaagacttgaatttggcctcccattagtcctctatagcctacatcaaaacttgcaagaaaaattagcaaagaaagcaagtttcccgcttatattttttgctctacatcgtgacacgacattgacactagtcgtcatgacgcttagtccttggcttcataaaattccattggcgttgcaattcagaagacgtttgtcgcagcgttgagcactaattgtgtaataaattttctcttgcccctcaattatttttgcatctattttgcttgctccagctactctccaaactacaaaacacacctagattaagtaaaacaaactacaaaacattaacaaatgataaattataatgtactaaattatcgcattaacgcatgatattcatgcatgatatcaataataaaataagcttggaatctaaaatgaccagtttctcttctgtctcaaatatatgtgcacttccgttgtaccttattactaaatcatctctttgacttatataagatattttgtaccatgaatcatctctttgagttacatacaaaatcaaatttcatttttgagccgaagttcataaacattggttgtactgaagaagcaaaaagcatttgttttcttcttccttcatattatgccatttttcaaatttcttttttctttcaataggcgtagctggtatcaatcataacttggtacgaagttgtcatgtatattataactccgtctttagtgtaattaatttaacagaaccggattatggcttcaaatgtatgaagttgtcatttatatatatgtatgtatctatttcatgtcttggggctccgtttatgtatacttagattgctatattgttgggtctcgatgacattagcctacagagtaacagtggaggtgtttcactgcatccttaagctttggaaacattgtaggaaaatggggaatgagaagctcttacatataaataacgtttgtctttgctatatcatattatcaccgctactgtcatttgaaatgtttgaaatgaacaggtttataatgctcttggtgtcagttatgtccgcgacgggaagcttgagaaaggaattactcagtttgaaaccgccgtgaaaattcaaccgggctatgtcacagcatggaacaaccttggagatgcctatgaaaagaagaaagagttcaagtctgctcttaaggcatttgaagaagttctgctttttgaccctaacaacaagttggctcgaccaaggagagatgctctaaaggaacaagtagacatgtataggggagttccagtgaaatcaaaagtgaaatcgaaggaaaggtgatttccatgcattatcgatcaacaccaagcttgttcctttttggtgttttgaaaggctaaagcaaatatgtcatgcctaagattctagtttggaagacacgtcttggcatgagctcaatgtaatagaacaaaaaatgagattattatgtacctgaatagtgtcattccaatttaacaaagaagagcaattgtttgcaattcctaaaatctgagattgtgtgtttcaagttgaatctaattgtatttattgttttttcatattattatttgttaagggataataacaaaaatctatatttattttgatgaaattagtttattcattacaacttctggttaaataatttaaataaatattaaaataacatatttgttttatgtatatttgtgtttgtgtgtgtttatatatatatatactagcaaaaagttacgtgcgaggcacgtatactaaaatttatgcgaagtattttttactttatttaaaa

SEQ ID NO: 111255 - DNA, 1400 bp, Cannabis sativa
  modified_base (27)..(67): a, c, t, g, unknown or other
tctccataaacctcgttgattagcaannnnnnnnnnnnnnnnnnnnnnnnnnnnnnnnnnnnnnnnngctagttagggtgttacaatgtagatcctgtagcccaggcgaggagaagagtcgatggagatccaaaagacgcaaccagccgccctacggaaaagactcaacatactgagatacacgttgatgaaaatcccatcaaagaggattgcaaaaaggaaactcctgaagatgaagatccagaaggcgatgggaaagaaaaagatgaagatggctattattatgagttataccctatagtcgtcaaactggtaaaagaactcgctttgacacagcaaaaattggcggcataagaagacttctctcgttgaatgcaagtagccttgaataaattggaggctagatttaaactagagaatgttgctcatgatggagaaaactttgacaatcctattcctaaggagaataatactaggagaagaacagaccctaaagatcttagaacttcttatcccaatagggacagaggaaaatgtgtcattggagaccctctgagaaaaactactttgaccgcttcacatattaacataaacactgccaacaaaccttaaaggaaaaagaaggtaaccaatgctccaaggtgaggcaatcttattaatccgagaggtaaagctatgcagaaagatatgacttatgcttaggtacaaaggcctactgttcgacaaaatgatgattacctaacaggtttgttgacaagtgtgatgatgatgtaaaataaattcaataactttttgatgagagtatgaccacacagaacctccaagtgtgattgaatgcaaggagggaaaaatctagggccaagaaagtaaggcctcgtggaaacaatctcaaaaatcacatcgatgatcgtgttcgtggatgtgaatctcaagaagccacaactaaatgtcttgaagaacaagttggaccctagaggtgggctagaaagaataattgagcccatataggatgtagaagaagtttgcattaatgaagaagatcctaccaaggttatcacagtatgaagaaatttacctccagccatcaaagaaaaaattgtatccacactgaaaaaagaatagtgatgtattggcgtggaaccattctaacatgactgagatcagtccccatgtgattttccatgctatgaatgttgacgaaaaaatagatccagtatgttagaagagaagaccactagatacaattccactggaagcattgaaaatagaagttgataaattgacaaccatagaattccttggggaagccttgtatctagtctggcttgccaatcgagtattggttccaaatgttggggttattttaccaggatctcgatttactaccatgtatgttgttt

SEQ ID NO: 111256 - DNA, 978 bp, Cannabis sativa
tactcaagtaattttagttccctattaaatagcttcaactaaacctttatatttaatgttatttgcattttatgtaagacatgtcatgtcgtatataccggagatggtccaattaatcttacgcttaaattgaagtcctttaatggccctcagttgctaaggggtctcccaaacaaagagacatccaaagcgaagggagatgcagaggcctacttgcagtagtcctcgcctcccaaagaacgggatgtgaagtgtctcgcccagaaccggatgagcctgacagggaagatcattctgttggttcccaaatatgtactagaaaggcctaatgcttaattatgtcgatactcaagtgtgatcgcggatatctacttttcttatacgctaggtcaccaaagttacggttttactttttctaacataatcagatcatgtctcctacattgaaacatgatagtgcgcgcaccaccaccatccttttaccagacggacattacgaacttctgtttgtaaaggagcaaactttgtgtgacgcgtgtccctcgcttttaaagttaaacctttacgtgacaatccaagtttgtacaaaatggtcctcattatcctgctgctgcacgcacggaaataatgcgacccacgagatcaaacaagtcaggtctaaattaccccaatagtgggatttaagcataattcttaggcgggtcaattatctacccatgctcgccccttagcctataaataccccctcattttcatgcaaaggggtgaagcctataaaaaacacatagctaaaattctgctacgattactcttgatcttcttcttctttaaaaagaaattaaggccaaagagttagagttttctgtaaaagacagtaaatttatcaacactgcccttagaggctaatagactaactcgtaggctaaggtttatttgttggaaatattttaccagtatctagatttactaccaagtatg

SEQ ID NO: 111257 - DNA, 4652 bp, Cannabis sativa
acagtaaaaaagtaaaaaattcccatgtaaatttcccaataaaaagtctagcataccacccttaaagccaaccaacacgtacgaccaatgttaatggacgaaacccattactacttttcactcttctcttcttccaccatcaatggcttccacaaattcaaccccttctgacccattcccctccgcagacgacttagctgccaaggctgtcaacaaacgctatgagggccttgtaactgttcgaacaaaggccattaaaggaaaaggtgcttggtactgggctcatttggagcctattttgattcgaaatcccagtactaataacccaaaagcagtgaagcttaaatgctctctttgcgactcagttttctcggcttcgaacccgtcgagaactgccaccgagcatctgaaaaggggtacttgcccaaatataagctccgtactgagacccaattcctcggtttcgccattgccgttgacgacgttgccttctccttcttcacacaaccacagaaagcgaagctcccaaagctgtatgagtcctccaactcctcatcacgctccccctactgctttagaggttcattctttagcaatggttgagtcgaccaggtactgcggcgagttcgggtacttgccgccgcagaacgccggcggtggtgctaataataataataataataataataataatagtagtaataatacaggattatataaccaccattcgatgttatcaggtgggaaagacgatttgggtgctttagcaatgttagaaaacagtgtgaagaagcttaagagtcctaaagcctcaccgggtccgacttttagtaaggaacaaattgactcggcggtcgagttacttgccgagtggttctacgagtcatgtgggtcggtctcgttatcgagcctcgagcatcccaagttcagggctttccttaaccatgtggggttgccttccttgtctcgacgcgagtttttgggtgctcggctcgacgcgaagtttgaggaggccaaagtggagtctaaagctagaatagaagatgccatgttttttcaagttgcttctagtggttggaagagcaagaatgtgtgtgactttccttgtggagatgaaaatttggtcaagttcactgttaatcttcctaaccggactagtgtttttcaaaaggccgtttttactggaggcgcgttgccatcaaagtacgctgaggagattttgtgggatactgttagtgggatatgtggagggtccgaacagcgttgcgtggggatagtttcagataagtataaagccaaggctttgaagaatttggaggttcagaaccattggatggtgaatctctcttgtcagcttcagggcttcgttagtttgattaaggatttcaacaaagagtttccacttttcagagttgtcactgagaattgcaaaaagcttgcgaattttgtaaatacagagagtcaggttaggaatgttttcctcaagtacaagacacaggagcttgattgtgcagggttgcttcgagttccttcttcgaaatttgatacttcaaagaactttggaccagttcttgcaatgttggaggatgtgttgagctgttcccgggtactccaaatggttgtgatggatgattcctgtaaggtggttcttgtagaggatccaactgggcgagaggttgttaggatgattcagagtgaaggcttttggaatgaattggattcagtttattctcttgtgaagctgatcagagggatggttcaggagattgaggttgagaggccattagttgggcaatgcttacctctttgggaggagttaagagcaaaagtgaaggaatggtgtgctaaatgcagcattgccgaagcaccagttgacaaaataatagaaaatcggttcaagaaaatgtaccacccagcttgggctgctgcttttatacttgaccctcttaacttgatcagggacacaagtgggaaatatcttccaccattcaagtgcttgactcatgagcaacaaaaggatgtagataagctcataaccaggttggttagcagagaagaagctcatattgcattgatggagcttatgaaatggaggtcagaaggactggaccccctttatgctcaagcagttcaagtaaaacaaagagaccccatcactggaaagatgaaagttgccaatccacaaagcagtagacttgtatgggaaacttgcttaagcgagtttaagactttaggtaaggttgcagtgaggcttatttttcttcaagcaacctcatgtggatttaagtgcaactggtcttttacaaaatggatttgtgtgcatagacactcaaagataggtgtagaaaaagcccagaagatgatatttgtagcagctcatgccaagctcgaaagaagggatctttccaatgaagaagaaaaagatgcagaactttttggtggtggaaatgttgaggacgacatgctcaatgaggtctttgccgatgcaccctctgtgtaatgttttctttttcaatctcttgtgggtttctttgtagctttaggatttttatttaattctttttcttcattttattctctttctcttcttttttttttcacccttccttcattacgtatagattagaaattttgaggaaattatggtttgctgaacaacaatgtgaaggaattgaacaaatgtattactaaaccaggcttgctgcatggttcaatgaaatcattaatctttcactgaaaattttactttgggattctttcttgtacgtgctcgtaaaggattaccttgtccagtgtgatcaaccttgtatagactctatgacactttgttgaacttgagtaattttgagaaaacattcttaaatttctctatctttagatttgaggcttctagtttaaaagccacccttttgttttcttcttctcttctatatcaattgacaattagtaacttgttttgtaacagttctctgattaaaattatgtattattaattttaatttcctctgttactcaacatggtagaaatggttcacaatctgatcttggcacaaagcgatggtgcatcagtgcatgtggcccacatatttactcaaaataaaatcaagaactaattgttgacttattacttattaataaggggtttgtaactattatgttactcgatatagtattctaatctaacgtgactaaactaacactttgattaattaaagttgattcgtctgatgatcatgtgaatactacataacttgtctatgttttactgaccttaagctttgtgtttcttaaacaaagacattttttttactgtttattctcacttgagagcctaaagcaatccaacctttcactgcggctcctcttttaatcttttcttaacaaatttcagggttgtattaatattttatattataagttaagttccacttaactaagagaaaaggtctacttgcttagctagaaatgtacatcatgaaacttcaaagtacttatttcttatatccactttaggtaattggggggtgttgattatttaaatatgctcttgtgctaaatgtttatagtttgattgtgaaaactttctgttggatatgattgaggctagatatggaaagttgatcaaaaaaaaaaaaaaagtcaaatttacacccaattggctttttccacaaaggcagttgatttttatgtgggatacatccgatttggtttggatgccaagtgtttgtagataaatggtgttttaagtatcagacaactagaaattaggtagttagtatatatgcctgtatttaagtgtcctaaggtctgagaatcagatagagttcagagatggacgtgcacacaaacacatgcaaataagtgctttgctttgcaataaaagaaaaaaaaaatatacactggtgctgacagataggataattttaagcacacctgcatggctttctaaacaatttttcatgatctttataatactgttactgcatgtgtccttcccttctcatggaatctatatttttcaattacaatatgaaatagtgtataaaataattaatgcaaaagcataattcgatttcaatttggactgttgtctcctcaataaaaaaaccattcttggacaatttcttattaaccacctcttaggtcttagcacactgtctaataaccttataatatttatatataaaaatatatatgctgattattgacagagatggaatgggaaaacacaaacacgtggagaaactttgttttagaaaaggagtggagtggaacactataaatgtttttagtttctttgagaatagaagttgcaaaaggacacaaaagtgacaactgttctattttttttatatattttttttttttaattttggaactctctttctgttgcagaggttttttttttatttttttttcttattgaactggttggtgggatagcaaactggtcttgagagtcacacatgggtcaacctcggaagaacttgagaaagaatctttgtagctaaacaagcaatacttgttgttgattcaattcagaataatatctccttctgtgtctgttactgaaattggagagagccccacaatgaaagagaggatgtccatctcagtttattttcttcttcttcatcttctttttttttttt

SEQ ID NO: 111258 - DNA, 1693 bp, Cannabis sativa
  modified_base (30)..(30): a, c, t, g, unknown or other
ggggtccacaattaaattaattcacaaatnataataaaataataaaaattagtggtaattgcctttactaatccacattactagagcggtcattacagagattttcttgaagcaatatttatcgcatataaattttctaagaaatttaatcatttggtcatgcagtgtgttactactcccaaatattccttaatgttcaatggtgggattcgtggtttttttcccgttaaaaaaagtctaagacacctaatgtctctgatgatatttgtatcttgtccagaatcatgaaaaaagttgggaaaaaagatgattccagatttcatgaatggtgtgtgaaattacagtttaaccatttgagttttgtaaatgatgttctccttttttgtcatggcgacttcaagccaatctattttatgttgcaaggattaaaattcttttcagcaacatttggtcttctcccaaatgaagcaaaatctgtggtttactcttgcgaaatgacagggaatgaattgcaaagggtgattaaggtctcaggaattttagtaggagtcaactgccatttaaatactttggggattccaatttgtgcaaaaaagatttcggcaaaagaatgtgagcttttactagaaaagattattgcaagaataaggatttggagctcgcataacctgtcgcatgcagggaggatcactttaatcaattcaattctaatttctattcatgcatattggtcacaaattatgctcattcctaaacaggtgttgaagagaataaattcaaaataccgagtctttttatgagaaggtaaggctaattttgatgagcgggaaatgtagcatgagaaggcttgtagggcgaaaagagaaggaggactaagcttacgagacattctcaaatggaacatagactcttgagaagtatatttgagttgtggtagaaaaaaaaaatttgagtcaaatgagtacataatgtatatattaagatggaagattggtgggctcacagagcccttttacaaagtagttggtatagaaaaaaaatagtagaagtcaaagaaagatttaaatatctaattgacatttctagatttattaagacagatttaaatatctaattgacatttctagatttattattcgtgaggagtataccataaaaaatggtcactaactactttgtaccaattatacgaactcaatggtgttcacaagtgtgggggagacttatcatatcaaaatatagtgttataatatggttagccattcttgacagattaaaagattaagcaaagattgctgcaattttagatggtggataactcaacatgcttattatgtgatactcatgaagaaagtatatttctcttcttttctttgaatgtcatcttagcaagagatgtttacaaaatgtaaaagataagatgtgctagggagctaaaataaaatcattgagcactctgttgcggtggatttctcgagctctcatgtgtaagttctgaaaatttgtttatgccgcttttgtgacagctgtagtatattatgtttggaaggttcaaaatgaactattttggccatctaaagtgagaaggataaatttaactgtgcataatatttgtagtaatgtaaaaaagtagagtgcagagtgttatgccaaaatcaattagtagcattgataaagagtgttttgactcttt

SEQ ID NO: 111259 - DNA, 3175 bp, Cannabis sativa
  modified_base (2019)..(2021): a, c, t, g, unknown or other
aaaatattttgtcaactaacttgccaaaaaaggactttacaatttccattagataactttagtatatatagctatcgttaataaattcttgccattgtccactaggaatttattgttgacattccttacgtacactagttatagtacatgcaaaatatcattgtaaatggaaaatataaagtacacaaaaaactacataagtataattatatattgcactcattcaacaattgtttctaactctaaaattgatggggttatgcgcgtatttgattgagttgttgacacaaaaggatttggcggcaagttgagaatttcgtcagtttctaacatttggacaacagttttcatggctggacgccctatcggatgccactggatgcaccaaaatcctatagttgcgagtttcttagcaatttttctgtcttcctcattctctattagcgcttgaaaatcttctccatcttctaggagattataaatccattcaggataataaatttcatctgtttcgcttgtattgttccgtcctcctactatttccaccaacaacattccaaaactataaacatctgacttgtaagacacatttccaaaattcttagagaatacttctggggccatgtacccaagagtccctctagctgtagtcactgataccaaactttgatctctagaacataacttagctaagccaaaatcggaaacttttggtttgaagttatggtccaacaaaacattatgcggtttgatatcaaaatgaaggatttgttgctcacaaccttggtggagatactcaattcccttagcaacacctatagcaatatcttgtaatgtttcccatctaagtgtagattggtgtccacttttgctgacttctaatgagatatagttatgaagcgaaccatttggtaagaattcataaacgagagctcttctcaaaccctcagcacaatatccaaccaaacgaaccacattgatatggtgaatttgaccaatagttgccacttcattcaagaactcttctccatcgtttccctttgatgaatcatttagaatcttcacagctaccaaaaccttattggaaagctttcctttgaacactgttccgtatgctccttcgcctaacttatttttgaatttatttgtaaacttcttaatgtctgaataagtatatcttgatggcttaagagcaaaatagtccttcaaaaactcggtaactcgtagcttttgttctctgtctttcttgtacaaagtgtaagcataaaatgaagcagctacgaccatcaaacaaaacactactaatgttgggaccttacctgcatacaaaagacacacttatcataacaataataacaacattgcaattaattaccttaaagtgtctaacacttacttaagatgtcacccactgattgattgattaatgactttccatattacttattaaattgaaaaaaaaaatacaaaaatcggctatcacgtgatataacgtacatttcttgtggtgttgagcaatttatttaaaaattctattataatctatctatatctataaaagagatgagggggtgacatggcggtctaaaaatattttaaagttattttttttcctccttaattcttttatttttaatattttattagagtttaaatttacaaattaatattttattattattttaataaatttttcataaaaatatcgatctaacataaactaataattatttttttttttaaaaaaatactatatataataccaataccacacatttactatatttttatttttattattattattattattattattatgttttataaatctttcgtaactatatacttcaatttataaatcctatatcataatattaaatataatttaaattcaaccacttggggctagctcaagtggccataggtgggtgtgtgagtgttggaggtcctgggttcgagtcccagtaaaacatgatgtaatatataaacgcttgaatcaaaaaaaaaaaaaaatannnatatatatatataatttaaattcaaaaatatcattatttaataataaattaattttattacataaatttactattttgaatcacactccaaagcgcgctatttttttttcagtctcattctcacgccttgcaacttatttttgtttgtatatggatttttttctctctctctcaaattctcaatatggagaaattgtttatttgaggtatgtgcattgacattcatcaaaagaatagaagacttttgtaagttgaagtaattatttttccttaacattcaaatttttttgacaaaaaattttaagtacatgcttaaaatagttaagcttataagttgaagctagcttctaccttgaaggtaattatttttccttatttagtttttatgtttctttattcattctaagttcatgaaatagttatattttgtattgttaaaaagaatttggatgagttaaagaaagaggtgaaggatgtaatctaaggtgattattctttttctttgttgcataaattattctactacggataaaaaaaaatatgtatcaatctgtattatttttttactttaattttttttcaacaaatcatcttaagccataaaaaattatatttctttttgaacaaaaataatacttaattctaaaatatttttaagcccaagatgatgtatataatattcaactttatagtgataataattattttttgttagggtttcatgattttgtttcttcttctttttttttttatttgttttattttatatctataaggtgattattagtttgttaaacatataaagaaaatatttacttctgttagtttaaaaataaataaataaaataaaatacagtttatcagttataaataaatattttttttaatatgatgaccaagactttaatattttttaaaaaatgtattatttttaatataattttttgataacattttttaatgtggtggcaaatacaagagaaatacaatgatgacaatggttttaaaataatatacaagttttctataaatttatcagttatatctttatatatatttaggtgtcgtttggtaatactttcgttttctaattttttaatcacaaaatgaaagtaaaatttttatttttaaaaattttgttttaaaaaacaaaa

SEQ ID NO: 111260 - DNA, 8701 bp, Cannabis sativa
aaaaaaaaaaaaaaatcataaccaacatacaatgtggatagtgtcaaaagaattagttcaagaatgaagtaggtgagtgagcacattacaatgtgataggcaaatctaagatcacccaacaactaaactgactttgaaaatatttttcttaaagaattaagagaacttatctatttggttttttttttttttttggaaataaaaaagaaggtaagctcatttctcattgcccatattcattcacaatttgaccacaaaaatccataattgggaccaaaaaagagaaggcctttaaaaaaacattgttttattttttttaattaatatttcagttgcaattttcaaatttccattcattgacatcacgaccaatgtctatgcccaccaaatacttaatttagcttaggcataaaaaatagtacaaagtctgaaaaaaaaaaacaaaataaaacccttggtttgattggtccaatctttttttgcaaagcaatactgattacataaaagaatagattacccagaaaaaaagcaaaaggaaggcataatttttggctttcttcttcattttttggtgtggggtacgtctcaagtctgaactcaactctgaccttaataggatcagataaaaattcgttcttggagggcctttctgtagtaagtggtcgcttacgcttagtcaaggcgtttttaagtcttgtgtaacttttccaccgtccgattggcctcgagattccctccaatagtatcatatagaaagaaaaaaaaaacatccaacggttggtctagtgggaatgtcttactgtgctaacagagacactaactcgtgtttaagagttaatgactttgtttaatttaataagaaaatattaaatagataccacctccatacccttccataacggcttgctttattgttttgtcggctataagtgaaaacagctcacttttcaacttgttccatttcgcttccaatccaagtcgagttccaataataataacaaaattatactgtgttttttcaattttcctttctcttttcttacaaaattattaaaggtataatttttattttacactggaaattttcatgcattggcaattgggcacatatatcaaacaatcgttcaaaatttaattttatcgtgaatgaaaaagtaaagttttttttttttttttgttatattataattaaaagaaaagtatgacattggtcaattgggttgatgagcctgtaagccaagccaatggtgtacatatctaaatctgaagccaccagacatggattctgtaagccaagcaactagtgttgtgttactatctttgtttaaagagaaaataataaaatagagcctaaaaccaaagtcttaaaaatattccaaatcttaaaaccctctccttaaacttttcacactcttcttctttctactctactctactactgcttttttatttttcctctctcttctttctttcttcttctcttcccaaaaggcactctgtttcttcaaagaatttagctttttctctctctagtctactgaagaagacgattgatagtttagcagtgtgtgagtgaaaaaatgaggggtcctttaggtgcagtcattggaagatacccatcaagtgatggtactcaaatgggtggaatcattagtcataacaggaaatgtagggatattgtttttcttgtgatctttatatctttctgggttgctatgattgttaactccagctttggattcaacaaaggaaaccctttaaggtaagaatcttgaaactaccccatttcttctctcttctttttgctacaaatgcctacctttatttttcttaagtttgggttttatatgatttttatggtaatgattaatttctcttaaataagtttctttgttagctcatgtacctctaatccttgttctgggtctgtcattgtttttccttcttttctatatttatcactttagcttaactgttacaacaaagagtgctcatgtctgacttaccctcttttcgagtcttgcattttcctatttctgtagagatccactggattaatggaaacgaaaaattgggttttgtgtttaatgtttgtttggtactgagaaagtgagaatgagaagctttattcatttacttgatgaaaagctacaaggttttaagtttctttaacctgcacttgcttaatagctgcatttttagtattttcttcatttttttagcctgatagtgatgcccttgttagtatttttgataatacgtttgtttcgataagatgcgtgagaaaaagaactactttttgctcctatgatatgccaaaaactattatctcacctccattaagtctaacaaactctatcatacatcctataccttttcttgggactcaatttgttttcttcattttattgtatggagcaactcaagggagaaagagaggataagctcacttcttagcttggtttatgcatgttgttcgtgtgattttgttatttttgctcaactgtcaatgcaattttctgtgactctgttggtgtttggaaaaaaaattaaatgttcacttcctgatcgatgttaccacatgattgctaaagatttttttcttcatcaacattgtgacctatagtactgtgattaaccaggctcacctatgggctggactacaaaggaaatgtttgtggggacaagcatgcgaaacctggtcttcatcagcttgaacttaaatattggttaaatcctaaccaggtctatcaaagtggtttgaaagacagtgactttgagttaaccaatgcaagaactatatgcttattggattgtcctatcccttctgatgatgcactaaattgggtgtgtgattatccagaaggagatatccgcctctcaatgaacgattggattgatagaaactatgattattttgagtttctcacacctgaaatgagaaacagctctcttcagcttcagggtccttgttatcctatcatatttccgagtgtcaatggtaagtggattcgctatgattactgttttgttgccaagggattttttcattctgtgtaattgtgctttatgcatgagaagctccctgtttgtttgtttgattgatgatttttgcattatatagcattacacagacatttctttttcagtttatgcaagaaaatgttatcttctgtttcctgttcagtttgtaaattcattttttatgtctgcattataaaatgttactaaacaaatctttcccttttccagtttactggagctgccaatttattgcacgttcatcaaacatgtctatgaggcattggcagcaaatgggcggagtgcgcatcaatgaggacattgttatagataaatccattcacagatccatcaattctcagtcatctgttttaaaggtgatttatcttatggttatttagtatatttttattgttaaaaaattataatgctttgaattcttagagaaaatgtcttagtctttcaatatatgaaaattttgtagtatggtctctgcttttagcttgttactaatttataattaacagggaaatatataaataaaacttcttaacatgcaaggacttttccaaatacagttgattttgttatgttttcctatagatgttgtcgaccaacctaactgattcaagatttgagatcaattaggttaatggtagggtattaaattcctatgcttttctctgagtatgaactactattgttgataacaacatattttaggtttatcttatagttatctttataagacaaaccctgtctgtggcctatctacttctaaggcaatgaagtgaaccagacataaatgtcattcatcatggtattatttagacgaaaaatatatggtctctctctgattccccaaaatggaaacttgattaattagtggatgatggacacaaaattatttgtttgataagacactgataaataagcttatttgcctgatatgtatctagttttcaaatgtatattcatgtgttacaacttatttgcagaggtacatggctgatattggaaaatcatggccagtgctaatagtttgtggagcaatcttgcctctgtttttgtcggtgatttggcttctgatgattcggcattttgttgctgcaatgccttggataacagttgtcctctttaatattctcataatatcagtcactatgttttattatttaaaaggtgagtagctttttgaggccttgttaatgcggttactggcacattcccaggtcttgttgtactttctgatgcttgtattagagtcaagcattgggctttgaataataattgttctctatcatgtatgcttactgtggaaatgtttttctttaaacataaatgctgaatttgatctcccttgctttctagctggatggattggaaatgatgccatcactcccattatcggtccccatgatccttatgtccatgtgtctgcaagggtaggtaccatcattagcctaaccctcaaccctgaaatctgcctatacattgcttcttacattttttgtgctttcaggagctaaatcaacttcgtggtgttactgttcttatgacttttgttatggttgttgctgttcttacatcaattgctatagtccgccgtatccttatggcaacatctgttcttaaggcaagtatgatatacttcaaataaatgtgcattctgtgacaaagcattaatttatggaaaggaaggaaaaaatctacttattaatcaaagttagctagctaccaaaccttcatcgaaatcggagaactctggatttataaaaggatatcttgtttttgtagttgtgaatatctagatttatagaaggatgtcttattttcttgtagccgtgtatcaaagagactttgttattacaatctgccagggtcaactatcaagtgatgtttccccaagatgaggcaattacttttcacagatggaaaaatctctctaagaatttgattgaattgttaacattcataggaaattgtaaacttcttaataccactatcaagaggaaaaagataaatatattttcatcatgcatattggattcttgacacacctgcttgtcctttaaatcaatttcatcgattctgacaaactgaatcactgacctggattttttcatttcatttactaattaatttgttagattcttctataacataaatattgatattacaggttgctgcaaaggtcattggagaagttcaagcgctcataatttttccagtcataccatatgccatccttgcaattttttacatgttttggttttctgctgccttccatctgttcagttcgggtgaggtcctccagaataactgtaactccaactgctgtgcatatgatctcgtgtcaagaaaggtcaactgtgatcgttgctgcggttacagcattcattacactcctcatattggagttgccattcttttccacttattcgggggatattgggctacacagttttttatagcatgctcctcaacagtgattgcgggttcagtagcttcttactattgggctcgtggtgaaacatcagtaagttctgaagaaatatgtatttatattaacatcaatgacatgtgttgtggttctgtttataattatttaatttttatttggatgacaagaacttaagaaaatatatatttttagaccagagatggccactgtaatgtggtattatcatatgggagaatatctaagactgggttaattgcatgacactgaaatatgtataacttagcatggggacatttaattcttccaattgtttttccaccagtttgttatagaattcgtcaggtcctatgtgtgtcatttaatcctcacccgacgcattttgtcctggtgaggtgaggcgtaagcctcaaatcctacattaaatatctttatttttgaactgtaaacttcgaagcactagtatctatcaaaaccagtactaggattttaggaataaattgctagaagaggcactattgttaggcccagtatttagaaaattcaattaacataaataatataattgttatttaagctatttttgttaggttcaacactttgaacaatccaaaaagtgagactgtagccttgagacgttccctttttgggtgcctgaaatagtgaggcctaagcctcagttaacctcttctttgtaatgtgggttggttgaattgttgaaatagcaatgaagtggcctggattttaatttacctggtccatctgaggtctcaaaagttgtatgtgattgactttttgtaagaggaactttgtttggatataatatcttctcataatttggatataatagtctctgcaagatgaagtttttttccttcttgcaagtttgcaactgctagatgaattgtttgagatattaaatactatttcattaaagtgcattgcttttctcatcatatgcttattgtaattattctatacgcagccagaaattccatttcttccagtcttttcctccatgaagcggcttataaggtacggcctcgggtcagttgctcttggctccctgattctgtcattcgtggaatcaatccgttttatgcttgaatcaattcgtcggaaactgaaagttgctggcacctcgcctgataattggtttggaagagtggcattccatatttccaagttttgcctaagatgtattgattggaccatcagatcagtgaaccgcaatgcctacatcatggtaattcaagaaattctacttgtagtcatgacttgtgtagttagttctgaatgcattgatgtttggcttcaccatcaccaatatcgtccttgggatatactagagtcccatatacatgttatgttctacggcaataataatttcatgccaccataaatacttagttgttatataagtatttggtctaattctttgtatgctttttaatgtctttgcagattgcgataacaggtaaaagcttctgcaagtcatcttccattgccacagatttgattatcaacaacatacttcgaatagggagagtcaatgtgattggagatgtgatcttattccttggaaagctgtgtgttagcctctcaagcgctcttttctcattcctcatgctggatactcacaaatacagatcgtcacacaacaagatctcttctccgctgtttcctgtgctggtatgttatgatcaatagctaaacgtcacttgttcttcattaaaatcagatatgttttttaaattaaacctctttcattgttattttgtgttgtgtttcatgcaggtttgttggggccttggttatgtcgtcgccactcttttctttgcggtggtggagatgtccatcgacaccatcattctttctttctgccaagactcggaagagcaccaagggaccgcacaatacgctcctccccttctcattgaaactctcaatgaccaaaatgagatgcagagacttacgcaaggacctcagtgaaaatagctcatatatgtataattggatcatatatttgcttgatgaaactcaagaatccttatactttattaggtcattttctcctaccttttcaccctttgaaatttttgtttcatttaacctgtgttgtatatgcttaagtttttggtaaaagccagagggaaaaggaagcctttcgagagacagttttatacttttcaactgagaatacaagacaattgtaggaataagtcatgtaactgagaatatatatataaatagttactaaaaaattgcatagaattaatctgttggaaatatttggaaactgagaaacacttcatagaatatatgacattcagttattccctacaatatgaaatatcaaaataaccgtgttgtatacttttggcttgtcggccggaattcctgcttcgatgttctgtcttattcagatcactttaaacaaaaataaaaattgtttgatgaatgcaatttgtttttacattacttttttttaaaaaaattctgctgtaaagtgtaacactagtgttagtttgtgtgtgtttagtgggatggtatttaacattgtttattagattatataagtgagatcgattttaataatttatttttagtgggaaaaaatcaatttaaattcaatcacaaagaatgtattgctatacatcaaaattagtgttttatgagtttttatactatgtttgtaaaaatgtgggttttatttttttcttttcaacatagttattttatgagaaaaatagttactgtttagtctgtttacagtatccagttactgtttttcctgtaaaataaaagttcccctcaaaataattctattttagttaacaatattactatgtaattggtttaaaagaatttgtataaaaatgagttttgttgactagcaatactgaataatgtaaagaatatcaatatctaccgtgtatttttcattgtttattgaactaggattgttttataaatgtaatgtacacacatgactacaaacacatacgtagaatccaaacatatgggttcttatgtttaggaagaaagtaggtatttgtagaataccatagaaagaaatgagagtaaacatttccccttgtttattttgttttgtaagagaaaatgagaatgttagaaaaattaataatgaacccaagatctatttgtatataacatagaacacaatagtaatatataataattaggtatgtgtacctg

SEQ ID NO: 111261 - DNA, 1313 bp, Cannabis sativa
  modified_base (1208)..(1209): a, c, t, g, unknown or other
ttgtaactaaatattatttttagtcataagtaatttttttgttgtgactaaaaatcacatttagtcacaattttttttattgtgactaaaaagttgttactaaaaatgatctttattgatagtgtaattttattgcataaaaacaatataaataaattccctagagaatattatataatactttgtaggctatcattattagacccaatacaaagtatataaatctagattatcccaaaagagaagaaaaaagaaaaactacaaattactataagagttttttaatccgatgatataaataataattatatatgttaattgtttattattaattcaacaaaaaaagaatctatatggaagatgaccctaattaattaggcgctccaacaacgaaggactatataaattgatatgaaaagtacttccagcccatgcatgcaggctagatagagatttggattaatttttgtcgagttatatttatatatttatataaatatatatgtatagctaagctaagctagttagttggtagaaagaatagattataataattatctgtttagtattttatatataaatatataccacatgaatgaagtcatcatcatcatggagtaataaaaaaataagtacataggcaatcaggcatggctattttcaccaaccgatcctcatctaaaacattaaacaataagtatagacccaattggcgccttctttctgaatctattcaatgtatttttcttttcaaatagactaccaagacattaatcaattaataagtctaacgcatcaatttggatccaatatatactaattaatggttttttaaaaaaatttagcatgtttgttattatatttttgtttttaaaatatagtgttttcaaaaatgagaataaaaaataatttctgaaatttttaaaacactagttatgtttggttagtgttttctaaaaccaatattgaccaaaagtgaattgttttttaaaatagaaaacaatattttgctgttttcaaactaattttttgtaattttgtttttcgaaaactatttctaaaaaaataacgttgaacaagcctggttgttttcaaaaaataattttctttttaaaaacaaaaaccaattttttaatgatgatgtcaattatacatttaatattttcgagctcgtttggatggattattaagtcgtattgtattgtatnntattatattatattgaattaaattatatattatatttttatataacactatgttaaactttagtttatactaaaatataatatatatttaggtgcccataaaaa

SEQ ID NO: 111262 - DNA, 5550 bp, Cannabis sativa
  modified_base (5483)..(5484): a, c, t, g, unknown or other
aactaaacacaattacacaatatagacattaattgctccacaattcacattaaattcaagcttaaagatataaaaataactctaaatcttagagttatcaagtaacatcaatgtggagagtagcttgaatgctggaaaaggaaagagttggtcaaggattagggacacaatgatttttcatcaaggaaaaaagccaagtaatctcagaagtggtatttgttatagcatgatttcttcttttgctgaagaatgtgacacaatatgtcctttcttgggcctccatggtgttggagatgatctaagaaaaagacaaaatcggtgatgggcctttgagtgttgagcgtgtttccaatttgaatttggaaaaccttcacatgtatttgaaagaatgaaaaagataccttcaccatgaactttttttatgtattaaaatactatgattagctgccttgagatggggttcttcccaatcgcctatcattaaatagctaatgacaagtcgagtgatggttagatatataagttttccggttagttgtctataccttgtaggatcaacaaggagctcaccttcatcttgtgaaagttttgagacaagagaccattttacagctcaaatatcagtatacgaaaatgactcaaaaacatatttcgtaaaactccacaaggagatgatacctatcgtgtatcccttcctagtaggcatatttaaaatgatagaagagatgaatgctttgggtgacatggtactcgggacttggtcgatttacttttggggaaatgggctataggatgcaaatgtgtgtttgcaattattatcaatctagatggctcagttactcgattgaaaagatgtcttgttgctaagggctatgctcaaatttatggcgtggactattttgacacagtgtctcttgttgctaaattgacctctatttggtttattttaatgtcaactattcatcatcctttgcatcaacttgatatgaagaacacttttcttcatggtaatcttcaggttgaggtgtatatagagcaatcttttgggtttgttgctcaagaggagattgtcgtcttcaaaaatttgtatgtactgaaaaattttggtatgatagaaagtatgtttgatcattttgtgttgcacaagcaaacaaaagctttatttttgttttaattgtcaaaagggttggagggggctaccatgcgtggcttctctctctgggcgcaaccatgagatctccaacccatccacgaatgttggccaagaccctttgaggtagatcacccctacctactatggggtgcgtcacctgagccccagccgagagtgtaattttctattagttgtgtatgtggatggtattgttattactagaagtgatcctacaagaactccatctctcaagtctttccttctcactgaatttcacatgaaagacttaggcatgcttaagtatttatttggtgttgaagtcacaaggagcaaaataggtatctttctgttttagtgaaaatatgtcattgacttattaattgagaaattgggagcaaagtcttttagtgctccaatgaattcaaacatgtacattaccgaaggtggggaactatttgaaccttctaagaagtatcgatggatggttaaaaagtaaaattattttagtgtgactcatccaaattttgcatatttagtcaatatagtcacccagttaatgtcatctctaacaattcattattgggaagcattagagcattagaagataatgtgaatatatcaactcttgactgatgtaggacttgaaatttttatacaaacaaaattgcggtgtgataatcaaggtgattttcaaattgcattgaattttgtgtttcttgagctaactaagcacattgattatagacgggtttacaatattacattaaatgggttgattacaattctcatattattacatttaagaaaaaaatggaattcttatattgtagttgagatttacttgtatctcttaaagtacaaataaacgggtttgggtgacatttctggaaaaagggagaggtggttggtcatgagagtcacaaatgggttgctgccatggttgggttgtgagttggatagtttgccaggtaggagttaccagtgtttgccttcaaaaggtgaccaatttttcgtactaggtacattatgcttccataattccaatgtagtaggtacattacgcgtccataattccaatatcatttaatagcatggcctggtaaggatatggtggcaacatgaaatgtggcatcaacaatgacaacatagatagagcagagacggcgacaatgcaaagggcaacatcaatgacaatggtccaggtagagctccaggaaatggcgaaatggattgaaagggaggtcattgcattagccctaggatctcccattcaaatggggctaatggatattcatttgagccttgtttttgagataaaatacctaggtgggtaatttataacagctatccatattgtgacccaaaaaacaacaacgagagtgaagaggctggtcacatctttgtttggggactgaagctgaagcaaaagccatggattttgacaacagagaagagcaaacattgatggagcattgacactattctttttctagttgaaaaaacgtgagccacttgtatcaagatctgacctcgaatattactacaggcaccatttgaaatcattgagctcatcttataagatattgaggcgagtataataggtgtttaatatcaagagagccaggcaagttccacaacatttaaatgttgccaaaaagtatttttctccatgcactgcgtgatttgcctttgcctaaaattaaagcgacttgtgttttcttgcatttttttccataatattacacccaattaagtaatcttatttctaaactaaacctatgcattaaaccaacaaaactcaaagaatatttgtttaaaacacactaaattggtgcaaattttagaaaagagatgacaaatatctttatttcttaagaattaacaagacaattggttgtggtcgcccatgatgtaagccccagattttttggttttggtttggctttgtttcttgtgctaaaagatggaaaaaggagatgactctagactaatagcatgccctattggatctctttccttctgtatattcctaatagtttttgttccttttctttttattattattattaacatttaaaaaagggccacagaattgcttgaaaaaccaagtagtggcctcttatagagcgctgatcatttttttacttgtttgacttcccatttaaaagaaagtgaatcatagcgttaggctaaacggaatggtgaaagattaaactgatatccttacttgagaggatttctaactaaaatgtgaaacgatactctaatggagcattcagccataacttttggctttgtaatcttggacttcttttttcttctgcatttatattgcttgttgtaatattgttaggttaaggttgttaaatttagtatatgacagtctctttactatagctatcaatgttatgcatttacggtttcatatttactttgctttttttcctaaaggggaaagctttttactcattcatatatttcttgaggaatacaggtcccgggactactgaagattaggtatattggacaaacaacacttggtagtgcagctatttttggtctgtttttgggtgctgggagcttaatacactgtgggaagtcctattaagctattcgttttcctttcattttggtataccaaaaatatatcaatgttctgttaaaaaatttctggtttctactttcaatatcacatctcaaatacacagatgttgaatcagggtgaattatcagttctatgtaatctgttgtttttttatgggtgcttgcgtaatttggtagccatttctgctgtttatattttatttccttgttgctgagatatattgctttgcattgtgaaattttgtttgcattctcttcaaattcttggggttatgagccgctgagctggctgggtgatattttattccccctgttcctgagatatattcctttcaaacttgcattgtgaaattttggctgcattttctcttcaaattcttggggctatgagtaggggttcggctggtgcataggctttgtttacaccagtatgtgatggtaagagcttgtttggcatcctaacttgttttctgttttaagtttttaaaaattaataagggacgtttgacaaaaatttttaaaaattgagttttaaaaaatttgaaaacagaaaacatcaaaatgttgttttcaatttttaaaaataattttttgtctaacatatatatacatatattatatttttgttcacatactcggatcttagactcgaaactaaatctgaacccgaattcagaagagttcatgttatggtatggtgttataatattgattttttttaataagaaaaaaattttaaaataattttaaaaaatttatctcaaacattattaaatttttaaaatgataaaaaaaattattttctattcttatttttaaaaacacaatttttaaaattgaaaactgaaactgagtctctaaaagcttgtttggctatatttttagtttttagtttataaaattgtgtttttaaaagtgagaataaaaacagttttttgccattttaaaaatttaatggtgtttgacacaaatttttaaaaattatttttagattttttttaggaaataaaatcaatattttaacaccataccatgacattaacccatctgggttcaagttcgagtatagtttcgggtctaagatctgagtgtgtgagcaaaatataatatgttagataaaaaaaaaatatttttgaaaattgaaaacaatattttaattttttctgttttctagttttttaaaattcaattattaaaaaaactgtttttaaaaatttttaccaaaccactcccagttttaaaactttaaagccaaaccatgattgatatgcgtttgctcattttgagaataatacactttctatatgcagcatgcataaaattaactttaatttcaagtagattgacacattagcaaaacacatggagatatcattatttcttgaactagttgaagcctcttttatcctattatacttggtgttaaagtaaaagtaaaaattttacatttaaaaattaaaaataaatgtaaaacacaattttatttatgtcaaattaatagtacaagagtttattagttttaagtttgatcaactcaagattataaaaataatctcttaattatattttttttgtttaaagaaaatactatttgatttcaatcatgataataataaataattagggtaatttttaagaaaatgaaaattggtatgaatttaaaattgcagttgaactcaataattttgcttaatcaaactgtttacatatatctattctatataanntgtgcctatataactgaaattcttggtttatgagaaatttatgggtgattttttatttttatttaa

SEQ ID NO: 111263 - DNA, 5407 bp, Cannabis sativa
  modified_base (49)..(60): a, c, t, g, unknown or other
aaactatcagaaatctaataagattgacttgtggactatgcagaatttnnnnnnnnnnnncacgtaaaaaatcccttgtgttcatacctcgtattttactgctttcatttttctgtgtgagattatcactgtgaggctcaaatttttgttaacgaaaatctgcgttaacagtagcattagcaaaatataagttaataccttatttttgatcttggtgcattgatcaaaagatcaccaaaaggcatctatacaacatatatctaaaagtaaactaaaacacatttttcttccaaaaggctaatgctaaaaaaattaatgttagacttcttcatgatagttaaccctgaggctgtgaacttgaaccttcccccctctgtctagcctctttagccagctgcttttcccttctcttcctcctctttagtgtttgcacagttagagttttacttggtggcctacctcttttattcctttattcttttgagcctacacacacatataatcaatgtcaaaacataatataaatgcaaaacataatataatatcagtcctcctttggcttctctagtagagattccttgcatcttaagattgtgtggctagtttttttgcatttggaacaatgcatgactgctcctactctgctagcttttttaactgtcccagctgcaggttgatccttttcatcagcccccttctctttttcttcattggcctgccaggaagattattttcacaaggaaaaaagattggattaaggcctttgtttggcaaattattagggctaggcatgggagaaatgtccatgcatatgtagttgcataaacttcttttttgtagtaactatgaatgtatccccattcatcatggccataaaaccatatggcagccaatgcatggccacaagaaatccttgtgagctgaaaccttctgtaagtgcactcatatttgtcctaatcaaccataaaaacaccaacttctaacattttcacttcaaataagataacattttcacttcaaataagataacattttcacttcaaataagataacattttctcttgtgacaatgcacttcctagcaacatcaatattttttttacacactatgtttttgtgaactccatgatttcacttttgtatgtctcccttctcctagtaaaaatacaccttaaactcgaactcactcatcagtggaagttttgaggaatttgagattacattgtataacaaaaattacaaataaaatttatattgcaatgtaaaattcctacaccaaattatggtgtacatatatttctaataaaaaacatattaaattctaatctcaaatttatcatataattaacaattcacattcatgcaaaaataaaccatccattcataatatatcgacatatacataaatgcataatactcaacataatatttactttatgtaattgtgaagatagctctgataccatttgttagtttttaggattcatattagagtcgcagcagaagtataacatcaaattcaattttttttttaaaaaaatattttttttgaattcgatatgaaccataaatctcagatctcaacataatataacataaaatagatctaactgcttcgaataaggattttacctcttgatgctatttaggagatccttgaattttttcgtataaatatttgaacatccaatccacgactttatgggcttgatgaagaatccacaccagatcttctagatcagcctcgatactcaagataagagtagggttatagatttgacaagatgaacaaactttctgattagagtactgtattttcaactcaaaagacactataatagagattgggaaaaaaccaatcctcttaatagagagagatagagagagcgagagtgagtcgtgcgagatagacccaaatgggttgccatggctaccacggtgaggctaaaacagtcgagtcgagaccccaaagacctaaacaagtcttatttcattcgtatgcaatcggatcgagtggtccatacatgcaatgcaagcaacgagcagttttaggcagaggctgcctaacattgtggtcgaaccacctagtaaaaggaggattgacgatgggtccaagttggaatcctatgaaggacccgtccttctcagtcgacctcgacatcgttgactgtgggcacataacccgaatgccacctacggtggtggtgttcttcgtacatggtcatagcattaaatgctcgagctccatgcaatggggcggctgtcgtgcatggtcaagttttaaattcgaaactaagctcacatgcaatgagcattacaccgataaaattttttacaaaacctcttcacaaaacctcttaatagtgtgcgagtcgattatttttgtaacaaattaggtatgatcaacatatatgctctagcttgagggagagtgttacatatgtatatattagctgtaaaattagccagaaattaggttaatcagtttactttattctcttaggtggcgtttggtttgaggtaatgaaatggaatgaaatagaaaggaaacaatctttattctattcctttatttggtttcatattaaagtattaaaatgtcatttcaataaaatgatattttcaccattttggtgtaatgactatttcattttaaaatagaaggaaagagaaaattttaataatttttttatgttttttaaattttattccattctatttcaattctcattttcattcctattttttatatttttattcctcccaaccaaacgttaatttaatttcttagaatagattgcttaagttgtgtgtaaatatatgttattctctcaatgaaatatacaagtaaattattctctttatcataatttacaatttcttataataaatttgactcattttaaataaatacagatgtaattaatctatttttaataaatatttattttattaagtaatttttttttaaaaaaaaaattgctttggttccactaatccatatatttcattgttgcaaggaaaaattaattaatttgaaaagtcagtatctaaacaaaatcattataaatacatacattgtggaaggatgaaagagcctgtctcgtgtagcatataacatgcatccgcagtaccattggcgccgtatgaatggtaaagatattttataaaagttattacacgacagtcaatacataattagactaataataataacatatttatgaagataagataaggactgaattaactctaattctcattaaaactctttttctttacataatagaacctgcaactacaactcaagtagtagattccacgcgcgctaataagacccgtacagtatctgtgttaggcaatagtagtatgcacctggaaagcggtttctaattgattgaaaggcaattctttcttaatctacaaaagccacgtaaaataatgcttcatgggtcaggtcaaaacattgagatatcattctacttaatctattgttattaccctataattctctagagtagttggcccaacccacacaattggtttggttgactacgatcatgccataatttcctccactacccaaatttcttattagaaaaaaactaatataatggtcgtttctgaatgagctttttgtcatcaagcactagtaagacgaaaagtttttgtatggtaagtttcctatttgactctgatgcgaatttcaattgagaatactaggaagaagcattaaaagtttaaaaccaccttgagagaaacttcaagggtacaataacacggacgacacaaagtgatgaccttttgaatcgtttactacctaataagcaactacattcatcccatttgtttagaggagaatttaattcaagacaaaataataatgacacgccatgtggtgtggtggctggctgatgtgtttagtatgtataatgtatatattagaatataaagaagagtgacatattctaaatgtgggaaagttcttttttttttttttttttttgaaaaaccaaaggcatagatatattaaaattaaattagagttagttattacataaaaggtgtactggtatggaagaatgatctaccatttacattactcgcaaaagcctactttatcacattttgaactgtaaaattacacaatttagaaataaacgaaaaattagaacaatttaaaaggtttgagacatttatattgaatagaaaataaaaacaccatttacaaatatatctctcctcttgtttcttcttcttttagaatgtaattgtcattttttattttattaatttatttattttaatttagaattattgaataagttttttttaatttccccttgaagctaccttggattctcattctaccatttatcaccagatggtaagtggttccctttagacaagtcattatccacatgataaatctagagggaaaacaaagcttcctaagtaaatcttccacaaactcccagtcaaccgtatcataagccttgctaagatcaattttcatgatgcatcttgcagagacattcttcctaatataaccctttagcagatcctaaaaaatcatgatgttatgggccaacagtctattcttaatgaacgcaccttggttatgcactgacaatcgagcgaagcacttctgaaagtctagaatagatcctcttcgaaatgcatttgtagacagtgttacaataggcaataggtctgtaatccttagctgaagtaggattagcgactttggggaccaaagaaataacagtctcgtttaaggttttaggcaacttgccattaacaaataaattcaagaccgctgtaaagatatcattgtcaattttactccataaatccttgtaaaacccagactcgaacccatccaatcctgggctcttagtagagtgaatgctgaaaagagctttcttggcatctcctttattaaaaggcttaatcaagtaaataatataaatcatttgcaagcaaaacaataaattaaaataaaatacatgttattacccaatagatcaggaaagatgattctagtacaacggtaaacaacaacgaaatttcatattttataattatcaatttatgatttaattaatcaactaattaaatacaatataataataagggaatttttcaattttatacagaaattataaaataattatacaaatattatcaaccaaattaatacgtatataaagttatctctaccgaattataaaaaataaacccaccgaataaaatagaacaaattgtgggctggttgcatgtagacagggttgtacattggttggtttagtcggtttatactacatattttctaacccagcgtaaagatcagtttgtaaaattctacatgcaacctgcccaatttaaaaaaaaaatcttaacccga

SEQ ID NO: 111264 - DNA, 6552 bp, Cannabis sativa
tttaatataactaacttgaaaataggaacagatacagaaaatttaaacaattttatcataacacttttagatcggattattgttaaattttattttgataaaaaatttgttcagagtcagatttttaccattttagaaaatacatgttctattttgtcatttaacaaaatagaagatccaatcaataattttttcaaaacatccaaaataatatttaacctataatatatacatttaaatttgtagaattacatttaataacataatatctcaatattacacctccttacgcattctctaaatttttacaattagagatgctcttaataagtgtgtagcagaatcaaaattcttactaataaatttatttatggttgtgtcaactgtgtccaagtctaaccaaaatcaaaattcttactgaactgaaaacttcaaactttcccatattcaattcgccgccggtgtatttctccgatttaacttcaccggagatacggttatcctccaatgatgctaccctaaccatctgtctccctcatcttctccaatttcgcctattttagctgatcatgcccagcttcttctagggtttcgtaaaagcccattatgtctgataagccgcctttgaagcttctctcagctcaagaatgggagaccctaatcgaagatttccagttcggcggtgcacgtcgcggaaagtggaacgcagcctatgctatcatcccttccctcctggatcaagctctctcatgtattctcaggcgggacttctcttctaagctttccatcattcttttccttgaagagtttgctgactcgctctttggggttgacgatgatggcgagtccaattccagggaaaattctctccttcgtgttattgatactctccgttcctttctccaaaccccggtggatggagtctctgtgggaatctctcttaaagagcaaatgatggtctctgtgacctcgattttgatctcgctcgaaacctgttccgatcgaatcccggtgaggctcttagaggggttggtagagttgcttttgatggttgttaataggcctaatcatgggcctgataggcagattcgggtggtcgcctgtgaatgcctccgagagttggaacaagcttacccttgtttgctctcggagattgttggccacttgtggagcctctgccagaacgagcgcactcatgcttgccagagctacattctcctgttcacttctgtggttcgtaacatcgttgcccataagctgagtgtttccatcctgagtaattctgtgcctttggtcccgtttagcgtgccgcaggttctgctgagtggttttggttcagtcaaggagggctctgccgggttgaacttcaaggagctgaggagggctttggcttttttgctcgagtggccgcaggttttgactccttgtgctatgatggagttcttggccatgattatgccggtggcagtggctttggaattgcaggcatcaatgttaaaggtgcagttttttggaatgatttattcgtttgatcctatgctgtgccacgttgttttgatgatgtactcccaatttttagacgcttttgacgggcaggaaggcgagattgcccgtaggcttatgttggtttctagagaaacacaacattcgttggtatttcgattgctggctcttcattggttgttgggtttcaatgaattactgctgaaaagagatgctaggaaaacgaagtcacttgttgatatgaatctaaacttctatcctagtgtgtttgatccccttgctcttaaagccatgaagcttgacatgcttgctttctgttccgtttgtcttgatatcataaatatagagactgggttggttgggggtgagagcaatggaaagacagtggtgaagctatttcaagatggccttgtctctgtgtcagcctttaaatggctgcctgccgagagcactgaaactgcactggcctttcgtaccttccgtaagttcttgattggcgcgtcatctcattctgacaccgatccttccaccacaagaactctgatggagtcaaccatctttcatactgtgcaggtactcattgtgtttcaaaatgaaatatgaggttttgcatctgctggactggagtagctttatttttttagttcttgaacctgttgatgataggatatgttcagttccttcagattttcttctttctaattactgttgttagagaccgcttagttcatattagtatatcaagtatcaactgcatgttttttgcttcagaagggttttcgccactctattatgaatgtcacagtatttgtatgttcttcattagtctgtctgtattttgcaaatctcagtgctgaatacttggtaactaggaaagaacaaaaagaactagcttacgaatttcatggtactttgcgggatggggaaggaggaagggtcaatgttcagcctcagatctgcgtaaattttaatgtttacatctttatttctcttttcttcttcagggaatgctagtagatgtgatattgcagtgtcagagattggttccagtgattgttgctttgattgatcgccttttgagctgtcaaaagcaccagtggttgggagagaggctgcttcagacttttgatgagcacttattcttaaaagtcaagatagattacaagttggttacatgcttccctatgtttgatagaattgctgaaaatgatacaatccctcctcgacgactgttggaacttcttactagtttcatggtgttccttgttgataaacatggcccggatacaggattaaaaacctggtcccaggggagcaaagttcttagcatttgtcgaacactgctgttgcaccacaaaagctctagattgtttcttgggctatctcgtcttcttgcatttgcttgcctttatttccctgatttggaagttcgtgacaatgcaaggtacaataaaactgattttcttctattcaataagaagtaagaacttttttctgttttttaatagatagtgtttgccattttttcccctcaccatcaagtattgctctttgcaggatctaccttcggatgcttatctgcgtccctggaaataagctcaggaatatgcttaaccttggggaacaataccttggaatttctccctctccaccgacttcatattttaatgttcaatctcctcggtctagtcataatgtcaagacaccaagaaatatatcatcctttgtccacctagagcgcttgattcccctactagtcaaacaatcatggtccttgtctttgtcatcttttactattggaagcaataagtctggctatatagaggacatcagggacgcagagcccataatagaggaggaggaaattggtggtgatagtactatccagattttacccgaaaaagataggattgatcacccacccgagccattgcgtgtgatggattcaaagatttctgagattttaggaagattaagaaggcatttttcatgcattcccgattttagaaatatggcagggcttaaagttagaatatcctgtagtttgaggtttgaatctgagccttttaaccgcacatgcgaagtaaatttaccagctggtggtttggattcagtagacacccttcctgctatgtatgcaacggtcctcaatttttcttcctctgcagcttatgggtctattccatcatatcatataccttttcttcttggtgaacctccaaaaaatgctaacatctctgatcaaatcgttgcattagacattgttcctttagaaaatggttctggagaagacagaaggtttagagcgtctgtaatgattgaattggaaccgagggagccaacgcctggtctggttgatgtttcaattgaaacaaatgcagaaaatggtcagattgttcgtggtcagcttcagggtatcactgttggaatagaagacatgtttctcaaggctattataccacctgatgtccaggaagatgaaatacctggctattactcagaattgttcaatgctctctgggaagcatgtggtactagcaatactggaagggagacctttccattaaagggcgggaaaggtattgcagccattaatgggactcgatcagtgaagttgctcgaagtccctgctctatctttggttcagtctgtggagaagtacctggcttcatttgttgtgagtgtaagcggagaaccactcatcactcttgtgaaggatgggggaattattagggacatcatttgggaagatatggcttcgcctgatgatagcgactcgagggctgattttgagagaggccctcttcatcttacatatattgaggatgctggtgaaagggaaagcatcatcaatatcagtaaaagaaacttgggtagttttttggttttgatatttcttccaccaaggtttcatctcctcttccaaatggaagtaagcgatttttcaactttgatgcgaattcgaaccgatcattggccttgcttggcttatatagatgattatttagaggccttatttttggcatagaatgatattcttttggcaggggaggtctttcataaatccccatttagggagtactttgttcaatgaggtctaggcattttgtttagtattctttcaaaatatttgtttaacagtgagaagggtaattttttgtacccagaataagcttgtgtacatacctctgcgggtgagagtccttgtatcattatctattgttgtctagaattttgaaataataattttatgccattcttgttaatttgcttcgaaattggaatacaagcttcttgtcttaaataaggtggttttttttttttattatttccaatttgtataaattttactgtgtatgcaaataatcttcaggaacaattaaaattgtaaccattttacatgtgcatttttttttgttcaactttagtgtaaatggttcttttttgtttgctttcataacttaaaaattatttttattttataaaaacagaaaataacttttaaaaattaatatgggttgtttagttaaatattttaaaaactgagttttataaaattaaaaaataaaaaatattacaatgttttctatttttaaaaataattttttattctaacatattattttatattttggctcacatatctagactttagacctaaactaggattcggatccaagaattggaccccgaccctggatcctgatcatcgaccctaacccgaaactcaaccccgaacccgaacccaaacacggatctagaccccggatctcagactcgaactcggacccgaacccaaacctcggacccagactcaaactctgactcggacctcagaccaagaccaaaaccagaacctaaacctgccccggaccaagacccagacccgaacctggatcgagacccagacccaaaccttgaactccggacccaaaactccgggcctgggtcttagtccgggatatgggcttggggtgggatctggggtcggggtgttgggtccaagtctcggtctcggtctgaagtaggattggttcatgtcatggtatggtgtaaaatattgagttttttaataaaaaaaatctaaaaataattttaaaaaacttgagccaaacaccattaaatttttaaaatggcataaaactatttctattcttacttctaaaaacaaaatttcgaaaattgaaaaacacagccaaatagcttgggcttaggttttttttataatcatgcttagttggttggacttaggcgttgtttagctttataacttaaaattgttttcagtttttaaaaacaaaaaaaatgaattttaaaaattaataggagtcgtttggccaaattttttaaaaattgaattttaaaaaattaaaaaacagaaacatcgaaacgttgttttttattttcaaaaataatttttcttttttttttttttgtctaacataatatattttacatttttgctcatacccggatcccgaccatactcgaacctcggactcgtactcagacccaggtcccaggcccggaccccaaactcaagagcccaaatcttggacccaaactccaaacctggacccagaccaagacccgaactcggacccgaatcacggacccaacccaggacctcggacctagcctcgagtctagggtctgagttcaaggtccaagtctagggttcgggtcgaagtccaagatctaaggtttggggtccgggtgaccgggtctggcgtccgagttcgggtcaaggtttgggtccgagattccgattcaaggtccaaattcgagtccgggtctagggttcgaattcgggtcgaagaatccaaatccgagtctgggtccagggtgcgaattcgggtccaggttcgggtcaggggtccaagtccatgtttggttacaaggtctggtccggagtagaatcagttcatgtcatggtatggtatagaatattgattttttttagaaaaaaaattttaaaataatttttaaaaaacttgagtcaaacaccattcaatttttaaaataacaaaatattgttttctattctca

SEQ ID NO: 111265 - DNA, 7398 bp, Cannabis sativa
ttccgtgaaaccgtatttttgttatttatttattttttttgttatttttgtgcatttgtgaaattaacccctatatatattaacactgtttttatccaaaatttcttactcaatagcattggtacattttagatataaggataaaaaaaaatgtttatgaaaaattgtgtagacgtattttttatccttttgattaaacagtcaagatgacataaatcttgaaatcagtggataaatatttgaggagcgttaattacaatattatattataattttttagtcaacatctatgtccgatattatatgtcggaatattttcttttaattttttttcatagtagtattcgttatagttataatgtcatctctataaatttttataaaattttgaatagttttcagtaccgaaaacagaattcttgatattttaatttaccacgcgtgttcaaaaaactttaaatctattttggcattgtaaagtattcgaaaatgttcaaaaatttacaagaacgatatcgtaactataacaaacacagctataaaaataattttgaaaaaaaaaaaaaattcaacatgtattttctgacataaaaatgttgactttactcatgtattaccaactgagctacactatcactagtcaaaatttgagtaaagtgaatttatatgtaaacaaattatataaatacccaactgatatagttatggagtgacacaaatattgaaatatagggcaatcacttgtcaatgctaccaaaagaatcttttaaaccattatttttactttcaattataattctacaaagcttagcttattcatttaagctacttaattggcaagtctatctccccccatacatattcatgtggttcttatgaaaacaaacaaagctcagcaagaaaattagtcaaataaataaacaattttttaacgaccaacttattcacatattatagatgcttatgtagtttactttttcttagtccataattaataattatacaataattttatcaatatgaaatgtctgctgacatggaaaagagagttctatatatatatatatatatataacatttgcaagagagtgataggaaactttcaattttgaagattttcaatcatttatatattgactagactagctttcatgaacatggatgccttatgcagccatggaggaaatgttgtgacagccttgaatgctaatgtttatggaaatggcacccgaactgtagttctagcacatggttttggtgcagaccagacagtttggcactacctcattccttacttagtatgttatttcaaagttgtggtttatgacttggttttctcacccaatgtaaatcataagctttacaaccaaacaaagtactcgaatttcaacggctatgctgatgacctgctctgccttcttgatgaactcaatgtcaagaacactttatatgtaggtcactctatgtcagccatgattggttgtgtagcttctataagaagaccagaactcttccaacaacttgtcttaataggtggctcaccaaggtattatatgtttttctgctctgaaatgtttcattgggatttttcaagtctgtctttgttatttgtttgtctgattttgttttcctattcttattatgatttattatcatattaatagatgtgattgacttatctgttggaaaattgcatttttgttcacagatatcttaatgggaaagattataatggtggttttgagaggctgcaactcagcagagtcttcaaagatatgaaaaccgatttcccaaactgggttaaaaggtttgctccaatagctgtaggtctaaacagaagtgctgccattgctcagtttgaacatagtttggggagaatgaaaccaaagattgcactgagtgtagccaagactgtttttctaagtgacctaaggcagattctacctcaagtttctgtgcccactttcataatccaatccgaaaaggattttgtcgttccaaaatcagttgcattcttcatgaaaagaaagctaggcacccctgctggagttaacatacttaaaacagaaggtcattttcctcagctgactgcttaccatatggttttgaaagctttgaagacagtttttcatatcaatagatagcaagttcagtagcttgaagatccttttatgagctattctcgaccgtttgccttaggattagctcgttctatttctcatggtgaacaagggaagggatatagctcagtgatagagtgttgtcctaacgtggtcgaagtagtagtgtttgaatagatgattagttttcttctattttctcataccacttttatgtatgaccaaaaaaaagagcataatttgtccaagtacttcgaagtttcaaggttttagtgtacctctccatttccacttagaccatcttgtttgttagatttagtctttatcataattgaatgtgagtagcattaccttgtactttgtttatcaatgtattcaatgttgccacgaccgttgtggcctttaatttatatcaagcacttaatagaagaaagtataatgtattaggtttaggtggattggtattgtcctagtattttggtatcatgccaccttgcttaaatcattaaaataaaaataatacaactatatcaattttaaaagatgccaaatgcattcaattaagaaacacgagtttatttcaacaaaaaaaagctttagttctgtaaagaatgcctttatctgtacaaatacagaagtagaacaaaagataatacattacaagaaataaatactcatcatatactcctgataattcccaagggtaaaaatgtcttacagagtgaatttaggtgtcaaaatttttcttccaaataaataggtcaaaccccaaaagtacaccttcatttggaatcatgatttttctacattccccacaccccactttgtattgaagattcttaaatgtagcagatctccgaaatccaaaagggatgtatatgttactccagaatcctcaggtgtggtgcgtacccgaaaacgacgaaaacttgtattccagggaaaatttctgcgctctctgtgccccacgcatgaagagactaacttaactttacctcaacgaacatgaacaacgcgacgcttactctgctagtgtgctctcaacgtattccattgctctctttttgacatgctcaatcctctcctcgtcaccaagagacttctcatactccaaatactttttgaataagaactataaaatcagatagaaatgaacattcaataacagtaagttaagcgaggaaacgaaatatttggctgaaaggaaaagataagaggtacatactttcatttttttaggtgcaagactcaaacaagtcgccctctcaaatagtgcacggatcacattcacatctttaagtcgaatctcctgcaagcaattgacacaagaatgtaatttctacagtgaacagaaattgaatagacaagtaacactagaatgttgccatcccacagttttgataagcttggaaataatgtaattgtgtcaactttgaaagggatttacttgatcaatataaatgctccataagtctgttctcttgggatattctttcaaaattccttcaaacatggatcttcccatatgaggaacaccacggtggaactcacgaatagccgtctgtgtgatgaactttatgtgtttgtgacgtggaaggcttaacagcgctcgattgataacagcctgaactgcatcttgctgttgtcgttccaagagcctgtccacccgccgtaaccaaacctaaatttccacaaaatatcgatgcttaattttttatgaatttggttttctgaatggaaaaaataacagcattaacagttcatacaataataccttgcatgactgcttgaactttctggtcatcttgtcaacaagttcatcagctagcccaagtttctttgtcctttcatacaaccccaatagtgctatataaacttttttgggatcattgtattgcaatgccctttgaaatactttcaaaacagcctcctgaaaaaaaaatccaatttaagagatcttaataccgatgtaacacaaattacaagtggaactacaaagtgtcaactttacatgatgttacctcaggaggatttccatgttcgttttccaaattaaaataagccacccaaatattgagcttctcattctcttctcggatatttattgtttgcaaggccctaagtaagacaaagcaacgtcaaatgacaagagtcaactgagagtaacctttcagttctaagaagaggggaagaatattaagacaattggcgattataatttgcaatgtgctacatttgtaagagaaatacaaaaaggaaaaaaaaaaatacaaaatgaaaaatgcaattggaagagaagagagacaacaacaaacttaaaaggattatattattactactactactattattattattattttcagattaccatgtttaaggctctgtgagaggcagggtaagagtgcttatagttttcttattattaaagtaagcttagtgtgaagtgaattataggacagcttattgggttttcgaaacttaacaacagtatttatttttcacagctggacaagccggacaatgaatttacttgccaaccatttattgtggtagattactctatatcaaaggtcttttacttgaaaatcttaaactagaaaaatacataatatgtaactgtacagagagacgatgatatctgatagcctaggatgagaaacaaataataacagaagatgtgttactgccatgaaaaaaagacctaaacttagaatttattcaaacatcagagaaaaatgaaatttaagcaagattctggtgaaatagcaaaaggcaatgcacatttgggctgaagggctgaaagagtacctttcagcaatagaacgagctttttcaacgtctgccatggttgactcagcaaattccatgaattttatccaccaatagctgttatttggagaacttctaacttgtttctcaaattcctcagcagttcttggcatatcattttccagtaatctttcttcagcagctctaatttctttctccctgcacaaaaatatttcaatattaaaggtaaaaataaatagggggatttggggagggtggagaagtttcaattggaaaaaactacaaaaatgtgaagactaaaataacctctctttctttgctttcttctttgcttctctcttgctcttttcatctagggtgtctgtaacatttataagctcttgattttgaatagttataccatccacattttcctggtatatatcatcgagggccacttcaagtggaggaacaaaagccctggattccgcttgtgcaagaatggggatttccaaatttaaacttgggcattcaacatccatattgtggattccttgaaaaccactttcaggtaatgataccaacttagtatcatttacagaactgttgttaatggttgcatcagccacttggtctgaagattcctcagcatcatcattttctagaacatagaaattcttcattccgagagagattcgatttctttctgcatccacctaaaccgaaagtatattgtcagaacataaaattaacacattctgttttattgaatatcatacaatcattttccaccaaatctaaattgcaattctggataatccaaaccatagcaggaccgacattagttctacaatgatcaggttagataataaacgattcctatcttgactacaagtaaaacacaaatgtcgaaatgcatagaaactgatgtatcataaccctgaatgagaattagatttaccttcaatatttttgctctcactttctcacgtgctttgtatttgctttcaatattctcagtacggtcatctgaaagctctgagatatggcacaatccaacctgaaaataaaagaaaaattaaaagtaaataaaagaaatacatcaaggcatttcacatagtaaataacaagcaaccccaatcgaattccacacactgtattgctctgtacatagagcaatccaacagattcccatttctattacaattctaagtgactttacaaactatctgattctatgagaaacaatcttgtttcaaaataattctagggaatacttccagctaggtaataaagactggaaggagtaggctggacaaggaaacgtcaatggagatgcaaagttagttaatatgaggaaaaagtgatatatcaaaatggcattggtcagtggtcaagaaatagtttacagaatcataagatcctccagattacacactctgcttacatggatcttcatttaggatttactccaacccacgcaagatacgggaaacaaaaacaaataagttggttgtgcaaataaatttccacatgttgacttcacagaattactttctcattttcaggtaaattttaaatgcccattttcaggaatcaaatcacaattataattatgcaaaagtgacttatcctgtaccaggttggtgttgtcaatagagataaataaaccatacttctccacccgcttaatcctgccagaaataatatctcccacgtgcaggctacttaaattagtaatatctgattttggtccactgcttgcacccatggtcttcaatgtaacttcaactcgctttgatagaggttccacagataaaatcctgtatcgaaactcttaataaatgcaacccgtattcatctgctaatagaaagaactttagacaactgacagatgaagaaattgacttacctgccagtcacaagtttaccaatggggaattctttgacagggtcatcaacaaatccatcagataaatttgaaagaagaattttggcatcaagtctccgggagagaaaaatgaaacaaccttttggagtaacatttttaacataaccctgaaaagcccaataaattatttaagatgacatcggcataatattgtagggcaatacatgatacatgtattttataaggaagagatgttttacagcacctgtatctccatattaggatgaagatcttcaatcttttccacacacttggttttagtgggcctgcataggtaccagagagtaagtagccaaatgaagaagaaagaaattaactgaatggtatatttatgtattaaaacttttatttgttaattagaaaaaaactaaattagattgagctgcaaacaataaggtaatctttgaagaataatgaaaacaaaaaacctctgccacacatttggttacagtgggcctgtatagataccagtgagttagtagccaaatgaagatgaaagaaattaacaactgaatggtatatatatgtattaaacttttattagtgatagtaatt

SEQ ID NO: 111266 - DNA, 10592 bp, Cannabis sativa
  modified_base (138)..(140): a, c, t, g, unknown or other
  modified_base (10530)..(10561): a, c, t, g, unknown or other
cctaataactaataatatttttttgtaatttttaattgtatcactttcaaataacatagaaaaaactagcataaaatttagtatacgtgcctcgcacgtagctttttactagtatagtatatataataataataatannnataataataataataataagacgaagaagaaagagggaggagtggctgcgactggggtgggatgggatgttaggttaggattttttaagaaaacttaaatattaaaaaaagtagggtttcgagtgaaattcaaacacggaataatatagtttaacaaactcgaacttaatccgcaatacatccgaatgtcacccgaactcggcctacaatttttgaaacccataatttctggtactttcaaatccaaatgtgcaaccctatttgatactttcaccattaaaaatataaattttggtactttataaagttttggtactttatattttttaattcaaacaaaatcaaaattaaatataaataatatatattcaagataataataaatcacactgacttcatacatatattcatttaaaatttaattaatttgtaatctcttaaataataaatatacacttttttttaaagttgcgccataaatattatttttttactataaaaaaattaaatctaaacaaattattttctacataaaactaaattatcttaattttatgaaaatattacttaaaatttaataattaaatcacactcagttcaaatagaattagaagtaattaatttttattttaaatttttagtatataaaatatattgtactttatttatagcttaagagtacaacactttcaaaatatataaatgatgtggtatttttgtaaaaaaaattctaaaatgaaactaaatttcctatgtctattacaaatagataaaatagatgaacattattttagaatgtcatactcctacagatggattaatttttagatgaaaaacctttcatgtacttgatagtgaagaacgttcgtcacacgagtaattttgaatttaattagtactggtgaatattttttccatattttcattctaatggcttacaattttataaaattatgctaatcaaaccattttcaaacttattggagttggagccttttaaattaatatattaaaagaaaagtaaaacaaaaatggttctcttttttctttcttttttctttaacccaacgatgagtcaaaaaaagatacaaaaccaggtgactgagcctgcaaaatcgttgtctataattagcatcatcgtaaaaaattaaccactacacctccacaatctctctaaaaggctctctcgtttataagtaaggaattacaggtaacccgaacttcgaattacgttgaggactactcaattttcatagccaaggatttttctttccagctccgcttcttttaggagttgtacctgtaagtttctgtcatgttcaagagaaaatcgaatcaatacatgtccaaaacaaaacgcgcaagcaagttggcgaaaagaaaaaattatacgtactttagacttcttagtttttcctcgaatcctgttctttggaggttttagtttgtatagccggaccatccaatggtgagttgtgaagacctacattataatcaaaagccataatgcattatcagaacattggatttggggaggtactatataaggagaacaatcacaaattacttgaaattttgttttttctattaaatatgtttccagggtttgcaatgaagattattaaagttaattgttatccaagattggagaactaatatgccaaaggttgactttgagtttaatgtactcatgacttctgctcatattatgagattgattctgtcttcttacctcttcaaaatgggtaagtttgaaatatttctttccaatctctgtccgcctcactctatcaaagcccttaccatctgtttccacaaatctgtagaaaaaaacagatttataattattaacacaatattaatgtagaaggaagaacaaaatgactaaaaaaatgagtgaaatgaccaacttccgagtaaacacgaacctgtaatacgagagtttgtacatgagcgaatttagcatagttggagttgcttgagaatcgatacgatactgaccatctctctttagacagaaacaagatgagatattgtcaagattctcttagcatttcaaataaaatccaaacttccaatataatctagtttcttatttgaaaaaattttaaaaagccaattactggtttagcagtttgactgaataacttactagataatcaggctccttgatgtgagggaagacacccccaccaatacgaaccatccacaggaacttattgatgtcatcactggggtagccaacgagacctaatgagaaaagcaacgtatcatctcaaagttccagttcttgtttaggaaaatcacagaatagatctaggaaagccaacctccaaaaaccacaagaacatattttacatccaaggagttaaagatttcccaagctgccttttcaggagaagacatggcagtaccaacagttgcaatatgtgtgttattccaggtattattgtcaacaatgacggtgcggttagccattgcagtagtctggtacccataatcccaccaagatgcaacctgcaaaacaagttttagaaagacaaggcatcagttactctttggttcagtaaagacacgatttcagctgcgcaatatttaattgtacaatcagaggagaaacgatgggcctcaagttcaaaaagtaggaaaaattcacaataagagaggaaaactgagtaacagggaacaaaatgcaataacaaaacggggaggttctcactttatcatccacctcagtgttgtggcttagccatgcataagcctccctaaaatcatcaaaaacatgaagaccatcgtgggaatgagatgttagaacaatggatggggctgaatacgcttctgctgctgcccagacacaatgaacctacaaggaaatagtttaactcaaactcaaagctcctaaagataaatttcttgtttatttatatcccatgattgcatgtgattcaatcaagaaattagaattagaagaaattttaccacatagaaggcaccaagcaaaacaagcaagaaaattgctatgatagatgcctcaaaaggtaaaaccagaagcctcttctcaattttagacttgatagatggcttttccacagcagctacagattctttatctttcttcctgttctttcttgatggtcgttcctttaatgtatcttcagttttatcagtttttgccacatcgttctctggtatgacactaacagagctcgtctccgctgccttaattgtgaaggaaacaaacagaccaaacaaatagaaattttagctcccaagtattacattgggataatttaaaccagcagcacatagaaaatatattacatcaatttggggtttcattgatgatccaggcaactggaactttattgatcgtgtaaaaacttcaaaagcttcagagagagcaatgccagacaagatgcaagctgctggggcaaatactagcataaggcgcacctgtacattacacaaacagataatcatgctttgacaaaacggtgtccagaaggtgaattggctgtcaaaacgttgttcttaccatgactccagaaaagtaaactgatgttactatatagaggatcacaaaagagcttgcatcagatagaggtgagaagcatgcctaccaacagatagatgtcattgggacagatacaaatttttaagaaaaaaattcagaaatatatatttatatatatatatatatatattttgtgttgaaaaaataacttacaacaatcccagcaggaaccaagaatgctaaaacattaatatccataaagtaagaaggccaagttggtggttgatgctcactaacactagcaataattggaatgtacttgcttgcgtatgttctggacaaaagcagaaactagcattcatcattaatgaagcgacataggaaatctgatttcttcatatttttaataattaaaatctgggaagtgaaatcataatagaacataaaacaacaattagatcatgtctcagcaaggcacaacaaaaacccatatatttttataggaagggagcagaacaacagtatcagttacttaaggccaaacaaaaccaatgccataacctaatcaggcctagctcacaggttacgacaactgagaaatcaaattaatcaacattaagtaccccgtagtttctgttggccacatgtttaacacattcaaaaagatcaaggttggcaaacaagaaagagataagagtagagaagttttacggatcaagtagactaagacttcttccactccatccttttgttgggctagaagctaccagagctacaagtatagctactacagcaaaacagagtaccctgatagagaatgaacagagaagcataaaggtcatttttaaacacttgcaacatccagaatatgttaaagagagagtaaatgaaacttacaggccaagagacagaatgagtgtgacagcaactttgaacatttttgcagacagaagacctttaatataataaacaagagccaccacatggataataatgaaaacctgtagaagaaaattgttagccaaagctcataagaattcaggtatattctacaaatacttaccaagaaggatgcaaaatgttctgatgtcatgactgcattaaatccaactacaggcaccaaagcagctagtaatgttcccaagacaacctgcaattacaaaataagattagttgcaatcatgacttccacaaatgaagtagaagtaggctttattgtggaaacatccaaccagatacctacttttacagtgatattataaattggaaagtggtggagtagcacaagaatgaattcttgtaaagaacttattacctaatctgtttccaatttcatggtaactagttaaatcaatttactcatattatacttcacaacgtgcacaaagttcgaaccacagttacaattataaaagcaagctaacctttcaatggatctaagccattcaaccaattgcaagaaaataactacatcttcgataaagctattagcctatagccttcttgttaattagagtatagcctacgaacttggttaatggaagaaaggttatgacaaagtactgcatattaaagcccaaatttcaattttcattagatgttggtcacacaagtttttcaagtgtaaaattgttaaaattaaggcttccctttggctgttaattttctatattatatccaagaacatagcatacaacatgctttctccaatttcacactacaaattaatttcattttcaattctttaaaagccttgtaagttgcacatacttacaagaggagcataagcaatgtacaaccgggatgagtagcgaccagtcacaatgcaaagaagaacatgcatcggaataagattaattataaaggtgtagcctccccaagagcaaacctgaaaaaaattaacaatatgccatcaactatgaatataatggggcataagaaagaaagaaggaaaatgaaactaaaacaaaaacacacaagacattatgcattatacattatacataccatgtaaaagtatgctatggagtttaatgtagcgtaaaagagagatcctgtattcaatgtctgcaaacagtagaggaaaacagaaggagaatacatataattagtaatgtattataaaagtgaaagtatgcagtcaaactactaactgaactggagtactttgttcttttagtaagcctatttttaaatgaataaaagacacaaaccaccaacaacaaaatggtcacgcccagccaaaagaataaaaagatgagaaatgccaaatatacttgagtcatcaccaacctttatataaagatagaaagtgataatcaaagcgaatatggccacagcttcattgtcatagcttccagctacagaacgtgatatgtatgatggaacctggaaatagaataagaagagaagcaaatagcattgtcatgtgcacagatttttaggatcttgtaaacgacactattaatgttatagcagaatgcagcgatatatattttgtgaaagaatgtcatacaactcgtatcaataaagacataaagacatcatatgacatttgtactagtaaagaaaggtaatacaaaactagaagctccatctgtcagacaagcatacaattttggaaatgaccaaagaagaacagccatgttacagcgcctaataactcatacaaaataatcgaacaaagcccatgaattcctcaatatacatacatgtagtagggttgggttgcaaatattccaaaaacattatgagttttatttagagatacactgatactacactaacggataaataactaaacaatacgcagatatatgagaataaactgacagcaaatttaagtcagagaaatttacttaaaaataaaacagtaagagtttcaaagaactgccaagagaatgagaaaagatcgatgttgcacatcttctgtcttaattaaaatatggaaaggaaaaataaaacaaaagagttaaaaatacccgctatgtaatttaccattgccaaaagagctgcagcagtcagtccagcaccagtacctttaacttcctataaaataggttaaattgagcaacattacaaatcagagaactattaaatatttttgaaaaaataatgaaggatgaaagaaaaacaaaccttagtgagaagaaaagttgcccaggaagcaaaagcagaaaatatgggcgcagtaaatacacaaacagtctcaacagtcagtggaatgtttaatgaattcacaaacctgcaattagtaggtagagacacataagtatccactatccactgacttagggaacagatgtaaacaccttccttttgtttttgtatttgtgtttatggcttccttgtcattctttttcattatattttgggtttcatcaggcaacaatttccaaaaaagaaaaaagtccaaaagcaagtcgtcctatttcggctggcaaaaatgaaaaaagagagaaaaaaactgtagtatttgctaacaatatgttcttaaatacctaccaccatatagatcctgctgtcaaggtcaatcctgggtaaacagttccaccaatcacacgcccaagagggtaccttatagaattcgtgacaaaaatcaagactgttaaaatgcaaagctaaaagaacttgacataataattcaactaaagattaccaagtagaaaaattaccatgtccgatcatcaaaccagttccagaattcatatattccactctttgtcagaaactgaaacgaacatatgagcagatacttacttcgtattgtttcacaaatttgtgacataacaagatcgatcaaatgagaagcacaaaagaaaatattgaaatttcagtgtacaacactgttttagagtgaaattgaggcaaagcaacaacaaaaccaatggtacgaatccaattgaaagagaaacaaattattaggaataaaacatcaatacaaagaaagaatctccttttcaagtaaagaaatcgtacctgtgtgactctgtaattgaaataaggatcgaactcgtgaattacactctcatacttaatgacctgtaaatcattcaccaggcattgtgaccattaggacgaatagttcacaaaagttaagctcagattcactgaatgaatattcaagcaccatcagctttgctcaggagatacaaatatccaaaagaaaatgataataaaacaaatattcaatctctacaattatcagaaacagttatgataaaacagaacctcaagccaaattttaataaatataccccatttcgacaacaaatattcaacaaaaactccaaatgtcaagatatgcgatacatacattagattatgtatgactcagaatacaactttcattcattatattccattttcttggaggccaagcggaagtgaattgaattttatgagtatttagccattagatctatcaaattataggaaagcttcaagatcggagagcttacagagaagagtcggatcgagaatgccaggacaccgatcaagatgaggatgaagacagagaagacatttccgaaagcgttccttaaaacaatccccgaggaggtctccgaggccgccattgacggccaaaatagagctctgagttacgtctttggaagagtagagggagaaagagagtgaaggggttttgcagggtacgagtaaacgaggaggagacttgtagtagtttgagaactaccaaactacccttgtaattagccaaattacagaaatgggtctcgcacgacatgtggaatgacacaattgtccttttatgtccacgtggcaacttcgtatgctatatgtgattatgcgctgcgattggctgaggactacgttgtcttccacgtggcatcatcttatatgccttgtgatattataattttattatttattctctttctacaatattgtaatgagatttgttaaaaaaaatagtatttattatttattttttttaaaaatgaatatttattatgttatttttttaaaaaaaataatagtgtaatgagatttttttttcctttttgaaatgatagtgtaatgagattaagacaatggaaagcgcaccacaaaataaaattttaggaaaaatgataatttctttaaaaatgattaccataggataatttcattacaaaataggataacaagataataatattcggttggtcaatttattgatatttagtaacacaagattaatactcactcattatattgacaagataaaatatgagtttagtaattaataagagaaaaacacaagatttataaatagttcactcccgtattctaacggtaattgagctacatctactgcgagtttttattcttcacaaaaattacaatagaattggctaaaataagagctcaaatttctagatctaatcttgtaggaacttttctaaatatgaaaaaaatatatatatgtatatattagagctcttttttataggcgatgagatttattaaaatattaataaaataatacaaaaaatattagataattattttgcaataatttagaccattgatgatgatctaatgtctaaaatgactctggatggtgatcgtcaaatttcggggcttgttacgtgtctattggatcgttttcaggtgatcgatttgcaaaaaaaatcgttcttatcttgaagatgaaattttaacttgaaatcttcaaaattgcagtatgagtgtgaaacatttcttgaaagagcttgaaattagctttcaaatacaactagaatcgtatcaatcggatcaatattgattgagttatggtcattttactgaaggttgttcagcaattgtcgcccaggttaacattctgacgtcaacctagaagcaatatgagtgggaaaacatgttggacttttattttttgatgcctaagtgatatcttgagattagttagccaatttcttaattcgggtgaagtcattcaccagttctcaaagatgccacttttttgcaaaatcgggtagaatcaaaacttcctaatttgcgactaatttgtcgatattccactttgccaaaaggttaaatatcaatgtgtgaatttaacttgtcacaagtcatagctcctgtttactacggaaaaatagtaagatgcttgagatgaaactggaattggataagcagattccagcgcaccaagctatatgtcaacatgggcgttgagtgctcttcggagaacttttcatgacactttttgttaattctatggcattcaagattgtgaatgaggtctcttaccctatttttgagtaaatattttcccccaagttaaatttatacctgtgtgaggttggcttgataacatgaactaaacccattttatgcgaaactaccagttaggcatcaattttaacttctaccaattgttttctgtttgtcttcataataagaactttaaaaatagttattctcagatggactaggaattttaaattttgaaagaaaaaaaaaaaggcaaggaaagcaaaggaaaataaaagataatagatcttttactctcttatctttcttttaaattttaaatttaaaaagagttcttattgacttaggagtagaggattataattgttataaatacagaactcctcttcactctctcctcacttattccacaagccctcatagagagaaattgagagtctgagtattttgctttcaatcgcttttaagtgttctttagcttctccagatagggattttttaatttctttagtttttttgtttttaattttttttttcttctcccttcttgtaaagcttgattcaggaattcaaaatctggttagaaatccttgaactccattgttaagacctccaaaaattaaaatacaattttcatgttgggttttgtgccctaannnnnnnnnnnnnnnnnnnnnnnnnnnnnnnnaattaataaagatcataaatcattttatgtt

SEQ ID NO: 111267 - DNA, 6779 bp, Cannabis sativa
  modified_base (50)..(60): a, c, t, g, unknown or other
  modified_base (738)..(739): a, c, t, g, unknown or other
acatagagatttgttatagaggtttagcccccttgtgatagcgggtaatnnnnnnnnnnncttttggttgtattgatacctagagataatactattcagatcgctatatgtaggatttgatataaccctctataaggatacaaagtatgaatcaagtaggcaaatctctaatgagagagatgaatagccttagaggcgtgtgagagatgaagtgagacgagagagagagccctattgggcgtgagccagagagagagagaagagagacatggctttcagacttagaactatttagaggctaagtgacttaggtttttaggctagggtgaaggccgttatataggagggctaaaccctagattacagtttaaatccctagatatttacgtaggttgttagataattataaaagaataaagtgcccttgaatctggatattattcagccattttgttaggttttcagggcccacttcccagcccatgccttgtgtccatgttttgggttgtacatagagtcttgccaggtcaatcatggccgcccatagacctacacggaagtttggccgggcatggtcctgccaagtcaatcctggtcgaccatggtcctaccaagacctagtctggcaagacaaagcctacaggaccttgtagatcactatagctccaccaagaggaggccagcctttgagtgtggagactagccttttgcaagttgaggacaactttgtacattgtnnccttgaagaggtcaggttcccttgatcgaacggaggctcctttggtccgaaaagtcactttttggccggccagcttgtgcacagatcctggccgccctgtaggctcacctttgctggcccataggctcctctttgccagcaaaggatgtgggtacatctccttaagggctcgcttcactcctttcagttgctacttgccggttttgctatatctttcatggaggctctgttctgctattggcggggctgtactccacctgtattctatctttggcttatgtggacattccatgtcaggtggaaagaattttggataacatgtgtaaatccaacaacttataagctttcattcccataggatatttcgaaaaaaattcaagatatgactctaggtgagaacttggatccattttgattcaagattaaagcataggcaagacaaccaaaagtttcaaatgataatacaaaggaggttttccatgtaagtttggaacaaaagagctctaggcacattaagtaagtgttcaattttgttgaggtctttggacacaagagtgataatgtacaatttcaagagacctaaacaaatttgtaaattgcagccactactaaaaaaatgagtgtttttcgtcagtcaatgttactgtttataaagttgaccgacgtaaatagtgtgccaaaaatatgattgtcaattactaaatgacgctataaaataataacttgcgtcgtttactaaaatgatgctacaaacacaaccgacgataaaaaaaaagcaaaataattaaacgtgaaaatgttattcccgtcagtttattagagtcgaataaaagctacgtgagctagaaccgacaaaaaaaacaaatgggtaaggttaaaaaccgatgaaaaatacatctaaatcccgaagtccccaaatctatcccactgttcacattcgccttctacatttcaaagataaaaaagctctagcgattggctgctcccctctcttcctccatcgtcgaccgacgatctcatctcttcctctccattattggcctctgctcccctttactcctcgccattgttgaccgctgctgccctctcttccttttgaacccacaaaactgccctaacgattttgacccaccacttccaattgtttggttctctctctgagtcacacacgggtgggtgtgatgtctaaaactccaatgaaacatttcacagtcacagccacagccacaggtatttgtttttatgtgtgtataatatatgtgttttgagtttgtggtgggttgattcgatctcctttttctatgcttgctgagaaacccattaaaggaattgatcagaccataatcaaacaaattattagggttttgtggatcttttttttttcctcttgtataaatttaaggaatgagtttactttgatgatttggaaattttctcgactcgtgctagtttttatagatcatttccttaattctaaacttttagtggtttataagcttttggttagatctgttttatttacttttagtattgttttccctatttggtgtttggtaatagaaaattttggattcgaaaccctctattatgtttcttattgaatgtgttgggtcaagctctgttttgtttatttgtttgtttgctgaaaattttcatttatgttgtttcgtcatggaattggagagagagagagagagatagagagagagagtcaacattgttaattaattagggattttaaattttaccttttaacatttagtgatggaatgggagttgtgataaaaagaataataaggtctctatgctaactattactaattacagttcttagatcaattgagagttgtgatgtttgttttaaaaaatttccaaccaaagtttttttttttttttttttgcatttcggaagatgattattacatcttattcttcgtgtttatttattcttgaattggtctggacgtgggttagtattttacttcagcatttttttgttgactgatcattgccaattagctttattttaaaattcattctatcatttgtgcagaaatgagcttaagtgggaaggtgctggtcgtgggaactggggaacacccacagatgaaattgctccgtaagtttttaatctcttggaatgttggactcttaattagagaggtagtactactttatgcttaattactatctgtgcatttatttctcttctcaaaacagggaggctgaggagcttgttgctgaaactgaaactaagaagaatgttgatgttgagaagccattgagagaggaggaatctcctcatgccaacaaggatagtcctgtagctaagccagaagagaaggagcctgaggacaaggttgctttcattattctttttttattcgtattcaattatgttttatgcttcaagagaggttatcgagtaagtattcttaattctttattttttactacttcatgttaattttgaggaggtttgaaagataagatcaaacaatcaatttaatgttgggaaagatgtttttgcctgtaaggctttgaatcgtactaaactacaatatgttaggttgattaatgcttacacaatcctaattagagtgttgtttgagtaatgatccttttgtttttgttgatgaaaacctaagtaatgaacttatttgtgcattgatttatgttttggtattatatattattttattacttgaaaaggtaagcctttattgtttatatcagaccatgatttcatattgtatatcttgtcaggaaatgaatttggaggagtatgagaaggtactcgaggagaagagaaaggccctggttactttgaagacagaggaaaggaaggttgatgctaaagagtttgaatcgatgtagcagatctcatgtaaaaaggagaatcatgacatctttatcaaattggtatgactttgctgttctatttttattaactaaatgcctcatatagccaacttaaattgtatttgtatttagtgggtatttatatttcagggatctgagaaggataagcacaaagaagcagctaaaaaagaagagaaagctaagaaggtttcttcagtctcgtcctatttattgggttttttattttaaaaatatgcaagtgcaaatgcagggtagttctatttcattttttctcttgttacaaacataacatacaattggattattatttggatgcagtcttttaccataaatgagttcccgaagcctgctgaaggtgagaggttctattctggaggccatggacgtggtcgtggctgtggttcaagaggtggatatggcggtggatacactcctagcaacatggcagccccatccattgaagatcccggacagttcccatcccttggcggtaaatgagattctgctagtttctcccatcagctctaagtttcaaggtgccaatagccaaaacgtagggtattatttttagttattttattgattttagtaatatatacaagtaatgttaaagcaattttttttaagtaatgttaaataagggtaatgattgggattatgaattgcatactatcaataagacatatatgaaaacaaaacaagtttattaatttctctgctagtcaagtaattaattttgccttttttttttaaatagtcattttgtcttttatggtatggtaattttaagtagtgcatatttatctaagaaatcagttagtgaattagttgtaggtttatagctttgaaactggttttactttaataaaactgtcacagcttttggtgagaactgatgtaatacctctggcttgttgaaaatttaggacaaggatattatcaaactttctgtgactcttaaattatagtatggagtaagctaccactaagttatgcgaaggttatggaattgagttccaacaaaaaggaaagaaaagaaggttatgggattgattagtagagtagggaatctatattttaataggtcaaaataacaaatttctatttgtagaggtactaaatttgtgttctcatccctcgataaacatgttgattttgatataactatcacagatgtactcttctgtttctctccaggggcattattatgcatttgatcttcctcgtggagtacatgaaatacttgagttattgcaaggcaataagtaatgtagtgctaatttttgtcaacatctgttgcttgctttctagtcatctattctctttccttccactgattcttttttttagtaatttttactctagtttggaggtttttgtatactcagcagtttatctgtgctataggtagctccatatgaacttcatatcttaacttatttttttcaattatcctcaccacctgccaggctagacaagtccatgagctcaaatttttattgtaatgcttgttagggtgccaaaagggtgtgtaatgcttgttataacttataattgcgctcgtcattcatagagctatgctatcatctagtcatattaaattagatttgatcgataagttttttttagctcaaccttcctttgtttccttagagaaccactctcataattaattgctttagaccatcctttattgtaaataatatatggtttggtagaaatttgataatgtaggtaggaaaaattgcatgaaaatttgtaatttttctttacctacatttatgtttcattttataaccgacgcaataggtgaaaaaaaaagtattttagcaatttatgtgtcatttttgaactaacattataagttttttgtgacggtttagaaatgccacaaacaattttgtgtcatttctagactgacgcagaagataaaataagtgtgtatattttgcgtcattttttcaatgtagataattgttttttgcgtcatttcaaaaataacgctaataaaaaactatttgagattatggcatacacgtcggttttatactgacgtaaattctttaaatgacacttaaaaactgacgaaaatagtatttttttttgtagtagtgagctttttggcattatcagatctaaatccctttatggtggtattaaattgattttgaacaagttaaaggatgtctagaatggttattttggcttaaataaatgtatccaagtgtacctagaataatcatccactatagtaacaaaatacttatatccttcacgtgtcaaggtatggaaaggctcccaaatgtctatatggacaagctcaaaacaatgttttgaaaaattgtgattagaaacaaaagaaagttttcttagcttggcataatgataagtatagcaatgaaaatcagaacaaggagtgtttttgaaatgtaatcttttattgataagaaaatttttgatacttgaggggtgacccaatctataatgccacaagttgtctacatttattttttaattagaaaaagacataacagaaggagaaaaatcaaattttaaaatcaaatttccatggctttcacccatcccaatcctttggttcttcttggtgtcctgaatgacacaaaaaccaccaagaaaagggaatgaacattgtgcaaagggaatgaacattgtgcaaaggaccgtaaagttgtgacagaaagtaagctatacttgaaattaggcacataaagaacatttgtccacaaaatatgaggtgaaatagaaatagatccaatgcaatatatgtttctagtagtcccatcaggtagaataacatcagaaaatgataaatttgacttaatatcatgaaatatttcaagatggggacacacgtggcgtataatcttagtatcaatgacctactattaaataagattgttcttaccagaaaattagatacccctggctgattttgtggggtggatgagttgtcattgtggaatttttgagctaagaaagctatgagttgttggcactggtttggtgacagattaggaaaaggatcttgggttcctctagagttatcctcggcaacatcgtcattagttccagagagatttgcagcagccttcccctgtgagtaggggtgtttataaaatagccgatccaatccaat

SEQ ID NO: 111268 - DNA, 11112 bp, Cannabis sativa
gtctgttaagttaaataaaaaaaaaaaatcgttaaactaataatcgttaaaccaaaaattactgttagataaacacttttaatatataaagatatattcatttcttattttaatccccatcacacagtttaaattactcattaagcttccttaagtttccactaattgaatttatttgtttgttgtggttgcagtgatttcaaaagattaatctaaatttcctagaaagagaaccaactttgaaatttggatgacatattcttttaataataatatgtaaatgatatgcatattcctaaattagtatgaatagcacactacccttatcttgtgaatattatatattacatgtgaaagtgaatgatacctcattttggttgcattttactcacatggagatatgatggagagattggaatcaaagttgaattgactcatacatgctattttattattactgttattttaatggctacaaaagagacagaaagtcattttaatttctttgcttcaaaatatataatttaatgccttctaagctctattattagcaccttaatgccaccacatctcaatttataatgagaaaaacacttcactttcaatcaacaacctcttctgtattttatcataacttgacttatcatgcaccaaaattttactttgtattaattaattaccagccataatttacttgaaactacataaacgtgtgtttaaataccacgtatgatcattgatttattcaacctttatttagatttatctcactctgtttttttttagtcttcatatatattttactactcaatagaaatttggtagcataactataatatgaggctttaataatgtggggtactacttatattaatgtgtgatgtttacatgtcgattcataatttagtgcctcccaaaaaaaaaaagaattataaaaaaataatgttcataatctaaattatgtatgaaattttggtgatgcataaataaatatataatttaaaatttaaataaatactctacatgtcattcattgttaatggaaatattactatttgagctatttatgttacaaacccagattaatttaaacactttgctcaacaataacacaagaccagtaacaatatagtacatgtcaaccttatatagtatcacaccaccaaaaaaaaaaaagaactagctagttagtctattcggaattagacgtcatttctttctatttttaaatattaaaaatgacaaatgagttttaatacttggataaattatgtgtttgttgtggttaaatttatcaaaattaatccttcttgtagttttaatgagatattttaaacataattattttaattataattttgtgggtttctcatctcaacaattttatgttccatccttgttgacgaggcaatattttttattttccattctacattcacgactaatttttttgtttggtatgaatcgtatgataaactgaagatggatgaattaagagatgtgtaataaagtaatcttttctagtctattttgcttttggtaataagaatataagataagagaaggaatggctatgggttgcaaaagcattgttattgggtatcagttggtgacgttttacgattagttagcgatatatttatgacaacgagcagagtactaggcaccaataagactttatttaaaattttatgttttattttactttataagtttttgagttaaaactttctccacatttaactagatgaatagtgattctttaaaaaaattaatattctatttataaatatgttatttaaataaaataaagaagaaaaataaagaatttgttgtatgatataaggtaaaagtttatgtgaggtaaaatagataaaggtgaaattttaataaatgcattttaaaggagaatagagtagagaaactaataggactattctaaattttttaaaattgtaggtgatattaataataaataacaaaagttttttttttaaggaaataaattcaagaagataaattgtctaacaacatagacataaatttaataggaagagtactctcactcaaaatttgataaggaaaagaataaaaagctctaacaaacttatgagcaaaacattgttagcatatcgataaacaatcactaaattatcaataattaaaccaaaaggagagatcgttattaaatgattaaatgacctcaactgctactaaaaaatctatctcaaggatcagcgtcatttatcttttatttttaatttaactaagagcctttcaaatacccataacctcacctaattcaaagaccacctaaaaatatccacaaacgtgaatagcaacattaatccaattattatttattaataatgattaataataataagtttgtttggataataaaatgaaactagtgactccatacaaaactctatgcgtttctatttaactaataataataaaatatctaatctgtttgggctggcctataaattagtgaacaacttcacattgtcctcctccctctcctcttcctaatttccgggaatactcatttcctctgtttctctctctttgatccaaaaacacagaattcgggtaccaatggatccacccagattcgtaatccaagcatccgaggccgaagccatggctaccaagtcgggcctcacagtcctacaactcctcccctccctcgtcaagccagcccagaccctggcccgaccccccatctccaagttccacgtcggcgcagtcggttacggctcatcgggacgggtattcatcggcgtcaacctcgagttcccgggtctacctctacaccactctgttcacgccgagcaattcctcgtcacaaatctctccatcaacggcgaaacccgtctcgattacatcgccgtttcctccgctccttgtggccattgccgccaattcctccaagaaatccgcggagccccggatatcaagatcctgatcacgtcggcggagaccggagacgaagacgaaggaaccgatcggcccgaattggacaagttcaacccgcttctgaatctcttaccgcagcgatttggaccggacgacctactggacaaggacatgccgttggtattggagccacaccggaatgggttttcgttctcgaacgggactaaccagagcttgtccaatggctcctcctgcgacgaaaatggcgaggtgggtctgcttaaactcgcggctttagaagctgcgaacaattctcacgcgccgtacagtggctgcccttctggggtggcgattttggactctaatggaaagatatacaaagggtcttatatggaatcagctgcctataatccgagcttgggaccggtccaggcggctctggttgcttatatcgccggtggtggtggtgggtacgacaaaattgtgggtgtcgttttggtagagaaggaagatgctttgatcagacaagaacaaacggcaagacttctcttacagtcaatatgtccagactccgagtttcgggtttttcattgcagtaaaaaggcttgttcttgttgatgagagtgaaatgactaaatgtgtattctatcataaacttttgtagtccttttctaaccattttggttaattgttattatggaaaaaggattgaatttggattgagtaaagtcaatgaaatgaaatgaatgaagatgatcgatctttctgtgtacattaagctacagttatccgaatcttctcttttttattattattatgaattgggttggttattcatttcattagaacagaaaaactaacctcatgaagcattagattattgtaaagatgaaaaaacattgatatcccaaaactcttctttaaattgatttattggtttactatacaaaactgtgacatacaagtacaatcactggtttaagtcgtattattgaatttcattgggttgggctttggaccactcataattgccaaattgagtggtactggtgttcttatattgcgtcatctttattttcactttcaacgtttttattcataaatttcagcacttgtacataaagaattgcttacaaaacaatagtagactcctgccactttctttttaagccactacaactacaatagctatgatgaaattttaaggtgaaaactaaaaaggtgctagccaaagttactctacttgctctgttcttagttgactcataaaccagagattatttcacatgtgtctccatcaaatgaacttttggggttatcaagtgttaacaaaaaggaaaataaattaacattattgagtgttggattaatatttaatgaaagagattgaatgtggccctaagagcaagcaataatcacaaaaatccagctatccacagtcagtttttaacatataatattattgtataagttccttccaccacttagtttcgtggctattagtctattacacatcaaatatagctgaatgcacaacacaagtataatagaatattgcagctaggaagcttcattcatatatagtaatacattttgatgtgtgatatttgactgtatacaacatttgatctaaaagaaccatacagtagggaacgactaagaccattatctcgattagagtaatatagtttagtggctatttgtaccacacacatacaattttgcatacttagatattaattttggatattatatccacgtgtgtggtattcgaataatcaaatttcaatcagccatatcgaatattaattaatcttctctctcatcattgggtgatgtttgagtgtatgaataatgattgtgtttcttaaaccttttgttattaattttagttacatcatataacagtactttgattgttctcttaaaaataaagaacaacttcaataacagtacttatcgaaaggggttcttcatatagctataacaatattatgtattagaatatggtctgtatatagagaccaatttttgcaggggaggcaaagaataattgactatataaaccaacatacaagcaacctaaacaaaaacaaaaacaaagacgacatcaagaaaaggaattacaacagttaaagtagttcattagttcataaaaacgacatgaatatgataagagaactctgttttgtagtatgtagcaggagtccaaaattttattatatttattactagttccaacacctgaccatgagaaaaatcagcaagtggaattttactcaaaaataataataataataataaataatccttttaattcttattccactaggccaattagaaattgactattgcatgcagtttatacagattcagattcattttgggacattattataagaaaacaaaaagaatgagatgagcccaaaaaaacacattatttaatttaatatataacaggaatatgtgattttcttgttcaagagttttaactacacattataaagatataaaagtaagaaaaaaattagcaaagaatgcagacaaaacattcttctacacagagaaattcacatgtactgaaggtactagatagctaactatgcaagttcacttcggggttggtttgctgaatttttagcaagaatagacattttagtacaatggttgtgtttgaattgaaacgcactatgctgaagatgattctgttgacttgtccttaggagctactactgcaggcagtagaatatctccaacacctttaggcggtccaatgctgcaacgagctgtgttatgtgttgcaatagcatcctttattttttggaactgcataagattttgagaagaatcagatgtcaaaatataaattgtgtagcttcttgagagattaaaaaataaatgaaaaaaccctttggtccaaactatgggaaaaattatgaagtttagaatatgctagtgtgctaatggagtaagaagttcttcaatgtcaccttttaagagagaataactcgttttacataggaggaagatgctgattgtatacatgtccatgatgagacgaagaaaaacaaaaggttgaagttacttaccttagcaagagagcacgaaaaggattccaactgtccatcagctccgcgataaaagtggaaataaggaagaaccttcacattcaaacttttgcacataggtttgttctcatcaaaattgactttaaggaataaaatctcagggtggtcttcagctgttctacagagctgatatgtacgcaatcaaaaaaaaaaaatatacatctcagaacagattaacacatccataaacaaaggtacattggaaaagagttgaattttagaaccttcactgaagtgaaatagttccagatattacatacaaatacaagacatggattactgccttaaaaaaatatatcgaatgattcacaagtgcggaggccacttatcaagaatctatctaaaaagtataccctgaatatgatttttcatagaactctttaagttagtttttagaactggaaacttctggagtggtagattgataattatagagagtactataagtaacaaaaagtagttaccttggggaataaggccctgcaagaagcacaccaagttccatagaattctacaataactaatctatctccagcttcacctaaagtactcaagaattcttgtgtagaatgaatgtcaaccatatttggtgcattcctttcccaccattttggctgctccgtttcagcaacagcagcctgcacctgcacaaagcaaacaatagcaccacatcaggaaaatttgacacaataattcaaaagtaaaccgaaaccattcttccaatgatttttcgaaaacaaaagatatccattaacactaaaacaaagtgaactgaagctgaggaattatgtatatgctaaaccaacatgagcatttgacactttccaacttaacaggcaaacacactcttcaatcagattaacaacatggagacaaaaatatcaaagaaaccaaagtcagctcaaatcaaattataaatagtacatcaaaaaggaaaattgaccaaaaatatcacatctatcattcatcatgagcatgagcatgagcagtagttatcattcaatacgaaacaataatgtgtaacgttacccctttccagaaaaattcaaagcctttcttatttctctttttccaaataaaagtaaaaacccaaatcaaaattcacctgaatttaaccaaataccctaacaagcaaaagggtcgtcgtaaattcacctgaatttaaccgaagcccaaatcaaattcaaagcaaataaggcgaaattcgtagatggggggaagctaaaaggattaccttgaacgagaacaaggagtccctacgtctgaaagcgaggcgtgtaacagaggaagaggaaagaggataagctctcttatccgagtaggaaattggaatgagacccggttggagggaattcaaggaggatgcgaaggaggtgataacagaggaagagaaacgaagtgaatggtgtggtggtgttactcgaaaaacatctgccatttagaaagataaaaaatcgaaaagaacagatatggtgtgttcttgtgtaaagatctttatataaatatatatatatatatattattaaagatgaggaaagtaaggtaggaaaaaagggtcaacagaagcacatgcgagaggccatgaaaaacgaaggccgtaggaggagagaggaggagcagtagtttctcgtggcctcgctagtgtgactgtgagccaatcaacctggaaccagatcgtacggatggaagaatatggagggtgttttttttttttttttggttatatatataatggttttttttagctgatcttttttagtttgtggcaacctttaccggttaccgaaccaaagtacggccttgttctctcccatcaaactttttagtgactgaactaacttttttaataatatttctgtttgttttacaatatttttctattaatggatgtaataacatacttttttagaattgatacaaattttaaatattctttccttcttttcaagcttttgttgttttgttcctcttcaatcaattaaggcactgaaatggttcctaagaaaatcttattatacatgcatcaacttttaatatgataatattttcaaaaaaaaaaaaaaacttttaatatgataatcaacacctaataagaaaaaaaaaactggttccaatatatttatttaagcacctttcatggtaagaaaaacaaaacttgaatgttatttgatactaagtgtagtacgaagcttcagtacatttttaagtatacattaattctcgtaaacttatattcagaataatattattctgagaaggaggttattcatttactcacaaatttttattagaatttgaaatgaaagagattaagataaatggagttccattgacaatggaaggaatttattttatgtataacaatttatttcaattcattaagaattttcagatgtctattaatagtaaaagtaatcaaatgaaaggacatatttagaaaaaagtgaaagctgctatgaaagccctttctcccaaaacgtgggaaaggggataacttttgtaaggggaagaatcatacacacgagtacaatgcatgatctagttgtagaaaatttgaggtttgaccttacaacaagagccttagatgaagaaaattaaagcacaaaacatgtcgatttaataataaacagttgtcataaataaaataagtgatgtaaagttactagaaacagcactactagtcctgctttacgagatttttaacaagcaaaaatttctttggcatttactcgagcacatattacattatacataacacccttaccagtgatgtatctatatcgatgataatcataatacactgataaaaggcatgggttcccaataccataatgacagatttacctatctgcaatggcattatcattgtcattttcactacttcgattacttcacgaagaacatcaatgaagatacattttatggagtaggcaaaagaacagaattgggaaacgatacagacccattattgggagcaccgtgtatgttgagaattgaagtcaccaagttgtaaatctgaacattttcgaaagatggaatcttcttccctcttggaaaccgaggaccatggccaacaaatatggttctcatggaaaatatagcattgtcataaccatgagctccaccacactctttctcgttggttctcttttgttctaccttaaacccttcatcgagtaatccaattataggtggaattcgatcactagcaacataatgaagcctactgggaagctcctccttaagataaactcttaaatgctcaccattccccaccctcctagatttcaacccttcattcattttcttgaccacatcagctggatcaacgccttgaggtggacgaattgcaagtaatggagtgtatgactgcacccaatccccagggatttcaatccaaggagccaaatcatcgagaaatagcaattttttatcacatgttccaaccattccatgatcaccaactaagattatattaacatcttcaaaaacacctcttttctctagaccagtaatcaactttccaatcaagctatcaattctagaaacagcttcagtgatcagaggatcatcaggcccaacttgatgaccctgatgatcaggatcctcaaaataaagggtcataaatacaggaatttcactagtgggaagatcaaaataattcaaaatagtatcaactcgttcctcaaatggaacagaaccattatattgttgacaaaacttttttgggcaagtccaagaacctttaattacctcagaaccaggccagaagtagagagcagcctttaaaccatgattggccacagtctcccacaacggctcgcctaaccaccacttgggctcgtggctggccatggtgaagtagtccccgctatttggatccgcaaaatggttattgattataccatgataagcagggtaaagaccagtgacaatagagtaatgattaggaaaagttagagttggaaaaaccggaatcaaacccaattcggcttcagtcccattagcaatgaggcggcctatatttggagttggggtcttgaattggtatccgaatcgaaacccatctgaggagatgagcagaaccaccggatgatcgagtttcttgagagggcgagccaatttttcagaatccacagcggaattcgttcggatcgtcgtgtttggagccgagaagaagaggaatgcgaaagctccggcaacggccagggcaacgcaagtgacgaggagtagggagatgaaaacaatggtggtagtcgtgaatttacgagaaggatccttggaagaaggagaatctgtgctgaaagagagaagagcctccgttgggtttggtgggtcatcttcttgggtctgaagtggtttaattggggctaaaatggagggtgaatcagaacccatactatgaaagttggggttttgagttatgggtttggatcacaaatgtgagaaaatgctgggtttgaagtttgaagtggaatggaagagtttagtggaagatgaagatggatttgaggaacagcaatggaggaagtcaatcaaagtaagagtttggtagacagaggggacgagttgttttggctgcaaatctggatggacggtcaggactaattgaggaaattgcttcgttacggtagtattgtggagctcattttacatatctgaaaccgtccgcatgtaataattaagaaggggagcaacgtgttggcgtggacaagcatgatttgctaagctgtagtactctacagatggcaacatatagaagacatctccaatatttagcacgaaagtaatgtaaaatgtaaaaattgagttatattttgtgaaaaaaaaaaaataattttgtaataattttaaaattaatttaatgtaaatttaatatgttatggggtgattttataatgcactctcttaaaagggatacactaataaactctctacttgtttcggcatgcagaaaaattttgtagtttatttttttttttcatattcatatacattatagttatttaagatatcttacaaaattttaaaaaaattggaataatttacaatatagaaa

SEQ ID NO: 111269 - DNA, 4060 bp, Cannabis sativa
accagccaacactcaaccattactacccactcctccgtccacgggtgccctcactgatccagcttggtatatggactccggagcttctcatcacttcactctcgatctgaatcttcttgagtctgccactccatattatggtaatgatcacattactatgggaaattgtaagttttcttccatttctcatgtgggcactgcatatctaccatcttcatcctttcctatcattaaactgaatcgcatttaccattctccttctttatctaagaatctgctcagtgtctccaaactttgtttggataataatgcttatgttgagtttcaccttactttctttcttgtcaaaaattagggcagtcatcaaatcattctcaaaggccttcttgatcaaggcatctatcgagtcacctcttcccccgccacatctcttgctgcctcaccacaacttctctacacttccaagaattccattgacctatggcactctcgcttgggtcatccgacctccgatattatctctcgcatttcctctacttgtaatttttcttttccaagaaaagattgcctaactttttgtactgcttgtcaattaggcaaatctcataggcttagctttaccaactctgtatctcgggcttcaaaaccctttgaattaatacactctaatatttggggtccagccctagttacttcaatcactggtgttaaatattttctcttatttattgatgattacacacatttctcttggttttatcttctaaatacaaaagaagaagcattcaatacatttctcacctttaaaaaccttgtttccactcaatttcaaagcatcattcaatcggtttgaaccgattggggtggtgaataccgctccttgtctcggttcttcactcaacatggcattcgccatgatctctcgtgtccccacacacctcaaaatggccgcctcgaacgcaagaatcaccatgtcgttgaaactggcctcactttgttagctcatgcccatcttctcgttcatttttggccttacgctttctctaccgctgtttatttaatcaatcgccttcctactcgagttttccattatgacagcccctatcacttactctataacaaagctccaaactattcattactccgagtgtttggctgccaatgtttcccctttcttcgaccttataactctcataaactagagtttcgctcctctccttgcacttttcttggctacaacagcaaacacaaaggctatctttgccttcatcccacctccaggcgtctttttatcactcgtcatgtcatctttaatgagtcgtgttttccctttgccactccctcggccgcttcaccacctacccatacacctcactcagtcattaccgcccttcctctctcggttccctccaccacaaatgctcccaatgttactccaattcattcatctccacatacttcatctccctatagtccatctcatcacatctcgtctcctccttcctctccccatacatcggcccgtcctgaatcactccacacttcccccaccccaacacatgttactcatattactcctctccttgatacccctttctcacatacaccttcatcatcatcttccaccgcctccccacccaccattcctttgatcgtagatttgcaaggcccatgtgctcttcctattgcccatactaatgtacatcccatgattactagagctaaatcgggcatctccaagcctcgtttgttttttagtgttgctgcaggtacaccggctaaatcgtctaactttcgggaggctagcaaagatcccaaatggcttgcggcaatggatacagaagtggtggccttaaaatctcaaggtacttggattcttgttcccccaccttccggttttaaggtcattggttgcaaatgggtgtatcgcattaaacttaatgcggatgggtccgtggaacgctataaggctcgcttagttgccaagggcttccatcaaactcaaggacttgactatcatgaaacatttagtccggttgttaagctgaactcaattcggttggtcctctccttggccgtttctttcaattggattgttaagcaacttgatattcaaaatgcctttcttcatggcgatctcaccgagaccgtgtacatgactcaaccagaaggctttgttgatcccgatcatccacaccatgtttgcaagctcactaagtctctctacggtctaaaataatctccacgggcctggtttttcaagattagtactgccattctccaattgggctttgttgcttctcaagccgatacttctctcttcatatacaggtctgattttgcagtaatagtgctcttaatttatgtggctgatattattgtggctggctcatcttcctctgctattgctgaccttcttacctatctcaacactcggtttacagtcaaagatctcgagcccctccacttctttctcggtgttcaagttcatcgatctacaaccgattttcacttgtctcaaacgaagaatatctgggatctcctcactaaaactgggttacttgacaccaagccggtcactactcccatggctcttacttctttatctctctatgatggtgagcccctcaccgatggtacttcttattgcagtcttgttggggccttgcaatattgtacgctaacacggccagacatttcattcacggtcaacaaactatgccagtttctccatgcccccactaccatccattaccaatctgtaaaacgggttctttggtaccttaatggcacgactcaccttggcatccttctccaacctgacattacaagtgaacttcattgctttactgatgctgattgggcctcatgtcctgatgaccaccgcagcactagtgcttattgtatatactttggattaaacctcatctcttggtcttcggctaaatacaaggttgtatcacggtctagtaccaaatcgaaatatcgagctcttaccaatggcgcttctgaagtttcttggcttcaatcccttcttcgtgaacttggcttccctcttgctgtcccgcctacaatgcattgtgataacatcagtacactccatctcgcctccaatcctgttttacatgctcgtacaaagcacattgaaatcgactatcactttgttcgtgaacgagtcaagaacggtcttctccaacttcgctacactccctccgaagaccaagttgctgattgtctcacaaaacccctcactgcctctcctttttaggaactctgcaccaaactcatggtgcttcccaacaccgtgagtttgaggggggatgttaaaccataaaattatctctctttatttccttgtattattttcttgctgagtttagtggtgaagacgtctcgttaaacggacaccggaggtaaccggaaaatccgttcaaagtttgaaaccctaaactttgacttgcgatcccgagctaacggtggcgaaaggagcggagccgcttgggggtgaggtcaccggcacttgcgctttcaatttgtccggcgcgtggggctgggcggtggtcggaggtgggtcgccagagtgtggtggtgatggtggtttgtgggtttcttttgtgtttgaagagagagacaaagaaagatatatagggagaggggggacgacagggggtgggtctattttgtatataattaattttttttttgtatatacatatatattatattatatttatttatttattatacatatacttggtttgactcggtcaaaccgagtcttcacattcttcccccttaaagaaatttcgtcccgaaattttaaagtacaacctaaagttgaaaattaaacaagtgaggatacttcatatacatctcagactctaactcccaagtagcctcgtcttccctgtggttttaccataagaccttaactactggaatgtctctgttcctttttagctctctcgccaagatttttacaggttgttcttcataagtcacatcttcctaaagagggatagcctcatactcaataacatgtgacagatctggagtatac

SEQ ID NO: 111270 - DNA, 3274 bp, Cannabis sativa
  modified_base (68)..(70): a, c, t, g, unknown or other
  modified_base (98)..(108): a, c, t, g, unknown or other
atgtataactaattacaatttcgaagttattcttatttataattggcccaaatcgagacttgattttnnnataataaattagaggttattcttgaatnnnnnnnnnnnaaatagaggttctactgtatatcctaaaaaagatgttatatgctatacttcttatctggtttgacatttggagaactatttagttttttttccttcataattatgtattattcatgattttaatgaatatttgtgagtaaatttttgtattgtcttaaagttagaacaattaatgtggtagctcattcactagctaaataagctcttatggctcatctagtactatttggtagcctagttagcctttgtgtatccataactctattttaactgattccatttaagtaatgatatatcattttcctcgccacctctctctttagcgttatgcttggaggtggtattttctgaggttttactctaaaaaaaaaatacaacatagtatatatgtactgttggcatcttaaaatacacttttaaaaagatcgttatagtatatttcttatctatttcgacattcatgagaattatttagtcaatttttttttcataagtgtatgttgtaattatttagaaccacttgtaaattttttaaaaattatgaatatatagtttataatgatgccaaaaattaaggttcaaacaattgtttaccatgcatataaaaaaaattatgtgcaacaaagcatttgaatttcattttcaatactgtaaactatttaaaattttctaaaaatttaaaggtggttctaaataactacaacgcatacgatcataaaaaatattagactaaaaaatattcttaaaaactgaaacaaatgcactataaaattttcctacattttatttattattaatcataatgataagttattatgtttcatatattcttattcatacgtagtaaatttttaaagagattttttttttttttttgagaaaaagactgtaatcataaattaaagagtgtcatttacaacaatagaaaaaatggccaagggaatttccccaaaccacatacaatcatttttcaacgctaatgcttgtttagtcaaaccgtgagcggcttggttcgcatctctcctaacatgagacacacaagcagaagaaaaataggacaaatgattcttaatatccatcattaagtcttgaaaaggagagagttgatgaaagactattaatagaattagccaatataagagagtttgtctcgatgaggtccacttgactattgtgctgaagagcccaaactaaaccaacagacaaagctttagcttccatttcctgaggtttatattttccaataagaggtttagaaagtgcagcaacaacataacccaaagagtttcgaatgatgactcccacactaattttatgtttggaggcatcacaagcagcatcaatattcatttttagtttggatgttggggaggctgccaaggcacatgtgacgccacaccaaaagaggaagcaaccgattccctctggtttgaaatctgctggtagaaattgcatacatatgcatgagactttgcccaaatttgagaaggagattggatttgtttcccatgaataaaattattcctatcattccaaataaaccacattgtgcaaaaaaaacttctccaagtcagccttagaaacgatggtggataaatgcatgatgaagtcatcgctcttcattctaaaggctgctgcaaaatcaaagaaaaaaccagcagaacgccaaaaatttttggcatatttgcaacagaataaagcatgcccaaccgactctcaagcgttagtgcaaaggctacaagcggctgaatcaatgatctttctagagaaaaagatgcagcagtagggatggcattatggaacattttccaagcgaaaatcttgatcttcgaagggagattcatgctccaaaaatatttttaccaagcagcctggtttgtggaattagaagacatatcggtttcctccatggaatcagcaaggtgatatctagacttgattgagtattccccaatattgtcgtgatgccagatctacctatcttcagcattagaaatagatagagggattgataatatatactcaatgtcaatagatgaaaaatgttggtgcagtaaagggagattctattcccggttttgagtaatgtatgtcaaaattggtgtgtatggtaatcatgtgtgtcaaagtggagtaaaagtgttattccttgggatccaagggtctgagtcacaagaaatatgagagccatcgcccacctttaatctcaatcctttttccaacagttcacgcccctaaaaaataccttgccatgttaaggaagaagatcggccaagagaagcatgcataaaatcacaattcaagaaatatctaccctttaacacttaggcttagtagagattcagggtattggagaaggcggcacgcttgtttcacaagaagagcttgattaaagtgagcaaaagatcgaaatcccataccgccatccaattttgttatgcataaaagtttatatttcttccaatgaatcttcttcttatcagtatctgaaccctaccaatattgtgccatcatttgttcaagttgacgactaaaagtagcgggaagtttgaagcaactcatcacataggttggtattgattgaactaccgccttcaaaagaacctccttaccaccaattgaaaagagtttatcattccaggaatgcaaaagtttccaaatacgctctttgatatctccaaacaattgctttttatcacgttcagaataagcaggcaaaccaagatatctctcatgacattcactaactgggatactaaggatatttcaaaaggattgcttgtctctgttcggtgtattaggagagaacgacataacagatttctccaaatttagatcttgtccagaagctcggtggtagatatccaatgctcgtttaatggccccacatgatctatcattagcctggaaaaaaagaaggctgtcatcggcaaaaaaataaatgtgtgattgaaggagctcgacgggaaacagcaagaccctttagccgaccaatatgttcttcaaattgtaacaatggatataggccttcagataggggtgacaattcatgctcgtgggtcgtgttcgtgtcgtgtcgagacccatgtataacaggtacatgctcgacccgaacacgactcgtttaataatcgtgtcaaataaataaaacccgaacacgacccgt

SEQ ID NO: 111271 - DNA, 4684 bp, Cannabis sativa
ttctattaatagtgttcctatagatttgatgtctattcttgagagcggttgctcgacttaataaagaacacttctttcaaaaaaaaaaattagaatggaacattgttgggagtaaataaaagtacggagaagttatgtgttagtggcatgaaaagaagaaactaacttagggtgtattttatttttcaaagaagacctattttgggagaaataaatggggatagttataaaaaaaaataatatttaaaaaaaataaaataaacttaatattaaagtgtatttataaacttttagggataaatataatttttcgttcaatattatgttaagagtttatgtattgtcaaaaaggcccttgaaacaatttaatttataaatatgctctccaaagtcaactctttattactagagttgggtggagaagaactctagagtattgagaaggcgtggcacacagaagaagctccatagagaacccacgctcagcctgtgcctgccatgctgattacatttactttactacatggcaagcctgtcacttgccaaatgagtagtagctagtattggaatctacaatcccccttacgtggcatcaattccagctttgataacaaaatattttcttttcttttctcccattatgtgagacagcttatatatgataagttttctcttttcttttcttttcttctcccaaagaatttcccttccttttccttttgtttcccctcctcttgttctacttttctaaggaatacttcacacctaataatgtatgtatgagtgagttctttcgttggagatggaatgaaatacaaacaaaaaataccttattcttcttcgagaaaaaaaaaaaaaaccttttcattgtttattgacctattgcaagaaaggatgaagtataaaactaattaggctaagtttaaaaattaattaattaggatcactacattcttattttgtcttataaatcataattaacactgaaaaattactattccaatgaaaatacttttcatctgatttagttcatgattttcataaatattaaaaagaaaaatattattattattattctttttatttatatattacatatttcaccttttttttatcctccactttttcttctttatttacttttcttcatatgtcctttctcttctactagcttaggttgttcctctctaataatagattgatgaaaagttttaaaaaatgaggagtacaagggatataagagatggctaattaacatttttatccttcgaattttgacatgtattaaattatactttctggactttttaaactgttaaaaatttctctcgaattattgaaattatttaattgaaggactttcttccaattttactaaatgaaagtctgacgtgaaagaaaatttagggacatgatttagtacatgtcaaaatttaaaggtagaatatggtaaatatcaaagttcagaggttacgatttggtaaaagacaatcatcacattagtgaaattgaacgaaactggatagatgtctttgagtccaataatctcagtagttctaggagaatttttaacggtctgaaaaattcgtaagtatgattgaggatgtaatttagtacatgtcaaaatttaagtggcaaaactctaattagccataagagaatagcatcaatttatcttaactggcacaaaagaaagtgaaaatgatggttataaatttaaatacaaaattaatattagtgatacattttaatattttaagattaacagtttaatttaatataattatattttttttaatttgatcttgtcccgtcttaattttggtggattaggaaggccccatctcttctccccctctgataatgtcctttggtgccttaaccttccttccaaaaactcatcatgcaaaattatctttaaataaataaaatcagcagtgtcaaagaattttatcaaaatcaaaataatttatttcattttattcgaaaggtaatctaccctctattagatattctattaaaggacattgttaatttacttcttaattattcttaagcattcttaattcatgttggacttaagtgtacacagagggtgggtttcgatctatttaatttctattttatttgttcttggtggattataactattaattaagtcaagcatgaaacataaattataaatattaaaatttatttatctatttattttcttacaaacatgaaactatataacttgtcatttatttcttaccaaacaacacatcaatgagcaaatgccaaacttgaagggtaaaaccaaattttcttttgttttatacaactggttttgttataagttttgcaaaataccagtgaataagtagaagctttgtgattcccgcaaacaattattatatatgcaaaagcagcattaacgcttgtgaaatacgaaaaagaatgtaatacgagcaacagtcaacagagtatgccaatatatatttggtaaaatatttcaaagatgagttctccataaattgtagaacgttatgcatatggagactaggaaatggaatatatgaattaggaaatacatttaggccataaagtcttattagtaacagtcgattgatatacaatgcttcttgatacaagcaagaccaacatattacataagtttgttgcatatataatttcttacccccactacgaccaaaggaatgaagcatttttgttctgatgtttttctcttcttactggacagtaaattgtactcctttattatatgaagtgcaaatttgagctagaatgcagtaaccaaaagatgctaaaaaggacagaaaacagtaaaaacaatatctcattatggtaccaaaaaaatgagaatattaccctactgagcagagagaattctcatatgtccttctccgacttcacatttgtctttaaaaatccttacaaaaggagagaaagaggagtagatgggtgctcactttattctcttgccacatacttgagagagagaacaaaatatgtaacaaattaataggcattgaaatctctctctctctctctctctctctctctctgctagtttctggagatgcgtggtcacatctcctcttttgtaaaaggaataaaagctgtatgaagatggaacaggatgagaatattaatttatgtttttattcaatcattggaaggattaatattctcacttcctatccactttctcttcttatgttgatgataagattaagaatcccacaacagacatatatgtattgtatatatgatgataactcctacatattatatctaacatttttatttatatgtgtgtgtccaaccacagacgattctcctcctagtatccttaggatagcatggcaaaatcatttgaaatgaaaccacatcatgagtgactcactacatgattcctcacgatcatcgtactacaattgagaaaaagaaaaaaagaaaaaaccatatcaaaatggcattttaatggttaaaaaaatcattgccacctcactagggaacctgtatgtgtctgacaacttgtataaaacagaacaagagtcgattttcattcactagctaggtccaggacaggacagaataccttgatttagattccacccacccaggacagatgttttcataatacattatgttttatatatgaagatcgatcaacaaaaataggaaaatagtataaatttcttaacttactaataaaaaagagagaaagaaatatatatatgtcaaaggcttcactctcttaagaccgagatcacaccttcaaattattaatttcttgcgaattcgtataagaaaaaaaaactaatagtgaaacaggcatatttcgaaagtaatagaaaaacatacaacatttatgaaatgatacatatgtgtaactataaaagggatacgaaaacataccaagagagcagtagtaacaataaggaataaatactgcatcaattgagatttgtgttgtgggccttccaacatttatatacttttcttctccaaaggaatgttcttaattaatttatgttccaaaaattggtgggggttatgatggatatatacacaccaatataaaattgttattgggcagtgaaccatcatatagtcataataatagttaataatattcaaaaagattggtaatatagccgcgctaacggctaatttaattttttttaatacaataataaaaatataatttcaatatatagtaatagtaaaattatattatctaattctatattattattttttatcttttattaaaaagtttaaaatttatacgattaatctatatatatatagaattttaaattgttttatttttttttaaaaaaaattattattataaaaatagataaatatgatggtgtagggaaaaattgaagtgttttccataatatattgtttttatatctcaatccttttaagttattgccattattagatctcactcgtaattagggccgtcttaaatatttttgaggccctgttctaatttaaatagttgggctctaataaaaaaagtgcaattataaataatatttttcaaatattatcatgtactaatatatattttacaaaattaagcaccaaaaaactcaaattaatatattaaaattgttattcacttttgagtgaaatataaactgaactcctgatatatgta

SEQ ID NO: 111272 - DNA, 3095 bp, Cannabis sativa
aatctatattggagtcaggaagaattaataagatagggaatttactcggtaaattgtagaactacttattgggagcttgattatataggcatatggcctctacactacttgagataatgttgtcttgtagactcaattaattagttttagttaattaattagaattataagtaagactatgtcttaattatgaatttcactaagcaaagacaaatttgagaagaaaatgagatttaaggtttatttattaattaagagaatttgaaagtttaattaacaaataactcaattggtagttttatttgataatttttcgttattattaaatagacaaaattaacatttaaaggtttaaaactagaaaaatagtattattgagaaaagataagtcaagaaataaaatgatatttttgaaacccattgcgcctctatagggttcaactatgggttgaataataggcgtatttattttatctttatttaatccattttaagtgtctaagcttaaccctaaagaaaatacaataaatagaatataaagcccttaacctaagatgcaatagctatatatatccattatatattttgcatcaaagatacacatacaatatactaaggctcacacctatatatatatatatatatatgtttatgtacatgttcatatatggtggagagaattctgattctctttatgagataaaagagagattaagagctaatattattctatagtattataaattttctatagtcttcttcatcaaatttgagtgccattagtgttgggattatgccctcacatatcaaggcaacactcaggacaatgtagaagactatgtagtatttcacattcgaaggaggagaaattcaagttcagtttttggtaatactctgcgacagaaaggaacaaaggttagagaactgaatggaaaaagacatttaattcctctgcaatcactgtaagatttacttaaacttttatgtgtttaatttgaattgttttaaggttccatgtttaggatgttagattagtaatgatcaacatacttatttagtgaaagtaagatcttagttaaatatgctttccaacagtatgaactaaaattctctgagtacactagtttagatgatattcgggaaaatgtgtacaaggcgacctgcaatatggtccattatcgaaagccacaaaggatgcctccagggggaaagaaaaaaagagatcaaaataaaaggtgcaagtatcatggagtcgtagggcacaccaccaacgtgtgtaattatccaaacgatgaaattaagactctagtcagggccaaacactagggccggtggatccgaatcccaattatctatcttggacaggggttgttcatggacaattacttgttcagggatagcaggcagctgtaaaccctccgtagggggtatgccgccctcaagctcctagaacataacttctagccctacctgctttaccagctcatgctgcagtagttctagctctgggaccaatgaaatcgtatcccccaagaatggctctgccacccattgataggcatgtttccacggtttctggaagaccacatattgcaggaagcaactagaactcccaaaaattatatttgaagtagttagaaagtgacggagaaatgtgtgctttagtgcagtcgacaccacaactgccaatcactttcacagaagaagatgctaggcatgtgtatttcctcccataatgacccgttggttatagaagctagatttccaataaaagagtttcagagtgttggtggacaatgaaagttcggtcaacatacttttcaagtttgcatttcaggcagttgggctaacagaggctgatttgtcaccttgccccattcaattccaaggattcaatggcgactcgctaatgccaattgggaagattcagctcccagtaacactaaaaggggaacataacatatgcgccttcaagcactgcacgtttgtggttgtggattctccacaacctacaacgccatactaggacgtccaatcttagttgattttggagtcgtcacttccatcaagaatttgtgcatggagttcccttgctataacaaaggtattggcgtactcaaaggtgaccaaatctgtgaaagaagctgctacaacgtctctgtctgatctgtgtttatggtcaaagaagaggttgatgttgctcctagaacagttgtacatgcggaagctgaggctgtcctggaggaggttgaagatgagttggatcctagagttgggatagagaaaatggtagaaccgttagaggatgtagaagaggtcaacatttgtgatacaaatcccaccaaaaccatcaaggtggggagaaacttacatccagtggtaaaagaaaaaattctggcgacagtagaaaagaatcaagatatcttggcgtggagtcactcatacatgatagggatcaatccgaatgttagtttccatgccctgaacattgatgagaatgccacactagtccgccagaaaagaagacctatagacccggtaagagcgaaagcagtaaaaatggaggtcgagaagttaacttccatttaattttgtgggaagcactctaccaatgtggttggccaacccagtctcagtcccgaagctcaacgacacctgggggatgtgtattgacttcacagacccaaaagactacttcccctttccgcgaattgatcaaacgatggatgtcgcgttaggatattgtaacgccttgatattttgccttattttacaaaatactaattttgatacattaattgaaaggattcaaaactttttagaaatacacagcgggttttacaataaatatgcaaaaaagtgaatgatcattcatattaaaaataaaaaaaatagctgagtgcatttttaaaataaatttacaacaccccactgagctcatattactttactttctaaaaataaaactaaggctccaccagtgttctagactgtttgttcatccatagcccctcgtaatatacatacaagaactgccccagctcatcaaacttatgttcaatgtgttgggttttatgccataaataaaactcatt

SEQ ID NO: 111273 - DNA, 4817 bp, Cannabis sativa
gctaattgcctttactaatccacattactagagcggtcattacatagggggcacccaagtgaacatatggatcccaacatgtttgtttctagtattttcttcaactgtataagtggatgggttgagatgatattagaatgtctaccagataccatgtcacttagacatcacacaacaccatctgggcgcctaggtgagcacctagcaagtaatgccctgatatttaggcgcgctataatgattttctaattaaggtgcctcctttgctaatcaaagtatttttctcgaaagttgtgtcaaattaaaactttcaatttaaattattaaactttatatacatatatatatatctatgtagatgggatcccgtatttaaacttttacaaatattatcaaaatatttttacaacttgtcgcataacgactacaaaatatagcccaagatgtcccgagaccgaacactccaggtcgcaccgtcttgacatgtacaatcattgcccgagctcggaactcacccctgtttagcatttgtctttcctttacctacacataaaagtagaatctgtaagccaatagactcagtaagaaaagtatacacaaatcatatattatcgacttgtgtctaggcgcctatacacctatccacaaggcttccaaatgattaagaacattcttaatagttagtgctattgaccatgatatcacccactaccagcactatgattgcactatgggactgacactatgttcgtaccgctatgatagcatcaataagcatccaaaagtacaattaaccatgatatcactcttaatcagtactacgctagtactggtaaactaacataatagttgtgccgctatgatagcaccaattaatactttttggggtgaatatcactcttaaccagtacggtgcatgtactgtcgaacagacacaatggttgtgtcactatgatatcacccaaaacatatacaatcacaaacacaacatgcatatataatatgttctatgatagtcttaccacgattccgaattcgagtgagttagccgacttgaacgaaaagcctcgtgctggatggatgccctcttcttggaaacacttcaatcctttgctgcaactcagaagattgaagggaaatgagctgattccctcaggttcaagctgaattcccaactgatgataaccaaatcacaagccgacctttgaaaaaaacagtcttcacttgaggttgtttgaacaattcatcaatcctgggcactgaatattaattcttaagtgttagcttgtttaattcccgataatcaatacacatctttccttttttcacagataaagtcagagctcgttaaggtgatacactgggtcgggtaaaccctaaattgagcatcccttgaagttgttttattagctccatgaattctactggagccattcaatatggtatttttgaaataggttttgccccaggtaccaaatctattataaaatttatcttttgttatggcggtaatctcgacaaatcctcaggaaatacacccagaaattcttttacaattctgactatcttaggcccaaatgtttcaagcctgctggagtcaatcgggaccgctaaaaaaatcctacccatccactgcgtagtaaatctttagcccttgaagctaaaatatctgggattcgagacccctaagcaaatccagcataagcaaatggatcttcgtcctctgattgaaaagttaccatttcccacttgcagccaatgctggtcaaatacttggacagagaatccatcccaagcatgataccaaactctgctaattccaattctactaagttagcactcaactccctattttttttttaccctaaatggcatatacctaacttgccttttggagataaccaactcctcgctaggcattagggttccaaccctctttcaataaagtcacaaggcctacccatttaccatattgattaattacttataatgccacatatgaatgtgtagcccccaaagtcaagtaacacagtaaaataagagttgttgaccagaagctgacctgtcacaacaaaaagactggttctagcatcagcttgagtgatagcaaacactcaaacatgtatgggttttgctttgaatctttcttctttgccccagggcaagctttcttaaggtacccaaccatgccacactggaagcatgtttttcgattgcaccctctaaaatgatgtttcttacattgaggggcactcacggtaagaataatcctgacttccacctctgccttggttccccgaaaccttttgctttgtcccaatccaccaaataccaaggtagtcttacttttctgatcagcagtggaatcaccactactcctaccatatctagaagtagggagagtaggggttccaccaacacttaaagtctcgtggggctttagaagaaattcactacattctcgctcataaagcctttgaggtatcttaagataagttgttgcatcatttgtagtggttagcagattatatttaatcttggcatttaaatttgctaagtatttctcttccttacaaaaattcatagctacttcacccgtaactaacttggctaacaatcaagctttgttgtgtagtcagttactgacatactctctggttgtattgttataatacctagcattaaacaaatcctgaatctttttccaggttgtaacaataacgtctcggatgatggacaataaattccatcgctcatgtgcatcctcttggaattgaaacataaggcaggtcacctaatcattctcggtgatacccataaagtttaagatttcccctcaaacactatgggccgcagttcgaccccatagcatctggactctttggaaaaactagaagtgccagcttgcaaaacctcatataaaggttttattcagtcaccattaacaaattgttccactagcactagcaaattcgagcagccgatacctgcggtgatggtactgtaggaggaccttgctgtcacaaccctaaatctcctctcccttgataatccaagcttgcattcctgtcaatctttattccaagttctgagggctagtgatggattctcataaccgcccctttttaaaccttccacagcctttgccgcatccacggggttcagatggttttgacttcccctgaccgcctccaatctcaacctcatcaccctgattgtgcatttcgttggacgtccttacactaggacttagcctacgaacccttacgtcaggcaggtcagacaacgatcagatatactttatgtaccatactttatggattttaaggcaatacagttagacaattaattataaactattatgttccttagcatgctttctaaatataacaattactaattatgtaaaggcttactgaaccgtgagttgagcttttctctaacgatgattgtacacgtcttgatgatctttagtagacaaacctggcggttctgatactaaaattgtaacaccttgatacttaggcgcgctaaagtgattttttaattaaggtgcctcctttgctaatcaaagggtttttctcaaaagtcgtgtcaaattaaaagtttcaatttaaattattaaactttatatacatatatatttatctgtatacagacgggatcccatatttaaacttctacaaacattatcaaaatatttttacaacttgtcgcataacgactacaaaatatagcccaacatgtcccgagaccgaacactccaagttgcaccatcttgtcctgtacaatcattgctcgagctcggaactcactcctgttcaacatccacctttccttcacctacacataaaagtagaatacgtgagccaatagactcagtaagaaaagcatacaacaaatcatatgttatcaacctgtgactaggcgcccatacacctatcacaagacttccaaatgattaagaatgttaataatagtcggtgctattgaccatgatatcacccactaccagcactatggtcacactgcaggaccgacactatgtttgtaccgctatgataacatcaataacacctgaaagtacaattggccatgatatcactcttaatcagtactatgcccgtactgacgaactgacacaatggttgtgcccctatgatagcgccaattaatactatctagggtgaatatcactcttaatcagtacggtgcctgtactaccgaaccgacacaatagttgtgccgctatgatatcacccaaaatatatacaatcacaaacacaacatgcatatataatgtgttctacgctaatcttacatcatttataaattcgagtgagttagctgacctgcacggaaaacatcacgctggatgccctctacttagaaacacttcaatcctttgctgcaacttagaagattgaagggaaatgagctgattccctcaagttcaagctaggttcgagagagggagaggatgaacatggagtcttctagctatttcttatatttttcttaaatgatcaattctaataatcaataagacataagatgaatatagaaatttgatttgattgccagttgtcccaaaaacaagctgccacctaatccccgaatgcaaattaccaaaatgtccatgatttgaatattaagtaattaataatcctaggggtaaaatattcaaaagtcataaccccgcttaaacccaacattctacatatctcataagtttttcctactaagaaaaagattctaaacttactcatgtgacacaaacgaccatccatcgcatgtttcaacaaatactacttttc

SEQ ID NO: 111274 - DNA, 1945 bp, Cannabis sativa
ttacacggctaaagtttaaaaggctgtaaactgccaaaaaaaaaacagtataaatgttgtttccagcgtggcacagtataaatgtaataaaatgggaaaaatcagtagtgggtgtaaattttcccttctattatggtaatagatatattatttctcttattagcaattaattttgaattagaactcatacatatatcttaacacctcactttcactactacaaaaaatttcttccatgaacatcaaagctgacattgtttagtgtgataataggaccactactagaaaaataggctttagagactgtttttgggacttacaatgtcgactttagcaaaattcactaccgatacagttccaagcgacgctgtagggggaaaaacaatcgacgacataacctatggcatcaattattataaaataaatgacgacatagtgtttctatgtcgtcagttattacacaataaccgacgtcatagttcctatggcgacaattattttgaaaataacaaataccataggggctttctatgattttttttagctttagaattaattttgtgtaaattataattttatttcttttatatatattattttattattaatagattatatataataagtataaataaatattaaattgaaaagttaaataaataaacatttacattattctaagtgtttgtatattaataatatttttatacatttaaatttataatatgtatatattatatattagctatatttttataatctaagtgtttgtatattagctatttttttatacattactctaagtgtttgtatttttctagtatattatcttttttataaatttttaagttttgttttgcataataattagtataattaataataaattaataatgtgtaatattttaatttttatataatttaatatttttaattatttaattttataatatgtgtttatatttttctagtataatagtataattttttaagttatgtttttgttatactcgaaattcgactatcatttcaaaggaggacacgtttcaaattgggaagaatgctaatcaatgaatgtaataataattatatttgaaaatggaataactcattaatgcggaagtgatagagtatatttacaacttgcttactataatgtcttacgcgagataaagatatacaaattgtggcctcgtacattaacgagaaatcatacgactttagatgtacaaggcgaggcattaaacttgctacgcgttaggagacgagacacgttgattggtaagacacttagcgtataatacacaatgtacaaactaagtaaaacagtcgggtaaacccaaacaactaatagcgaggcgtccatctcgctataggaaggcacgctcgcgatactttcactaatcagctccagacatctttcaatgagattcacagcttcgtcgagtaagttctctcggatagaagctgacattcaaatgatgttggctgttgaagttcaccttgtccctaagaactgcaattttcagatagagcattatgtcttcaaacgcaggaacgacgaggcttagatcatcaacctcgaaaaaacatgagaaaagctccagctcgctaccaaggttactgacgctgtgttcccatcgagacatcccaaaatgttacgatttacaacatatttaatacacgtttatattgaccccgtaaaagaggacctatcgcagctgtgtgattttcaaatgtttacaacatttattttatgtggtatgaaataaaaccccacgatttcaggggataattgttgtaagatatcagtcaactatgtaatcaactgccctacgatgtaattataaatagaggcaagttatactgaaaaagggatgaaaaattcataagagagaaaaacaacctgagagttgtatcagaaatctaataagattgacttgtg

SEQ ID NO: 111275 - DNA, 4561 bp, Cannabis sativa
ttaaaaaatacaagtcgacataagcaaaacatagtacgaattcgaacacgatacaaaaattatatattgttgttgtttatgtcaatcttaatgcattatgctaaaactaggtccctctttcaacaagtttcaagtttcaactgctataaaaattcaacctttataaagaaaaccaccactttacaatcaaactaacacaaaaaactaatacactctcttcttaggatgagtttggaaccaacaaacaagtaacaactaacaaccttttttacttcgacagccataccatcattcaattcaattcaaggtcttaaaacacacaattttccgagttagtttaaaaccatcatctccttttactcctgctcttagagaaccttgatttgctcgattcattaggtggtttccagatgatatcgtccagattgccacaaaaactcttgtaaaactgcaccacagcattattgaatccaatcatcttatttaccatccaaatattgaaatggaaaatgataaagagaaaaacaccgaccttgaggtactcgctagcatctccggctgctttttgaatgtccaccataaaaaatgttggagcaacttcaaatatcttttgaaaaataaaagaaaagaaaaaagaatatcagtataatcaaattagagatgatggtgcctgtagtgtaaactaaatttcaatctttaacttacttccattataaccgagaactgagtattcttatctgttgttgacccttccactctcatctgcaaatgatcaattttttttaagaacaagaccgaaacaaaaaatcattccaaaggtattgaatcagatgacgacagtgaatggtgtggtagccctgttctagttctatgcaattttcattggtaactaaagacaatcctataatccatgcaagtgcacttagagcatatagaactgatgaatatagattgatgaaatcaaaaccgagaagtggaatatagaaaggccttaccttataatttcgaatgtgagtcttaaaacccattgattgtgcaacaacttccatgctcgataaaacaacctttgcgggcttttgcgaaacaaagcgtgtttgatatttcatagattcctagaattgagaaacataaaactgaaacaaattaaaaaggacaaacattttgagctgcaggttcgataaatccattatatggagcaggcaacaaatataatgaatctgacacaaaatcctacctggccacgatcaaacagtgttgcaaggtttaatccttgagataaaattattaagtcgaatgcattgagaatcaaaggacccatttcttcatttcgacgtggctcggtttccctttcttcctacatttcccatacataacaaacttattaaatgaaagagagagagacccaaaatatcagttcactaaaacttcacagatacaacacatcatgaagaagcaagtatgaaattggataaaactaccgaaattaaattagtgaaattggatattcaggatttgatggattatgagatgatttataaagatggaacttgcaaaaattaggtgcagacaaggataataaatgctggtagttgaattaaaacaagatggatgtcaccgacctcaggaggatcatcgaaaaaggcattcacatcatccaggtttacatcttcatattcaaaaagtctaacagagacataattcttcttaaaccactcgtcatctctgatctgttgaattgtgatacgctgcacgcatattggagacatcaataacaaccgaattgaacaaggtaacatcaattagcatatactttccgaaaattgagtaaataaaggcaagctaaatgcttttttaaataactgtgcttacagtaacaggattcgggtctaaaattctatatatcaaggatttggctccaaccggaaaccatgttgggcaagaaaactcggccctctcaatctgcataaatggtttaaaaaattacatctttcacttgcaattattctaatacacaatctagaagaaaactaagcatgataatcgtaaagttgttgcatgaataaattcatgccttactgtaaagagtggtgagatcaagctcgtcaaatggaaggtatcccgccataagaacataaaggataactccacatgaccaaacatctgctacagcaccatcataacccttgtgaccgagtacctgtagagtatcaaaccgaaagattgacacaatgagagcagaaaaagtgaacagaatatctttcactttcattaagtcaaatttagatgagaaagcaagcgcctttaatgtatacttcaggtgctacataatttggagtaccgcaggttgtccgaaggagactaactccctgtagacaaaacatacaaagaataaaaattaagattcatatcatcatcttcaaaaagaattcgtcttcaaagaatcttacttgttcaggcaaagcactcaaaccgaaatctgaaatcttcaaatttccttgagaatcaagtagaagattttcaggctgtagggaaaagttaaagacagtaagaattcaatctatggaaagagaaataaaaaccaacaataacatttcagatgccaagcgacaatcacctttaggtccctgtgataaacccccttactatggcaataatcgacaccatcgataagttgttgaaagtatcttcgagaatcagcttcactaagacgtccttgttgagcctacataatccaggactttaaattttaacatatcacagatttttcgagtataatcgaactgctgctaatctggtgcaacagctgaaattgaaattaaactacttactattttatcaaacagttcaccacctgtaacatactccaagattatataaatcttagttcgacttgctaaaacctgaataaatgaggaccaaccaatgcttgttatggaaaaatttcgacatcatggaatattaggataaacactatagagttcttaaaatagtaaagaaatgtataacgaattccatgcctcgaataaacgcacaacatgaggatgcctaacgagcttcattaccgatatctctctcttaatctgcataacaagaacaatgtagcattacaacagaagaacaacttactcatccttggtcatgcttcttttagaatctattacaaaatctattctatgtttacaatgttgttagcaatacaattaaattcattatcaggaagacaattagactaataatgctgtgctttgctgacaattagactaaatttagcattatggctatctcaaaagtccccaaatatattgtcaaaggtacctctttccattctaggcaagaaattcttactggtatacaaaatcttgaccaattaaaacatgattttccactctgagcaaacaacagtaacatctcataatcaaatttaagtatatgaatcagagagcaaacaacaataacccctaatcacagaaaagttgagaaaagaaaaaccatgacaatattattagtactaagagattaattggggaaaagagttgaaaacctggtcaaccatcttgtgtttgatgatggtatttcgatccaaaactttcatggccacactctcaccagtctcagtattctgagcaaacttaaccttagcaaaagtcccttcaccgatcgtcctcccaatctcatacttacctacttttctcaccaccatctctctctctctctctttttctctctctgcaactaatatctcttatcaacaaaatcacaccatgactgatactataccaaagactcaaactttatttttaaaaaaacaattaaatacaacaaagtacaaaggaacttgttaatcaagcttggaaatttacaccaaacccagttgtaaaactcaaaagggtattctgaattttctactgcgaagagaaaaggaatggaaaaaggaacatgttcccccaattggggtttgaaaattgaaattgggttaatgggaaaagaagaaatttgagttgtggggttgaaaaaagattgaaactttgacaattgggttaggtgagaaatgaagattttgagctaaatcacctttttttccccttttgtaactgaggaatgtttttaattattaaccggaaaacatgtaaaaatgatttctttattcaattttctattttatgaagacaatcattttgtactctttttcttttcactttctattttggaattatttactattaaatttttttgagtgcatacttatccttaaaaaaaatatctttacgttgtaaaaaaaataaaaaatctcaaaatcccataaaaaaaataaattaaataaaaatagactttttttaaataaaatttctattaataattaataagtaaatgagatatatcctattacaccctattacatgcagatataaaaatatgttaattaaacagtttacattaaataagataaaagttctaataatattttggaattattgcatagaaaatataaattttatttacaaaaatacttccataaagtaaagacaacatttatacattttatgtaattttaattaccaaa

SEQ ID NO: 111276 - DNA, 6687 bp, Cannabis sativa
aaaatttaatggtgtttggcacaaatttttaaaaactaattttagattttttcttaagaaaaaaaaatcaatattttaacaccataccatggcattaacgtatacgggtccaagttcgggtctaggatctgagtatgtgagcaaaatataaaatataatatgttagacaaaaaagattgtttttgaaaattgaaaatagcattttgatgttttttgttttctagtttttaaaaactcaatttttaaaaaactgtttttaaaaaattttgccaaacgacccttattagtttttaaaaacagttttcagttttaaaaaacagaaaacagtttttaaactataaagccaaacagcctcatacatatctatcatcagttgtaattaaaatatgttggttctcacttagttattattcatttataacagagagcatcctgctgtcgatggattcagatgtctattcactgttgatgggttttcaaaagttcgttttcaacccggattcccacctatttcaatggtagaaatctcacctttttatcattctcaaagtaaaatgtaacactttccattgaatcttagctgttttatacaaaatgcaggttagagagcccaaagtttatgctcatggaaatgaaagtaacgaagatgttataaatagaaattggccgggatgtttttcatagttatttggtaagattaaatacttatggttcgaaactcaactactatagtatgctttggctacacttcccaactcattactatgacagctgaagtgtgtatactactcttacccatgtaattggcctctcaaaaaagggaataacttggataaaagcctgaatatttctgcttgagtgatcatcaactttcatcttaaaaatatactttctcagaattgagtgaattcaatatcaaatctgtgtaataggtgattaaagtgaactccatatttaagtttaagcatatacaatttttgagtgagttttgttgttttgtttcaatgtttcctgacattatatatgtgcaattttggatagttcttcttttagtgcaatgaattcagacttaatttttagaaagaaaaagaaattaataaaagttctttcttggatttgcttaatttgtttttcattatcctttggtttaagatcaacaaaacaagcatggaaggaggaagaattttcaatgtttcaagtaggaatattcagccttctctgtctggttggctcattgactgactttactacaataaaatagaagtcatcagtcaaagtcatgtgtgtcatttgacgttttcctagaaactacgagctcatatacatttgactttgatttttatcatcagtctctatacccataataaaagcctgtctatttttccacatcttacatagaaaagcatcaagacccttgtccttatacatcatcacctctcaaatccaagcttcatggccaactatggaaccgtccaaaggccgtccacaacctcagcttctccttctctaggcgagccctacaacccaaagaactccacaagaaagaacctatcggtatccgacttcaaacacctttggcctttcaatatccccacaacctcagaatctgcagccgtaagaatcatcagaaacctgggtgactttggattgttctatgctcttttcatatggattggcctctttatatcccttataccagaaagaaaagtctcattgatttatttggtgattatgacctatataacatctgtgtaccttctggtgttgagggcactgcccatgtctattgacctcaataggtttatagacaaaaaagttgtccttttcattctggctatagtgactatggttgagctcatcttaacaaaggctggtctgcatctccttgctactttgggttgtggtgttccaataattttggttcatgcagtttttacaatccgaagtgagctttcggtgggtggtgaagatgctgtcgaaggtgttcctcttatgaactccagtgaaacagaatcagttgatatagtttgaagagttctctattaagtgtggaattaaatatttagttttaattttttttaaaagaaaaaaagtttgaagttttaattaaattttgctttatttgtgtactgttgattctaaatactgcttagtttagtttaagtgttcttaaaaggatatttttttagaggctttgttctacttagcactgctatgctctcgtgagatgcttattgtgaatgatagcactaaaaatttagtggctgcagtcaataatcaacttagtgcactttcgtttcacctcataaataatattgggtggatatgaagaagattattggaatgtttaaacaaccagaaaatgatcaacaagaaataagtgccagctgtcccaattttgttaccattaattcaagtttgttaagttaattataaattgattgttcgattcctttataataaaaagtctataaataaagaatctatctcaattggattagttgagcagctcaaaccatttctcactcttcattcattcatttcaccataagcaccagagaatgttcaaccaactgctccattacaagctcaagaggctgccttaccaaataataatctactttcgctcaatcttagatttgatcgatctaactatactctgtaaaaatcatttgtgcttgctgctgtttgtgcttacaaccttgacgactatcttcttggcacaattccacaaccttcacagcttcttgcaagtaactatcctaagcctgcatttcaacaatggcttcgttttgatcagttcattatgcattggctaacgaactcaataactaaactaatgcttgattatgtgataaattttcaaacctctgctgagatctggacaatcttcactcaactcgtcgccactagatccagagcaagactccttttgatccgtggtcttctgcaatccacaaagaaatgatcacttttcattgatgaatacttcttgaagatgaatctgtatgcaaatgcacttactatagcagcacaacctctttccaatgatgacttgattctctatattcatggtggtcttgattcaaattatgaagtagtagtggtgaactttacctctcgaactgacaatcctattttgcaagaggttcagttcatgcttcacagtcaataaatgagaatcaatcaactcacaattgactctcttacaaatgtgcaggcaaatcttgttaacacaacaaataccaaaggtggctatcaaggcaattcaggccatggagatcatggcttcagaggtggtcgaggcaactacggaaatcgaggtggaagagccacactagaataaaagagaattaagatcatacaatatgaataaaataaatcgatagtgtataaaagtatgaaatctttaatatgaaattattaagtacggtttactatgtactatactctagtgcgtgtgattttaattgagatcacatatgtggatagacatgtggtaaaggtactgtgtataatttgattatacatgattgaatcaatatgtaataacatatttcatcaacatgttatttagcatgaaagagttattcatatcacaatgatgatcattagtagatctgtctaaatccgtcagagtcgtggctcgtcgctcgagacttgaattcaccatcacggtgaggctaaagtttattctttaaacccgagctcactcaatgtaaaattcttatactacaaatatggtgtattttctaaaatatatataaaaattcttaacccaaatttactatataattaacaattcacaatcatgtaaataaactatccattcttaatatatcatatacataaatgtataatatccaacacaatatttaatttatgtaattgtggagatggctctggtactatttgttgactttttggatttatatcaaagtcgcggcggaagcataaaattggattataggtttttaaaaaaatattcgttgaatccgatatgaatcttaaactccggatctcaacacaatataacataaattaaatctaattacttggaataagtattttacctctttatgcctatcaggggattcttgtatcttttcatataattgtttgatcatctaatctaaagttttatgggcttaatgaagaatctacaccagatctttcagattagcctcaacacttaagataagagtaggcttatagagatttaatgaaatgaatctattttaaaatatttttattattaaataattaattaaattagaattatttaattatttaattacaataaagacaagaaaaaggatttaaaaattaatttatattgattagaaatttaaaatcatgtggtagtggtaaatggagtatgttgtgaaattcttaaagctacatggatggacaacaagagagagtcaagagagagaacaagacgagttcttgaagaggagagttgtcttagtgtagtttatttcttttatttcaaagatagtaattttagaaatactcaatatttactcggttcatattttatttatttatttattattgttaaatacttgtttactaatagttgattagtacatgcaaatacataaaatctcacacaatttgctattttgattattatgcatctcattttagaacatgattatttaggactattttatatatttttgtgtattacatttagtgaaatgaataaacataaaatgctaggttgctttaaatagtttaaatagcttggtatatcaaatcaatagactatctcctaaagttagtcactaatttaaccaacttttttttctcttaaattgtcttcaaaaattatttttgtaatatggtattagttaaattatttttaggcctatactatagtaatttaattatacaagaggctaaaattagaaattaaaatcttttttttttcaacatgattttagtaagagaaacacgtgttttaaaatagtgagtgggagagagttgtcatctgttatgaaattcatagtcttcattattagtccaacaccgagagtatgaggagggcatcaagacgactttattttcgtcctcctaagaaaggtgttgaaccatgcagtttcaaggttggcttcctctataagataggacaaagtgatgtactttagtgtgatatcgatcggcaacattactaagttaagtcatggaatccaaaataatggattacactcacaaagtaatttcactgtctttgacgctagggacataacttgaccaaacaagcaatactttactttgtaaagaaaataagagttgttctagttacaatcaataaagacaagaacaagtcttatagattattcaatgttaatttgaccaacccaaaggtggaattttaatctttggataatcttatcgtagaatttctaaattattttatgtgttttaaatgtgttcatgcatcatatttagattctaaatttgatatttatttttttcatctatagcatttatattgtgtttgtatcttattgcttatgtcctgttttattttaattttatttcagtctaataataaaatgacacactaacaatataatattaacaattacccttacaatatggtaacagtacttgatggtgatttcacgtccgagtagagagtagacatagaacttctacaactcaaggagaacttgtatgaattagtagctgaacaagactcatggctagaagtatgtgaacaatcgagtcacgcggccaggaatgtctttgcacaataacaatatcttgttgacttcattcaatgaaaagattagagaaaagtatgacatgtttgtctacacttgtgatatttggaaggaacttcacaactagtacggtaccgctcatgaacatttagtttaagagagaaatgtttttcaaaataagttgaatattttgacaaaattacaacatgataagacaaggtaaatttgatttactctacatccctattatatcagtggaataaattgttctttgccactaataatatcttctcttgcttgcagtttttggagtctaggtaaataatttaaggaagtgagacttcttcaaaggtccaattagaggcaaattttagaagagcattaaaggaatccaagttttaattttagtttaagagttttatttaaaagataatttattttaatttattactttgttatttaattgttagttgcatattttttttttatctatttaaataaatttatttgaactttttgtcaaatttaataaatatttatttaatttcaaatcaaatgtgcaaagttaacttttactaaataagaacttcaatgctcatagtataattttaaaattaaaagttgaatgttttactatttattcctaataatgtttataagttaaaactatttagctagtaacttataaaagatttttacacttaagtttgattgaataaaattgttttaattctaaaatttaaacttaataattaaatgagatttaactagaagttttgaatacttattcaaaatatacaaggattagggattcaaagtcaatcttatataaccaaagactcattaaagaatctatatattaatataaaggaaagcacaaatgagatgaagtggcattctataattattttttggctatttatctattttattaggattttagtaaatt

SEQ ID NO: 111277 - DNA, 3419 bp, Cannabis sativa
ataaaatgtttggtgtaagaattttggtgagtcttagtggagattaataaaatcttaaactcaagtatttacaaaatttgagataaaaaataaataaataaacttaaaaatgacataagatttgcttaaccataaaccttgtactaaaatacataaatttaattttacatttatattcttaagaatataaaccctataacaaaaatcccatgaaagatctatacatcatcatggggtacttaattatgtctctccgacccaattcaacaccaatttttgttggaaagatgatgataaaatacaacactaaagcctaaaaagctaattttcttttacacaaaaaagcaagatacaaaacatcactttgagaaaaccaattgcatagttcaattctataattgattattatgttaaaaaagaaaaaataaataaataaaaacctacagatgtggtcatttcgcatataaaaataaatgttaaaaaaatgtcatatatggttaaaatataggataatttttatttatatacaagtaaatacacaatattacaaaaaaaaaatataattatataattttatacaattttatgaatatttacaaataaacatatatgtttacgattttaacttgttgattactttcaattgaaaaaaaaaataaaataaacgcataaagctaaatatgtaaatataaaaattaatatttatatttttatatattactaaaataatatgtttattaaaatttaatacgaaattaaaaaaaaaaaagaatacacaaacaaatttacaaattttgtttatattttaaaacaatgtgtatatatatgtttattaaatatttgattagtattattaatgtttataatgttattactaagctaatatgtttattatgataataaatataatttgtttattaaaaagttataacaattttaaaaatacaacacttaagtttatttatttatttaaatatatgccttttttttattaaaaggtcataaataatttaaaatttaacatttattcttattggttattgaaaaatgtgtttaaataaataaataaaattgtatttaaatgtgaccttatttataaatgctatgtttatattattattgataatgtttactaattaataatctaatatatttgttaggataatgtttgttgatataatttttctgatcaattttgtgatgatatgttgatataatgtgtttgtaaaaatttaaatacaaatttatgaataaaatatgtgtttattatttattttttatttatgtttatatgtttattatttatttttaccatatataatttgtatataaaattaagagtatgtttctcatagttaataaaatgtataataaaaataattttgtatacacatataatgtaattaagtactataaagtacataaagttgtaaatttccctaaaaaatatacatcccaatgttaaaaaatttcattactcataaaatatgcaataataagattcaattccatagataaatatattacatataattataagtgtacgaccatagatctatagaatatatttattaattcaaagagaagaactcaaatagcggaagcgtaccttaattcatagataatgataattttaatctatcttgtgatgattttgaataatgatcttccaagaaaataagacttatatgggagaagatgatttttttaatttgataattataggttaaaatagtagaaaagcttccacaaaattaaataaatataataagagtgattataatataggtctaaatatttttcattgataaataagcccccacaaaataaaaattctgggtccgtcactagtgttatgaatataatctatagttcaataaaaaaattgtttgaacttcatatatcaataacttcttccacccttaagtgttatagaaattttttagagttttgaatatagtctagagtttaatagatataaaagatcgtcgaattgcatatactaataatttcttctacccctatcagttcaaaagatctttttattaaacaaaatcttaataattgcttaagaaatgacaattattcataaacattaaatttaaattctaattgtttatgtggtattatctattttcaaagattattataccatagattttgtaccaataataaaatacaaaataaataaaatatgataaacatataaatataatttagtattggcatacacgttaaagaatatgaagctcaatttcataatgaaaacctcttaaagagaaaattttattaatactctaaaaaaatgtcataatgaattgtctgcaataaaatgaaataggaaataatagttgtatactaataatttaaactaaattgtttaataactaaaacaattaatgcaaaaattaaagaagataacgagctttatcttcaacttgtataatctccaccctactgtcaaaccatccttctcaattcgctaggatatcaatccaagtttaagcagctggagatgaaataatatcttcaacttttaattgagaactttcccttacggctgcccctccaaaaatagaatgtcattacttctttccaaaggctgaattcggataatatcatcaactatttctgtggaaaagcagcaaatgatcaagctttcattccacctttgagtgcctgggataaagattcaaaactaaagtaaaagcatgagtaacattataggagaaaccattacgaacctccaaagggctgaaccccggcacccaaggcttggaccaaatatcaatctttccattgcccacgagataccctgcacctgagatgcacagctcacgagtggccagaatgccacgccacacccttaagtcatctcacttttcttgaacataccaaaaatcatccacaaagcagtattttgccttgagaatttgaacccagggcctgctgcagttctctccatctaacataaaccaagccaactttgccaacagggccaaattgatgtttttgaatcgttttgaaccccagtccaccattacgtttaggttggcaaaaatcagtccaacatttcagcgcgtagtaccgattagagtcaccccaaggcatggatcccttccaccaaaaccgagccacaataatatccatctcaacacatatgaacactgggattttcatggttgacatggcataacagggaatgctttgaaggatcgagttaatcaaagtttttctccctacaactgacaagttcttggctttccatccttccagccggtttaagagtttttctttgagatacttgaaatcgttgcgctttctagcagagcagaagaaaggattcccgaggtatttctccttcttatctagcaacttgatatctagtatgtaacgccccgatttcccgagacgtcaca

SEQ ID NO: 111278 - DNA, 22340 bp, Cannabis sativa
  modified_base (3355)..(3359): a, c, t, g, unknown or other
  modified_base (4972)..(4972): a, c, t, g, unknown or other
aattctgcgctgtttttaattagtaatcccggttaggggattagggtttcataatcattttgggtagcgtgcctaattatttagggcgttacaccttaggtctctggaacaagctggcttcattctacatgaaaaaatatcttgcaaacaagttgtatctcaagaaaaagttgtacacacttcgaatggatgagtcaaaggaattaagagagcatctagatgaatataacaggatcattcttgatctgaataatcttggggtgaaaattgatgatgaagaccacgctataatcttgttgagttcacttcccaagatgtatgagcgctttgttgatacaatcttgtatggcaaagaaactctgaccatgacagagattaaggctggattgaattctaaagaaattcagaagaaaggagatttgaaaaaagagaccaatagggaaggattattcattattaaggaaaaattccccaataaggaatacaagggaaatcagaactcaaatagctacaaaggtaactattcaagatccaattctagaaactccacaagagggccaaactctaatagagttgtaggaaagcaatgatattactggaagaaggatgaccacttaagagatggttgtttgtctttaaaggctaaactagagatagaaaattatcacaagtccaaaaggcatggagttgttgatgttgcagatggttatgagtcatttgatgcacttgtagtgtcatctgatgcacttgtgatgtttagatcagattaaactagagattagattttagtctgagggtgttcatttcatatgccatcaaataaagaactgtttaagactctttcagagagcttgggaacaacaaaacgtgtgagatcaaaaatgtgggaacaatcttgttaaagaatcatgatggagtcatgaaaaccttgcagcaggtcaggtatgttccagatctcaaaagaaatcttctctctattggtacgtttgataaattgtatgtcgtcaaagttgaggaaggtgtaataaaaattgcacaaggcactgaaactgtgatgagagaaaggttgagtaatggaatgtatttcctagatggaaagacaaatatttgattttgaattgtaacgataatgaaaatccttatgattttgtaaaagttaattatgtcaactccaaaataaatggtaggtaagaaaaaaaaaatagaatgacacttttgttaaacacatgtctcaaaagtattgatcgataaaaatttataagcgtaagttacttcttctcgtaaaaagtcataattgtatttttttaaaatttatgctaacttattcgttattcgtaaatctctgtagttcaattaatatacaacacgttattaatgataaactacatctaaatagagacttttgtttttgatagaatctagatagatacattgtaacgtattattaattaatagaatgaaacgataacggtattggtagaaaaaaagaaatctaaaaataataatattctaataacgagtatggtaaagtaatattaaatctaaaaaaaagtattataacagtaattaatgataaaaataatgaaatcgacgaaatataatattttcataacggttaaaagataatattctacttaaaagttagagtcaagattaattactttgcaataaaataagcattgtatttacaatttttgctcactatgacactataatttagaaataagagtgagtagaaaagtgagatagcaattttaattattttatttataatcttattttagaaatataaataatttatagagaaagagttatagaataatcttatttattattttttttttaacaatgaacttgaaagaataatcttattactatggaacaaataaccaaaatttgctcctcatttttatgctgagcaaaacaatatgtttgatatcgtataagaattagttatttatgaccaaattgtaaaatttattttgagttgatgtttcatgctataccttaaaaaaataataataaaaatcatgccatacaatgtaatatatgtaattttttatacaccacaaaattgttagttagtataatttgtatcgatcacattatttaatgtcaaaatatggttaaattgtttcatatgtaggttcaggtgtttagtctttgtttggttattttgttatataattatgtttgaactactgagagtgtctaatatcatcccttgtttattgtagtttactaagtatatgtcacctctcttaggttgataaacatgttaaatatgtttagtatgttgttagtgattagggtttatgtaaatagtttaatattgttcgttaactaccgaacctttttttttttaattttaatagtttgttacacgagaaaataaattctgttatttctcttattgttttctttctttcttctctttgttaccgattcaccattgttgcaggggaggttctcatacaaagctagtgtgagatttgaaccaattcgaagggagtttgaatcttgctagtgaaaggattcaactgtcatactcaaggggatctggagtcttgaatcgagggatgcgagtttaaaaggtagttagaggtactttttaattgaattgttactcatgatctagggtaatctgtaatttcgtaatcgattgatgttgattaagtttcaaaatcggttactataattaatattttgatttcattagtaagagttacactttacccaacccaaacacttgttggttggaatgtgtttctaatgcaaatgaaacttgtaaaattctggcataaatttttactttgctttctcgtgattaattccttttagtttactcaaaaaagaaccaacatttaagaacaacactttcataatcttttctacataatatatcttcattaatgcactcaactcatttcatatgtatttgttattatttttctatatataagcctgtaaaataaattaaattgtatgttaagagtttgccaaaaaaatatatattatttatacaaatataatattgcattataatttttacaaataccgaaaacagaaattcttttgcagggaggacgattacgatactcatactgaacattaacaaccatcccgcgaggattcatttggtgtgtactatattagatcgtattatattaaattattttttatatcacatttttatatataatactatattcattaaaattaaaatatttatatttatatccataaaagtcaaaactaaacgtaactataatttaatgtaatactatacaatataatataaataaataaacaaacccctattacacatacgaaagataataataataataataannnnnataataataataataataacaggataagaggggtaagtagattggtagataggtaggcaggtaggtataggtactaactagaggtgttgtaacttgtaacttgtaacttgttaggcaaatttgtagtgtttgtcaacagtgagagagacatcccaagtgcaactcatccctttgggaaattccaccaaatctccagcctcaatctctacacactccttagctccctcaggagtcacctttactttcccttctagcaaataacatgtttcttttgcttcatatgtccatggaaatttgcttggaggacaaccccatctacattattcattaatatattataagaaaggaatactaatacactctaattaacacaaaataaccaaaataaaaaaaaaacttacttgggccaatttcttactcccatttgtgtaagtttcgactcgggaggattcttctcgattttgatacctaatttctcggtagtcatagacatggctatacgagaactgcaaccaccaccaccaccactaccaccacgatttgctacaattaaggtagcactactcactcctaataagcttgccattttcttcttcttcttgtaactttactatatgtattgatttttcttcacaacaagtacaagttctactacaaccacttgttattcaatttataattataataatatagtaatgataataataataatatgtgatgaaaattactgtcaagtgtcaacctctcacacctcatctcatcccatcctctcttgtttcatttttccaatttacaattatacccctttcatatataagacaaaaatgaaaaagaacttattactttggtggagtaattggtattttgcttggctgttgcccacttgttctattgtagggttgctttggtgggattttatataattaataattacttcacaaaataaataaataaatttatcttcaactcttcaaacactttataattaactctctttacctttttatttttggtaaaataaaaatgtgatattatgactcaattatgatgacttgactacccaacatcatcctactacatataattttctcattaattataataatatcatatgaaaacaaataatgattaaaatgaattatatgtatatatgttaatattattgcttaattaacattcttgagtcttcacacactccatatgaccctacctcactacccaacttgattcaaaaatttggaatttttatgaaatgaattttgaattaatttttttttataattaatcttaatttttttttatgaggagaaaagggtcaaacatataataatgaaaatttttacaatgcactccataaaaaaaatatactgatgtaattaatgtatctctatctattttggcatccgaattaattttttaatcaactacattataattatttaagacatcatacaaaattttaaatactttagaaaatttaacacacaaaaaatataattcaaacagtgtgttgcacgcgtgactattttattttgtatgcatgtgaaataggttgtttgaacattattttttatattgtaagttattccaaaatttttaaaattttataaaanatcttaaataactataacatatgcgaatataaaaaaaatgcactaatatttttctagatgttgaaataggtagagagtgcatcagtgcattcttttttaaggagtacatagaatcactttataattattattagagtattgctattggctattagtgatgccccactttttataggtgacgctctacgatttgttatcgatattctctaaaagttattttcttaaataacatgagtcccgatacttaattacactaataacaatatgacaccgagaaaggtactgaacaccaattattattattattagagcattgctattgaccaccaatagtgtccaaaatcttttataagtgacgctccatgattaattagtgatgtattttttaaaaattattttcttaagttatataaaatccgatacttaattacactaatagcgatatggacaccaaattctctaattattattatttatgtaaaaaaaaagaaaaaagactaagagcccaatagtcttgactagttcagtcaactggagctgctggttggttgtctctctttctctctctaaataaaaatagaatcaaaaatgtgcttaagcactactactacccctacagctgacgtgtcacatttcgattgggtaatacccgacacgcaagctctactttttcgtattccaacaattcaaagaccgtaggggggtggaggtcacgtggatataacgcaaggggtgtacagtagtaatcctgtactgcgtcacacgtgataattacttctcctcattacaaaaatccaaaacccaaaacgaaatatacgaaacgagaaaaataaaaaggagaaaaatatatattataattaataaataaataaataaataaaaaaggaaaaatagaaaggagatgaaaatgtgtaaacgaagaccagaagacttagaagactaaagaggaagaagaagacgaagaagaagaggtgtaaatcgtttaaatccttagctttgaagctcgatctcttcagctgctgtgtttgaaagattctgaggacttgtttatcggaatcgcgcaccagacccatctccatcaaggtccgttttcttcagtttcgtaactccgatccttttttgtttttttactttctatttttatttttcgtactgtggaattttaaggatgtagatttgggtttctaatttgtttttggataagtttaggctttgtttagttttttttttttttttgggtaattaaaaaaagggaattttgattttggagtaatatttttgttgttcgttaggttttgtatcaggaattaaaaaaatttgaatttttattgttgggattattctatttttgtttttattaaaggggaaaataagaaaaataacatttttaggaaatttgtctaaatatagaaaggaaataattggttttgtggatttatttttgcagagttttgggggtttgattgaacttcaagtctgtgatgctgttgaggaaataagggattctcttgaagagcttttggttttgatttttgttgtttatatatttatataaatatatcagaagaagaagaagaaaaaaatgttggagggtggtcaaaagtttcctggaattataggtatgagtaatcaggacaacaactactgtgatttgtcccaagggttttattataagctcgatgaagggaccaatatgtctgttgatagttttgggagcttgcaaactagcaatgatggaggatctgttgctatgtctatagataacagcagtgtgggttctaatactaatgattcccacactcgtatcttgaatcaccaaggccttagacgacgtgcaaatgataattactctgtccaacagagtgttaaccgtagaggaagagttatgcatgttctgagtgatgatgcccttgctcgagctttaatggacagtaattccacgacagaaggtcttgaggattatgagaactggaccattgatttaaggaagctaaacatgggggaggcctttgctcaaggggctttcggaaagctatatagaggaacttataagggtgaggatgttgccattaagattttggagaggccagaaaacgaccccgaaaaggctcagctaatggagcaacagtttcagcaggaagttaagatgctggctacactgaggcatcccaacattgttcggtttattggggcttgccgcaaaccaatggtctggtgcattgtcactgaatatgctaagggtggttctgttaggcaattcttaatgaagcgtcaaagtcgctcggttcccttgaaattagcagtcaagcaagctttggatgttgcaaggggaatggcatatgttcacgagctcgggttgatccaccgagatcttaagtctgacaaccttttaatcttctccgacaaatccataaaaattgctgattttggggttgcccggattgaggtgcagacagaaggaatgacaccagaaacagggacatatcgctggatggctccgtaagattttcaactcaactgcaagatattttctcacctttatctttttttgggggaattccattttatggactccttcgttttgcacttactgtcgttttatttctacattatttttttgtgtcatgtttttactttattgtttgcttttagttcctgaatagtttctgcttgtgtgagtccagtctatcactgtcagtctttatatgtcatagatagtttgctttcatatggttgcttcgccagacactaactgcagctggttttggacttcgaactctttctagtatggaatcataaattgttccagcaaccatatttatgaatagtcctcagtgtgattctcttaaatgggctttcatagtgcattttacttgcagcttttcaaaatagctatctgtataatcttccttccaattctaggccaaggtgttaatctctatccttctttgatttttaactttgtccttaaatggttattagttttcatatgatcatactagcatctagggtctcttttcctgtgagttcatcccattttctgtgattttttttataatattctgtggctcatattcatcctgggatggttcaatatttggtgaacagaatattctttgatgtccgaagtgaagatcatgcacaagagcacatgttaatagggccccccctttttcttttttattaacaaagaaactaaaatattttatctgcttttggaataaggctactggtttctagtgactacaactttcgtgattaatgcagaattctcatttgatcttatctttctttctatcgtttcttaacaaatatgacagcataaaggtcttaacttcttttgtcttatcttgtgattgttttgtggatagtatatgctccactttctagtgggtacccaggttaattgtatattcatgttcatggttgagcaagtctttgagacttgtaggtgtgttagttcaatctacaagtaagtgtctgatggtttcgatcttaatgacagctattagtgtggttattacaacaaacatgcatctgaatcacattgtgcaggagtttatgtctcactttttcttatagttttcacataagaccagttcagaagattcggtggtgaaacatttttttgtgcaatgacttttccgagaaagtttgattttttattttgattttatgttgttaacttgtttttttttccaatgtggtgatttttttctccctctttttggaaaattcggctctgcagtgagatgatccagcataggccgtatacgcagaaagtggatgtttacagttttggaatagttctttgggagcttatcacggggatgctcccatttcagaacatgacagcagtgcaggccgcgtttgcagttgtcaacaaaggtgtccgtcctatcgttcccaatgattgcttacctgttctgggtgagataatgactcgatgctgggacgccaatcctgatgtgaggccacccttcaccgacgtggttagaatgcttgaaaacgcggagacagagatcatgacaactgtgcggaaggctcgtttcaggtgttgcatgacccaaccgatgacagcagactgaccgaccaaccaaacctctggagaaaaagggaaaaaagagaaaaatgttacaagaaaaagaaagagaaaaagaagaaacttggaaaaaaaaaaaaacgaaaaggataaaaagaaaaaagaaaagagagagagagaaagagagagagagagagagaggcaagagaaggtcattatattgttgtagcttttgtgtatttatcaggttaattattatctttggttaagatagaaaaaaaaaggaaaagtgatgaaaggaatatttggttttgggggttcttccttcttctgttattaatagattcggttgctgctgctgagttagtaaaataggatatttgtgtgtgtgtatatacatatacatatacatatatatccttgtttagttctgttttggggtttctgttgtctctttgctatgtattaacacctcccttgtttagttctgttgtattgacataacgcaagatgttgggttctccatccaccaaatatatgtcaagcacgcaattgttgtattttttttttctttttcttttaggggggaaagactaaacatatatatatatataatataatataatatgtcaatttttatacagctaagtatacaatagatataattgctcaaatacagggcatggatgcatgtatctgttttgttgtgtgttaataatttggaaatgaaatgttctgactttaccaaaatctattggggctggtggtgagtgagcatgacactcctatagtcctagtcttatggccactgctgctattctcgaattctaatcccgagtcaagtggtagcattggtcgaaagtgctgcaaagctactttgcagcaatctcgaccagcctcgttcacagaactcgggatagaacttttttgttcttatagagtaagattgtttatagattgatttggttcggatatctaatactattcatatgcttaaagactgttttttttgaaccaaattagtattgtaattttgtaaagctttagaattaaactagactaattaaataatttgaatcaaatcaaaccaatcgactacaaatttggttggtttggttagaattaatttagttgggttaatagccacaaattatatgtcatcactcatgagtgccatcttatgtcttatgttagtaaaaaaacaccaaacaggcaatattcaattcaattatgaggaaagtgacactcatactttttcaatcattcaatgatttcaaatgaaagaagaaaagattactaaactagagagctaagcaacatagaaaatttgagaaaaattattaaaaaaaaagtgacttcacttcaaaattcaatatcattactgtgtgtgtgtgtgtgtgcttcttccttcttctagggcttacaaattgtacaataagaaaaagacaaatctgatggaaaaagggttagacatgaaattctcttaaaggagagtataatccactactgtactactccactctctcttttatcaaatttgtttattgttgggttggaaatggcaaaagaaggaggctttttcagaatgcaattacagatacactctgtattcattcccaagccaaagccaaggtttttattcaatcttaaacacaaaaagattgaatctttttgctccacctccactctaatcctaaattcctacaaacccaataaacctcaactcgtttggccctctcccacagatgagattccattttggaacaaggagtttccttgttctgatcacatgggtgttgaatatgatgctgatgctgatgtggtcagcaaccatgatcatcatcagctcatgcacatcactcatgtcacagctgaaatggcacccatagctaaagtgggtggtcttggtgatgttgtcactggacttgctcgtgcctctttatcttgtggccacaccgttgatataatgctccctttttatgagtgtatcccaaggcatcaaatcactgacttggctttaatcaccacctttaactcataccatgatggtgtttggatcccaactgaagcctatagaggattggtttcttctatccctgttattttcattcaaccctcaaaccatttctttaaggggaaacatgtgtatggtggctcttataacgagcttgatgcttatgtcttctttagccgtgcttgtcttgaatggatgcaggtctttcttcttcttctttttgatatttggtcacaacccaatattcataggcttgcttactcttttaagctttaatttattcaatcacaggtaactggaacccaaccagatattattcatgttcatgagtggcagacatcagttttgcctttgctttattgggatatgtatcataatctttctctaaaggtactcactttatatttattactcttgttttgtttggaaaaagttatcttttttgaaaaaaaaaaataaaagacatattcttattcactttctgctttgtagaaaccaagaatagtcctatcaatccataacatggagcattttggagagtgtaggtaagtacatgtatgatgattatagttagagaaatactaaaaaaggcaccagtggttgtaacctagcaccctctaacatgtcatatcactagtgtaggtgtaattaagttcagattttatatagtttaatataataatttttctagaatatcggtaaccaatcgcaagacgtcacctttaaatactatcaggcaccactagtaccttatagcaatactcttatagatattgggattatgcttgccttttatgatcattatacatgaaagtttggttagaaaatccttcattatgtatgaaattgtagatttttaatacacaatagtttctatccaaatcttgaaagaattagagaataagtattttattgatatcaaagggaaaaaaaatcacatggttacaaacttttcgagacagtttggtaacaaaacaaattttcctcctcttataattgatcagccttcccttaagttgattttgtaggataacagatttatgcaaatttgactactaagcatctaaaatcctatattgagactaatataaaggcgtaacagattgatgtatgcaagtcttctgtatatctatgcagatgagattaattatttaaagacaaatcaattgttgaactattctatgagttcattaatgtccatttaagtcctttacatgcatgttatcttattttggcagtgaacaacaacttagcaagtctggtcttaatggttctctatatgcaactattgacaaggtgagagcttttatctattgacaagaagtacagctagtattagaggaaaagcttatcttttgctaaatcaaagtgtttctcttctcaacatggcaggcagttgatgaacgaactgttggccataatcccgaaagattgagcttattgaaaggtggaatcgtctacagcaatgcagttgtgtaagttgcagcattgtgcatatttaatttctgcttatgtgattctttggaatatctaaaaacattttagcaattaatatctgaaactcatctcatgaataaatttgaaaaattactgtgattagtatcaataagtatgttgtcggttaaggattactaacagaaacaggatgagtataggtacatctgtcttagctcttcaaatgtttttttcaagaagaaattaaagattgctgtttcaacataagaattaaagatatagacttatatgtttattaaaacattgaattattgatttgaatactcatagttcttagattatgcattattgcttattaaatacttcttagattattgaaagtctgttgatagcttgaatttgagtcctccataagactctacctggattaggaagacatggaaacttcgtcaacctgttgacgggtacatttacgctgtttcattaccatgcattgcattatcaacaaccgattttttctttcttttaattcattttcagcacagtctccccaacatatcttaaagaaactatgtgctcaggatggctttcaagcactttagtgagcaatcgacataagtaagttacaagttgctttctttctctctatatttatgtttttgtacttggtttatatgattttttggacctttataaaagggtgttttctttctccaccaaccatgtcatgtaaacattctctttaagtatttacaatattcggtaatgtattcaatcaagaaaacaaacgaaagataatggaacatagttatgctccttggatttgtttcatcaaggaaacacatcagtcataatcccggggaacactttttaacacctaaaccagagccaacattactccaaatgatattcttttctcggattgcattcatcacaaaattccttctattccctttttgttaaaatattcaacaactttgatttcattgcacaatgaagacagccatgcaattattctcgaaacaaagtagtagagtccaatgttcataatcttacatctgaagcactctcttcttaaatctatcccatcaagtaagagataaagagaagtgaactctactaatttaagctaacatatgattttgtgattatatatgcacaagcttttatattgcttttcaattcaataatcgttttttatcatgtattttaggtacttcggtatattaaatgggatcgacacagcaatatggaaccctgccttggatgttttcttgcctgcaaaattccatggtgaatttatgcttcttttattaaattaaaaatctgatattatcatgaacacttgaaaattagctgtggattaacattttgtacttaatagtgtgaaatatcttgaattgattcggtacatattgcagctgagaatcttgaggggaaaaggttatgcaagtactttgtccagagaggccttggtttggcctctagtgatagtgcattggatatgcaaaccaaggtgccattggttgtttgtattacacgactcgtcgctcagaagggtcttcatttaattattcacgcaatgaagcgtgttgaacaacttgtaagtctatcaactgacaatgttgaatgtgtacctacctaatctaacatttttgcactaaaagcatggactttctatttcttaagcatacttgacgagcgagtttcagcataagattctgactagtttgatatttttcttaattgttgagtcatttctagggtggacaaatgattatactgggaaaagctccagatggtaacgttcaaagagaatttgaaggacttgccaatttggtaacagatttcatcttcctctctttcggtaacagatttattcttgcaaatttggtaacagatttcatctttttgatatgttgcatctactgctgatgctaaatgttgaagtaacaatgttagtggaacaagattagtgtaatataaggtaatttcatagaattgctaacaaaaaagatataaaattacttagtgtagagaaagggagcaaaaagaggcattttatcagaacatccataacaaatccttgcatatcctctctaacaattcagatttatagaacatgtttaagttctttttcttttgcttttttaaagaacccgaaagattctcatctttaagtctcaaattttctgttttataactctctattacatcatacataattgtgtgttgtatttatatatttccatagaaacatatgaaatgggtttttaacattggtatgatattatctgctttgggcctaaaacacggatttgtttttgagcaccttcccaaaaggcctcataccaatagagatattgttcgaacttatatactcacgatcattctcatttctagctaatgtggggctttggttgcacacccaacaaaagtttttttaaagaataagaaaagatgatactgaagttcatatgagatacatgaatccctgcaagaaacccaagtagtcttagcattgttctcagttttatgtttcagccgaactgatggccattcatactttttctccccatgttgcagcataatgaaggtcctagcattcgaatcttattgatgtataggtaactagtctttgtatacactgcagaatatacaactttatacttcataacctttgctagagatcttccttcaaattcaaaataagaatttgacttacgcttcgttaacaacatgttgattcgggttttttgtttcgtttgttatgaagtgaggagctgtctcatatgctttatgctgcagcagacatggtgtttgttccttccatgtatgaaccatgtggacttgcacaaatgattggcatgcgttatggggcggtatgtaattttgtttttcgaatgaagaactcccatttttatgtttattcttttagttatgtagtacaaaacttgtgccgatggccatgttccactgtcctttaaatcagcctaagcctttcggtgccaaatactactacgggaaatgttaaggggcaccttaaaatgtcaagtactataaaatttgtgcattttaatatcagattccactgatttaataataattatagaaaaccgttaactgtttatagaacgtcacatcatagtagtgttgagcattacagtgactattaacaatgctcatttgataatttattttgttatgaatattgatatgaaggttctgtttttgtttattgaatgattttcaggttcctgtggttagaaagactggtggtcttgcagatacagtcttcgacatggacgatccgcaaaaccaagagaaagccaatgggtaacctttatgtgcttttggattcaagctcttgattttgttttggtttaaagcttttaaaccaatttgttttgttcaggtttgttttcgagggaatcgacgaaacatctctagacggggcactcgatcgtgcattttcctactttaaagacagtaagatggttttattgaacaaccttggtgatgtcatgctattaccgtcaatatatggagtattaccatcaatctcttattataatttccatgcttaaaaatacatgttgaaatattttttttcaaattttttttatgacaatgttcgttataatcacaatgtcatccttgtaaaattttaaaaatttcgaatagtttacagtattgaaaataagtttaaagatttttaaacacacgtgataaattaaaatatcaagaactctatttttagtactgtaaattattcaaaaaatttcaaaaatttacaaagatgatattataactataaataatactgttacgaaaaaaaaaagaaaaaataaaataaattctaacatataatttcgagcgtgaaagataactaaaagattgtaattagcactatcttatagcactaaattagtactcttgtgaatgttaaatttgtctgaattaaaagaccaaccaattaacactactaactaatactatttacttgtctttttgtttttacagatcctaataaatggaacaacatagtgaagaagattatggaaattgacaatagttggaacaacacagctgggaaatatattgagctgtatagctcaatcaaagcaaatgttaactaatactaaaaacacaacaaaggccttcaatttcaactctcattttggctatactttctcagaatatgatcatcatcttggtcatttagagtatggtacctgcaaaaatgtattaggctattgtgtacatataataataataataataataacaagattttgaaatttctttagacattttgaatttctttattgatttgccctttctcccataataactttacaaaaccttgctcgccggaccgaagaaaaccagcaaagaattcgacagacacttactactttaggtattaggcatcagcatagtatacatagttcactctctccccacccccattcgactacttcagcgaaaagcctaaaaaccgactactttaagaaacgaaaaatttaaagaagaaaaatgaaaacgaaaaataaaagacgagtatgtaagaaagatatcaaacaccctccctctccttgaggagcaggacccggcgtaatacctaactgcaccgaaccacacaagagatgcccaaaataccacccctaatgtggtcagcaaatgaaatgaagaaaaatgaaaacaaaggtaagagaagtccactaggtcaaagcaaaggaccccgaaggatatggtgtctaaaacgcagctcgaagctagcttacttaacagttgcttccttgtcaatggattcattaccacccgaactagatcccactacttctttgtcactctcctcctttcccaaaccttgggataaggattctgaaacatcttttcttgtactagcaccaccaacttcggatgctagtgcctggttgctactctctttcagattcagcgcttgagaaaaagtagttgacacgtcatgaacaacgctatcagtcaatgaatcagtaccgtctgaagttgagcaagcttggtgtctggccttcctatccctcgagagtttttcccgatcatcataaaagtaaaaatcgtctaggatagatgttcgtgcatcgtgatccttgaaaattttcaacatctcaataccctgtataaatcctacctggttttttttagcaacaagaaataattgtaagaaaccttgccaagccatacaaacccaaaataaatgcataaaagccaatataaattaattaatctcaaattcatgcacacatggaagacaatgaaataacatgtaatcgttacctcttgagaatcgcgactgtgagtaacaggcttgttatcattgttctcaagtagaatatggcggaatcgaatgttgggaacatccttaacaatatgccattgaaccgggaattgtccactccatctgtcttgctgccagtaatctgcatccttatcaaaatcaacaggtccaaccatttctgctactccacagaactgcccacttgcgttaacctatcaaaacaatatttacaagaaaattaataacgtgttatgcaccaccaaaaatattgaaaatgccttccccaaagagaaaaagtttcttatttaagtcctgttgtatcatatcatgtagcatactagcaagaacatatttttcaataaagcaaatagaaggctaaaactaatcccagtatacaaaattgaatccttttaattcatgcagttgtatgaaatggggtagttcaaatcaactaaaattttatctaattagcggaaaccaagtgtgtgttctgtgtatttccaaaatgtaaatgcatttggtcatgagttcagttcttaagagaattttccttcaaaagccactagcaagggagattaactttgagctgtcaaacataccgaaaaaaaaaggaagactgggcagcgtgaatttttctcctttgcctcatgataagcaacatcgagtttcttgtttccatggggtgtactagcccaaacattgtatttaatactcttgtgaacattgtcttcactgaaagacttgatgataaagaattttgcattctcataatcggtgacaaaatccaaccggttgtatgaatcaagaagaattccagaaacagataagttgtttttggtagcaccagatgaagaaccttgttcagtggcactctttcccttctgctttgatgcccttggcccccgattacgatcattaaagatgtcacgggaatcaatagaaacactacttgagtcttggtctctctctcttcttctgcctttgtcaacaggtaattgattcagaccattaggaaccgagtaaggaaacgaagcaccaccatagccagagctctgatatgaactaccatgatgataatgagaaccaggcgccaaaccatatccatgagttggtctctgttggggagaaagctgaaaaaaagaccctgtctcgtaagcaaaaatatttatataaatatatttataaggcttatccatcaccatattcataatggcaataacaaataaggctaagatactagttttagtcctaagtacagtataatttttcacagctaaacatagttcaaggaactaatcccttgggttttacatggagggtgaaggcctaaagaatggagtgaaaagacttaatagacaaaataatgagatgctatattacctaagaggagcaataacattcttttgcccaaattcaaaagatgcacaatgactctttttcgctggtctatatatgacttaagaacaatctacttatcattttcgttctttttgccatccccaagttcaaaacttttcattttttcgtgataaaattttctattcagtaattttgtgtcatccaaagacctattcaaattccaataaaattgatgaaaacaaacctgcccaaaattgttctcgtatgacccaagaatgcccattggttggggataaactgttggcgatgtcactggactattatgaatattaccagaaaggtttcctccgcctaacgaaccaaaattgactaggtaacctgatcctggcccaaaaaacatgttatcaatagtactactttctggtgtcatcaattcagttggtgaaacttgaagacccgaagtaatatgaggcagatttggcgctgtttggtgaaaataggatggagagaaaggaagctgctgcggagagaatagttgaccatctaccataagaggcataggtgtagcaactggagaatattgtccatatgctatttcaggattgaagccataaccagaatggaagacaagagaggaattatcattgtagacaacctattacacaataagagaaaaaaaaaaattaaaagtgtaaatatagactttaaacaaattctacacacatcattataaaaaaacaattactactcaccggcgataaaacatgcaagccatcagtataaacattttgtgagtatgcattccaagagccagtgttgctaccataacccgaactacctaaagtttagataaatgaagccattaataggtatgatatgattgtgaaaaagatccgtttatatattcttacaaattaaagctcaaacagatgtttttaattccttcaatcaccaaaagaacgcgagaagctcaagaaactaaccagcatatgaaatgttctgttcattaggagtgtaagctttataatggtgggaagtgccatagtctcttccacctgcatcaagagaaccccgttgtcctgtgacattgcttgagtgccctataatgagtggatctggagaagcattcgcagaaacaatcctttcatctctgggtggaagtggctgataatcaaacagaaaatgaagtactaataagaagatttcttcttctatttaatggggggaaaaacaaaacgaaaaaacatagacaaatcaaactgaaacaaagttccagagagatttgcaccagctactacctgctcagtcaaaacatccggcttctcgggtctctcacctgcatcatcaaaaaggacattcaaatataataagagtgtgactattgttatcacttctcaaacatttaggtactaaggttgcttggaaaccctttcatattttctgctgaaaatctcttatcattctcccattgtttttattagtttctttttcctagaaagtttcagattattttcagggcaggactcaacaagaatacttggccaaagtttaaatccacctctaatctagtttttaatcataaaaggtccagctataattaacctaagaagagagttgactatcttgtcaatataaccaaacccaatccaacccaacccaacccaacccaaagctttcttataaattcctaccagtaaagttgtatgccttatggaagaactaagaagggcagaagcactctattataaatttctacaaaaagagaggaatctaactaaaaatgttcttccccaatagaaaggggaaacccacacaaaccctagaaatctatgaatttcaaattataatgcaagcaaaaacacactgcatttcacacttagcatgctaaagtctagggtttgagccccaaaggcattgacccaaaagagtagttgttatataatcgatgaaattgaagtttaaagctacgaactttacaatattacacaaaagaaaaaaaaaagagagagaagatgatttgggaaaagcccagatgaaaatagataaaaatacattatatatacgtaccagaagaagagcagacaactcgatctcggtcgtggcgagccttgtccatatcactctctaagatctaattccacaaacgaattgaatgagcaaaacccagaaaatattggattagaaaaaggggagaaattgaaacaataataattgataaaaagcaaaaggggggaaatggggttgggattgggaatgaaaggggtttgctttatgattcttcttcttcttcttcagctgggtctagctatgattctggttttgaatgggagaaaaagaaagggttttaggcattacattacttacatgtatttgtatctatcttaataataataataataataataataataataataatttgttcaaataataaaaatataataataggggctaattagaatttttattaatttttatttatgaaaaaattaacataataatttgatacatttagtaaatattaaagaatttagtatataaatgattactgaattaataaaattaaatgaaattagataaaaataaataaatttaacaatttatttaattagcttaataataatgataaagaaaacaaattattttttattacattttgaggtcataggcttgtaactcacaccaaatgtttcatttgtattgacttttgactttgctcatacaattttcttacatgtgatgtcaccatctttgaaggcatatttgaaaagaaaaacgattttgtgatatatttgtataaatttttagtataaagttttattaaaactatcattaattttattatgtaaaatagaaaatatataaattgtctactatagctaatattctaataaaataaaataaaaaatgcataaaaaagtatataaaaaagtagtattttatatgattcaaatttgtcacagtatatgttcaaaaaaaaaaaaaaattgtcacagtatttattatgtgtcaaatttacatcatttcttaacacaatcttaaactacattttttgttaagtgctcttacaacttgcaagtaatttagagcatgttttgtattgttttctgtttttgttttcaaaaaattgttttagaaatgagaacaaaaaatagtttttgaagtttttaaaaacaag

SEQ ID NO: 111279 - DNA, 2987 bp, Cannabis sativa
  modified_base (30)..(36): a, c, t, g, unknown or other
  modified_base (2952)..(2962): a, c, t, g, unknown or other
tcactccaaaattctaaattgataactaannnnnnngtaatgggttttatttagggcacaaaacccaacagaatctcctggacatttgatgatgaggaagttcaagggggatgcagttttcgagtcctggaagccctagtcctaattttctccttgcctttctcttgggatttcttggcgttgaccatagcggcagagatctaattactccaaaactttagcatcacagactcaagtgtattttcgcatgaagcaacaacatgaataagtaaaaggaacaattataaatcatacaattatgaggaaaacaacaacaacaagaaaatgaatctagtaaagaaacttgtgcgtgggtgcaaccattcagtgaagtagtatagggtttcccgtgagcaaaagctaaaatgctagtatgaccaatgaagctgccatactccttaaatttgggcaaagacatagccctcaaaggatcaactttgatagtgtttgaagaggttcccggatttctagggctcctaactatttggtctactttgtctatttgatccttcacggggtatctatggcgatctatgcctatgaaatatttgtcaaatcctccttggttcctccaggacatgcaactcaggctgggggtacgaaggatgcggaagggtccattaactcttctcgaagtactagcacccggtgtccccacattaggataagtagtgacaaacctctctgagatctcttcttcctcggacagaggatcaggatggcatgacacccaatcagagcttagggcattatcattcttggccgcattggtgattaaaatggccaaatcagtggcaatcacctctttcacttccctagggggttggcgctgtcctcgaaggctgactgtattaatactttggaactttgtagtcaaacgagatctacgaaggagttcagttgtcaccaggtctccaaccttcaattgctcttcctagaaggccctatattgggcttctttcacgattatctcctcagtcttaatactttgaaggggaagctttgctacaaatcaaatatgttagtcagaatacaaaaattagtaaaagctaaaaagtagattaaactcaaggtaaatcatcgagataccgagaagttgaaagcttaactgaagagatggcaccttgctaataggaaatctagaagaaaagaactaatattctcgaaggtcatgggtgcgatctgtttgacatacaggatagtaagaattcgggcgcttatctattcaaaagaatcccaactttgttctatttgtcctcatgggattagccttgacactatgaaagtaaaggatctccttaggaaaggaacctccagtttgttgatttgacagaacacataccacccagcctagagcctgctgtatgatgaaaggatcagctgaaatggtgcaatgtaaatttttgcaattagagtcttaaaataatttctcaccaagggaaggtgagtgccattggaaatgtgggaccaactccatgcactaaacccatcaacactaatggaagcagattccccaatgacgaaaagcatgtgccacattagtccaaggacgttacggaggccaacaattcagaataaacttataacatcccattagattgaaagaagttagatttctgatccatttcccaaatggactctagacgggcctacatcgttggaggattttcgaccccttcgcctctcctagtgtccatagggaggtctctctcagcggtgggttcattttctggaatggtttccaaggcctcctcaagttgaaatgttaccatgggagccctagtttgatcatgtcccactgaagatctttcgacagatggaatagacccacctttgatagatatggtcgcacttacgagaaggtcttgattcaagtccattgctacaaaggaaaaaagcaaaccttttgaaatgactaacgaatgcaaggatggggtttctttcgtacacactatcttgttattcagcacgcgaacagtcctagccctaacctaagaaaaaaccttttgctctaaatgtgttatgccaaaaactcaaacaaggggttagttcacttacttgtcaaatcaggagggttaagtggcgtgtcaagaaagcctgcctaaaagctcgaaagctagtcaatgtagcggtcgcagttaaccttaaaatcaaacgtttcccctaaggaagaacttcgatggtccaatcaaaggggtgcgatgtctgggaaaagttttgtccaaatgacgagtaatcgttggatcaaatcatctaacgcttcttgcatgcaaaagatgtctggaaaagaaaaagaagttgcagagaaaaaatagagcttcgagtaaatggagtaaaaggaacaccaccaaaggcggtttatatttcaaaaagagaacatgcctatgaaagatcaacggttcaaaattcttgcaatagatctaacagctagggagatgagaagtcccgtacgatcagcctgggacccacaaaaatgttgaggtccttttatgcacgtcatttagttgccagttgcattccaccttttttgctaaacacaccttgccacgcgcgaaaaggggcaagaaatacttcttgaaatgtcacgtggttaccacgcaagaggaagtaaatgttgtatgtacgctcagtagaatacagctcatgtgggggtgtatccgcgacctaaatctttagcacgtgtcaatggtcaacaccgaaaacaatagcaagctcccgtgatccaaaggatcttgaaagcttagggggtaaatattaaacaagttttcactaataagacacgtggcatgattgaggggaagaatatagccacgacaataattatttgaggtagctaagaaaaggaacgtctcccgaacctggaagataacgagaggcgatgacctctaggagtaactgttgggttttatgccnnnnnnnnnnntccatttcaatgtaatccattttat

SEQ ID NO: 111280 - DNA, 6060 bp, Cannabis sativa
  modified_base (5683)..(5693): a, c, t, g, unknown or other
gtgaaaaaatgccatagaagaatgacaaacctataaatgccatatttttgtaacttttttacaaaatcccatatttcatgtaatttttactaaatattattgtcgtatgtattacttgatacaaggccgatcttaaaataaatgggtctaagatttttgtgtgtgttgtacttaaaactaagtttaaatattattggacctattttttgaaacatttacaaaattatgatttttctccactacatataagtatattagatacaatttgtttttggttggactttaggcacaatttcatcacaccttaacttagggttgaacctgacttgatattatccccctaccatttatttcttggctttgtccttaataataattacactacttagtaattacacaattacttaactatcggaaaaataaaccataatttttaaaaaatttgaattcattttgaaatagttctatttatataaagatgaacggatgtttctcttttagttatatttatcaattgtgaaggagccaaatttagtgataatatttagcatatacacctctattgcattttacaaattatttagtacatataaatcctatgagatggttttcacatgaacctcaatgactcaatgtcatgactcatgagttatgagtgtcttacgagctaaatgaaaacaaataaaaactgaaattgaaatgttgaccagacaacggcaagatcaactactctgttcacgtaaggcataacggcctctacatgtttaaatgtggccaaatcttttagtacattacataactctttataattaataagaaataaatttcactaaaaacaaaatttagtaccaaaagcatttacaattaacatctactccactgttactgccaaagtttattatgcagttattccttcaaattagttgtacttaatagcaggaaaataatgttcaaactaaaaatttaaaagtacactcacccatgctaattgtgtgaatttataatattacttactaaatgctaaccacgtagccttcaaagatttatatatgtagaacaaaatataaaccccattgaactagcctcaacatattttagtttattttttatatttagaacaaaaatattatgaggagtttgagaaatggagttgtgaaagtattggtaatactacttgttaaccttttatccacagaatgcagaaatccaattctccacagggtcggaggaggacgattttcttggaacccaaacatcaactttacaaattggtcaatccatgagcaattctacgttggtgattggctttgtaagttcttgtagttttctaatattaattcttataacatatgatgacactatatcatttgggcaattttttccaaatttgaatttttattttttaaacagattttggattcgacaagctaatttataatgttttggaggtgaacaaaacaaactatgagaaatgtgaggacaaagatttcttaacaaatgtaacaagaggcggtcgcgatgtgttcaacctcaccgatgccaaggttttctactttcttagtggtagaggtttctgctttaagggaatgaaagtggctgttcttgtcaaggatttttctgaagatcaatcactagaacctcctcacaataatcaacatggtgatcatgatcttcttttcaccaacaatgccttctcttcttatcattatgtttcacacatcattatcttccttgctatctttgtttttcaatgctttcacatgtaatagctaattctaatttattatcactttacacttttggaagtagtctttttatgtaacaaacaaaagtatgttttgaatttctttttgcaaaatagtgtttcttttcttattaggactattttataatgaaatgtttaatattagcttttttgttttttttttttgttaaattaagaatgtaaaaaacttatgtcttgctcgtatcttgttagagcatccattttatatcttgatcgtgtttttaatatgaaggatgtctcgaatgatttgttatatgcattggtaatagaatttgatggttaataaagtttgattttccattcaaaaaaacaaatataaaaaacgtgtagggtactttgcaccaaaaatgacctaaaaaattttctacccaattttttcatgcaatttttcaaccctaacatgtttctaaaataattttacaagtaaaaaaatgtaacatgcaaaatatttttacctagaaataataaaaaaattcaacaaaaattgaaatatttacaacttttcataattacgtaaacaaaatacaatagtaaccaaaactaaggttctgagaccagttattgggaatacatacttaacgaattactttatttttcgtgtaacatttaacataaaaattaatttcctatgacatctttttcacatattcagtatcgaatatacttacagagatgttgcacatcagaaaaagactcatctcgttcagtgatctaactcttgttcctttctctcacagactatgatcaatcattaaacctaaatctttagaaaactaagaatacaactttaatctcttcacaatcttctacaaagatctagatgttgtaacagaattgtgtgggaaagtgttacaacaacacttgtgtagggtttatgtcttgaaaagtctgataagatatttttgattataaatagtataatttcatatatgtttgaatcttgaattattaatgttttatatttaataatttatgtataaatattggaattttttttactcatatatgagatatgacttgtcttgtacagagaattaagatcattggctatgaataaaatagttagcaacatatttaagttatagaattttgaatcaataattattagtacggttcattgatgcccgttatctggtacaagaaatctcgattcggatcgctgatgtagaaagacatcatgttgaaggtattgtatataatagagattatatatgataaggacggataagtaattaagttatctttatcaaactagatgtttactacaaagacctaattcatatcacagagatgatcaattagtagatcggcctaaatcatgagcaatcatgaactcttgttcttgtcattggtttctttgattcactcgttaacatttctcagataagaagattcttaaaatttttgttttgggtgtgaaggaatatgaagaaataaggtcataacgaaactgcacatgtgtccttaaatagaatctttgtggtctaaaatcaataattgtgtaatgaatttattagaatattctttcctttgttatttgctttttatttgcaatgtgtcatggccacagaggcccttgtaaaacccttgtacctttcttatgaagctatataatgaatgaaatgcaccagctacctttgagctaattttttacataaatctttttcctaaaatttttacttggtatcagagccacaaaggccaatgtcgtcaccatgtcaactggaaatgattagactcctctagccgcctctgctactcaaggcaaagctcaatttgtaataactaagcagagctctgtctctacctcaagcatccaaccaataccaatatctcccttcaggagcaccctcagccaaccttttgttgtaaagttggatagaaacaacttcaccttctagcgcgtaatggtgttaaccattattcgagggcatcgactcgatagattcctcaatggaacaaaattttgtcccttgagttcatccatatgactatctcaactagtgatggtactccatcatctaaactctatcaaaactcggattatgaagcttggatcatcaatgacaagcttcttataagctagttatacggctcagtgattaaatccattacatcagaagtaatgggatgcacatctacctttagtctttggcgtgcactcgaaacactctacggagcttactcaaaggaaaaagttgatgatacccacacttggctacaaacaactcacaagaaaaacatgacaatggatgcgtaccttcgtcaaatacgcacatggatagatactcttgcaatagcaggtgacccctaccctgaatctcacttacttactaatgtcttaaatggtcttggtctataatatctcaccattgtggtttagcttgagcctagaggtgcctcactgacctggctagaacttcaagacgtactgctcagctttgacaatcgattggagaggttgagtactcacaactccaacactaagttacttaaatatgttgtagctccatcagctaatcttgcacataaaactctatcacagcgaaatcctccaaaatgatagcaaaatcacccttccaatggtcatggcacatgtcatggaggctatcgtggtggtaatagatctcgtggaaggagtggtagaacatgcagccattcaacaacagtgtgttaaagtcgctataacttcatggtaagtgacccttgcaacaaacagaacacgcaacctcaatctggatctagcaatcccactgcctttgtcacagctccataggttattgaccatgaggtttagtttgcagatagcagagctagcaaccacctcattacagatcccaaccaattgactcaacgcactctgtatggtggtaaggagagattgactactagagatggtaactcattattaataacttatattggagcttgatctttaccttctctatctcaaaaacctctaatcttaaaatatcttttgcatgtacctcatattgcaaaaaacttagtgtattcaagctcactgcagataataatatactaatggaatttcactctgatttttactatgtgaaggacaacaccacaggaaaagtgatactctaaggagctctaagagatggcctctattagcttcaactaccatcctcaccttctgtgtcttcttttcaattttttattaactcgtttgttgtgtcgcaatgttattctagtgagtttaatgtaaattgatttgtgatcgatgagtctttaaattcaataaatggagtttggcatagacgactaggtcacccctcaactagagtcttgaaacatgttctagtttcaacaaatgtaagagtcctagttaatgaacaagttcctttttgtgatgtatgtcaaatggaaaaattgcatgctcttccttttactctttccactagcaaagccataaaagtcctagacatactagcctttggggtctgactccaatcatgtctaacaccaattatataaattatacacacttcttggacgactattttccccatttaaagacaagtttgaggctttgacacctttttctcagtttaaaaatcttgctgaaaatcaatttcaaactaaaataaaagtcttaagatcaaattgggggggagtatgttccatttggcaaagttttccaagatcatttttcaacactcatgtcccattacctcggcacaaaacgaatgtgttgaacgcaaacattgacatatagttgatatatggctcacattgcttgcacaagctagtatgccatgaaatttagcaaataaattttctaacttataaattcatcatgactccagtactatagattcataattacacttatgatttcatggaacactctgttggaattttatgtcctaaataaannnnnnnnnnntataatcagatttattaattaatagaagatcaaaaattattttatgatgcatggttcacatgattatactttcatgattatatgtttattatataaatctattaaatcctgaacatttagttattcacaattacagtgatgtcatcacagtagaaagtaattgtgattatatgcttcaaaggctttagtctcatgatttatcagtgcattggatttacactgacgtgataattagcgataaattttacttacacaagtataagtagaatgtccttttcagggtattagcaaagtatactagtattagatgtattgggtatatatcagactagactgatattgacaatggaaaagatatcataaactt

SEQ ID NO: 111281 - DNA, 5236 bp, Cannabis sativa
gtaaatttttccctattcagtgtagatcatctatagagaatcattgactattaagattgtaacaatggataatcattgactcttcatatcctcccaagagtcaatctctcattctccattccgcaacctgttgatgcacaactaatcccaccaaacaatagcatagtcagtaaattcaatggcagcaagttttacctttttcatttcagaatagttttgacaatcaaaaactaattccatcttcttctcctactcaaggtatgcttcaagatcactcttttcttgaaaagcgagaattttcatctttatatttcacaaataattatctatctggttcctagcttctctatcccgaccatacctcctattacctactgacatcctatcaaactcttcctcagaaactaccccttccccatctacttcattatcatccctttggtgaaccttgttcctctgttgcctctgttgtgttccctcttctaccctatctaacattgcatgtatttgttcaaactcatctctcgtcatcctcctcatcttccccaagtggtgtagtttcattgcctgtattttcttctagattttgtgacatacaaaaataaagttagagcagatatagaaagacctcacctcactccctcacatgtttcactcaaaaattaattttttactcaaattcgatggcttttacagtatatcattttttttaaaataatacttaagttctattttttgttgtaattttgttgacatgaaatataattttatcagcatgcaatattatttttatttttttatgttgttattatatgtatacatttctattgtaaggtatatattttttgttatatgatacataagttttattgtatagtatatcattttagtttagatcatgtatgtttagtttctattttattatatataaaggttatatgtaattttgtaagaaaaatataattattttatatggttgtatataattttgttgacatggtacatactattttttttattatattatattattttgttttattttttatcgtagttatatttatatatattttgttgtacgatatatggtttttgttgtgtaaaatatatcatttatttaagatgatatttagtttgtattttattatatgtaatgattatgtataaatttttttggtatgtatacatattttaataaaaatatatatatttggatattaatttagtattgtaattttttgtagtatataattttattctacggtatattaattttcagtaatacaatatatcaaatacttatatatatatatttaatgatctaatataattatttgttattgttacaatctataatctataatatagaataataaaaaaattatataacttaatttaataataatatattttttagaaaaaatattgatacataataaatatactcttataatttttattagccaatttattatatatgattattttgttaattttttcttataatttttattagccaatttattatatatgattattttgttaatttttttttagaatagagatatttacttaatttaaaatttaaaatcattttacatctcagtctaattttaatatcaacagcatttatccaattaccttattgcggggagatgtgtcattttggtcaaacaagagattatttcataaatacacaaaaacaacaaaaaattataaaaatatgattataaagaattttaaatatttttataatttttatgatgttatttataaaaaaaaaaatacaatctttctatgttatactcttgttaatttattattaattttttattatctatatattatttttattgttttaatatttaaatattattttcctatcacttttatataattttcttgttatttttgtaatattaatataaaaagaaccgtaaatgtaaaaacaaaaaaaaaatctttaaacataaaaatataaaaaatttacaaaaaaataatattttatgtaattatcccaatataaaacccttcaattttaattttttatattttaattactcatatcatttatctaattaccaaattacaacaaaattcttgagaataaaaagtcactaaaaggaaattgacttgtccatgaatgcaatcaagtgttccatttaagggaagaaaaaaatctaatgataactagcaacctctaattttacaaacctcgcgagaggagccacagctgtagaaacaaagaactcaaattgaattctatgccctttttacaatcctcttctaaattacaaggatggaaaaaccgccaaaaaaaataaaaatatatttatatttaggtaagaaaaaatatcatatgtttataaacttacaaataatgatcatgtacatgcacaagttggcttccgaaaatcactttctacttctcaataccctgctgtaaatactggatcaaatcgtacccagcagtggtccacttgttgtaagcatccgtgcagacgtggatcatgaaatttgcagcctcacgatcagtcatttcgggatgaaatctcttgcgaagattaccaattggatcacccctgctaaagcaaggcaatccactgtctagcattaactgaactgtgctgataatcccatccatataacggcgagctgcaagatatcctttgacgcacaaactgaggcacattgaattgaaagaaagaattcaggtaaaaatgaatacccaaatctctttaggaaaaagtcagttcagcatagagaaaattaagaaagaaacaaaacaaaggcctccactacctcacaaactggtgccatgtttcacttttcatgacccccgaaggatctaaaagttgagtcatttcatggctaagcttaaaatgagcactttcaaaccgcatatttccaccgggtgaagtttccaaaataaaaccaaaatcaatatgaacaagtcttccaacgctgcacgataggaacagtgtcagtactgaactttttgttatcccttctatacaccgaaaaataaaaagactattcaaacaaccatttatatttattgtcgttttgcaatttattcttcacctaaaaacctgaatgttaaaatcataaacaatacgttttatttttctctcaatattccaacatgattagagttataacaaacaaaactacacacacacatatacatacccgttaaaattttctctttgtcaacaagctatataaaagtacttaagaaattgtagaatagttaagaagatcatacttgtcaaataaaagattgccattatgcctatccttaggctgcagtaagaggctggcaactgcataacctgcactgctgatgatgaagttctctcgtgcagcttcaaaattaggagaacttacaggaccatagtcttgctgaaaaatctcatataaaccaccatcagtcgtttcacccatctgacttctactccgagtattaggcaccacctacagggtaaaattgatggtgagagaaatcatatgcaagtttgcaacaatacaatcacagtaccttttctgaaagaaattaaagtagaaagactagttttattgctggacatttataattggaatacccatgggattgagattgggtcatgatatttcacccaatatcagtctcatatgtagtctatatttgcctataaatagtgccaaatgataaaatacacaaaaaacgatatgggcagtagaattagaatagaacgtgtggtaaatttgcaaaagtgcacaaggaaaagacctaacaaattaaatacttcaaggcaacatacaaacatacctcaattatgcctctcccagggccagtcggaagtacaccataaggaaacaaataaagatttagtccaacagcttcaaatatatctctaagaagcgcaatcacttgaagagcaagaacatcttggcgacaatcatcccctaccttttatattagaaaactctagtaagataactgaactccatacttgtagtcaaagagaaatcataatatgggaaaaaattaccgtaacttcaaaatcagaagacatttcatgtattcagtttgaatttattcaagccaatacaatgaagtttgtaattaatttgtgatagcacaaagcattctaagaattaaaaccacaaaattacaaacatgggataagtgaacatttccaaatactggcaagttttgtttatgaatcttagaatcatggtaacaagttccaacccaaaggcaaaagaaaattgaaaatgtaagcgaataagcacaccttgaaaatgcaagcttggggttttacaacattgtggtctccatcccgatcaatcacattaaacgtaatcataataggaacttttgctgccgactgcaagggaattccactatcaacctgaatacccctaacaagcttgttaggagctgttggtagataaaggtcatctccttccatttcaattttttccaactctctgttcaagtgagagagattctacactaaatcattttaaatgaaatatatctctcaatgactaaatcatttaaagattgagaagtatacctcctaatacctgcccgtcgttcctctttgggaagtggaaaaaggacacctgaaatagatgtaaccttgtcaaagaaatcaaattctcttttaaacaagtcacgtgcctttggggagaaaccgtcaataatacgatccctaacaagtggcagcagggcttggaatggagtattctgaaatcagagtaaacacaatttatagtgcgtaaattactagaacaactaatgttaatatgaaaaagaacaaaagaagggaaatctgggcctactagctgccacatattttagttaaaaaagatgctgcattgtgcaaagaacttcctacttcctagtataaaacatgttaagaaaatggtttcatagatacatgaataaataaaacactgtaaaatacaatgttttgtgacatttccgttctgagcaagtagactgattttcttatgctaatgccaccatcattaacatttaccattttaaaagtgtaaaatcctagcatccttttcaaaatgacaatttccctcgaaagacggtttagctgctccatcagattgatgcacagtttgtgtccactaagattattataataattttgctattattctgtgacacaggtgtaattgaaatgtgtatatttatttaatgaataaatagaatttattcgccccccccccc

SEQ ID NO: 111282 - DNA, 2999 bp, Cannabis sativa
ctttttatcccactgccatacatcccggttttcattttagcgaaaatcgggataaaatgccttaaaaaccgggattaaaggcctttgcttgtagtagtgctaggttaacttagggtgtatgagaatcactactacaaaaaggggtttttgagtcggtaacgcgtctggtcaaacttgttgaccgacgcaaaagttaacccacacttttttgcttcagttggtgaacatcgcaaataataattaattagcgtaagttatatatccgacactaaaacaataactgaagcaaaaaataattttatgaagaaaaaaaattataaacacccatttagcgtcaggtataaattgaagcaaaaatagttaagttattcaattctttaagcaaaaacaaaaaagctgttattttataaaaccccccaaatcaaaattaggttcccatttcgaaccatctaaatcctctctccatttcgaaccagcgctcaaaataatcacctccattaactccggcgagccacccagagacgcccccgagcaatctctctctctgtctttttccttctccgtcgaacatctctcttcgtcaaaaatgtaagtgtctctttcactattttttctcagtcgtcctccatctctgctcaatcgctggtgtttcggtgtgtacagaagactttatgcttttcttctctttcttgctcaatcgcctgctccacccactcctccaccctctcaatggtaatatgttaattatatttttatttatatatatgtatacttatgtatatatatatctattatattttgttcttgatgattttgttgggaaaatattttgatccatttctcaatgtctttgctgaatacttttttcttcttcttgtattttcccttaatatcctgtttttttggataatcattgatcttcaaagtctgaaggcatcacctctgataatattttttagcagattacctattcctacttcctacatatccagtgatttactcatatatttagtgtgtttttccacaaggatacataattttttaataaaatatatgtaactttgatgtggttattgttttttccttatcctcgaagagctaatatctccattaactaaatcctctcttaccctatttttggactcttataaaacttctagtttaagatgccattatgtctattaagatatatttgaagaagaagaaaaacaattgggataatatgtaggattacatcttccatattttgtatgccttatgtccaatttctgctgctgttttatgtactcatcataaagtctaattttacattttgaaatataagagtgtgtcaggtgaagatatataattaggagatataattgcactagatacactttaggaagcttcacttgatgaaaatgacaaaattatcataataaaaatatttatgactaagtatattaattaatatataatatttgaacacataaaaagaatttgatgttacagttttcaattgcatctttttaaccagccaataattagagagttgattgaaacaatgttaaattgactttaaataagtttatggtggttttggtctagctcgtccatctattcgtagggagggtaatttgatctttcatttttctctttagttgtggattgccaatgtctcgagagaaaaaacttacatgagagattttgctaaattctaatgaatacgatagcaataatggtagaccagatttcaaacccttctcaataaggtgattggtcttcacagacaatactgcttattattttggatttgttttggggctttctctgattgttactgatgtttagtcatatatagttcactcacttttagatttaagactcatttttgtgtttatctatctatatatatttcagaatcaagttttcaaataccagattgaagaaaattataattaaggagacaacctatatatgtttccattcattctctcttgatgttaaggttatgattaagtaatttgcatatggaataataaattcagagcaagaaactattgtattaatatgagttgcagtatattttattagtgcttgtatttttcatttcttttctttaaatttttactatttaagcttcaatttctccaaaattaactatctcgaactctatatctgagaattgttcattgttggtgtgattaattaggtgtctttgaggggagccagtgcaaaagagataacgagagatgctcttcttcaaaaggtgtatgttttactcttcttcaaagggtgtatgttcattatttgtgtattatagtaattttattgtggatgttgttttggatttgtgattaataatatgtaggagttaaaaagggtaggctgtagcagctactgctagtgaacttgtggtttgtaattgtaacaaggactaggctatatatataattgtcaaattagttttagtttgaatatattcattaatttatattttataagtttagacattgattattttgttaatttgcaagtcatttgacttgatattattatttaacaattaaatttttgcgtgggtacatttaatttgaagaaacgctaattttattggctttttagtaaattggatggtgctgggtgagatccatttggttcgggttttttttttttttttttttttttttaattttttagcttcagttcataaccgaagcaaaaaaacaatttgcgacggtgtaatactatttgcaagcaaaaacttttttgtgtcggttaagaaatgaagcaaaagatattagtatttgcgtctgtggatataacgtcggttgcaccaactgacgcaaattctttatatgtcacttaaaaactgaagcaaaaagtcatttttgtagtagtgaatgagaaccatcttattctttgggaaatttacaaaaatactgtttttttactaaatattttcaaaaatactgggacacggcaaactttacatttttactgtccaagcccatttttat

SEQ ID NO: 111283 - DNA, 4207 bp, Cannabis sativa
  modified_base (4136)..(4137): a, c, t, g, unknown or other
acacacacacacacacacacttctcttttcacaacttactatttttctccacacatacctctctcacacacaaaatacatatttataaagttacaaaatttgggcaccaagacaacgaactcaccaaggttgtttaatgtagagataccctaccctgcataaatttgtctgattcatgtgtatgatattgttatggtaggtatgatacgacgacaatattgctgagataccttattccatagctagcaatggtagggctaaatgtgctcaagctattgtagggctaatataagctcgggttatgcatgtaatggccatgatatgataaatagtacgatatggtgttgatatggttatttcatagtattatggttattctatgagtatgatataagaattatgatctttacgtgtgatgttatgatcatagcatggaggcatgtaatattattttctatttacttatcattatcacttaaagtatgatacttttggctgatctgaatttttaataaaatgcctcctttccattccaaaaaaataatattgttttttgtgtatatgctaattcaaagattatgggtcttctatgtataaggtgaagtggtaatgccgtagtacattagtgtatgtagtttgaaaatgagattacttagttgcaagaaattcccttcttattcatatataataacaccattatataaatatatatatatattttagagatctaatggataaaatttaggtcattaaatttagttacattattaaaaaaaatagctgaaaatctatcgttcatgaaccatgtatgtcctataaaaataggctcaaatgatcatagttgatgaaaagttacaaataatattatataatataagagtaaaaatatatgcacactaaatatgcattagcatatatattatattagttatagtgaggtattcagctaattgaaagggattaattaagacataattcatagtttaaaaaaattcacactgttacatcattagacctaattaagtataatattttgaagtttattttacgtgcacatacctttactcatattattattcatactataattaatatcatttacccactacataaaatctacaagagatccaaaatccaataacaataactacaaatgggacattatgggatcatcattcataaatataatgtggagttacttttttttggtgtgtttattcatatattatatgcatatataaggatagaaaatattataggcatgttatggctttatatatatgaataactttggtcctttggagacttcgaaaggagcaagccaatcaataaattaaattaattaatgatatttatttatatatatatgagtgctacactctattaaaataagtatattggtgtaattttttactgtttataaaaaaatttagtctatttaagatattttataaaattttgaaaaatttagaataatttataatataaaatttaatgttcaaactatctatttcacacgcatataaaataaaaaatttacatctgcaatagattttttgagcttgttaaatttttttgaatttctcaaacttttgtagaatgttttaattaactataacgtatatgatcatacaaaaaaaatcagagtattttttaataaaaaaaaaatacatcaatacacctctattagttttgaattctaaaatttaatttttcaatatattaataaggatatgtaattagtgtaatttggtcatcatgacatggctatagtctatagatctaactttgtaccatttgatgtacggaaactttttgaaaagtaaccccactttcactatttcttttttcatttttccaaaaaaaaaaaagattttcttttcataaggaggaccattatttatatttattaccaccataaatcaatgtggaccaacattttttatttatttattacatgtatggaacccactaaattaaccaaaccaacccacctaattaaaataaattctcattattttatagtataataattgtaattgttgtttttatttacattttttttccttagggtagaaaaatatacaactctaaaagttttgagacttttcttgtttgtacaaattcataagggtcttctctcgatcctttattttctatacaaattctcatttttttttctttttttgggaaagtaaatttaattctagaaataataaacttcaaaaatatatataatttattccttattttcttcacatttgacctagaacttttattcgaatgtgatgttatgttcgtgaaccatgtgaattagaaaaaattaaaaacattattaactattaattaaagtctaattaatctaattagtacaaagtagcatcaaaattaattaactaataattaaataaatagcttatatataaatatatataagcgatcaaattttgatatcatttatatatattttagaagaattcagtcaaagtcaagacaagtttaattaattatacaaatcaagacaacatctttattgcttggtgctcttgatgttaacctttgtcaaagtttaagagtcaagaaagtatatataatctttgatttttaaacaaaattacaaaaaatataaataaaaaagtatatgtatacgtatatgtaaatataataatttatatatttatatgtcgacattctcaaccttcaattctttatggactagtggtagtgatcttgatcaataaccatttgaacaaaagaaaatgacaagactcgcactctataataaatattaatttaagtaaaataataaaaaaaaattgtatacaaaatagttatatatatttacttatgtataaatactttgttgtattattattttttatattaataatgtttgttgagatttccattatggagacacattatattgtgtttgtaaattgtatggcttcgattataaattcttaaaattaattcaaataggttatattgttaatttaatatgtgtccattatttcctaaagaaagtagcaacttataagttatcatgatgatcactttttaattataattttgtttttaatgataatgacatgatctatgttaattatttgtgaaaaaagaattaataaataaataatattccattttagattctaattaagtttatatatcattaatcattccttccatataacattaattagtcaaaatatttttatgagatttataagataaatagcaatgggttggagaatatgatatatatactgtatatttctatatatacataatatcacttatttaaattatatgttaattcattataataatattcgaggttgatcaactaataaaaataattcatgcaataatttaaactcatgtcttcttcattttatttatcatttccaaagtcaaaactactcatataattatttttcttgctttatttaatttgtttatatattttatatttctgtggtcaattaataatcttgaataaaagattagtatacattgattttattctaataattaatatttcatatcaaaatcagtttggtgtagatggaaatgagacaatgcttatttttgcattaacatgtacataattacacaaaataaataaataaaatttcaccaaccctagcataaaattaagaggttttattatttttaaatttcaaagtagttcttttaataattttatagaaatccacttaacaatctacatagcaactaacgtagtaatttaaatcacaattcaaatttacacagcaaaccaacataaaaactaccgaaacaggaccattcctacgttaaggtgggccgcacctaaggcccactcctatcaaggacccaaatgaataaaaaaaacttttaataatcatagatatattttaataattttttaaaatgtcatttattttataaatagggttcaaaaatttattttttttaaggtccaaactaacttcgagccaaccttaactttatatcgaaacaacctaaacggtacaagtaaaaaaattacatatgaagagattccccaaaaataaattggaaaataattgttaccttaagttgaacaacacacgtgaacacattattaatgggaaatttgattttctatnnttacatatacttaatatttttttttaaaacacataacatttaatatttgtgggatatgacacattttaga

SEQ ID NO: 111284 - DNA, 1285 bp, Cannabis sativa
tttatatgtgtttaaattccattgttttataaattcatatttaggatgttaaacaacatacatggtagtagatttagatcctagtaaaactataatccaacataagcatcgtaagatgcactaatgcacttggtccgaactttgttggcagaaatctgatggtagtatgagatttcaggacatgtttttaatcaatcaatctctcatggccaaacaagcaactcacctataaaactattaggattttttggtttctaaggttatgaaaacattctactatcataatagttctgtgttagaaatggaagaaacaaagtgagcttgttttcttgggaaaagcatcttatggggacgtgattcgtggaatgatggcactcgttagctagttgggagaggtgatactatcattgatctataaactcggtaggaggcctgcatcgggagatgatgcaatttcgtgtcaaacctttttggcaaaataccttcatggctcaaatactttcttgtctctcacttctcttggtgctgcttcttttggggcaagaggaattttttatactcgagatcatttgaggaacgagtcttgctacttggtgggtaatggggtagtggctgttccattgacatacttaagtctccttggattccatggttggatttcgaatactacatagttgccttgaatccattacctttcaacttttcttcttatgttactccttatcttacctcagtattgggtgattgggactcgaataagcttcaggcttggttcattccaagttttgtcgagtcaatttactttgttcaaagactctcgtcctttcatcgagatgaaattttttggaaagatgctaggaacttgtgatcctatttggcagaaactttggagattacaagttcaagaatttcatgagttctttttgtgaaagttggatagagatattttgctgtttggaagtcgtttaagtagataattgccaagattgctcaatgcaggtgttgattcgtttcagtatctttttctcagtgtttcttggccagaggtgtttggttctccagtcagtggggtttacatagtgaagacttggattttgaccgtctgttggacttgttaataggggtgagcaaaaaatccaagaaaccgaccaaaccgagtacactgaccgtctgaacactgaaaaaatcgacatcgaagaaaccaaaaaccgaaaaaactgccttcggttaaaaccgccttaacatggtcggttttagtgtcaatggcaaaccgaccgaataaacc

SEQ ID NO: 111285 - DNA, 2888 bp, Cannabis sativa
  modified_base (2591)..(2591): a, c, t, g, unknown or other
accttaccggcaacatgtttgcattatggtaatgtaacagagtataatgcacataatctatatggcttatatgaatgtaaagtcaccaatgctgccttagtcaatgtgactggtaaaagaccctttgtactttctagatcaacttttgttggctctggtaagtacacagctcactggactggagataatgcagccacatgggacgatttggcttatacaattccatccattttgaactttggactctttggaattccaatggttggagcagatatttgtggtttcagtggaaacaccaccgaggagctctgtaggcgatggattcaggtataatcttgcagcatttgtttcttaaagtacagtgcaaagctttagattttgttttctttcattctaaaataaattgcatgactttgtaaaatgcagctgggcgccttttacccctttgcaagagatcactcagacaagtttacaattcgtcaagagctctatctttggaattcagtggctgcatcagctaggaaggttcttggtctccgctaccggctacttcccacattctacacattaatgtacgacgcacacaaaaagggaactcccattgcaagacctcttttcttttcatttcctaaagacaccaaaacttataacatcagttcacaatttttacttggtaaaggaatattggtgtcacctgtattgaaagctaaaacatattcagtcaatgcatactttccagcaggaaactggtttgatatgttcaactactcgagctccgtgagtgtaacatcaggtcagtatgtcatgctaagtgctcctgcagatcatataaatgttcacgttagagaaggcaatatcttggccctgcaaggagaagcaatgacaactcaagcagctcgtaaaacagctttcaacctcttggtcatttctagtatgagcacaaatagcaccggggaagtgtttttggatgatggcgaggacgtgaagatgggagaggagggaggaaagtggagtttagtaagtttttctagctcagtaggaaaggatggggtctttattggttcaaacatttccaatggacaatttgctctgactcagaagtggatcattagtaaaatcaccctaataggactggaaaaagctaagaaggtgaaagagtacaagctatattcgggaggaacgttgataaatgattctagcatcaaaacaagtttttatagttttgggaagttcagcacagtggagatgactggtttgccactgcttataggtgaagaattcaagttggttctcacttttggctaggatagggagtactgtccagaattagaaggtaaataagaaattgagtgaaaacaaattaaagaactagtctaaataaaaatatggtcagtgacccttgttctaattcaatggttacttatttcttctgtttattttaaggctgaattgtgataaagtatatttgagatttataatctaaactttctaaatgatagaagagtcaagagggccagtttaacaaatcagacattcactataagaacataacatgactctaaattaaattttgtaatgatcaaggagtcttgatgtgtttctaagtggattattttttaaataaaatggtaataatattaattccttccaataaaatggtggtaatattaattccttccaatactaggattttatattttctctaagtctactctttccaactcaaactcacataacacacctcattaagtggcgtttagttggaaggaataaaaatatagttagaataagaatgacattctaataatttaaaatgaactcaaataaaagaatggaacaaaaattgtttctttttcgtttcattacctctaactaaacaccacttaaaagatctgcataagaaaagtaagtatccgatatgaattttttttccaactaatgttttcaatcgcataagtacctgattattaatttatattccatttataaacttctgtagcatgttataatgggttggggcatcttcattgttgttagtcttgaatttttgaagttttaaatttttaatcatattcaagatcagatgaagatttttgaaaatacttgcttatgacatcttcagtgttattagtctcagattgccaacacccagcctcatcaaattgaaattgtcccttgaaacaacagtttagaaaagtcgtcctacgtttttttttgcctccaaatactcctcatttttagttttactagatgaaatccaagttccaaggtcgtattagcataaatgaatcttgttttaccaaggagtttatactaaccattaaaaaacctaataaattgtagtagagcaggaaagaccaaattttattacattcatattgtctcttgttagatttagattttgatttttcgtctcaaatacaacactatggtagcgtttggttgggagaaatgaaaatataggaataagaatgagaatagaaatagaataacatttaaaatgtataaaaataatagataaaaaaattattaaattttttctcatcatgcattggaattgtctttctttttatttcaaaatagaatagtcnttccaccaaaatggtggaaaggccattccattggaatgacatttcaatactttaatatgtaaccaaacaaaaaaatagaatgaagattgttagatttagattttaatttttcgtctcaaatacaacactatattctcctataaagaatatactgagattcaaagtaaaagcattgcacattttaatatccaccagttctgctcatccaccagttgctgaatacatcttcatctctagtcagcttttcatgttactgatttttttatgcaccagattttcatcttgacaaacatttaa

SEQ ID NO: 111286 - DNA, 7636 bp, Cannabis sativa
gtaaaataaattccaacatgatcctcatagttcccttaccagttttgtagtcaaatccttcatcattaagagtgccaagagatatcaaatttctctttaattcaggaatgtgtctaacattactgagagttttgatagtgccgtcatagctcctcatagcaatggtaccaataccaacaacctggaacttgttctcatttcccattatgacattcccaccatcaatcttggagtattcaataaaccaatcattgtttggactcatatggtaagtgcatccactatcaagaatccattcaacatgatctctatgatttgaactggtgcagtcatctttagaacttgaagattcatcttgagccttgattattacaaaaatatctccatctgaaatataatgatcatcaactatagcatttgaatcactgcctttctcttcttcatgcttgctttgcttcttcttgtcactaagttcccaatagtttctgattaggtgacctatcttgccacagtgatggcattttttggtttcttatggtcttgattttgatcttgtgtttccacttggtcttaaattgttcctgaacttagaatggtgtctgaaccttgaatttcctctccttggttgtcttcctcgaatcatcagggattcatcagttctggtttcttatcttgcaggcttttgctagtttagttctgcatcccttgatcttggagtgctcattacatcttcaagagtgagtgtccctgttgtacattataacagttctcatttccttgaactgatgtggcaaatcattcaatatgatcacagcttgatcttcctctttgattgtttctcccatgttagttaaagacaaaataattttgttaagatcatccaagttttattccaaagaaacattagcattcatcttaaaaccatacaattttccttttaagaaaatcttggtagctgttgactttgccatgtacagttgctccaatcttttctagatttctaaggctattttctcctccataacttgtctcaaaacattatcaggaagatttattatgattgttgatcgagcttatttcattatgattttagcttcacttttctttgttgcatctccttccttttctgatttttcaagcctttcctctagtgcagaatctaacttctggtggatcaagattgccatcatcttttctttccaaagggtgaaatcccctgatccatcaaatctctccagatcaaacctggttgatgaagaagccattgatcaacctttcttgattcttgactgcttcagtattgagtcttggatcctccaagaactgagctctgataccactgttgtaaatcctacaacacaaactcaacacacacatagcaatgcatacaatccaaatatcaaaccagaaaataaaccaaacaagtaatgaacacaattaaagcataaaacagaggaaatgtaaaaggataagacaaatatttatcctcttatcctggttcgaatctcaatgtgagtcctgctctagctctcccccaaggagtttctccactatccaagattgtttacaaataccaattgagagtagtacaaattgagaatcacacagagagaaaatgactctcaaaccaccatgattaagctgctcaagacaccatgaatgccatggttcttcatcttcaaaagtttcctcctttgactctcattcactcattctctctttgatttctctctcactctcttaaactctttcttacatcattcaaaagagattacaagtagtgtttatataggtcagtttttaagctcccaacccgagccactaacccttaagacaaatctaaccaatcttaacaaccttaactaacttcctaatcaactttccaagaatagaaagttagttccaaaacttgttttctatggattactaaccacactatacgtacccgattgattcacattaattacaaagatttgattttatagtacaatactatcaattaagtcttcctctctagatctctaaattagaagcatatttatattattattaaaagtttaaaattgtgataagacaatatgtctttatagagttaaagaaaggacttaggtatataatcttagttggattgggcctgctcaataaattcttcaataacacacttctgctttaattaaattttacacacacaaatgataaaagttgatagatcaccaacaatatgacctaacaataatagattatctaagaactcatattataataaaaataataaaatgtaaagataaataaaaaagtctatcaaaaaacataaaggagatttttaggagtgtgccataaaataccctaaattttatgggtatcatatatatatgaattgcaaaatatgaatatttgtatatatatttttaaacaattaagtaaatttaccttctcttcttttggtgagtttctcacgtaataaagcttgttaccacttttagtggtatcgactttatatattcccttcaccattaaccagtatcctttcatttcatggtatggtcctgcaaattttggatttgaatccaaatgtcttctttttcttttctttctttatcttttacatttaatccttctcgtgcgtgaagagagagagagagagagagagagagagaaacatgatatgcatgcttcctgagtgaaaagtatacatatgtcaatgattaatgacacttccattacatgcatgcactctaatttatgaatagcataacgaatatgtccaagttttgtgatcaaaattattactatatagcaagtacgtatacatttagtttgattcaaatcactttcaggtaatttgaacctagtaaatttatcaataatttcttaccctgctctcccagagaaatccagtaggaatgagccatttatatggacgtactaatggaaggttggaaaaaaatatatgtatattttaattaattatatatatttgtaattaaatactatatatatttattgacaaagtgttagctttttgttttaatatttacagtttactttttagaaaaagagaattctggaatttgattgcctaccaatatgatttatatatatatttagtgcttcaaattgaggttaaacatttttattgttaattttgtattttaatttatacttaataacatatacatgtataaatttatatcaatttttaaccgatttttttaacatattgtattatataaacaaagtacgctcaccttcaactcatatgtaaggacttctgcacttacttcaagcactatagatactcaggttttcatgattacctttcccataaaaaataagggaataaaaaaagaaaaggagaaagaaaaagcagaaagtaatagctaattatcattacttatgtgattatttgtactcgtgtctgtggttagatttatacgggattacaaaattttgaatgtcattttttttatttattttctattttttttctattttattattattttttttttttttgagggaggaaaagaaatcaaaatattgtacgtatgtaaattaatgcagatgtaattttagatgaataacatatatgttgtcaaaatcaatgcaagaatatggaccctaatggagaaattagtgcatattctatttcttgtacgactaatcacatatgatatgtggcaatatcttatattaattaaaatacgttggaaaaacgaagatttttgtttccatgcaaaagttgaattttcccgggaaaaagacgcaaaaaaagcagtgtatctaagaataatctatctccatctattgaggtccaaaagccatttttctctcttccatctatttaaaaatggatacttgcatttgcattccatgggctgttttgtttcttatcaactaattaaaagtgtaatttgagtcactttagaattacattaaaaggagagaacaacaagagttgtctttccctccactacgtctttctctctctctctctctgtttttcatcctcttttccttttctttttctttgctaaagacatgatcaaatcaagttctacgttctaaagatgcttccatgagcacgtaagattgagactttatcgaatatacacacaagaataccaccaatagagagacttattatgagtatattcctcactgcgtaccaatatatatatattaaaattttgaaaaagatcgttgagagatatgatctatttgatgtgatactgggcctaacaattccactaataacatacttttgatcagtgcaatgatcagtccatccatggccgaccctttgcatgtcttcaaacaaataataaataaataaatgggtcccagaatagattaaaattacggaaaagagaaagaacattagtatgtatgtctgacctaaacatgattaaccaaaaaagaacagattgagtcaccaaatgtcaaaagaaggcacagaaggagaaatggtagtttggtatatatttggttagtctaatgaaagaagaagatcaagggaacataaaggctgttggatcacatgcacatcacattctttttctccttctcttctcttctttttatactgttaaagaaaaggtgttttgatttgagaaatatatattgatcagtgatatataaataaaatttaaaaagaattcaaaaatcaattaataaaagggccccacgatttcaaggctgcaatatatttttgctacagaggattcatatttaatatttaaaagttttacaccctacaattagttagattaattaaaatgtataggaactaataacaacagtattatactgctttttagtactttcttttcccatatacatttacttcctcaatccaagggattccgtgggatgatgaagctctatatgggacctctcttcttatcatcatcatcattccatgcatatatgtaaataaagacccacctctcacgtccagtacttaccaaagcaaagtgcttaaaaagtggcatttttttctgatgacagccaataattcatatactaaatgccttcacaaagtcacaattatctgatcttcccttttatccatttatatataatatataatatatataatcccctttatcgaaatctggtgaaagttatttctatcatacatattttatatagagaatgttataaaaatacttttttttttttacaatatatatttcatatttttattattatatatattttacatttttattgtactaatttttttaaaaatacgtgttaatgtttcaaaattacaaaattattatgtttagtaaaaaaaaataactttaaaacaactccagaacatatgttagaatttgaagataagataaatgaggtttcatctcaaaattaattggcatgggaggagtagcccattcatcttatatattctattatctttggatacattagcaatatgagactctctaacatctcccatcaagtagctcttttgctctattttttggatgggtatttttggattggtggcttttttttttactttgacttttggatcaattactgttggatttttagtggctctttttttggctctacttggatcaattttttttagtggggtcaaatagtcattagaggattttttttatgatttttctttttactctgataccatattagaatttggggataagatgaatgaacttccatctcaaaattaattggcaataggatgagtagcctatttctcttatatattctattatctttctacacattagcaatgtgagactctctaacagaacaatttaataaaaatacataaaaacagttacaaaaaaaaaaataaaaaaaaaaggcaactacaaaacaacagaaaaaaaaaatattaacctaattacaatatacaaaacaatatcgactccttaacatatttttgtagtacgaaattcttttctattttactattagttttgacaacttaatttatctttttgtattactactattttttttcatgaaatttgttgttatatcttcatactttaagtatttttttccctctcttcctttttaagttagtaacatttaaaatgacaatttaatttttagaagttatacaaatagttacattaataataagaaaacaataaaattttatgattttaaaaatagggtatataatataatggataaaatataattagtatctcaatatctattattatacattgtgccaactaaaaatgaaaaaacttatcattgtattgtaaatatatgcatctacataaacagaagaacacacacatacaacaaaaaaaaaatattaggaataaattaaaaatattcaccataaaaaatatacatgaataaaaaataactataaaatgattattcaaaaaaaaatattccaaaaactacttaaaaataacttaaaaaacataaaaagaacaaaataaatacacatctttacaacaaaaaaaattatctgcaataaacttaaaatatataccctaaaaaacacacaaactaaataacaacagtataataaaaaaacacgtaaaaacaacataaaaaacttataaaaacacctaaagaacaacaacacaaaaacaactataaaataacaaaataataactacaaatcaatagaaaaataaaaatatatcaacctcgttaaaatatgcaaatcattcatcaatcaacttcgaataaactacaaaacataaaaaaaaattattaatcatgtaaagaaagatataggagtagtacgtacttctaattttttgtaacagagagaaagagtatgaaaaaatatgagaatgtacgaaagtaaaataatcatattttaataaaggttaaaataacttagttaagttttttttttttttttataaaatgtttgtaattaatgacaagtattttgaattagtttgagtgtcagtagtaaaaaaatataaaaggaagaaaaagatgtgaagtaagtttttgtaatttttttttttaaaaaaaattataaaataaatttttgtgagagagtaaaaaagtattagaagaaagatataaaaatagacatttattatatatactagacgaaagttacttggcgagccacgtaaatattaattttatttaagttttagtgattttttaaaaaatacatctttgaaaatacatctttcactgcctatataattatatatatatagttcacatgtaaatttattagctttgaaaatatatagttaaatttctgttgagtcctgttaattaactctcataactataaaattaaattaggtatcttgcccgtaagtctaatatctaatgcccatctacacaagttatagaaaaaagtaaataaccggtaaataaaagatgatcattttataattagacaacaaactttataaatttattttaaatcttaaatattatttttccaattaataaaatcaatgcatccatctaccataaataatctttaatattttattttcatttacactaaaaaaattaatatcaatttttgacaaattaagagggtatcatgcataatgcatgtgcatcaaaaacagtaactaattaaatactaaaataattttaaaagatatatatacatacatatatatgtgatcatttccatttt

SEQ ID NO: 111287 - DNA, 8149 bp, Cannabis sativa
  modified_base (207)..(209): a, c, t, g, unknown or other
tactaattcttctcctttatttattagttgtaatttctcttatgttcgtagaacttgtaattttgccgctcataatgtggctggatgggcgtttgctcatcagatatttgggactatcccggtgtcctccttacctgacaatatattttgtaacgatcgagaggtctaacttttgaatttatgatataaacgctttttctcaaaaannnaaaaaataaataaaaaaagaaaaacaatctcatgcctacatcttttacgagcctcaaccaactgcccaaaaaaaaataaaaaaaaaaattccatgataacaaaagtaaaactggacctctcaaattcaacaaacaacattatatctggtggcatctacttctcaagaccacctctcgtcacaaatgagtccatgaagaataattttctctaatataattaccttacaaatcataaatatttaatgctttattgctagtagtttatggttcatttagtttaaagtattatttacaaatcataaataattacctatgtagatgtaatttattatgtctgattaaacaaatttccatttaccttgaaaaaaaaagaaagaaaatcagactcctcaactctagtgtgagaaagcaagtagctgatttgcatgccagctaggcattactcataacacgcgcctttcaattacgaggtaccaaaaaaatatcacatacacttgtggccagctcgttcacctgcttacaatgacgaaaacacccccacctgttgccacgcgtagcgcgtgcgaacccattccaaagagagagaagaaaaacagagatgtgagaaagcgagtgacgaaaggtgagagtcagatatttcgaaaccctaaaatctgaaaggaatttgggaaaaaaaaagaggaaaatttgctataccggtacaccccactcgctcttgcgcctcgcgtgagtcatccatctcagatcgaacgaaggtccatctccaacctcctccttcttccttacttggtactcttcacgtctctctctttgttacagaacccgatttctctctttgtctccttttatttttctgaattgttttttggggtggtgaattttatagattacgatttgatatgggtagatggtgaattttattggtttcttgatatttagagtgattatagggtttgacgaagttttcaagttttcttttttttttttttaaatttttttcctgcaaattaaatgcgtgactttttcccattagaggtgatatttacgttatgtttcgagttttagttaagattgtgagtttatgtaatagatgtaaatgtacataagtctactaatgtagttgtttttgtagtatagaagtttgtgggctatgtgtattttataagctaaagctaaagaagtagtaacattgagatgttctagaataaatgaggattacccagttgaacttgcctttttattttctgatttaagtcttctgtgtaaatttatttgataggttattagttgattacaatgttagttggttatgatttatccacatgaatgaattctctctcccacccttgtgtttgtctaggagtttgacattgtcatctcaatgtctctgattatatggttgattttaaagctggaagtgttgactattcatgaaagatcatcttttgtgaatttcaaatctccccattgttacattcttgattatgattggatattcatttccttgaaagacatcaactaagatttaatgtagcttaatgtagcattaatatatgttaatgctaagcaaattattgatgacaacagatcaagaatttccttcttggcctttagaaggttgactgccttttatgtttgcctttaagtactagttacaagacaaagccaaagtatgaaagaaaaagagaagagaaaaaatggctaagaaagagttttctgacatggagtcaggttatggatatttacaattcagggtttatttttattgtgattaatgagctgagggtgcaagtatctcctgctttagctataaattatcttagttgtatgtaaaaaaattctttccagactgttggtgatgttgcactaactttgaaacagtttgaaagtcacccagaatctattgagatttaattaacatgacattttgccttgaattagaaatgttcaagtaaagaactcttaaaaattgtagaaaagcttttcctatttttgcacattgtttgggtacaaaattgtttgaggtcttttttgtggaggcattgaaaaaagaaaaggctatttatttagaggcctgcttctgttgtttcgtcattgatattagttaccaaatcttctattgcattacaaagtaagtcttctttgtattcaacatttgtaggtgaaaaaattgtgcaattgctggaatggcaatttctatttaacatgtctgttacccaccatcctattttgtatgtttctagggtcggcttacaagtggaaattctttggtagagttatttatttgtatttagctgctacatcactaggttttattgttactatctttgttaaatattatttattatttgagtaaaattcccatgttataatatggaatttttcttccttttgaagattgtaatggaaccttaagatttctagtgatcatttatgtttaatttattggatatagatcagtgacaagataatgaataataagattaaatcttccagttttagtgaaaggtccctctttctttatctgcttgggtttatatcattgtaatatttttgctacctttgctttcttgtacctggttttacttggggacatttggaaagacaggcatttttacagctttgggtgtattcattcatttgcaatagaagttgtttcctagtttcctgtgttaggcttagttatagccttatatgtttgctgtgttaagcttgtttttgtatgtactagtttcttctgggtatattggctgggtggatgtataagtttgttgaaaataattaagtagattggagaactgcgttattgtttttattaactctgtttctagtgataggaaagattaccccttcttgggattcagtaggtgaatattatcgaaaaaaaaaaaaatattatcgagataaaatataattgtatatttctgtctagttattaaaacaaactcatattttgcatggtggttatcttgtttgttcactttttaggtaaccttaagatcactaactgaaggaaattgtatacgtcatggacattgatcttcggttaccatctggtgaacatgataaagaaggtgaagaatcaactgccattgataacatgttggatggtgaagagaaactacataatggagatattataagtgggaatatggtcgatataggagatgaagtacacactgaagatggtggagatttgaactctcccacagcaaatatggtagtctttaaagaagatacaaatcttgaaccactttctggtatggaatttgaatcacacggagaagcctattctttctatcaagagtatgcacgttctatgggatttaacactgcgattcaaaatagcaggcggtcaaagacatcaagggaatttattgatgcgaaatttgcttgttctagatatgggaccaagcgtgagtatgacaagtcctttaatcggcctcgttctaggcaaagcaaacaagacccagataatgtaactggacgaagatcatgctcaaagacagattgcaaagctagcatgcatgtgaagaggaggtcagatgggaaatgggttatacacaattttgtcaaggagcataaccatgaactattacctgcccaagctgttagtgaacaaacaagaaagatgtatgctgcgatggctagacaatttgctgaatacaaaagtgtggtaggcctgaaaaatgaccccaagaatccatttgaaaagggtcgtaatttggcagttgaggcaggagatttgaagattttgcttgattttttcacgcagatgcagaatgtcaatgctaacttcttctatgcagttgatgtgggtgaagatcaacgtattaaaaatttgttctgggtcgatgctaaaagcaggcatgactatgctaatttcagtgatgtagtgtcttttgataccacctacattagaaataaatataaaatgcctcttgctctttttattggagtgaatcagcactatcaattcatgttgcttgggtgtgccttgatatcagatgaaagtgtgactacatattcctggctaatgcaaacgtggctgaaagccatgggcggacaggtaccaaaagtaataataactgaccatgacaaagtgctgaaatcagttatttcagaggtctttccgattgttcatcattgttttttcttatggcatatattggggagggttagtgaaactcttggtcatgtaatcaaacaacatgaaaatttcatggcgaaatttgaaaaatgcatctacaggtcttggacgattgaaaaatttgataagaggtggtggaagattcttgataaatttgagctcagaggtgatgaatggattcattcactgtatgaagatagaaaacaatgggttccatcgttcatgagggatgctctattggctgggatgtctactgtacaaagatctgatagtgtaaactactactttgataagtatgtgcataagaagaccagtgtacaggaatttctaaaacaacatgaaacaattctacaagataggtatgaagaggaagctaaggctgattctgatacatggaacaaacagccaacattaaaatctccttcaccattagagaaaagtgtttctggggtatatacacatgctgtgtttaaaaaatttcaagttgaggttttgggtgcggttgcctgtattcctaagaaggaaagacaagatgagataagcattatttttcaagttcaagattttgaaaaggggcaagactatcaagtttcatggagtgagatgaagtccgaagtttcttgtttgtgccggttatttgaatacaaaggttatctttgtagacatgcactgattgttctccaaatctgcggcctgtctgtcatcccaccccagtatatattgaaacgatggacaagagatgcaaagatcagacatttaacaggagaagaatctggtcaattacagactagggtgcaacgatacaatgatttgtgtcaacgggcaatgaaattgtgtgaagaaggatctctgtcacaagagagttacagcattgcgtgtcgtgcactagaggaaacttttggaaattgtacgagtgttaataattctagtagaagccttgttgatgctggcacatcagccacccatggtatactctgcatggaagaagattcccaaagtaaaaatattgtcaagacaaataaaaagaagaatccaaccaagaaaagaaaggttggcaatctagctcatgttatgctattgttttctttctttggaggaaaatttgttcactcctatcaaccattctttatttgcaggtgagttttgaaccagatgttataacagtagggacacaagacagcttgcaacaaatggtttgttctcttttaagtgaaatgtattttaaatgtcaattgtagattagcattgtacattgtattgatgagtgattttgattagcaattttcttttattttattgaagagatgaattaacagtactgatgtctattttatattttctgcaggataataaactaaacccaagagcagtaacccttgatagttattatggcgcacaacagaacgtgcaaggaatggtatgatgactagcaaattcatattcacatgtgaaaacatgttttcatgatgtgtcgctgacaagcgtttttttttaccacttcccttgtcaggtacaattgaacttgatggccccgcgtgacaattattatggcaatcaacaaaccattcaggggcttgtgagtcatttagcagtaaattaacaaataaaaaggggttattattgtatctgatgtatataagaattgggttttgattactgtagggacaattaaactcaatagccccaagccatgatggatattacagtgctcagcaaagcatgcatgccctggtaaccttataacttcattccaaattttgaggtctatgattgccacgctagtgatggcatgctaacaatttgttgggttctcaaacatgcagggacagatggagttttttagtagacccagtttcacttatggtattcgggttcgttaactagttatgaaattcatgtggcttctctcgtaatttttacttgcaatactttctcactctaggatattcatttcattagcaggatgaccccaatgtgagaacaacctcactgcatgacgatgcatcaagacatgggtaagaatcaccaaggtaacgctcctgaaggtatattccctcatcttttctgctgctgggtaattcctttgcttgaaatttggagttttaatatcaatttcaatgattggcgtgtagttggaggagacacacacaagtcacaatattttgaaggaaaaattggttcatgccttatgaatgatggcctagtaaaaacctcgcggtctggcgtctgtaaaataagatagagtaggttctttaatctttccaggccccctttgtcttctaaaagctcacttggagtataagacagatttaaatagggtcgtcatatgttatatcttttgtaaatgttattattgtattgtatggtatcatatcagctcatcttgtggtgtttagcttaaaataggattagtgcaaatcagaattattcatttgaagttcaacttgaaccactcactgatccctttgttgcttctgatatattagctaaaaagcagttcctgctgattcaacttctatcgctttccctcatcttatttcttaacagtgttgttgtgatattggggcaagaacttttgcttatttatcaaggttgattatttacttgatcatccaagcattttattattatgtaaatggttaatataaagttttgttgtgcttttaacagatccttacattttaatagaattatatatataaatatatataaaatatggttagatttgaacagaattaacccctctcagccaatacatttgaagtgtttattagatattttttaaactggaacgataccacaaaactgatggcaacttttcaagccattttcattaatatataactatatagtgatgtctcatattaagaaattaatatattactacataccacacctagccgaggtgcactttttggtgtaacctttaacaaggtcttgaaagatgtaagatttatgagctatggatttctttttaatgaaagcacattggttgtcacttgtgtatgagaaaatgaagcacttcttctagctttacacaatattttggagatgcatttataaataatattatagcaagcaattgggcagtaatccaaaactcgagttggctcttcgtgtttagagttaaagagactaatgtattgttaaactcctctagaacgctgtaatttttttaaaaacattgctatatggcatcagaaatttcatttcctatatctgcccacatacatagtcttgaagaaccctacaccataaccatccaccccagactgttattggaatgaatacaacaaattgctttcttaacaacaatgaaatctccaagaactaataagcaggcctgagcagggagatagaggttaagagagtcgttgccacatcttcttcctatccccaatactgttcttcccatacaccaccgtaaggcagaagtctacagtcaaactattcaccttgaccttacaatgtaaaagttgtgaccactcttctagtatagcaatattcaccaacgtttttttagccaaatcaaaagaaaacaaacatcaattatatgacttgtatttattcaaaatatatataaggagatgatttttgtccagttatagtacaacgaaaaatactttgctacagcaaagaataaaagctagaaatttgaacggaatgagtcattatattctactgccactaatgtaaggttttctaaaatttacatgtgtttatttcatcgtattagaaattcatatttagggtgtaagattatagtattataatcaacatacatgttagt

SEQ ID NO: 111288 - DNA, 5843 bp, Cannabis sativa
tgaagtaatgaggaagacaatggtaaaaacccttcttatattgaaagatggggaaccgttgatctggttctaaattgtatcaaatggtcggacatctttccaggaaaaatgaaaagacatgtaaaatacccgccatatgaagggacatttaattaaaggattaattaacttttctcgcgaaaaataaaattgccaaagaaatgtactcattaccaattaaggaaagaccaaattatcccaactaggatcttttaaagaaactcttccacttctacaaagagcttttcaggggcaattgttatgctcatattttgagccataaatatggacaagacatgtgggtattttcctcgaatattaaaagatgatcatgattacaacgactatcctgcatcgagagaaacaaccataaatagatatcaaccttgtgctatgctacaatatcactaacacgtaacaacgataaagtacacagtattgtaagatatcaacttcctagagtcatcttggagctaaccgagatcactcgaaaacatgaaagaactgaaacaatgtcactggaaatggtagataaaaagttctttaagagcttgtaacttattgacccgcatactcgtgagtatgttgaaagactaagggaaatgtacaaaatgtgacttatctaaggattcctaacatactaatcttaggagttgacataaaaggcaacaacgaggacaaacatcctaactagtgtctcgcggaatatgaccactcattcccaaacatgtttgaagaatgcgagctatattttagatatattatctcaacgacgaaaactatttcctgataaaaacaaaaacagttttcaacaattattctattttatctgcatgtttaaatatgaaatgtgggggttattcacgtttcatgagcggttacctagataagattcaaagagaaataactgcctctctaaaaaaacctataaatagagacagaaccttaggggaaagggattgatcatttttggaataaaaggaccttataagattgggtgaatattcatagtaattctcttgtaatctatacatatcattaggaaatattcaaaaatgacaatgactcgtggagtatgtagattttaactactaaactacgtaaaattcttagtgtttcatatataaaccatcaattttttatttacgagacttcgttagcaaaaatttgagtttacaattataatattatacttaaaactactaaaacatgaaaaaattaatattatatattattttatttatagggtgcgatataaaagtttgagtatttataagtaaatatttaaattataatgatgctaataattttttttatatgattatctataaaatattgtttaagagttatataactaaaactgtaaaatgtacatattctttagtaataaagcacgaatttaagcttaagatataaaaatagactgacctgtttgagaaatacatgctcacacaaccaaacttgtgctagagttatccattaaagatattgacacaacacaacacgactcatatttttttatagcacgatacaatacgattcgatttattttttaaaaaatacgaattaaataatataaatcgagccagcacaaaacttataaatttcttacatgactaatcataaatacactaaagtagggtctatgtaaaaggtgtctattgtagacattccctaaaatatttatatatattttacatggtggtagtaatgtcaacagcaaataacaaattcaaaccctaggaacaaaattgccggaagaaaatgataaaatactaaccgttttgattccaaatttaaataataaataaataatcactgttaataatgactacacatgtatgcactgacaaaatgaagtttattttaataaaataatatatatatatatatattacatacaaattatttgttgttttttttttaaagcaaaattatttgttgttgggttacataaaaatgtcttcttttttttttgtgaaactaattaaggttgcctttttatttcactttgtttaacttttaattagatgcaaagacaaagaaagctatgtacattgaatggttaattgatgacttcaattttgattaaatacaaaacaaaattgggacactatcaccagacacgtccattgtacattgtatgtgaactatttaagtttattagattctctcaatggagagaaacaatcatcacgtgtattctagagaattttaaaggaaaacaaataattcaatttttcttatctaccaaacatcattttcttggattatcttttaatttgttaggtgaagattaaaatattcaaaccatttcaagtaaggaaaaaaaaaagatattacttctgtgttgtgatattttgatctgtaaacagctaggtggtattaaaagaagaagaataaaaataattaagttcacacttcacacatcaaaatctataaatgggtcctaaaagtggcccgttaaaccaaaccttatacaaaaataacacattttattattacttattacaaatattgatatattttcccctttaagggagacaatttactctcaagattcgtattataaaactttacaaaaatgtaacattttattattattccaccttgaaggagacaatttactctcaagactcgtattataaaacctaacagcttagactatatatactttcaagatcttgttttagtaatactatatatagtatttgcagattagtaattagggcataatatttttaagccattggattaatatagaatataatactataaatggtgacataataatgtctctgacttagtcttttcatatcaattatttaataacaatagcatgtgttagttaatgcattggggataattttagttatattggctacgacatccaaggaaccttaatataacatataaatataaacaattataacacaaataaatttggttcatgaagattcaaatagcaagctagtgacattatgattgacttattctcttttaattagtaagataatgtatagataacttactattaaaaaaatctacattatatcaaatgagcttcatctacatccacttgtcaataatatggtgttataaaaatcaggacaaatcacagtgttcatagatcatattaaaaatataaaacctaatattatataatatatatatataaactaccttgaaaagagttatcttcaagtggttggtattgataatatctgcaattatttaggctatggacaaatagcttggagaattaatagatagatagtaatttccttttatattgttttggtattaaaactgaagttaaaatatgaaataacaagagcactccctctaatggtgggatgaactaaggtggatttggttgtgaagaatgaaaatataagaataggaatgagaatgagaatgagaatcggaataggaatggaatagaatagaataaaatttaaaatgtataaaaaaattgataaaaaagaattattaaattttttcaaatctggcattggaatggtctttttttctatttcaaaatgaaatagttattccaccaaagtagtaaaaaagtcattccaccaaaatagtgaaaaagttattgcattggaatgatattctaatattttaaaatgcaatcaaataaagaaatagaataaaaattatttttttttcattccattatattttattacctccaaccaaacatcacattataaaaaaataaataaaaaaaaaaaccaaacgccacctaaggataaatttttgttttgtgttttctttggcttattttgtgtccgtttaaacttgttttgtgtttttttaagattgccaagcttgtttagtatcattgttatagttagatattctacgacttttaattttatatttataagatctcaaatttatggctttaaaaagtattttctatgagtcggatattttgacacaaaacaaaattgagacgagcatgatccaacaaaaaaaaaaaaaaagatttagacacgacaatacacaacacgtacaatattataaaaattaatcaagctatgcaagtgtacatagtcacaatttataataaatattgataagacgaagtatcatctcataaaaattgattatcaattaccagttaactaaattttttgtttctattaattaaataaaattttagaagttttaacaagaaaaataacaagcctcaaaagcaatagaaaaaatcaagaaaataataatgagcaattgattacaacacacaactttcatttaatgcaaaatattttgtcggcgagcttaatgttactgacaaaactttttcatctaatttttcgctcacgtttttattgtgcggaaattaaaccgccaaaaattttacaatttttgtcagcgtatttacttgacgacaaaagtgaaattaaactaccaaatatttattaacttttgtcggagcacatattttcatcggcaaaagtgaaattgaatcgccaaaagttgcctcttttcttttggcagttgatttaccaccttttgccaaagaaactactttacttcgcggtataagtcacttatgccgatgaagtaactcgctggtatagaagtttcccaaagtggagaataatttgccaccttttgccagcagggttaataaattgcgccgacaaaagtcaacttttgtcagtgcatttcatgaaatgtgccagcaaaagctctttaatttcttatagtgagagtgtacacgtaaacaatccattttgaaagttaactgagataaatagatatcaccttaaatttactaacggttcagtagctggaagagtttaactgctaaaaacccttaaaagaataggtcatatttttaaaaattagtaaaaaaaatatatatttcaattttatttttattttgtttggacttctaaattgagtagaccctaaacacatacgaccttgcaagaagaagggtgaccctttcaaaaaaaaaatcaatgcaatattttattcaccttttaaaaataaggtatattaattaaaaacgagaatatagttatttttttatatattcttcaccaatttttttgatttcacacttaaaatcaaacaacacgaaatagtttaatacagttaaaactctatttaaaaataatctttaatttattatataaaaaaaattaaatcatgatttaaactaattatgaataaaaaatttataaattataattagttatacatttttataaaattttatattaaaaaaatatatttctataaaaaaataattacattttaatcaaatatctattatattatacatttatttatatataacaaagaattttattccacgtaattatgtataatatatgcctatattttatttactcaattgtaaagagtaaattaatgtgtcaaacaaactatatagaattatgcattagaattttttgttattgtcgttatatattatacatttcgacgttttgaattttttcgatgttttgaattttttttttttgataattcatctgtacttacaatctttcaattgaaatgtattttatttgatctcaaatatatatatatatatttatatatattttttaaaaaaatgaacgattattattaatcaaataaatcaattactataaaagtatttaaaaaagtatctatttaaataaaaactcctataggactaataataaattttgtcaatacattgttagagatattattacaatggaagaaaatcaaaatattacaactctattgtaatacaatacaaggaccaacaaagagattaaataaat

SEQ ID NO: 111289 - DNA, 6590 bp, Cannabis sativa
cttatgtcagggtattttgggtacagtatatataaaaagaggtatgttttaattaaatgtaaaattagaggtaaattcagttaattgataaataaaagagatattttgcaataaaccccataataatgcaacctgacttattgcacaatgccaaaaaaataaagggcccatattctttaatgcttttgaggtttttctatttaaaaccaatataaaaattattggataatcaaaattgtccttggtcacccatcccaattcccacaactttcaattccattactatattatttctttaaaaaaaatgttatttctttccaaatctcatattcttttttcattaattttttagactatgtttcaattttcaaacagttagctttcaactaatatatatttccatccaatttaaagtttttaatcaaatcaaaaattaaatttgtttataagaattaagacagataacattaaatatactttttttatcatatatatttctaatttttttttctttgataaataaataaaaaataattagtatttttaccatttaaactttcggcactacttaattttgctctctaaaatatacgatttattaaaaaatttccttaaaatataacagttatataattatgtaccttctattatgttctgttatttttaccgttaaaaaattagtatttctacatcctaaatttggactaatataaaattttacccttttttattaaaaaattataatattctaatttttaagtaattataagattctattaattttgaaaaaaaataataaaaattatttacaaatttgacaaaaatataaaattaattaaaaattaaattattcttaaaaaaatattttcaaactttattttatttataaacacatatcttaaaaagtcaaactaaaattatgaagaatctaataaataatttaaataaactaacaatgtttaatgaaaatttataaactcataacttaaaaaagaaaaaaaaaattaaaaattcaataaaaatataaaaatattttgaaaaaagttataaattaaactaaaaaaaatgttatgtttacttaaacaaatttacattttttgagaaaaataaaatactcaagtttattctcgtaaaatttagtttttataaaaattaaattttaatattttttaaatatctaaataaattttttaataaaaataaataattttttaaattgcttaattagttttaaaatttttatttattttttaatttttttaatcattcaaaatattttttatattaattttttgagatttttaaaaaaaaatgttgatattttttatttttattttaagggagtacgatctgatagttgttaaaaattaaggggcaaaattgttaatttacaaagacacgtcagtatttaaacagaataatgagatgaaatcgaacaagaggactaaatttctgtatatgtaaaactttaagggatattcttaacaagacgtatattttaaggatcaaaatcaatattatcaaaaattcaaaggacaaaattgctaattattctaaaaaaaatagaaaacatagcatttattgaaatttctttgatgttttactctttgttcaattgtatgttttgttatcagagcccaaattatttaagacgatctgactagtacaagccacttcacttgcctatgcaacaatttagaaacaaacaaaatccaaatgaaacactattaagtatgttgccaacttctcatttatgtttcaacaaagatatcattaattattgtctttcaaattaacaaaaccaaaatgctcaaagcctctctttaaaagtaaactatgaaaagaaaaacaagatgtggggcaatccaagttcattaattacaagacacgaaaaacacaaatgttttgttttagttattcttgttacaatcttttcgctgtccgggttgtggtttggtaaaatccaatcctctgcaaattgtgaagtttactcagatgtgttgatgggcgtttctgaatgtgatccccattcggtccatgatccatcgtacaccggaacatcaggcttgccaagccgatgaagaccctgcaacaagatgagaaaattttcagttctactttcgctacattagctcggttatgaggttcaaacctcgaacctccttgtttctgatttattaagtgcaccgagtgtggtagcgatatagaaaaatggaaggaaaattattagggagagagatttgaggtgtaccagagcgagaatacaagcagttacgccggttccacatgatgtaacaacggggctttccagagagatacctgccgcatgagttttaacatatcggttatacaattactacgagtaaagagtacagacgattaagtgttaaaataagagtaatttactatataaatacttaagtttaactctcggttacagataaataccaagtttaaattttaacagtaataatacctaagttatatttttggaattccgtagatatctgaccgttaaatgtcaactcattatccacttatcattttcttattggtatatttaaatgatttggaccaatcagaaataaccacgtgacaatttactaacacttagcaactaggtacctacaaaagttagaattataacttgagtattattactgccaaaaattaaatttaaacatttatttgcaactgggagttaaacttaagtatttatgccacaaattactcttaaaataatgcttactttgtactgtgtcggtacaaatgaatgggaagttttagtattaccttcttgattgaaccgttttttcagttcatcggccggtaaaagtgactgagatgcatccaaaacctgaagagaacatacactttgttcagaattgagagttttaagtatagaacaattacatcaaacctcatattctgaactttatcaatataggaataaaggaaaattcaatctcaaaccaagttttagaaagaattgtatccatagatagcttgacaaactatgattttcacctgtgcaaaaggaacacacttgctcccaggaacatggccacttcttataccctttcgaggttctggaacagctccatcaaacctgcaacagcgcattagtacaaaaatttagaatagaaagtattcgaaacaagcaaaacatacctgggttttgatcgagcatcgataagttggtgtgtcttgttctcgatgttacttgttacctagaaagtaagtaaaatgtgaagactaatgttacacagtctgacatgagtatccattttagagatttaatgtaatatacatccctataatttatgataaaaaatgtattatgtttagaatgaatgagtaagccaacctggtcaagtgtccacacaagatgtggctgaaactttgtctcaaatgtaattgggccaacctgcaaccagtgaaaatggtagatcttattaatagaaaattagtatgaatgccaaaatagaaggcatatacataggtagcaagtaagctaccaaaccggaaaagtagccaaccatggaagtagatattgagagtgttcgcgatggggacagtttagattgtgacatatttttcaaaccaatcacatatgtggttttcgtaatttctcaaactgcacccgcactgcgagatcttaaaaccgcaaaaaccacactgcgaaaatacggtgcggtttgagcgatttacactattattattattatcaagcattataataaaaattcaaaaaccaatctaataaaattttaacaatacaaagaaaaaaaaatagaaatttttaaacatcactacatatatatactcatcttcaagacattatatcatattgtctcgaaaaaattatgtaatatattacatatatttgcacatatatttcaaaaaacaaaaattatattgtaaaaattaataacataataatttatagtgcggtgcgatttacgattcgtaatttggcaaaaatgcaaatcacaaccgcaccataaaagactcaaacaacattttttatgcagttcggtgcggtgcaagcaatttgtggggtgtaggcaatttgatcaacacccgtagtagatatggcatattaataatttccataagtcgaaggaacgaaattataatcaagaagaatctaatgtatgaagtttatgaacataccgcctgtccttgataaactttctctattgcctcactggcagcactagccttcaaaatagcatctcctgaagcactggattcaacatcatatcctgatgctcgccatcttggcaagccgccatctaaaacccaaattctatcatggccaaaaactcggaacatcctgttaatgtcaatcaaaagaaaatttgttcatcctgttaatttcaacttttaagtttaatgttaatccaaaaactcaccaccaaacccgagctgcactaaaaatccccttcccgtcgtacacaactagatcatctttgttcttgatgccaagagcagaaacagctgcagcaaaggcttcctctgatggcaacatgtgtggcaactggtgcaataagattcaacattttataaaccagaagaaatacaaaaggatccagagaattcatagcaatggtttaaatctattattgataataggcccctcatcgaaaccccaatattcaaattaacttggtttgcatcattttccagcaaatatcaacaaaaaacaaaccatgaacaatagatgcaggaaaattatctcacttttgttgtgcggtctgatattccatctacgtcaaagaaaagggcaccgggaatgtgagcaacctacaaaagtgaaagactaaattaaagaaaaagttgtgacattacaatgaccatttaaaatgttacagaaaatcagttcatggttggcacctgatactcttgaagtggattcctttgttcatcgggcatgtaccaagatgcatccaacacctgaataagataagaaacacaatgaataatcaacttatagaatctaaaggaatacatgttactgttagatacattacttcaagcagactgagctgaataacaaatggttcatgtaaaaatagacaatttaggagcaaccgaagtgggtaccttcaagttagggtccttgatgttagcacgaagccaatcaacagaaacaacagggtcattaacagacacatattttgtcgagaaactagttctgtcccctgctactgaggaagccatagcgcgatgaatttgaaacgttttaatcgttgtgtgagcagagtccgttggtaagtgagataatgtctttagctgcaataggaaacaatatcactaatccccatatgaatcattataaatctatatctctgaacttggcattgtctaaacttaaaacaaacatccctaaaaagctaactttgactaaagttggagttataacttaaaaacagaaaaatcatctaaagtgttacacaaagtaaacaaatcctaagcaattccattgccataaattcatgagaaaactttcttgattttaatatgaccttcatacctttggagaaaaccacaatttcagtaattttacaacatagagactatgccccaaactataaaaccaatatctatagataacaaaatcacatatattttggcaaaggataccaacacaaccaattatcatagatatctcttaatataattgttcttaatcctaagattccaataagaacttttaagaacattgtcaataatccaaaccatatacaacacacaaacaaagttaagtttcttcacaccataaacaagaaaagtcacttaactaattcaaacaacaaattagatattttcccagattgtaaaactcacaattaacacaaaaaacccaattaaaatctcagaaattaaaacaagcaaacattaattaaaatttagcgcaaagatcaaaattttaagagaaacccagaagagaattgattgagaaataggaataaaaggacttacattaagaaaagaagagaaaaatcgggggtttcgaacttgagagggtgaagaagagtgaatgaaacgatgggcgccaaagagagaccttgctaaaagggatgaagccatttcaatcagagaccataaggatggacgaaagagagtgttttgagtcagaattttgtcagcgaaaaggggcgaaagtgacaatttttggttgacgaaggtttctttctagttttcactgttacagctcaatacccattaaccagttactagttagtagtgaaaataattgaatagaataaagcttcaatctttaaccttcttaagtgtcataaaaataatttttatatatatagttgaaaattaatgagaatattaagaggtgatttttagtagtttcccaaaaagaaataaggtgatttaattagtaactattgactttttaaagtttaattatttgtcattttttaaggatagatttcaatgagcattaatctagtagggtttaggccttttttttttttgaatgggaatgggaattttattagcaaaccaaatccgcaattacaaaagatttaagagtactaggaagagtactctcattaaaatgacgacca

SEQ ID NO: 111290 - DNA, 5697 bp, Cannabis sativa
atagatcttgggttaattgttaatttatataacataaaaatgatacattattgtatttgtgggtatgaccttgttaggtcattgcgttctgaggttaatgtctatatagcctaaacactaacacttggaaaagggttctttgcattggttgatgtggctaaaaattggcactgaatcttccaccgttattgttgcatttgatctaatcactgaaaaatacaaccaacttccacttgcgaacaaaaatactaagggaaaatcctattactcgacaataacagtattggatgggtggtttgtgatgtagtaaaatttggaggatatagtaattaaggaagagtatgttgagttttgggttatgaaggaatacggggttaaagaatggactaagctacatacagtcgtaccatcaaatttaactgggtcttttacatctttgatgcctcttaagtatttcaatagggaccatttagttatttttgaccaaggacaatgagaagtttatgatctattatggagaagaaggaggctaagattgtgaagaagtatactaaaagttttgagaagagtgcgagaagcctcgttggagttgataacttgatagagttgatgaacccaatacagggaagaaggcacgggaggacaagaacaacaaaaagaaggagaagcagtaatacttactgacttttctcttttagttattttcatttggctttattttgatgattatggaaatagctagctagagttataggcgcttttgtttaagaatatatacatcatcactaataattgactgatcattatcttttttcatggtattatgtattgtttgggcagggatgatttcttgtccaagggatttaaattggtgcttaaatggggttgtgaagaagaaagaaagagatatatatactgtaaaccgaggtgaattagtatcctaatctaaattcaaattaagcttaacgtttctttatttttattattactgccaagtaaaatagtttatttctctgcttatctgactaattaatcttggtggctttattttttcaggttggtgctactattggttgactatagacttttttagtacttttaacgttgtaacctttttcctatgtttatatacttttcgagtactgtgactgtctgtcttgtgagataggaatatattaacattagcgatggtttgatggcaatggcattattagttaggtcgtgttattatacatgctaagaacattatgaaaacctcaactatattataggaaaaccttgatgatgttgtttttcgtttgactaaatatgcaatagctagatataacacgagatgaaaattagagcgatctacttgtagcaaagtgaacatcgattaaatctttttgaagaatatttttttagcattttatttctactcttcagagatgatagaattttgtatctttgtattagtattattagatttgattgtaatctttctaaacaaagaaccttttggaacagagagaaaaacttaatatttgaatcttcaagggtttttttactaaaaagaaatttattggttaatgtttacttataggagcattgttattagctactaagcattataatgtggcattttataaatgattagtattattttataataattatcaaattaaattataagagatttaatagcattatcacactttaaatggtgtctcttgtagtatttctctatttatagtaacatgttgtacgggtgttcaagaattctaacaaagaatggttagagattagctttgggaataaaatcttataaagttcgttaaactgtaaacaaactagaactccattgattctagttaagtttacttttggtgttacacgtaaatcccatactaaataaataagatgtttgttgcttggaaaaaaatataatatttatggggctaaatcccataggaagtgttctgcaatggcttgctcgctctggcgatttcgaatggagatacggtggttatctgtaacccatcaactagaaagtactgcccatttctggtcttattgggtacgatcctgttaacgacgatcataagttggtaaggatggtacatcatttttacaaagatattaactgtattcactcattctatacactgaggtcaaagtttatagcctatatatatttcaacagttggaaaagggttggtgatttccatattaacaatttttacaaagaatttcgtgagttgccgcttctggatgaggacggcggtgttgatgagcaactcgatgttgatatctggatgatgaaggaatatggggtagactcttcttggacgactaagatgttctcattgaagcccacaaatctgtattccaagaatggccatcaggttctcttgcatcaagatggtgagacatttcttttgcatgatctcaatacgaataagaccatgaatatgggcaacatttctggccttcctagaagttttgatactagggtgtgtgtgtgtgagataagccttgtctgatttggggttggtggtgaggacaatactaattactaagcaggggttaacaagaacacaagaaaacttttggagcttcacatgtcaacaatgctatataccacaccttttgtgtaaggatgattttctctctccatgggatttaaactggtgttataaatgttgcacgaagagtggaagcagaggtatatgttaaactgatagcaagagttgaatttactgatatgatatggataatggatggttgatggttctatgctctttacttaatcactcttggttgtgtctgtttgtttcaggttggtggtattggagggtttgtgcttatgtaataattgtctcttaaattctgggatgtcaggaattaaagttgacaagttgactagttgattcaacaaaacatagagactaagtcaaacttttgatgtatcgtatattactttttctagttctaatctaggttcatactactaatgttatggtttaaatagacaaacgtggaggttttgatagtttggttgtgaaataataagacaaagccatttgaactgttttcacatgagctcgtttcgttgtattaagtcgtattatattctattgtattatattaaatttttaaattatatatcatatttttatatatactatgttaaactttaaattatattaaaatattatatatttatgtgtccatacaaattaatattatatataattttacataaaaatattacataaaatataatttaatataatactatacaatataatacggcgtaacaaacgaactcataatatgttagctcttacttccataacttgtaacttaagaaaagcccttatctcaacctaccaaaaaattagttcaaatgataaggctttcaaggagaaaagacaagaaaaacctatttagaacaattacaaagtacgtactatcaaactaaaaagaactagcccaattctatttctatagttacttcttacttgggtattatatttttttaatgcaaagatctattgttgtattataattaacattacttgtctttttattcagggatttatagtagttagagttgagcatccaatccaatttaatattttctcttcatccgatttgatcaaattactaattggataataattagaatatattggatctgttttttaatttgatatctatacacctaattttaatattaacttaaagatataaaaaatacgtaaaaaaaaaaattaaatactactatttatttaagtttaatactctataaaaatattataattgttacaaatataatgttactaaaaatttaaaatagctaaaacaaaaatattattaagtaataaaatagaacaaaatatcattaaaacaaatatacacaacaaccaaatattacaaacttaacacaataaaaactcactaaaagtataattaaaatacattttttattttacataaatatatatataaatatttttttaatacatatgaatgaaattagatttaatcggttttaattatattttgagaatgacttctgataaccgatctaatctaattagaatccaattttatatatctaatccaatttaattgtaattggatatcgagttttttataattgaatttgattggttagattcagtttaattgaattagatttgattattatttgtctaaaaatcattctaaattgctacattaatatacacttttttataaaattaaacaatatatattataaactatttatttattcgtctaaaatacagatacaaattattttagatttgttttatatttgcatgatgacactataaatcatttaaaattttacaaaaatgaataaaaaaatttaataaacaaccatatataatttatattactattcaaaaaatgaattataagtttatatctcacatgctaattttcctcctattattataattattattattattattattatttataagtttgtaccataagttattgtgtgaaaaacactgacctgggttggtttagggtcagggttcggggtttagattcgagtgtggggttaggttcgagttcggggttgggttcgcgtctggggtcgagttcgtgattcgggtcggggtcagggtccgcatttagggttagagttcgagtttgctcgaggtccgaatttggagtctggagacaaggtccgagtctcatagtttaggttggggtcgaagtccaaaatattgattaagaaaaaaaaaaaaattgttttaaaagaaaattggaagtaatttttttttcaaaatttttaattaaaaaaattaaaaaatgaaatagttttataaaaaatatttttagaaagtattttaatttttttaattagaaaaataaaaaattaattaagacacattatatttacataaagagttgtaacaaatactaacggttatgctcattgatggcaataaaactatcatttgaaacatagggaaataaaattattatttttaattaattatatattgaattaatatctttgcatattttttgtacaattatgtgaaaaagtcccaaatagaaaaccttttcattttctttttaggagaataaatataagtattattaagcttttaacctttatcaggtcggaaactctcaagtacggttctaaagaaaggaataacatgaccaatctcccttcttctatgtgtgataatgtattttgctgtagaaacacatcttagaattaaatgaagcaaaatccaatttcaagagaatagatttcaaaaaattccattcaacatgattataaatgttgctcatatctaactttaggaccatctaaccttcttcgttttctcttttccgttttaaataatttaacacatcaaaagagaccattacattatagaatgcaatttgagtgtcaactataaaagaattccaatttaccataaccttagtaataatttaaaagaaaaggttaattgcaaaatattttaaaattaattttataagttagtacgtcttttatctaaaataatactataacttcctatcaaaataaataaaaattaggtaaatactattttagaccgtatgttttgtaaaagttactgattagactctctgttttgttaaatgacaaaatagatcctatattttttaaaatggtaaaaataagaccct

SEQ ID NO: 111291 - DNA, 5056 bp, Cannabis sativa
gattggattggattggattgtgcgtattggattggatcggttattttatgaacactcctagtcttagatattgtaaagcccctaatgtactcctatacatagtgtgatctgagaaagtttcaccactggttagagacaaaacatgtgctgagcttgtaaggctaaaattaggctttgcaccttccatatgaaccttaacaagtaagtctgaaatgtatttagattgagacaagtacatttcagttgagtttcttattattttgactccaagaaaataaagaagatctcctaaatctttgagagagaattctttattaagaacagagatgagttggaagattagcttcttgtttggacttgttacaagtatgtcatctacatagacaagtagaatgacaagattgtgatcattcccatagacaaacggagagctataatatcgagatacttgaaaccctttgctgattaaggtagtttttaagtttattattccaagcactgggagctaacttcaacccatagacagctctgtgtaatttacacacatgatgtgacttagtgggatcgacaaacctaggtggatgctgcataaagatagtttcttgaagattgccattgagaaaggcatttgagacatcaagttgtgtgaaagaccaactgtaggagactgctagagtaagaatgattagaatagttattggttttacaattgggctaaatatctcagagtaatcgattcttggtgtttgatggtatcctttggctaccagccttgatttgcacctgtcaagggttccatcagcatttagttttaccctatggacccatttgtggccaactatttgcatgcttgggtaatatagaacaagagtccatgtattattcttgagtaaggcttggtttttcatgctcatggttgcattccatttgggatcagcaagtgcctgcttgagggattttggttcagtaggtaagagtgattcagggagagggtgacttgtagctatataggcttttggtttgtggattccatttttggatctagttttcataggatggtgattagtagcagtttgtatggatatagtaggaggtagttgggaagtagaaggtatgtcaagggtgggttgaggttgtgtgtgactacttggataggattgaggaggtggagatggtattggtggagtaggtgaagcttgggactagtcaatttgagtagtggatgaaatatttataacaggcacttggaatggagatacattaggatttggtgttgtagcaatcgagttatcaagtacagaacttggatgcctggtacaagttgatgttgcattaggatcaacatccctagttactggtgtaggcagtatttcagtagttggttccttagcaacagaagagggagaagcattagtttggtgtattatagctggtgtaggaaaacaaatagaagagaatgagttgtttgaagaagatgttacgtgagtagaagactgctaactaactggagggaagtcttcttcattgaactgaatattccttgggatgtaaattcttccagatgagtttcacacatgtagcctttgtgttgcatggaatagccaacaaagatgcattttttagatctcattgacatcttgtgagagttgtatggtctaagatatgggaaacatgcacaccaaaatgttatgagaaagccatagtttggttgtttgtgaaacaaacactaatgtggtatgtagttgtctatcactagtgatggaagcctgttgatgacatatgtagcatgctaaaaagcataccactagtaggaaaggtccagaccaaattgagccaacaaagtcatgcctgtttcattaatatgcatgtgcttgcgctctgcatgcccattttgctcatgatcatggggacaggaatgttgaaattgaattccatcaacatcaagaaaattggcaaaggttttgtactaaccaccccaatcggattgaacttttttttattgaaagggtgaattgtttttcaacaaggttcttaaactgcaagaatgttgggaaggcttgggctttgagtgtcatagggaaaatccatgtaaatcgactaaaatcatcaacaaaatgtatgtagtacctaaatccctccttttaaggaacatgagagggtccctacacatctgtgtgaaccaattttaaaggcataggtgccctgcttaaggacaaagagtagggtagttagtgatttttttctattttgcagacattacagaattttaaatttttaaaggagcctttaaaattgatgttgtgtagaacttttgcaagagttttaggggcagggtgtcctagttttgaatgccaaatattgatatctttattaaaattagcatagcaagcttcattaaaggattcaggggattttttttaaaaaaaaaaacataatttttattaatgttatgacttgtattacaataggaagagactgttgaaacagtcttgttattacatgatgaagagactgttgaaacaatctcgttagtacaatcagtattactaataggagaacaacatgaactggaatccttagttgttatgtggcactcaaactggaccggtgcaggtaagggtatggatttggtcagcacatagaacccatttttaaccctccctttgagcaagactctccctgtgatcttgtccttaaagcaagtagagtgaaattctaagaaaacttgattatctttagtaagttgagacacactaacaaggttatttttgttattttaggaatttcaatgacagaatttaattgaagatgagtggtattggagggtaaagaaagattgccaatgtgagtgatggggagtttcttgccatcaccaactacaagggattcagggccatgataaggcatttcaaaatcaagatgctccattcctatggctacatgtttgttggcactagtgtcagcatactagttaggatcatgagcaaagtctgtgatcatttgggagggtatggagatggatcatcttcatcaagttcagtcaagaaggcatgtgactctccaatcttaggagtgaaaaggatttgtcaaatcgataatggcacactgctactgtgtgaccagtcttgaagcaaacttggcacaacagtttttaggtgggtgctccacggccagggtgtcttctagtagatcgaggattttgacctttgccatatccacaaccatcatatctaaaggatcttgagaaagagtatgggtcagaaccagatctggaagagcttgtggatatgttggccatcaatttggaggagctatcactgtcagtatagtgtcattataaacgactttcgtgagttaatagcaacgattgaatcgatttaaaagagagatcatcaacaagacttgtaacatgaacaacaacagggtcatattctggtccaagaccattgaggcgatgcatgatcaagtcactctcatccatagggtgcactgttgtagacaaagaatcgataataatctttactttatcatagtaatcggagatagaaagagtacctttctgaattgtggagagttgagatttgatttgcaagatccgtgccttagattgagatgcaaatctttgctctagggccttccatgccatgtaagatgtattgtacttagccaaggaacccaatacagttttagacatcgatgattggagccaactgagcaagagttgttcctttcttttccaggtgatagattttggattaacatcaccgttgacgagttaagctggtagagcaactccagtgagtaagatatcgttgagaccatggccaataactgttggaatcccctgagatttttaggccaggaagttcgattgatcgagtttaacaataagagaagaactgagagagttctgaaaggaattccaagattgctgaggagcaatcggaggaggttgaggaacaattcgtggtgattgctcgcgagttggagcagttgtgcatggtggattttcaatgcttggatgatccatagatgactttcgtcaatagtttcgtgatatcacgtatgaacttatcaatgcaaactgaacaaagtaatgaatacaacaaactcactagtctacaaaagttgcagaataaagaaagagaggcctttatttatagatgagagattacaaggatacaagtgtaaataaagttaactaaaagcagttaactgttacaacaaaacagttaagaaaaatagaaacaactaactaacaaagattaacaattggtgacagtattagcgtgaagatgaaacccaaataattatatgtgatgtattacatgtatgtagattacatacaaatatgatttccagtgtattataaattttacgtatatagaaatatacatatttacacaaagattgttttatatctaaaatataaatgatacatatttaaattgattaataagtcaattttctttgtatatgatttttattagggtaaatatcattttggaccatgtattttgtaaaagttattaattggaccgtctgttttgttaaataacaaaatgtaccctgtattttttaaaattgtacaaataggaacctgaagtgattttttgtcaaaataaaatttaattataatctaatctagagatgttatgacaaaagcggttacattttctgtatctgttcgtgttagaaattgtcttaaagtggttatcttaaaaataaaattgttaaaaattgagttcagggtcctatttttaccattttgaaaaatataggatttattttgtcatttaacaaaatagatagcccaattagtaacttttacaaaacgggtccgaaataatatttaccatttccattatcattttttattaatttaaatatgtgtgcattaccgttatatgaaattagagacctttaaaaattgtgtatgtatactggttaaatgaattatatagtacatttagggctcgtttggaacgctgtattaggttgtattgtattgtattgtattatattgaattgtattttatgtaatatttttatgtaa

SEQ ID NO: 111292 - DNA, 1732 bp, Cannabis sativa
gcggtgccgccattaacatctacatgctaattctaggccgcatgttgcttggagttggtgttggtttcgctaaccaagtaattaaacacactcccatactaaaattctcaacttatgaaaaaaaaaaaaagttagttataactgttttctgtttttttctgtaataacagtcagtacctctgtatctatccgaaatggcaccaccaaaattcagaggagcaatcaataatggcttccaattcagtatcggaattggcggtttatcggcaagtctaatcaattttgggacggaaaagatcaaaggcggttggggatggcggatctccctagccatggcggcgtttccagccacaatccttaccctcggcgccattttcctcccagaaacacccaacagcctaatccagcggaacaacgatccacacaaagcagagctcatgctgcggcgcgtgagaggcacggacgacgtggaagccgaaatgaacgatctcgtaaaagccagcaacgtcgctagaaacaccaaacacccatttcgaaaaatcgtcgagagaaagtacagacctcaactggtgatggcgatagccttaccttttttccaacaggtgaccggaatcaacgtcattgctttctacgccccacttctcttccgtacaatcggatttggggaaagcggttcgctgttgtctgcggttatgaccggtgcggtgggcgccttctcgacttttatctcgatgcttatagtggacaagtttgggcgtagagctctgttcatggcgggaggaattcaaatgtttgtttctcagatcatgatcggaggtgttatggcggcaaagctcggtgaccacggaggagtagagggggaagggtttgcgtatatggtgattgtgttgataggagtgtacgtggctggatttggttggtcgtgggggcctttgggttggttggttccgagtgagatatttccattggagataagatcagctgggcagagtattacggtagtggtgaactttctgttcactttcatcgtggctcagacatttctggccatgctttgccattttagagctggaatcttcttcttctttgggggttgggtggtggtgatgactgcttttgtttacttgtttttgcctgagacaaagaatgtaccaattgagaagatggatgaggtttggaagagccactggttttggaagggttttgttggccctgctgaagatcgtaagatatgaaacaatcttactttttgtttaaaaaatcatccagtgctaattgatttgaacaatgaaattatacacaaattttataatgtatatgtgtgctaaaatttgtaattatatatttacatatcaatattatcattactcatttcatatagcaatgtgcaacaaaatcaaacataaaataaagatttcaacaccaatttgctcatctcggacagtgtcctattttattaaattagtgtagaattttggcatcattctactttaatgatacaagaattagtgtgtacaaaatttcacgctattaatatttaatagtattagattgtgaatcagtaccaaattgatacataaccttttgtttcttttcatttaaattagggcattttagatgaatgtgtacattttcttaaataattacaaaaaatgtaaaaaaaaaataattttaaaaatgtacacatttgaaaacatatttacaaaaattcatacaaatttttaattaaatt

SEQ ID NO: 111293 - DNA, 6275 bp, Cannabis sativa
ttcaaataaatataaaattagaggcaaatttggttaattgattaataaaagaggcatttttcaacttaccccaattataaacattaaaatgtttgggcccatttgttttgagcttcagccctctttgtttgctaatgtttgtgtgcatttttatgacttcttttttttttcttaaaacatttttatggaatttgttttttcatttttaaaacaatcactggttaccaattaaggaggtaataacatgttattattgattcattattagtatttaagataattgatagtggtaaccgattactatcacatcacaaaaaaaaaaaaaaactagtttaatagtagtaactagttaatagtatactaattttcaaataatcaatttgacattggtaacctaactaattattgtgatgaaataaaaaccaaagttaagaaaaaacccataaaagtgtaaaataaaataaaataaaattatatattttggtggcttttttttggaattttaatttttatgggtttttggaaaacttttacaaaaatgttgttttttttcaaaaaaaaaaaatttatgagaaaaatttaaaaaaaggggggaaaaatagtttagggtaaccaggtccaataacattatggagtgtttggtatgggatttgggttcttgagaatgtaaaaccaaatctatgtttggtataacatttgtggagggcttatgattaaatggtctttactaataaatttatttttgggctaatctcaaactttttaaatatttgagtttgagattctcttcatttcaaaccctctcaactaaacataccaaacacccataaaggcaactaggtacctttaaattgtttttcttatattttttttttaactttttttatttgaattttaaaaaatttcccacaaaataaattttgataaaaaaaccttattttgaacacattgtataaaaatatttgaaatttccatttttttttatctatatttataattttttcttgacattatatagggcatccatataagcccccaaacctcttagcaatataatatagcccccaaaaccagacctaaatgaaaactccaagttcatcccaaaaatttaagttatggagtgttcacttgatcaaattcacaccatttttttaatagtgtatttaattcacattaagtataaattttatatttttaatttaattcagtccgcacaagagttcaaatccaatctaattcacaaatataaacatacaagtaataagttgtttttcttttcattcaaaataatgaattatttacatttttttaactataatattaaagatttgctacaacgataatataattttgaccacatgttgtgtagtatagtgtagtggtagagatatttttattagtatttttttattatttgggtcaaaagttcaaatttcatcacaagttttcatgagagagatcatgcttggccctttaggaggttaccttgtagtagtgtcattcttaatgagataagaattttcaaggtttacactaatgaatgacgttataagacttttatagctaacacgtggtctgcaaaattatctaaattatcaaaatgagaaagatatattgtgtgatccctattttgagagaaaaaaaaaaagacaaatgtaaaattaaaatatccaaaactcaacatgataaaatgttaataattggataaaacctatattttgtgtgattactctatattatataaaagtattatcaaaggctaacctaaaaaatcatggacccacattatttatttatatattttccaaagaaagattagttttcacttatttaaactagtacataatgatgttgtgatgtacaaatggttgatctaaaaagcttacaataagatcaaactaaagaaaaagtaagtgagagagagagaggctaaaatattctaatagtttattatgtaaaaggctcaaaatccaacaatttacttactggctacacccaattaatccaatatatatatagccaattaagctatacatacacatatataggtcatgtatcaaatcaaaaaaagcctaattcctaaacctggctctacctgtattttcactggcaattccaccattgccaaatcattgctaatatcaatttgcccatcattttaaagattcacactacaattcctcacttttattatttatatatttatctctatacatttgctggaaagaaatgtcttcatatatagtaagggggcaagtgggtcatttgcctctccctaacttttatttatataatattttaagtattttatatttaacttcataaaaataattttttatttatttatattcttatatatttttatatttatcctaataaaattatatatatatattttttatttttatctcacatatttttatttgtacccttataaaatttatatttttcattcttgttctcacaaaatttatattttttcaataaaaattatattttttattaatacttcaaatttttttctttcctccacttaaatattgggttgcctcctccatgtatgtaaataattaatagatagagttcacctttttttttattcatttaaaaaatattttgtgattttttattatgcccatgcatgagaaagaataagcatacttttgttatttaggggtgtggttttggaaacttgaagacacaagtactttactaagagcccacataattaatatatatattcttgttaataattaattaatatgtcaaatttttatacttgatagtgtattattataatatatatacataaaactttcttcctaataacacatttaattaatatatatagttttgagtcacttgccaaactcattaaatccattcacaaaagttgcactagagcacccccacatgactaaagctaacatatttttgtggcttgatgattgtgtaaaataattaagccagaaaaaaagggtataaggataataaataaagaaagttattatatacttgagtaagaatggtgtaaagttacttatatatatatatttgagatttaatttataatgaagattattgagtttgtttgttaaagcttttgggtcctcccaaaagagctctgaaatgtgatttgggctatgtatttagatgttggaccacaactttttttttttttttttctctcttccatgattttcagggactttatttgcatatatattcaatatagtagtttgccacttttgttttataattgtaaactataataatgatttttaaagaaattacgatatataaaaaaacaaaagaacaggtcagcttcatcatgtgatctaaaagtcgttattctcaattttccaaaatgggccaaattgtttactctcctttataacaaaccatcctacgtgtacgtgtactctatatattttatcatatatatatatatatacaaacattacattattattagatagttttgtagggaagaaattataaattatgacaataataaacccaaaactttttacacataaaatgtagtatatatgttataaaatatattcaatattgtcacaatatatattattagttagataaggatctccatatatatattaagttgcattattatcgattatatatatttatatattattacatgctcgctcggcgcatatgtattattatttttaaatggttgttaaatattacaatattgtaagatatatatatatacatatgttctatatattttttttttgaaaatcgtatgatatatattcaaagcttatatatatatatataaatgtatagcttatatatataataagtaagaaatggaacaaagagtagtccaaagcattgtggtccatgatcatttcgagacacgagcacttgactacacttataacatgctccatcaaacttgatatataatccgaaaccctaaaaggagctactatacctaatataattatatatattgataatattcatatatatatgtgtgattaaagattgatttttatggtggaaagagtggcaattgaagaagtagtatataatatatatatataaatatatatatattaatactttttctttattaattttgtaggaggaatttataataaggagtaaagatatatatagtaaactagctaaactctagctaatttggtagaggaacatatcacatgcaagaataattcatttgatgatattgaaagaaatattaaagtataggactaaaataagttcaccaaaacgaatcatgtgttcccaaaagaagctacaaagagaccaaagccacttcatattattgataaattctttagccttacatttcacaaactctctacatttattaattaaacaaaactttcacactatacttttttggactcacaatagggacctcacaagtacacacttgggatgttttttggtgacttttgttttttttaatctaaatttcaacgctaaccaccttccttcgattattataattagtttataattacttttttcgtaacttttttttttcatttaattaatggaattttctagatggggtctctgaggttttcttggtatttcaattaaaataaggattacatatatatagaaaatatataatggggttaatgcgacaaaaattattttcatgggataggtaaaaccagattagttataatataattgatttgatcatattagtaacatttcccaataagatgctacttacttatattatatacatgtgtgccctaattaacttaacgataaattattattattatagataattgtcattattaatatattataattaagatcgatgctttgaacatataaaagaattatcatgattgaacgttttacatgttgtatagaaactagaaagtaaatgcgaggttaaaaaacctatcttaataattttgaccctcatattagagattattaaaaaaaataatgaaatatatttaaattttttgaaaaaaaaaattactacaaaaatatagaggggtaaagtagtaattacagtgtttgttttttttagaaagacaaaaatttataagtcgtaaaatgtattatattttggttactaaaatatacaggtttatatctatatatttataattttgtaggtagtaatatttacagacaataaaaattgtaacatactttcatcggtacttctataatctataattaattaaaaatactaaaaatgcgaatatattctgaaaaattgtgcaaaatgtattttttttttttttttttaaaaaacaatttctaatgcaagttttgattagttggtatcacttaacttgctacttttttctttttggtgttgtattatttggttattcattttaacattcatgtacaaacacatatgttgaccccaccttatctgtatcatcaaatcagatagagtgtcaactcgactaaacatattcacatttttcttaaaaaaaaaaaaaaattgggccacgccacgtgttcaatcaaggtccatttcaaacatggaatatcaccaactcttagggcccccatttcgtatttgagcccaactttatccaatatgggctatttggagcccaataaagcccattttgtgaggcatgttaggatttgttgatggtgaatttattaggtgatatgattattcattttatttttgctattattatttactgggaattaatgcttttgtgtttttccttttttggtagtcattgtcataacatggcaatggtaataatattaggttgtacctgttccgaccagatatattaatcgacattcatttatataatataataacaaaatcaaatcatggttgaaaattatggagtttttagctttattatgatataatcaaatcatgattttgaagatatattactgcaaatctattcaggtgtgcttacctaacttccatgtgactagtgatatatgcatgcatatatttataatattattactataaattaaatatatcattagggttaaagaagttgatatagctacaagaatttgtaattttataggtgtaacattaccctactatactttaaacattaagaaataatataataagatacaaaaatgtatgaagcaactaatatattgtcctggttggctcgacttttaaaagttattttcgagattctgaagctcaaaatatatattgtgacagtcagtagtcccgtgattcgtaaggggaaataccaggtaagctgtgcaatcccacaccgcct

SEQ ID NO: 111294 - DNA, 3196 bp, Cannabis sativa
tagcacatgaaatttcccagtatatgctaggctatgggtgacctttagcattaatctatgctatatggtgtcataagcttaaatgtttataatagtggcacagcaatcatcaccctattggatataaatgcttttgcagccaaggcattaccctgtagtctgtacctgtacgtaaacagcccagaaagaaaaccaagctaatccatgacattttacatcatttagtacactgacatctcttctattttactcatcatgacccacatattccatctagcaaaataaaataaaagagagaaaagaccagcattatcttattctattattgatcacttaattatgtgattcggtctaagtacagtaatattaaccataatctaatctagcatcaaaataaaaacagaagggctgtcccatggaccattacacagctcatccactagttagtttgtttaatgtacagaatttttttacctactgatctaaaattctaagtataaatacattaatcaataataatcaatagaggcaaccctacctaaccataaatgaaatgaaagtaatgcattgcaatgtatttttgtttttttacacctatgctgtcatgtaaagaatataactattaccatgatatagatcatactcagaggtagtaaataatcctcttatcaaaaggggtttctactccattactgaccccaatcataagaggaagatatactagaccacctaaaataggtccatgtccaaaaaagcaaaggagacagaacagaatcatctctctattactttttttcccataagggtaaccaatatacaatctaaaagaggagacaaagcattatttttagctctcctcaactcacttccctacactaaaaattcttggaactttttctcaaatgtattattaaacacttcaatcagctctttgtacagcagttttaaacaaaagaatatacaacttttgatccattgaaaaatatagaaacccacctacagaatgtgtcacaaacgacccaaaactcgaccccacaatacagtgccatgctggtccatacaccccatcaaattcctgcacaaaaataagaagaaaacacaaaaccccactattcagtttattctaaatcaaccacggaatcaaatcagtgtgtacaaatccaatgttactttaacaataaagcaatataaattagccttaattaacatttttttcctctttttttaccttcttaagagcagaggcaagtgttcttgaggtgaacttttctaagctatcatgagcttttcttgcaaactccacagcatggatctgcataaatggaggcatatcagccgaaactactttcaccccattactcgcgaacacatcagctagctcaacatgagtctcacacaaagacctccttctcccaccacttccggcgccggttcctattccatttccggcgaagggtaatgaaaccgaatgtctctgttgaagcctttgttcctctttcttgttgtcctttctcaacatcacttggctaaatttcttcttttccccttcttttgttgacttcttcgactggtctttacaagaatcaccactaccttttccatagtcgtcttcttcttctttgtcatttaccgttgcttttctgggttgaccagttttggctttggaaagagaatgcttagaggaatcgacagtgggagaggcggcggctgaggaggacatggtcttagacttgggttgatggaagtaggtactgtctataagactaagaatgactttattgttattattccttgaggtgggtttctgaactgtacggacatattgaccatggtcaagcgatcttgacaggctgatgttattgttatttttaagcagaggagaaggtttagagggtaaaatgggatctgggttatggagggtatggtcagacatggaagatgacttggagtttggacgaccaccaccaccaccaccagccgctaacatacgccgttgggtggttcggttagccatggtgaatggtacggtggtgtttgatgaagagggcaaaagaaacaaagagagaaggagaaactttgtttttgtttttggttgtgttgttgtgtgtatgaatcaatataatctgataatataatattagagaagatttgtgatgtgatccaacggctgagaggggcccacatcagtgaatgtggggaagagttgggtctagatcagagatctaacatgcgccgagagcggtggacaagggagttttgtgtggcttttttgaccattgactcacttaatattttaagaacccaaagccaaatccaaaaccaaaaagaccctctagctagctagggcatacaataaatcatcaatatttgcagttattatgatacaaaaagcaatgatgtgatttatcctttgtcaaatatattatattacacgtttggaaatggtgatcaatacactttgaactcaaatgatagactgactacttaacctcatctaactttaaactcagtttgggaaacaagggaactcaaaatattaccctgaccatcaaatattcagttcattagtaggatgaaattagtgaattttattcaccaactaaaagaattattacacttaagccttaattccataataggattttaataattggataaatatatttttggtgttatttatcaaaaaaactaaaataattactttagtatatattttatttatttattttggtattcaaaattgggtcaaataactaagttttagaaagaaataaagaacctaaataaaatatagtaatatataaatattttaacactctcatgctaggtggaatgagtgtacctttaatccagaaagaaagtctatttggattctaatcttttgaaagggtaagtgatagtggtgcgtatgccactttactttagcacaattcccgtgggaggtactttgtcactttccatattttgaggtaaaattgttcggctaaactatactatatcaaagctaacaaaaacaattccatatatatctttatatattaaaaatgtttatctagcggcaatttatatatctttatatattaaaaatatttatttagcggcaatttttggtttaacgattgttttttttatttagccttacacgattaacttaacagactgttaacgttaaacgttaataaataaataaacccaa

SEQ ID NO: 111295 - DNA, 6677 bp, Cannabis sativa
  modified_base (6617)..(6633): a, c, t, g, unknown or other
tacaatcacggattgtattccctgttttggcataacgggaccaaatcctgtcccatatattatattgctttcactaagtatagtatggttgtttgcatatatatttcctttgttgacctagctagtttgtatgttattgttatgtttgttacattgaaagtttacaatttagttttttatatatataattaattataatgatttaattacaccgtgtcataattcaaatgccttttaattagatttggtatccgactcaatttaatatttgttttcttcatttgatttaattaattttttttttaatgaaaagtgaatttcattaacttaaatcattcatcaccaaggatgagattacaataggtaaagaaaaatcatagcaattacaatcagcctcaaaaaaagaagatcgcgccaaagaatgcacaaccttattagcagatcgtgaaacaaaattgaaagaaatatcattcatagatgccacaaaagtcttacagtctaaaagaatatggccataaggagaagccatataagttgcataatttaagtccctaataactcaaaggcaatccgattccaccaccacttgactctagttattcgttttgatccaacttagagcttctttaattccaattacttccaccacgtgacgttgttacatcccagctttgtttattgttttagcttttagcactacaccagtctcattacgagctatcataccaactccaaacctctgctccctagcaaaaattgcaccgtcgacattcactttgattgtattagaatcgggggggtccaatgctcaaccgatgctctattagagacacccttctctgcaacaagagagaaatgtttttgagcattataccaatcaacaaagtgtagcttagccacagataaaacttccaccacagcaggctgtttcgaatcccaaaccagctcgttcctcactttccaaatggcccaacaaatcattgttgcttctatgccagcggcctcagtccataccttaagtccttctgcaaaccagctagcaaagatcattgtcccagcagcaaccatgggcacccctacctttcccagcagcttcgagcaaaggaacacctgaccagaacgtgtaagattgtttctggtgcaccattgcagaaattggacaaacagatgcaattgggacatgcttagtggagagttgaaaccttgttgggaggcaatttgaggaagctctccacaacagatttttcacctttggaggtactttaattttccacaaactcccccaaaattctccatcatctccactgatgttgctgtcatttatttgctccagatgccggtaggctgatttaacagaaaacacacctgcctcttcaaacatccaataccaagtaccagtccctacaccattagctaatggtattttccacaccatgtttggatccctctcattcaacacatctttaatcacctcggaatcccattcaagagtatcaatcttcatgagagacttaactgaattcccaatcaaagctggatgagttgagtgaatataggggtcattagcatcaaccagccacgggtcatcaagtatactaacatggtgtccatctcccaaaatcttcctcgcaccagcccgaaccactgcttgagattccaacacacttctccaaatgtaacttggattatggccgagagttgcgttaagaaaattactcttaggaaagtatctatccttaaaaatccttcccatcaagttatcttcattagtgagaagtcgccattcttgtttagctaataaagccaagttaaaatctttaaagttgcgaaatcccataccacccttggttttatgcattgacaactttttccaactcaaccaatgaattcctttgttcttggatgattgccaccaaaaattactaatactgctctcaatatcattattgatacctgcaggaattaggaaaacattcataggataagcaggtaaagcttgaaccacggatttgatcaacacatcttttccagctttagaaagaaacttattatcccacgtttgaatgtgcttctgaactttatccttaaggtagctgaagattacatttttgttgcgaccaatggtactcagcaaacccagatatttactatatatcctcagttgcttcttgtattcccattctagtacatatttcatgtctcatctgagttgaagtgttggtactaaaaaaagttgatgacttattgtaatttcccttctgaccagaagcattagagaacacttcaagcaatttgataacatttgaaacatcaccactcgttgctttgcaatacaaaaaaccgtccgcaaacaacatgtgtgagacaataggggccccattagctactctacacccatgaatccatttcttctcttcaaatcatcgaataatagcagacagcccctacgcacatattaagaacagatagggtgaaataggatcaccctgtctaagccctctacttagcacaatcggacccaacacattaccactactcacaatttggtacttcactgttgagagacatccatgaatgagtcaaacccattttccttcaaagcccaaacgagttagcattgcacataaaaagttccaatccaccctatcataggctttactcaagtcaagtttcaaagtcatatacccatctttgccaagttgcttccttttaagataatgtaagatctcaaacgaaaccataatattatcagtaattaacctcccaggaataatctcattcaacaaacctttcaacctattcgcaagaacctttgtaatgattttagcaataacattacaaagagaaataggccgtaattcactcatctgttctggtttcttctttttggggatcaacactatgtttgttgagtttaaataaggaggtataatctcatctaagaagaattgcttcaccgttgatatcacatcccttcccacaatatcccagtacttttgaaaaaaatttggattcataccatcaggtcctggcgatttgtctgggtgcatttgaaacactgcaattctaacttcctcatcagtaatcggcacaagtagttgttcattatgttcatccctaaccttcggctgaatacactccagaagttcatcagaagcccccggttcagcatgaaaaatatcattaaagtagtcaaccataacagttcccaatccatcctcccaactcctcatattgcccatagcgtcttttaaacttaaaatttgattgttgcgtcttcgagcggaagctttagagtgaaaaaatttgctattttggtcccccgattgaagccacaattgttttgatcgctgcctccagaagacttcacgctaatttagggtagaaaacaactccttcttcatgttaaaaaagagtttcttccctgcatcatctcttctacgcttcagttgtttcaactcttttttacacttgttgatgcggctagagaagttacatgagatattcttaccccaactcttaagagcatggccacatgttgttattttttcatcaattccagctccattagaatcactccagcattaccgaattacctcctcacattcaggcgaactagtccagcagttcacgaaccgaaatggagcaacagcagtagttttatgacaagaaagaacatctagtagcagcggactatgatttgaaggcgacacttccaaattataaatttttgcgagtgagaagtttcttagccattcggcatttaccatagctcgatccagtctagcttttatccaatttggcgtatcccgactcttctcccatgtgaaaggatgcccacatagctctaagtcacataaaccacaatgagtaactgcttcttgaaaaccacttaataaccacgcaggacaaggatttccaccaaccttctctttttgatgaagtacattattgaaatctcccattatgcaccaaggttcattaaatcttcctttcaacgttctcatcaaatcccaggtgtttttcctaagacttctattaggttccccatataagcctgtaaatctgaacttattagagtctccagacagataaaacaatcaatatggtttgctgaaaaagaatcaatacttagctcatcttgtttcatccaaagtaaggccaaaccaccactccttccttgagcctcaacaacaaaacacccttcatagttcaacgatctacacacctcctccactttagctttattacaaagtgtctcacaaagaaaaatcacattgggccttttatgaaaaaccaggtctttaaggaactgaacattccgtggcggccccagcccacgacagttccagcttagaattttcataatgattggcgagccccattcccaaagcccgccaaacacaagttttttgaatatccatctttttgttggcccatctcactaagctattcattagaaatgttaccaactttccttttttttgctatcatatattatcacactgtcatggtgatcatctataattgcctctccctgatttttgctaacattatcccccaaaactccaatctccatatcagcaatgagattattttttggttaaccaccattagttgttcccctattctgtagtaaatgcgcaccagggatagtatcagatgtaccctgattttgtggtaattgatcaccgtaattaattgagtgattaataccagaaggatggccagaactagatcttgccggagctggtccaccactgctgctgccaccggccaccatctcaagattccatcccctgtttcgaaaccactttgctcatatattcttatgtgatcgttgaggttgtgctttcatgaattctccataaggtttaacaatgtgttccaaaggttgatgaaacaacttgttacaaaaactatcagaatggcctataaccccacaaataaagcagaacataggaaccctttcatatttaaaattaatctagaaccacataccaatttccttcatgagtttcatccgtctccgcaaaggtttccgaatatccaacctcactcttacccgaagataattcctccacacacccaagaagttattaggatcagattctaaaaattcccccatcatattccccacattctggacagtctgtacattcgtacaccctggttccatatcatgcatttgaacccaaatatctaaagaattgagaggcaatgacttcgggtcccctccaactggtagtctctcaataatcaatggcatcctctcatatgtccatggactcccattgatcactcgctacaaatccacttcacggtaaaattgaaatagaaatcgattcggttcaagttgtttaacgtacattcccattcccggttgccataaggaggccaaaatatttcattttttcaaagtcgatcattctagaagacaaaaaccttcccaccaagcaccatctaccatcaataccatcatccacccctcctacatttacagtgacattctctaaatcttcctcttctatttgaatagaaaaagtatcatcctctgtatggaaactctgacgactgcttgaagccagttgcactaacaaatactcctcacaatcagtacccacaaacaaacaaacaacaaaagaccccttcccaatcagcactcccaaacaaaaccaattaaaaaatcaaacaacacccatgtcaaaacaaaccatgtcaaaagacaagactcactgtaaaagattatctaaaatccctcttaattaatatctgatttaattaaattaataattaaagatttgaaaaattatcatctgatctaattcaattagaactcaaaagttaatccaattcaattactactcgaattggatcaattttttaattagatacctaattacacacctaaatttaattaatattaactttaaaatatgaagaaaaatatataaaactaaatatcactatttgtttaaatttaatactccataaacatatcatcgttacacgtgtaatacaactaaaagtttaaaataataaaaataacaacattcctgggtaataaaatagaacaaaacaatatgagaataaatacacaaaacaaccaagtgttacaaattcaatacaaaaaatttcactcttcagcggatccccctaagatcagtgggaaacatttagcatcgttgctaacttttaatactgtcatgaccctgttggatagtgacagatggtcactgtggttagtatctccaatggcatcttgaaatttttgggagttcaacttctaagacattcttcgcgcatggctcccagtcctcataatttgactcagggtcgtcgcccttttttctccgacatactttttttttatgtcttttcgtaagataataagttcagctataaacctttgctcaaaatatctttctgggtacgggatcatccttttgagagttaatgcgagtattgagattccctttttcgcattgatttttcccttaagtccactagctaggggtccctcctggttgattttctcccttagtgagatatatattaattaacagagtaataataagtgcacacacttaaattaataggaaaatttacatggtatnnnnnnnnnnnnnnnnnttttacaaaaatactgtcatacggtattttttacttttttactg

SEQ ID NO: 111296 - DNA, 14888 bp, Cannabis sativa
  modified_base (13864)..(13865): a, c, t, g, unknown or other
cacaaatccaattacattgtggctttccaaacgcaccctaattgtagaaattagaattaattgtaattacttagtttcctatttctttcctagtttcctatttaatctctctatgtttgtatataaatactttatattctattgaataatacacaattctattcaccattctcttatggtacggagcaaattttggattgggattcgaaattcaaaattagggttcatcacaaattggagtttgcaataagggtttgattttcttcattttttaaggtcatttttcggaaaccctatttggagtgatcttttgttctcaccgcccattcagaaagtttgcctagccgcagatctgccaaacccaaattaatccggtcatcgaaatcctcacgcgtgtagctcatgcaccgcccattgttgttgtcacgcaccccacgtgccggtgcgtgtggccgcgtccgacaatttttcttgcagtggttggtttctgaggcggctcctctctggactattcgcatctgtttcatgctcataaaatccggttttgtatttctctattcttcgtgtttgagtacgccttatatgcttagctgatttgtgcttgtgaagatttggggtctcctattttggttgtgaaattttgagtgctagctcagtatctctttttgttcccaacttattgtctcattttgcttgcccctttatcgaatttgttggttgatttgttgtttgagttagtttcgtggaacaaacataacatttgtaatggcttctggaagaccagttcttgtttctgcagttgaatatgtcaaattcaatattaggagtctcttaggtattcatcttcttctatcactactaatgctgatttaggcaaatcaaattcttgtcttctttcctcatcttcacaaatctttatgtgggttgaaacaaagtcctcgtgtttagtttggtaaatttagtcagactgttgagaaattttatttgtcaaaaaataaggcagatcattttgtgttctataaaagattaactgttggtatcattttgttagttgtgtatgtagatgacatcgttattattggatatgatactaaaagcatctcatgccttaaatctttcattcataccaagtttcacacaaaggatataggggtgctcaagtatttctcgggacttgaagtcactcagagtaaacatggtatttttctatctaagaggaagtatgtacttgattcattaaacgagacaggaaaactgggagcaaaaccttgtagtactccaatgaatccagctatgcatcttacaagcgatgggaaaccatttgaagatcctgagaaatattgcaaattagtttaaaagttgaattatttaactgtgactcgtccagacattgctttcttagttagtgttgttagtcagtttatgtcatctccaacaattcatcattaggcaacattagaacaaattttgtgttacttgaaaggaacaccaggacgaggtgttgtttacaaaaatcatggacacacccagattgagtgtttctctgatgcagattgggcagactccaaggtagatagaagatccacttcaagttattgtatctttgttaggggcaatctgatctcttggaagagtaagaagcaaaatgttgtgtctagatccagtgcagaatcaaagtgtagagatatggctcaatcagagtgtgaggtagtttggatttatcaacttgagattgaagtcatatttaagacttcaattctagtgaaattgtggtgtaataatcaagctgcctttgtattgcctcaaatcccatgttccataagcaaactaagcacattgagattaattgtcattttgtttgtgagaaaattcaacaaggcctgatctccgtaggatatgtgaagattggagaacaattaggggacattttcacaaaagctttaaatagggtgcgggttgattatctttgtaacaagttaggcatgattaacatttatgctccagcttgagggggagtgttaggatatatgagctatacattagttgtagaaattagaattaattgtaattacttagtttcctatttctttcctaatttcctatttagtttctctaggtttgtatataaatactttctattctattgaataatacacaattctattaaccattatctacatgtctaaaaaattagcctaaaaaattaatctatgttcaaatattggaaataaaatgtcttgacaaatcttaatgtgtaagaaaatatgttaacaactacagcttacagcaatgactaccaaaaaaaatggaacaatatgtcatcttcaatttacaaaatgttaccttcaatgagagagacaaactttcccactctgagtattcttcatcggtatcttgctttaggcttgcaagaagttttacctttacatctcgaacctgatacattgaaagatattattgtcaataaataatgaaaattatgaccatttcctcttttccttccataagatatccttattgcaaccctgcaaaccaaactctttcctaatatgtatatttggctggacctacaacattaatgttagatgctaattagatttaagttgatcacatgcatctcatgttttcccacacacctcctcttctatacgttcagagacagattttgtacaagttggagcagaaactttccctttgtcctcatctagctgtcaaagaaacataatgaaaataataaataattcatatggacaggaattcagattaaagcacaaggagtaccatagataaatgtctgctgtaccatgatatttgaacaataaacaacagcaaagtataaacagagtatcgcaactaagaaccttatttggtggcactatataagaaattttataagacgcagggttcttttgtggattttttccatccccgtccccatgataggatagctttccatatgagattgctccacaaagtacagaaccgtgctgacaattctgcaaaaaacattgagaatacctgtttttaatactattactaatattaacaccaagtagaaagaaaaaaaaaagcaaagactatacctttggaagcttgtctttagatggtgggcccacataaaatgcttcttttatcctaccacacaatgcaatcatttgtcaagtaagaactataaccaaacatatttaaccactcaaatagtttgtcgagagacatacccaggaactaaaagtgatgacttgtaactgccatttcccatcacagtaccgtctggttgagagaaaaagctcaatcgtactacatcctgaaccagatagaatgaatacaagttatataggtattaaaatgataaagctacattacttacataatataaattgacttgcatgcatgcatcagtaaaagttacatatttccatatacaatacccaaaagtttaggccttctctggaccttggattttaagagagaaaaaatgactaccaaaggattctattttctcatgtttggattgaataaatgaattaagaattctttttccaagagaatcaaaacttgtgaaatataattttatgaaattttagaaattaaaaataaaaccgaagatagatgatgtataaacttcacaaaccagcacagaaattgtttgtaaagagaacaaacttgatcctggaaatatattctaccttctcttccaactttctttcaatgaatagcactaactgcttcaacttttccagatactgcacattgtcatgtctgaaacaaaacaatcaaaaatgtgaaaaaaaaaaatacatttttaagatcaaggccaaattagggaatcgagaaaagcagccacgtttctaaatttgaaaacttaaataccaaacaaagcagcaaaatagcaacaactagcttactacatgattgtctgcaagctttctgctgtgaaaagaatagtataccttaaataaagctgtaagatgtattctcccttgggaagtttcgagcgatctgggtaaacatcacccattgcatatacacgctacaattggagaaaagaaggaagtgcgataacagtggtggtgatataataataattggatccatggcaataaataaatcggaatctgatacaaacttttcactctctgctgtgcaggaaaaattaatttttaaagatgaaaatccatggcaatagatttatgtattagatcaactgatgctgcaaagtaccttgtttgtgtcagaaatcatataaaactgagactcaaacttagtgtcatatatgcggttgttaagtaatggaatgaaagggtttatttcagctccatcttccagtttaaacttgtacctgtacaaccattggataatagcgggtgagtcttaaaacttgagccaaatgaagaatataaaataaataccaaatgacatacgttaatttcagtgctagggtttgtttgcctgagggtagtttgtcacgatctgttgtgagagtagaaattttagcctcaacaggacggtaaggaattctgacctgcataatgacaaaagagagaaacgaagatgtcgattgttgactgtattagagaagagattgttaagatactgtatttgaacacaaataacagcgtgaattgaaacaaataagaataaataatagctccataaataagctggcaactagcttcaccttgtttagaatagcagcaggtgcaagtttctcagatgccattggagcttcggcatcaattctaactggtgcttcacttccatcgagtagtacttcgtctttatttatattaattccatgaaatgcaatctaaacatattcgtaaaaccaaatagtaagtgcaaattttgcaatgataacctgattttgaaatcaataacttcaacttgattaaaaataataataatagacattaaagagttcaccaaaatcaaatagtaagtgcaaattttgcaatgattacctgattttgaaatcaataacttcaacttgattaataataataataataataataataataatagacattaaagagttcaccaaaatcagagcaaaatatttttaaagtttaaaaatataagaaccataaatgtaattaaacataaaaaattccaatagctaaaatatttaaagatcacgaaatagctaaaaatcctatttacagacacgttaaaacaaagttttctttacataataaaggcggccgatccattctgaattttactaggcatgctttaagatcctaaaaacacaatcacagtaacgtgcccctagcatctaagagtgtagtcgatgagaaccaaataatccaagctcaagagaaccaataacacagtagcaaaacacacacaacagcagcaagcatatatccaaacagtaggaaattgctataagattgatatagaaaagctaattacagactaatgggagcccttacgccccttttgatgcaaatggagattgactcaattcattgcataccccttttctaaccttactctcctatatatagtaatttctcactcaatactaccctcccaaacaaagactcacatacccttattattactatatgctagcacaccccactaatcctagtgcgtaacagtagcagaaataattaaactgaaacaaaaataagaattagatagtaagaaaaacatgacagaaacaaaattaagaattacgttgggattaaacatggcactaaacagcacacctcaaaatctacaatagttttttcatggcttcctatgccactggaccaaaactgcgctatagctaattccattgtctggccaccaacaacaggaaaggaaaagctcttggtagaaggagaagaaaatgtgacaacactctcccacttattaggcctttgcagaggacagagctgaagatagcaggcatgttagagctaatgtaatcttatacgaataagatatcttttcatcaaaaaatagtacatgaataagatatcattaaatcctgtacctgaacagtgtcaacaaaaaatctacgaactgtatcgaatcctgaggtttgcatggttgcttcgacccaagtggcaccaagaggcacctctaaaaatcttctctcaatgtggcctaaccaagtaaatatcaagataggagcaattgagtatcaaaaataagcacctgatgccaaatgattttctctgaatgggtaaattgaacttgagcagctactattaaaggactcggggctttaataaaaaaagaaaaagcagagaaagagagaataaattgatcattttacctggtagaaaagacatcccagaaaatgtgaccaatggaggtcgattcaatacagcgatgggcttaataatagtaattggtattctgaaaagaggaccacgccagggagctttacaatcaataccgtaaatttcatgatagtgcagtccttcactaagattggttggatccactactacactgaataggtgtaagaataagttataactagcattagttacaacatcaagaggagaggacattaataaaagaaaaatataaggaatttaaaactatgaaaatacatctcattaacccatctcaaataactatcataccctcaacataggcataaaagtgtcagcaccagcatgaaagccctaccaccctagaactaagcattaactcattcattctttttcttagtagggtactgcctctccagaaaacgtaacataaggttataatacaatgttaagatatgttgagattatagtttcacttaagttacagatcttaagttataatatgaggtttaacacagagcatactggaatttcatgtccgccattgcaaaagaaagacatcattttaaaaccaaagaaattggacaattaataaaagtaccattctatcctcatgaccaaagtattcatattgtttatttttttggataactcaaagtattcatattgctaaaagaatagaaactaacctaatggtccgtccattatgtgtaagaaggagatactctgaagtccttacaactgcttgatcacttgaatgtaactcaatacactcctcaaagggaaccaaatcatccaaattgcttgcatcttcatgaaattttggctcaacaagaactgtccactgttaaaattaagttcagctaccagataaaacataaatggaggcgaatatacttgagtaaactgcagacagaaaagtctgcaagactgcaactgcttttcaaggaaaagtaactaagcaaatgaaacaaatatgagcatgtaccaaaattctcagaacacaaaagctatagcagataacaatataggtcaacaattttaattgatatatatatatatatatatatgtatagatatagatatattttaaagggataacttaaacacataaaggaaggcatttgtttaacgttagtatacaaaatcactttcaaaacctgaaaggccatttaaggatctcacctcactagattgttggcaagaactaggctctctgaggtagatgcctcgtgatacaggagctacagtcaaaccaaaaacatcaattcatcatatcaaaatcacatgcagattgagtgaaaatggccctcatataagtcataagaagtaaaataaaaaaagtcataactatacagaatcatggtaaaaagacaatgaaaacgtttgtaacacaattttaccaagataagatcccaagaaaaattcagacatttcaaccagtcaaaataccaatcatactctctagaaggtagcatcaaccacaacaataataaaacatatctaatataagatataaattggcaacatgaacaagctcaataatagccaaatagtaacagtaataagagtccacaaggaaagaagaaaaagctaatcttacttgtttttccagattgagtgacttttatttgataccaaacgcatggtacatccttggactgttgtaaatattcatgtgccctgcagtcaaaaagaaattgaaaacaagtctgaattgtccgtgctcaacttgttatcaagactaacagatgagagaaggtacaaaactaacttgtcaacttgcataagtccatgcccagtggacaacttatcctcgggtacactgcctacaggaacacatgtgttctcaagagctttcctcacactgtagggactcacctgaattccctcagcctgctcagaaaacaatgggtatcagtatatagataacaagagaaaacattaatcaagcaacagttgtttcctttaatttttgtttaatagaaatacaatgtaaacaaacccagcaatgaataccttcattgcacttaaaagcaacgcaacacccccacaggcagatggtgatgccattgatgttccattcatgagcatacgactttggagagtccacgtaggaacaggagcaacagcaccgccaggagcacttatagaaacaccaagatctccatcagcagttggtcctcggctggacctgcatagtaaatagtttggtgcacaacaaatgagcattctaaggcatgtgtagaccttaaatttaatggttccttgtgaaagaattcaatatagagaaagagttaccaagtatattcaagcccttcagatggggcttcaacaacaccatgagcaccagcagccatagctggggagacatatgccccaactcctatgatggttgaagtagtaccaccaggtgctccaacagtgctcaaagctggaccactgttaccagcactactcacaaatatcaatcggtgcttgtttacgacctaaccaccatgcaatcaatagcatatttaaaaaccattcaagtaaatagttggaaaaaaataaaacgacaatctcagccaatttaatgtatcaaaaaatattacttcattaacaaggtcaacaaagcggccatagtctggcagcaaagaaggttctccataactcatgttgataagatcacatttgttctgcaaaaaagaagtacagtggctgttaataacactctaaaaaacttgtatagtttagctcatacacaaggctcactcgtttgatgaaactaagggctcgattggccaattggctgattacccgattggcacacaggactggattactagtaggaactgaaacgaattatgcgagtattatactgtgcttagtgctgtttgatactaataaacttttcatataactgagattctatcaaataagaccatctccaatggagatgtaaaagttgtgatatatttggcacaaaaaatgactttgtgatatatttgcatcaatttttagccttgtgctccaatgcacaattgcaaaacttgatacaaatttaatgcttttattaaaaaaaaaaagtaataactctatcaataattttattattgttttattatataaagcaataaaaacaaatgtaaaaagtttataatttaatgcaataactaaatttaaaataaaatattcaaaataacataaaagtaaatataaaagtaatacatttattgtaatgcaaaatttgtatcatgccatattgtgatctaaatttggatcaacttttggtatgtgacaaatttagatcaacttttggcacactattggagcaaaatttttataatatgaaactatattttagcaatagatcaccaatagagatgctctaaataaattttttgacgatatcaaataaataaaatttacaagaattaaataatatttcaaaaatacatatttaaagaacaagttatgttaatattatatataacaattaaaaaattatatttttccataaatatataacaattatggtgactggaaaaaattgcccagcctcccaaaaccacccaaacaagggtctggactaaatagtccagttctaatgtcgtgtccagcccaccaaatgcaccctaagaatattaattcctaaaatcttaaataagaaagaatacacgtcaaaattcaaaaataattctaataaaaaaaatcagaaatatttggtgtaaagaatttttaaatgaaacagtaaaacagagcaaacttccaatcacctacctctatagcagctataatagctcgtgttagaccggttcctgtctccattgaacctaagcgtgaatctccaattttacaagatatcagttgtgcccctggtgcaactccattcaacaagggttcctgacacacagtatatcaataattatattggtttgtttcaaaacatttgcagcagacagataaacttcatgtacctttggatggaaagcactagcaataccagcaacgtgagtgccgtgaggggagctgtctgttacaatacttaaaacatttccctcatcatacacattaagaacgactgtacaggcatctaacttgctgagcacagcatactctcgttgaaccctgcaagggtcattgtatttattttagtaaacaatcaataggattcaagaattaatagcaccaaaagaaatcaatacatcaaaccagaatgaggcaactaaaattcaaaaactaaaacaaatgcaaaattccaaatgaagcaaaagatttgataacatacaagcagaatgccttgcaataacactgaatagtttgtactaatacttttcagatatttccttaaaataaaagtgatctacgatcccaacaaaatcactagagaattttgaagtgatagtttccgttcttcgaaatttcataagtcagatcctagaaaaatagttttaatattattttatcacccatcaaaacaaataaaatcaaatggcttaaaatcaacatacaagtgcaacaatcgtatacttcattcgaataagatcaccatatcatggtcaaccctgtcaaaaattgtatgctcatttaaaaagtttatttcctttaaagtaaatccaatattattttccacctaacttcgtccttggaaagaacatatccaacatagaatgtcactggcaagtaaacaatacctataatttgctaagggcaaaaagtcagcaagttttccactatctgggtcatcatcaagactttgtgtgtctaaggcagccacccaatattctccatcatgccagacaacagcatctatgacaggccctttgtcatcatagctctagaacataagatggatcagaatttacaagtacccaaggaaattaagaataataaaatgagaatttggaactgacatcagcttgctttcgtaaataatcaactctattttgaaggtcttcacgaactctcttaatgtttgcatcctcaagtttacagtgtttctggaaataaaacatcacagtaaaattatatctcaataagggatacatcaaaaaaatcacacattcaacaatttgcagcaaagcacattgacagtagttcatttcggcaatttcaaatacatgctccattgcctgataagtaaagttttataagagcttctatcaacacaagtgaaaaggattctatctagtaaaatgtgacaaaacagactccaaaacaacagggggaaaaaataacacacgaagcctgtcacagcacaaacacacacatgcttaacccaatttatataaaaatcaaatcacatgataatattcactttcagaatcgatgtatttataacaaagcaagtggagaactaacaagcaacctgttcaaattcatcaagttgcttaacagcattagcaatttcttcctgattttgttcctcccattttttctttctttccttctgtcaagaataaagttataaacattgttcatcagccaacttcattattctcaacacatcaagtgtgcttcatctgtcaatcttaaaaaaaaaaattaccttcaatcgagaagtcaatttatctgtaaacaactcatatgcgtatttataacccacgtgccattcaccagtgggattactccacataaaattgacaaccagggaagctcctatttaaaacatactatcaaaatcagaacagggccattttgtgtgcaagaaaaagaattacacatatagccattgaagcaaaaaaataattctgggaacgaaagaaagagaaaaaaaaaaccaataagctttcattatgaaccaaacataattgcaagattagtgaacctccatactatcattccataatgttatctaaataaagtactgaaaactgagaagattctataaaatcattaagtaaattttcaaaatgacctgaagctccacggataatacgttcatcttcagcagtcttaacaaccttagacgtatcaatatctccactcccagtactgaaaatttcacaaaagttatgtgattaaaatactcgtgaagataactttcatttcaacatatgtgaattaaattttcaactagagaagctaccaatcaatgacatctataattttccgctttccgtcggaggtaacttgcaatccatcagccgcagggtctactccagaatctgataacagaaaattaatcccaaaaaaatccaaattaatgttcaaaatgattgcatgaacctcaaaagagcaagagaaacaaatttcgggtgattgaatgtgaaatcaacatcatccattaagtatgtaacagtactactataattcgatcacatttactaaataaaaccatttcgatccaatacaacgaaaaaaactcgaaactcctgttcttttctcactctatcaattcgttattcctcaaaaaacataacatgcatatacatataatatctcgtctacttcattttcctcaatccaagtcagtgagacagtccgatcaacatattaaatcatcagtagaaatgaataccaaagatagcgatgacaacaccacgtccatcgttttcagggtgagcctcaaggaagcgatcggcaccaatctccttcttaggcatgagtgaggccaaaaacgttgactcgttcagtttgaatttacggagcgaaccattatcgtcagcaccgaatgaagaaccaggcattgccgtaaccctaaaacttccagtaacaccaccgctgccgctagtacctggccttttactactactacttcttctgttcgagtctgattttcttggtcttcgcgtttggttgattctttcgggtctaacaagaagcgagaactgttgctgtaagagagagagtgaggacgagggcactgatggtaatttgtgcaataatagcattgggttaagcatcttttttttattttatttttatttattatgggttgggggtgttttggtaattttagggattaggtggcggcggcggtgtttttggggttcgaggattgggtcgaaggaggcggggagttgaggctcgacctcaatgtcggggctcagttgttgggtgcgtttggtttggatatggtttggtaggtgctgcgccaagtgtgttgggaaattacctttttatcctcgcatgcatttggatagacatgtagctcccacttaatgaaatagagtaggtcaagtcaaatgccacactggctctttttcaattttggaaataatttcctcaatctaatcattatattcataatactagtaataacaataaaaattagcaatcgtttttcaataatttaatatttcttttttctaatgttttagtattattttgaaggtttgttcctatgttatgccacttaaagtactttttttcttttcttttgtttttatgaagacttaaaattaggcatgcacacgaggcggaggattggcggggagtgctttcccgttcctatccccgttaaagagtttaatcctcatttgtacttattcatcatcggagatagggcgaggaatcccctaatggggtcgggaacaaggcgggaaagaaaaataaagtttacaataaaaattttaatatacaaaaatattaaactacannaaaattaaaatattatacattaattattatttaataaactaattattatctaaaacacaatttaaaattcataaaaaaaatactaatatactaaaaaagtaaacataaattataaattataaaatattagtagaaataagttaaaacattaaacgagtcatcgtcggggcggggaatgtaatccccgtccctgccccgtttaacattcggagattaaaagtaattctcgtccccacctcgtttcctatttagatgggaaatctccgcctcattagggacagagtcccgcgaagccccattcccgtgaagaaaatgtgcatctctaattaaaataattaaatatatattatttgatttagagtatttttttaacgtgcttctttcatgacatttttactttttgtttttcttttctaaattacttaacaaaattgtatagtttttttttatactttccaacaattaatcacaaaattgctttttaaattgttacaaaacaagcaaagtctggtcctaacttaaaatgagcctaagaattgtgttatgtaaaacggatttgacttgtgtaagagtagatgtgagtattagtgtgactatgtctcaaaattttacaaaagtatccttttttttcacattcatattatttataaaaaaattaggttttatgtttgggttcacgttaagtacatatctagtccgccttaactcagtaactaaattgtctaaactattttggtatcgcatcccatgtccctttgatataaaattatcatttatcttttatattaattacccactaagacatgtttagaaaaacaaataaaataaaattagaagtatagacttttctttctttctttttttatattccctccataaattttttaacactttaattacttataatgtgaaaaaatataagtttgttgtgtccgatttgtcatggggcaaatgaacttattttgtactgtttagttgcctgtgattttgtgtataacatagaacacaataataagatataat

SEQ ID NO: 111297 - DNA, 6089 bp, Cannabis sativa
aatggcgggtctcacggcggcaaacaagctctataccacggttgggttcaaggactcgttcgagctcaccatcgtggaaggtggttcgagaatcggtggccggataaacacgtcggaattcggcggcgaccagattgagatgggggccacgtggatccacggcattgggggaagcccagtacacaaaatagctcaggaaattggagcactcgagtcggagaagccatgggagtgcatggacggctcgtcggaggatccgacccggttcacgaccgtagccgaaggcgggttagagctggacggaacggcggtggtcgaaccggtttcgggtctgtttaagaagctgatggattacgctcaggggaagctggtagaagaaggtggtgatagtgcgaatgagtctttgaactacagccaaatagcggaaaaagctttgaagacatgtatagaagtgaatggtggtattggcagggtcagtgttggttcttatctgagacaaggcctcaaattatattgggctttgaagggacaagaagatggggaggtaaaagggtatgagaattggaccagaaagttgcttgaagatggtgttttcagggtgtttgagaatatccagaggacttacacatcggcagatgatcttttgactcttgatttcgctgcggaaaacgagtaccgtatgtgttggggagaagaaatcaccatagctaaagggtacttaagcataattgagtctcttgcttctgttcttccacctggtttggttcaacttggccgaaaggtgagacaaatcgagtggctgccggtgactactgctagagaaaaatcagatatgtcaaatggttatggcaatactagctctacgcctgtgaagcttcacttttgtgatgggacaacaatggtggctgaccatgttattgttacagtttcattgggtgtgctcaaagctggagttcaggatgatggttcaggtatgtttaatcctcctttgccttgtttcaagactgaggcaatatcaaggcttggttttggggttgttaacaagcttttcctccaactgagccaaaattatgatcgaaaatgccaaaatttccaaagttttccatttctccaaatggttttccatcgtggggactctgaacttaggcaagaaaaggtgccatggtggatgaggaagactgcttctatgtttccaatctatgaaaattcaaatgtcctgctttcctggtttgctggaaaagaggctctcgagcttgaatccttaaaagaagagcaaatcataagtggggtttcatctgctatttctagttttttgcctaaaccattttacaagaagggaaatcccacttctcctcctgaattattattattatcaaatgggaatgtgagttctgcagacaagtttgaagtgaaagttacaaaggtattgaagactcaatggggtaacgatcctctgtttatggggtcttatagttatgttgcagttggatcaagcggagacgatttggacagaatggctgagccattgcctagcatcagtagtcaagagtcaactgtttctcctccacttcagattttgtttgcaggggaagcaactcacagaacccactactccaccactcatggtgcctactttagtggtattagagaagctaataggcttctccaacattatcactgtgctggggtttagagaatttagtttctttttttctttttttttttttttttggttggggggaacatttatttctatgatattattcctcgtttccataaacaatttctatgtctctctctgtgaaactgctacgattggggagggagaagaaaagaagaagaagaagaagaagaaaaattaggacttatgagacagaaatttgggacgttttctagatgtactgcatgaactaaaacaagttcttaattttattatattattattctattgcctttctccttgtttgtgagtcttatttttctcgattgaattcttaatcatcaaagtaaagacacttaagattgtgttttgacattttaaacacttcaaggctgggaaagtacaatacatagaatagaatgctttggataccttattttatgagcctattaagcaacttaagttgtcttaatttaacactatactgatgtgtcacgttgtgagagtgattaaaaccaatattaaattgtactaataagtatgccacctgttgttatttgacacctaaagtgtcccttccatatctctctctctctctcactcactcactcttaccattaccaggtgcttttgttttgtctttctgaaaggacaggatccgccaaacccggttctttccagctaggaaatctcccttctcatctcattagctcctttccaatccatggttattgtttctcttgtaaccaaacaaagcctaacatctccaacattttgagattggaaatgatttactccaaggcacccctctggatcatataatagctagctaatactcctcctataacaaaattgtggataatcaataagatggcccaagtgttatgattctcattgaaataggatcagagcaaccaattcttggggtcccatctttttatttgtttgttttttaacttgggtcaatcagaatggtaatcaaatttgtcctcaacactcggacagaattagatatgcttgttgtgcctatctgattgctttgataatttgcagaaagaaaccccttttgatctgacccttttaataaccttaccccattctctaacacattatatatatgtatatgtcatgtgccagacacatactcataaaaacgacttaaaactctttctctacactacactacgcttgtagttattatttgtagtagagacagaaaataactgtctacaatcaacactaacaacctaggtgtataacagatacttctgtccaaacatgtttatctaccacattaaatttagtttagtcccacccgttggattagagatggtgtgactaatcaatggcttaagatgatcataaaaaaaagggtccctctagagttgagttaatagttgactgtgatggattttcataaccatttaaagttaaagtacatgtataatctaacatagttatatactttgatcaaaatgacaatatttatcaatcccctgagatcataaaaaggctctaaaatctgctgagattttgttttgccttcattgtgttgctagcactgtatagtcaaatcagtagctattcatagagactccattattgtaaacatttgccaggcacttcccctaaaaacccaaatatttttttaaaaaataaaaaataaataaataatttaactgaaatggcccacttgctgtctctttttcctctttgtgggcttcaaatatcaattacccctttgatgatagtgcatattacagaacaatctgtcaacaagtcattgtcttgattcataaacaaacaaatgagaatctccatttcccattaacatttccccaccccctccacccactgccttatttaacatcttaattaccttttttattttccttctttgcctctaatcatcattactcacacctttattaaggataatgcattattggttaattaattgttaattatacctgattatccattccatagttaatttctgtttattcagtttacatgaattgtataacattcaatcctctcttttttctttcccactcttaatgtgaatcccgttgtcttccatcatttaaacacacttctttaatataatgatccttcttagttactttgcttttacacaaatcttggactaagaattttgatgataaactctgcttttttatttttctttctaaaatgaaagtaactttcctattatcaataaagaatcaatgatgtccaaagagaagatatataactgatttaagtaagttatcatattggcatctaacactttgcttttaaaaaggtattaatatattatacaaatatatataaaaaaaaaagtataaataggaggttagcctttaactaaaataacagattaattagtatcatatgatcatatctaattatatgttttgatagaatctagagagtagctagagagggagatataggtaggagtctagaacctaaggacaatataggctcttttattactttcttctttaaattccatgccagttgaattagctagccatgacttaactagtgtccttttatttagctgagatgcacaactcttattacctcaattattatttcattgtatggtcttttaactaaaaagaaaaaaacaaaggtaaaagttgacactacatttatatatatatataatagacttggattggatctagtatggacaggaattcaaaagaaaaaacaccatcttctgtggatttgtcctgcagtgcaggcaggcagtgagaaagactggggaaaaaaaaaaaaactagcagtagaaaacaaaaaattattacctgaagtcactgttgactgtggggtcgggtcgggtaatcgggtcgggtgaatgagtaatgcaagtgtgaaagtgtcatgtcatgcatgtaaatattgtaatgtaatgtgtaagaaaaggaaagagtaagtgtaagtgagtagtagtagtaataactaacaaagtccagaataagattgagatatatgcaatgcaaagtaagtctggctttggaatcgaatcagacaaaggctgctgaagaatcatattcagtgagtggatgctattggatgattggtctattatcgtactatgtactatccttttgtgtttccccttcttggaaaaccacctattctttttgcccttaacaaaaaaattaaaataaaagaatcgaaaaagttacactactgtcattctctctctctctctttctcttttatataaataaaaattacatccatagaaattttaaagtatagaatacaaataaatcaagtgaataagtcgacaatgtcatttccatacaaagattattccaatacagtaccctgaaaaaggccactataagatacatcatcatataaagtcatgaaaaatattttggaattaattaatattctaccatctgttatcctcaaatgagagaattacattcttctggatattgagagcacattaaacatttccaccgctttaaagtataaaaggaatttcaatctccaactttaaattatagaattattttaggaagcaataagaaataaaccaaagttcataaaataaataaaaaaaaaaaaaaacaaaaaaaacaaaagcaattgtttttggtgcccactagtccagagtctatatatatatatatatatataggctaaggccatccctttcttttttggattcatttcaggtcaaagatattggtaaccaagtgaaagggacgactgaaaagtcaggctctgccttgctaattgagtttaattaaaaaggcccaaacttttataaatacatcccatttttaaaataaaatttaattacttaattatctttttgtagaaacactaatatgtccattttcaaagtttttttcattttacttaccagtccgccagcagacccccacaccctgacttgtcttatatgcatatatcaacattttcactatcgatagttagccaaaaaaaactctatcgattatgtttttttttctcaaagaaatttccatcatgttttggttaatgctatatacgacatattgtggttctatactacacatattacatattacagaatgcatagaagatctaataacaataacggtaggctatctagagatggaagtgttagaagttttattattaaaaaattatttaaatagattataataatatatactatcatgggcgaagccacaattaaagtgggggcagtcacttcacgttacatttgactcggttgtaaggatttaaacttaaataattatttttgggctagcctgttgtaaaaattttagaaaaatttatatggtatactaacttttgttattttcttacaaaaatactatcaggcggtattttttactgtattttttcttaagtttcatattgcagtatactatgttaagttttc

SEQ ID NO: 111298 - DNA, 7237 bp, Cannabis sativa
ctatcttcaatggtactctattttcatagctaaattagtcattttattgttattgcttcaatcatgtttcctactttagtgaataaatcttataattttattaataataatcagcaaaaataataatatgcaatccatttaggacatcttcctcttaaaaaacgaaccaaaactgcttaattcccagattgcctaattccaagatcaatcaaccatgtaacttgaaacttaactattgtgtaagataaatatctgcactattaacaaccattcaatcatagagaacttgtgttatttctaacaactaataataatttgatgatgagccattgaaaaatagaaaagaacaacaaaacaaaacaaaaccacattacaaaaacaaaactaaaacacttaaaactatcacaaagataaactaattgtagtattaaaaatcgaatcgcaataacaaaacacaactcttatcaaatggcatcccaagaggccagcaggcctgaacctgtgaattataaattaatttataaaataatgaaagtaaatcttttattaaaataatattaaaaaaattaacaaaaaaaatagaaaactccctaaactctatatccatttccattctctagtaatcacttgttcaaatcactccctactatagcttaaaagtgtaattagaaaacatgattagagaaaggatggttttttttatttaaaattatttattagccttcaatcccagtcaagactcaaaaggccaactgcatacataacaagctgcaaagcatgcaagacacccaacgaaaacaccgacacaaaagtaaatgccatcacacacagtatgtagataacggtaggttcgaaaatccaaacagggccaccactcacgtattcaagacatcataaaaccaacacaacacctctaaaaccttctcatcccacaactttcctggtgtaggttcttccaggttggatatgagggaccggccttaaatacacatcaccagccccgccattccactggactccagccttcaaaagtggggctccagttttcaacaaaggtgctccagtcttcacaggaggggctccggccttcactgggggacgctgccccaccatcggcttacgggaaccaattgtcatgttagccagcttctcagatgcatcagaaacttcacgcgctcctctaaccctattcactgacactgccagccagccaaatacacataataattcttaacatcggcaagaaaacaacaagacatgaaactgtttctcaaaacaagcaagagacactcacttggattgctctttactgggggtcgatattttggttgagttccagagctcttcaaagatttctcattcttttttgcatcctaacaaaattacaaaaactcattagtcctgcacaaacacaaaaaccgtcgcaaactaaagcatttcatagtcaaatgcaatctagttgtaagatgctggaacaataaattattccatcttacctggctaaccatatccagtttgcgctgcactcctgcaatttataagcaaaagttacaagagaactttaaaaggacaagcacataattaaaaccaattctgccatacgtacaaagtgacaatatgacctgttttctcaggctttacaatatatccataaattataattaagcatatggagctcatgtttattcgtatgtagcaggcatgcataatatatatatatatatgtgtatatatatcaggataaacacatcaaagccctgtgaccacgtgcaatgagatgtgatttgattacaccataagagccataaagtaaaacaaagcctgaagaaaataattaccaagatctgaagatgcatgtactttaggtgaagaaaaattgcttggcttcgaattagataaagtcccagaatattttttcacgcattgttgctctgataatcctcttgttcttgtagctgcacaacattaaagagtaactaaataaatttatgttcacaaataaaaacactcatctaccaatccatcatatcttgtatttacaaaccagatgggggagttctagcaacagtcgctggtctgggacgaagggaaggaggaacataatagcaactctgtgacagagaacaaagttaaatttttcatacttagtaacatgctgaaaaaaaaatacaattgttcattgaatgccatgaaaataaacggcagtattaaaattttgcaactttgtaggaaaaaaacatacctgaaagaaaggatgctgaagggcctccaatgctgttggcctctttgaagggtcccatgaacaaagtgcctgtaaattcaaatgaaaaaaacagggagacagcataagatacttgataaaggtaaaaaaatcccaaactaaccaatcaactggaagatttagataggagacaaaaagaactctaattatggactgtacaaattacattgatcaggttgacagcattgtcacttgctgatggaatgagcgctgtcagattaacacctgcaaactgcaatatacaggcaggcatccaacttaatcatcaacataataatccagtaaaagtagctagatcatattgcaacagtaagaggaaatgtgtaaacaaaaatagcataaaataaaataataatctccaccttaatctgcaacataacttttaatccagtaaaaagaagcaacaatttcagtgcatcagtagatgtaaatagttatgcaatgcaaacataacataaatcataacagatagttagctcataaaactcgacataaaacacttaagaataatccaatattggtatagatcccctttcgagtctcgcagtaggatgagacttcccttaggaggtacatcatttatttatcaaggctaaagtctggggtactacctctgtttaatgagaagctcactcagctatgaaacagggggaaaaactacctattaatgagacgattgtgttgggttgtcatattgtatttataatgatttattggtattaaaaggcattaggtctttatttaatttcattaaggtaaaggctaaaaaatcgaaggtactgcagggttagggcacacctgcttgagaaacaaattgcttcatatccaaactacctcttttagtcagagacatttttacagaaaatgataaagaaaaacctacctttggaaattgataattgatctcagttgcaaggcgaagaccgtcagcccatgaatcctcagttggactgcctcttacactacagattttgtagatttcatctgcttcactgaaaacatcacaggttaaacaataacagaagtatcagaaactagcgtcaataaacatcctgtcacatgttcttagtttgtaatcaagatcatagaattgataaagtacattgtatgatgcaaaagacttcaactccattagcaataacaagtagcaaggtacatacctagcgcctggaaatagagggcgtagagtaaacaactcagccatgatagcacccatcgcccacatatctgaagacaaaagatccccttgagaattctataagcaacttgttttttaaaagatattcaatgactcaactttatgcatatggaattaaattgatacgaaagaaatagattcagcacaaaatagcaaattatatcaaacttctgcttactcaccaactttagaactataaaggcatgattgtagcagcacttcaggggctcgataccttatgaacaaatgaattacagtaagatgttggcaacactacaagcagaaagtgaccaagataaaaagcaaataaaaagaaaatacacttaccaacgtgttgagacatattccgtatatggtggcatagaattaatttctcgagccaaaccaaaatcagcaattttgatcaattcttttgttactagcagattttctagcaaaagaaaacacaattaagtcaccaaatgaaagatatagaaacaaggtgccacataggcaaactataaattgagcaagaaaatcagcccaaagcaatatggatgtttttcatgggttattgcaacataataccaggctttagatcccgatgaaaatatccagactgatgcatataagcaagtccttggaaaacttggaaacaccaatttctaatctcagcttcagagaaaagcttctgcctgtctttaattagttggtaaagattgcactcctggcatagcaaaaaaaaaacatggcatagcatcagaaacaagacaaataaaacataatgtaaggctagttggacacaaaaaagtaatatttaccatgtattcaaacacaaagtacaagatgtcattttcacggatgacttccttaagcttcacaatattaggatgattcattttgcgtagtgactgcaataaacaaagtcgataattaattgaagaacaatagcagactcatgggaaggttaggaggaaagggatagatggagcctggaagacaataccttcacctctctcagattgacacattcctcccacgaaaagtactttctcttcatttttttaattgcaacctgtatgttgtagccaaataaaagtgagaaaaaaaaaagctagacagaaaaataatcatgcatttaagagacatacgaattaagacttaccacttcaccagttctcttataaatggctcgccaaacacttccaaatgttccatcaccaacttcctttattaatgtgtacctattatattcacaacagtgagaatgactacacagtaaaaaacattaccaaaaaaaataaaaaagaaattgcataaatccaactcacctctccattcttgttgaatacaaagcagctctgtatttatttaagtattaaaacttgtacaaaagacaagtggcatttatcttcagtaagacggtccttaaaacagactacgatatattcacaactgccttgtcggtccagctgaatccaccattaattttctaaggcaacatgcatgggcacagaaccagagactttctgatgggcaaccttatttattactaacccaaatgcttgaagacagtgacatggcatgcacagtgtgtacggacaagtactacagaacatattgacacttgaaagaaacgagcccttcgctcaagatagcgtctcctcgattcaatattaaattgagaaacagctaatactaatacttgtagaaaatcctcagctagttgatgtctcaccacctttaaacaatacccatcagaagtaaaaacgaaaaaatacctataactaagtagtctgcagagatcccagtatatcaattatctcgtattgactactagcagtcttcaactgcagattagcagcagaagtcagccctgtcataaagggaagaaaaaaaacatactatgagaaatcaagatctaaacatagaagtgaaaaagaaaaaaaaaaaatcaagtatgatgtactatacccctgaagaacaattcccagagagttggacaggatgttgtatcagcaatacactattggaaaatagtaagttagatgttaagtgttaaccaacattccttaagaaactccacagtcccacacataaagcaatggacagagagagagaaattggaaatgaattgcttactggtacaagtgcaataaagatccaacacctacttcaaaagtacctagcatcacgcctcctttcctgatcattgaagagcaactgaccactaagtgcaattaacgaaagaaaccagaagaaaatctccgacaatgagaaatcgccagtcaagaacttcctggaatgatacaacggagtaatgaaaacaatttgaccagaagcatgctcgctccatgtcttgaaaagtacaagaaatttgtttagatccaagttttccacaacctgtcatcaacgccgcgtgcatagaactcagaatggtataatcttgtacatcagtaatgagatagaaatctatctaacagtattttatcacataggggaaatcaagtaacaaatactacgatagaaaagaaaaagaaatccacaaggtagcatgacctatgaaaatttatattatcataacaaggtctataaacaagtttgaatataattaacataattcaacctacatacaatatggcaaagaaacgctcctagatccactggggaactaactcaataaattcttaacatagtacaattaaatataagataacagagccaatattctaaaaagttgcccttcatagacattggctctctaaaaagttgccccacgcaaccaaagcaggtaaattattcaaattacaaaagcaatgaggattaagacataatgtgacgatagcaaaaaaaaaaccataaacaaggaagcacgctcgaagagaattgaggggtaaaacaaaattgaccttctaacgctcatctcaaaagagaaaccttaaaaatcaaccttatgtattgcaaaaaacaaggacgtaataatatcatttcaatattgaggttagaataccaaacaatcagccattaaatttccagaaagttttcctaatagtaacaaacggaatatgtacaccaacttatcacaatcctgaccaaaattagacaaatctcgatagatgtatttcagttaagaaaacctaattcaatatcaaactgattgaacccgtaaatagtgaaacaagaaccaataaaataactgcataaccaaattggaacaaatcagaaagaaaaccctaacctcaaataaaaatcgaagaaaattaaacagccaaatcgaagaacagatccaaaatcgatgtaatatttttttattaagaaaaaaaacctgaaagccaagcggcatagccaccgtctccaaggacgggaagaggtggaatccagagcttcgccggttgtggtgtttctagagatttcgttgccttgactgaaaagcccaccaaattctaatctctgctttctctttcttggcaaccaaccaatgaaccaagaaaatacctaaaaataattgtgattctatattccaatgccttatgtctatctattctatatttatatgtgtagtatatgcatagtagcgccagcggagatctctaatcacactcttctcacggtcctgattatctctctcctacgcgttcgttactcatcctacggttatatattaatcttctcttttaatttatctactaattttaattgttttttcttttaaagatgtagaatttacgtggagtatgggttttttaaaccttttatgataaatatggcataattaacta

SEQ ID NO: 111299 - DNA, 5612 bp, Cannabis sativa
aataaattcaaaaataattaaaaacttactaaattaattaaaaacttaagaactaaaccaattttagtttaaaaaaatgtgaaaataattctaattcctagagttatcactatatcgggatgaactactaaaaatttattgtgtctatcttataaattctcaactacttattcttttagccaatctagcgagtgggtaagtctagtctagatttctcagtcaacaaaactaattttaaaagaataaaacaagaatccagggctaatattatgatgtggcaggacataaagagaaatacgttatttcattaaaaaagaggaaagcagtgcatgaagcttaaagatggaagaataaagctctagatgaggaagatacagagaagagcttgatttagaacaaaataacatgattaaggagttctgaaggcaggaaaaagagcgcgatgaatagcatatgagaattagtgcacgaggacagatcagaacagatagagagaaggaagcagacaatttgttgtgcctataaatcgaagaccccctcattcaaaaaacatatggatttgatcacatgagactagccgaaattctatcaaaatatactcttgaaatcacatttgatctcgggaagcaagcgacccagacacgattaaaagaatttagagaaaaattttataaactgattgagaatgaatttcaattagattgaacctggcataaagaattcaaagtttaaatgacaatttgttgttgagccaatttttgacatcaataataatgtatttatatatatatagttttcaccacctattatacctataaatagataataatatttattaaataaaattaacatatgattaattatatattatttatgtaattttatatatttacttatatatatatatatactattttttataaggttgttgctgataaagattttaaaatattagtatgttatttttatttttgattacaaaataatatattcttttattatattttaagattttttattatttaaaatttatatggtaattaattttttaataaaaataatatagttaataaaattaggtaaatatttagtttactttatacattgtcaaattaaaataaaaactattcgaatgcccaaaatagaaaagaaaaaaaaatactgtgattattctcattagcttctatattctatcctttaaaatatatcactaaaatcttattttatctcaaatttttatattacatcatacaatttttttttattttttctctacattatttaaatattttttatttattttataaaataaaatataatggtagtacactcagataatatatataaaaaagttaaacaaataataataattttttttaactcaatgagtagttttctttatatttaattaaccactatttgagaaaagaagaggaaaaaaaaagaacaaaagaaaaaattatttgtgggaccctatctttgctcttttgtatgtaggactttgtttgcatgtttgagattctgatttggtggttcatggctgttatggctactgaagttgaagtggatgatttagtgaccttaacaaataaatttgcggttgaaagtgaggaagactgggaagttaatgaggaggacgcagtgaagtttagtgaaaaaaaactcttattgggaaagtgatttctcaacggactgttaatgggaatttttttaaaactatatttggtcgaatatggaagacagtgggcacctggaaagtgaagattctggaggtgcacaaggatcatacttttgtcaaaatttcctttaaaaatcgtgataatattcgtatggttctagataaacaaccttggttgtttgggagaggccttcttgtgatggaggagtggcctttgtttgatcaatgggtagatgctaagttagatatggtttgctgctgggtgcgaattcatggggttccactgaagttgtgtacgcaggcaaacattgaaagggttgcgaaattcggtggggaagttgaggaagtttgttggagtaactcgcatcaagtgttgttcaatggatatgtctatatgcgaatcggcttcccgattaaccgaggaatctttgttggtcagtttgtgaaattagcaggggtggattactgggttcactttaaatttgaaaagttgttcgtgctttgcttccattgtggatattggggtcatgagaaaaaagattgtgaaaaggaaaaaattatgaaagagggtaaagataggagatgggtaccaagatatggtgaatggttgaaggaggatagcccaataccaaatttttttgttgggcagtccgtagtgtaggtgtggcggggggattacatcaaataggggaacaggggatgggtgaagaattagctctgaaagatgttgtataaggagtggcgggggaacaggtggaaggtggccggagtgatggaatttggcgcgaggtggacgataggggtgaggcagttcgatatcgtgggcatatgactcaattgcctacagttactaaagatggaaatgagaatgtcaggcccaaggaccatttggggcaacaaggaaatgggccaattgtaatatttggagaaaatgttacttgtgttgataatgggcttacgactgagagagtaagtaagcctaagtctcatatgcaatatattaggcctggttcattgaacatgtaaactgagtcacgcgataatattgtagaggactcaagctgcttttctgtcaatgtggaatatcagaaaagaaaaatttcgttttaggggtttagtctttacttcgaatggaatagaggagaatgatggcagatatgaaggagatgatgcgaatgagggtgaacaaaaaaaaaatggagggaaagacagaaatgtggaagagaagggggaaacgagtgcgtagtaagggtaaacaaattcaactttctggtaagaattgtcaaggggatgaaattgctgagaaaggactgggtattgcaggttcgatgggaagattggctaatagtggtcaaaaacgaaaagcttccattaaaaattgggcaaggaatttggctaatagaggaactaagaaggtacagggaacctcattgaatagtgcaacaatggtaagaaattattcgggtttggatgcatttgagaaggaatggggaggtgccgattttgtcttcaggttaggtgtgtatgagaatttggtggtgagttctggggaagaaatctttttgaggtgagtatttcttctaatgttgatttaccatctctttctgtctctgctaaagcggcgagccttaacgatcaaggccactgattgcaatgaaaatgataagttggaatatccaaggaattggaaacccttggacattgtgtgctttacaattccatgtgcgtgaaattggaccgagtattgttttttatctgagagtaaactgactcgtgatcaggccgagcgtgtgagcagtttggtaatctttgaactgtggatagagttggattaagtggtaggcttttactgatgtggcgagatgatgtgcaagtgcaagttttggcaagttctcctggacatattctgtgtacagtggttggccaaggatttttgccttggatgttaacctatttttatggcgagatgatgtgcaagtgcaagttttggcaagttctcatggacatattctatgtacagtggttggccaaggatttttatcttggacgttaacctatttttatgggaatctagaggctagtcaatgaaaattctcttaagaattactgagaaatttgtgtgctgaaatcaggggcattggttatgtatgggagattttaatgaaatcactagcctttctaaaaaggttggtgggagaagtcgttcaccgagggcgatggatgagttcaaggaagttatcgatgattgtagatttattggttttagctcttccaaacatgacttgacgtggtgtaatgagcatgcaaatttgagagttatgaaatgacttgatagaggtatgtgtacaacggagtggttacactaatttgaaggaactaatattacttttttggattggtgggaatcagatcaccgtgctttggtggttgatatcctagtttgtgataatggagctaagtgtaatcaaatcaagcgagtaagtcgatttcactttgaagaggcttggtctgaagaggaagaatgcaaagagattatgcatacgcaatggtcagatattggagagagaggaaaactaaaaggcttttgatgtaaggtgaatcgttgtggaaaagccttaaattagtggaataaaaaaaagaaagaagcgactatctcaggagattgataaggctaggaaaacttttagggttcgtttggaatgctgtattaggtcgtattgtattgtattgtattatattgaattatagtttatacaatatttttatgtaaaactacatgcggtattaacttttatggacgtctaaatatataatattttaatataaattaaagtttaacacagtattatataaaaatatgatatataatccaattcaatataatacaataaaatacaatacgacgttccaaacgagcccttaatgagttaactttagtatagcagcaaggggtttggggtgagttgaagaaagtgaaagaacacttgaataagttattaaaaaaagacgagaagtattggaggcaaaggagtgaagccttatggttacaatggggagatagtaatactaagtatttccatcgtaaggcgtctatgtagaagaaaaagaatgaaataaaaggtttacgagataatatgaggatttggcatgatgacaaggagatggttcgcataattattgaaagatacttttcccagttgtttgtggctttagggattaacaacgatactttaaggggaatgaacgaggtgcttcagccgaaggtgtcacaagctatgaatgacgagttgatgacagagtttagggttggggaagttttcaaagcagtcaaagatatgaacttgacaaaggctctgggggtggatggcctccctgctctcttctaccaaaagttttggtcgaagctcagtaacgatgtcattgaggtgtgtcttaatgtgttgaataatggtactgatatgagttgtgttaataatacggttgttactctgattccaaaagttgataagccataacgtattgaagagcttcgacctattagcttatgtaatgtgatttacaaggtggttgcaaagtgcatagctagtagactatgaaattccttggggatggttatttcgaaatcacaaagtgcttttgttaggggacgactcatacatgataatgctattattggatgtgagggcttacatgtgatgaggaagaataggttcaagaatgggaataaagttgcacttaaattggatatggccaaggcttatgacagagtggagtggcgcttccttaaggtagtcatgttaaaattgggatataatgttgggtggctggagaagattatgttatgtagggctgaacattttgaacgggtttgacccgaacccgagcaacccacccgaacccgaactagtgaacccgcaaaaaaaaaattttaaaa

SEQ ID NO: 111300 - DNA, 1766 bp, Cannabis sativa
  modified_base (1739)..(1740): a, c, t, g, unknown or other
ttaattaaaattcaattttgctccacaaaaaggttgcaactatgcatctattgtatttttgactttcatatagcttttaatttttttatgacattgtttaatatgaaaatttaagatattctgtgaattttttaagaaaaaatttaaaaataaataaataacacgttaaaaataaaatttaataagcgtgttgtactacttttgttaatttatacatgtgtgaaataaaattttttgaatatgtaaatattagataatagtgtccaacatgaattaaatgtaaaaaaatattaagtcatttataagaatatagattatgttggatcaaaatcattaatatgggctcatattattagtgtattactatttgaagtttgacctaaatataataatcattttagtaattgtggatcattgtgtattaaaattttatgggataaatgtgtagatactttaagtaatatttttaatttagggatattggcgtttaaactacttgaactacacatttagttacacttcccataaaccgattttttagtggtaaaaccctccaaaccttacttatgttatgttatttactactttattaagttttcacagttaagtgacaaggtggattgatatgtgtacacaattatacacatgttatgttttgattgatccacataaacttaatttattttaaaattatatttttatacaaaaaaaaaaaattattttaattattataaaaattaattaaatctttaaaagtaatttaaataaaagcaattttttattttttttcttctttttctcgattcttcttcttcttcttctagattcttctttctaaccttcccaaagcattcttcctccttccctaatcgccaatcttcttctccttcttcctttcccctggcaaaccagcctgatccattccttccaaaattgcccagagccccaaccatcgtcttccccttctccttcttggattctccttcccaaatcgtctgcagccccttcgttcgactcatcccagaagtcaatgatagtagacgtggtcgagtacaaaaccaagggtctgagcatagcttcaagctcctagatcgagaggttggtccaacgttgttccggtttgaagtcctaatgatatattctgagatttttttagtttttctaattttgggggtgtttacccagatttttaaaaattgataaattagagcttaagaaagatataaagcaaataataatagacaagtaagttttacgtggttcgggcgttaataatccctagtccgcgaccccacagtattagccttactagcaagtgtttgaatattacaaatatttacaatatgaaccttagccttgtattcctgttttttctcttgaggaagaatgaaggtagtaggaatttcagcaaaggtttggtaagtatcaaattgttcacactttgcacatgaaaaataagagtatttataggcacgtatgggagtgagggcatacccttcacccagttagagtttcgtattcaacacgctacaatggttggtactacaacatggcaatctgatcgttggttggtagggagcattcccatcgtgtggtgtacaactgctgctaggcattttgtgggaatgaggacacatgtcactcaaaggtttcaccttgcaaagttgttgtctaggcaacctattggacaaaaaggagcttcagaggcacgtatgcgcactgttgggttttatgccctnnataaaactctttacaatctgattagt

SEQ ID NO: 111301 - DNA, 6566 bp, Cannabis sativa
  modified_base (6519)..(6519): a, c, t, g, unknown or other
aaaaatattaagagtaacttttaaaaattatttaagtttatatatttttaataatgaggtgtatttataattttgtagggtgcaaatagaacaccccttaaaattttatgctattatttttcattctaccaaaagtaccccttccattatcttcctaaccttttctctctttctaacaaccaccatcaccaccattcgccaaaaaaaaaagtaagtgcttttaatttaaaaaatgttgttgaaattgattatttatatgtatattgtttgattttaacaatctacacatatctacctatgttttgttaattttttttccaaaaattacatttcgaattttgaattttctgcgttttttttatctaatttttcgcaatattttacaatgttttgtgatagttcaaatctgaagttgtagacgttttgtgatagttccaaatgtttcacgatgtttaactaaaaagttaaaccttttgtgtattttttacgcctcgtattaacaaatcacactcaaagcttttagttttttagacacattgtaaaaagtcaaattttatcacaaaacacaatctctaacctcaaatttgatttgcgcaaatatatcgtaaaatatcgtcacatatctcaaaaaactgaaaaattagatagatctgttaaaaacaaactacgtgcatataaacaaccaactccaatattttttagtaaatggtagtagcggtggtggtcgctgctcttggtaatagcggtggtggtggctggtagaaagagagagtaggaagggaagaagggaaaaagggaagagacacatttaggaatggaaactcaaatttcccaaaacaaataatgcagcctaaatacgcagttacccacaaactaggggcatttccatctcttgcccatagtggacaacataaaaaacaattgttaaagtaataaactcctcccatcctattccacattaacgcagtaaagcttgaaaaaaaaaaacatttcgaaattccttgagtcacaaagtacttcattgttatccagaaagaaataatgcaggtgataatgttcagaatattaccatcagatcctaaggaatgaccaattaaaagaatgaaaaaattgagatcaaaatattgcaattgcactaatttcaacgattacacaaaggggatggcaaaagtaatttcttaacaatctaacccaaaaaggatttcatcatgttggggggaatccctcaggaggtgtagacggcccaaagtctagatttgggaagacaccaggtggcctttctcggggttcgatggatagcagttggctcgagtcacccacaacgtcagcccatccataatgaggttcagccctttcattcaaaaaaaaaaaagttgacacaaatcacaattactaactgtgacgacacaagtcacccaataaccaacattacttgactaagaaaaagtcaaattcttactcgtaataagtttcttcgtcgacaacaatgtcccagctttcacctgttgtactcttcccatatttgtgcactttactgattaaaagaaaagaaaaaagcgagaagagattaccacataataagaacagtgacatttcataataatcatctaaattcatatggaaactaacgtttcatactagtaagttaatagaaacaatagtttggtttccgtacccatttccgaagtgctcttctccccatgtccttgaccaacctaaacatcagaaaggtaaaaacaagtcatcagttagaaaaaatcccagagatttgtgaaaaggttctactaagatatctatatattgacaaaaaacataacaatatagcataaaatacggatggagacaagaaagaatgctgaagtaccaataacagaaaccgccctatgtaaatcctcattaaataaagttcagaatgcatattcttgggtggttaatactaacagtgagtaacgtaatcattaatgaccatagaaaattaaaattataaatagagaatgtttcacagatcatgcaataagtattatgaagcataattaaacattattgctcgaaagaaacattattgctcgaaagtacaagaattgacatacgttcaccactgggagatacatgccatgtctctccctgtctagaaccgatgccagcaaagaacttctcttcccacttgtcaccccatttagtcccaagttcggtctcggcccatttatctgtcctgaaaaggttattaagtgaacaaaaatcagaaacattaatactgacaatataccaatttcccagtgaataattccaatgtataataggattacgcaacacaactgctaaacaaattaaaaaaactaaaaaaggaaacgaaaaaaagcagaagaaaagaggaccatttgagaacagatcctcttccatcataatgctctccccacttctcccaccatgactgttcattaagtctaccatatttatgtgctcctttctcagtccagcctttagcatcatatttctcccacctgtatccaaattttccattccatcaatattactatacctaggcgtgtcataattgctcaagtgaactgcgtacaaatgtcatcctctaaagcataagcttaccatttctcataccatccagcattttctgaacctgattttgcctgcttctgtgcactcctctcaatccttgctagattactgcaataccataatgtagtacttgcaagatcaaaaactacatagttacactggggaaaaccggaaaaaccgacaaaggagaaaatcaaatccaatcttcgagagcatggaagatcatagaacagcaagaagtaatctaaatagttacattgggcaaaaaagcaaaaacaaagtagttaatatctcaaaatgttgaaagattattaaatacagtaaacaacctccattcatcttgatgaagtacttcttgccatgtttcccaccatgaatctccttctgcatttctacctgatttctccacacctatgaaaaagataaatatcactgagaactgacttaacacaagcatgtgtgatgcaaatagataacagatttttctacatgtggtcttgggcattaaagtattttcaaatatgaaatgtatggttaacagaacgaaaaaacctaatttttcagtaataatacgctctacttctcttacataaataaaccatagtgtaaccattttagttcaatgggttcaaaatttcacgtcaattgtagttaaaaaaaagtcaaagattttatcataaaaatatatgggatgcaatattgatgcccaaatgcttgtacaaaaaggaagaaaagaggcaaaaatagatcaaatgacaaaaatagcgttatcatataaaatgccgacagaaatattgacacacaaatgcttgtacaaaagaaaagggaaaaaagaggcaaataaataaaatgataaaaataacccttacaagttcgcgttcacagtttcaatactaccaaataaatggaatataaaccagaacacatagaatgagaagcataaatacctagctctttgaatccggtccagtcacttttctcccaccactgtcaatgagatcaataaatccacattaaatgcatccacctggtgatacttaatatggtcatataatcaatgttaatgtaatgagcattagaaatgcgatggcgattgactaggtatgatgtcttattattacaggtatacatatcagcagtagatgcctacccaatctacattaagtgcattgcaaccgcttggtcataacaggaacacagcataatatcgtaagcattagagtatgatgacaattgactaatggtattcttaaaggtacacacatcggtagaactatagaacctttcatttgcacgatgaaaagaaaactggtgaatcaacaaaagttaatgcttaccacaaataaaaactaataaaggaatgtgatcttctcatattacaccaaacttttaaaagcttggattacatgaagcatgcaaattcttaaaaagacccacataaaagaagaagaaaaaagagtaaaaatgaaatgactgtttcgcattccatagagatagagagaaaacttcttccatagaagacagtttttaagtgagaatacagggaacttccttcttcaatttcatgtaacaagtcaactgtgaacttcaaaagggagtaaaatataaatataattcccttatataagctttagtgataattttacctgtgcaaaaaaattatatggaagtttaaaccaaaaactatatgcaactgaaaatccaaaatcagattaggaaacaatatcctcttcttctaggggctaggaactaagttccattgatcgtagtattttaatgttggttttatctactaacaagaaagtaactaccagttgcatttgtagactttaaaaagttagtaattatcagtttcaatttatcctctagacatttaattttgaacttgaaaatggggttagtggatgttggttctttttaaaaacaatagcttaataataccaataagacagatcaaatcataccgtttccttccattctgaagatccatcgttagattgaccacccatctttgtccatctgcatctgaacccattatctcccaagtcttctccactttctcggtaccaagtactgccatcttcatttgtaccagtctcattgacattttcgtttaacaaactaatgccccaatccttctcatttgcaataccagtgtctgcagggaaggcatcagcaagcatcaaatgaccatcaaataaatttataaatgcaaaacatgaaataagttcctagggtttaagtccaatagcatacactgatagtaattaaagtctatttctagttattttgaaatatattataaattacctcttttaggtggactgtctcgggactgtggaccagaattcctcgggctacatcgaggataatatttttcttgtttagagtcaaaacgatatctgcagtaatcacgggggataaaaaaatggaaaattgaataaagattggtcataaatcgcatcttgaaagtatctttttcagaaacatctaactaccctcgctggcaacacaaggtttacatcattgcttatgatttcacttttacaaatcttcaatgttcttcctgtggttctaaaacgaaatttataccagactgcgtttctatttaaatgaacttttagacaaaagtagcattaacattgaatactgtatgatccaaaaactaaactgatcacagattttcttcaaactagactaagtatatcgttcttgataagtaaaatacctaagatcaactaaattaaatgtaagcaagaatcccaatcatgatcatcaaaacaagaaaaagaaaagaaagatcggaacgtactgaggagaagcaaaaggcaatgcaggagaagtggcctggattcgaactctgcgaggggctttcttgagatcaaatcgccattcttcgttcttctcaacgctcttccctggcctggtcgctctcctaatcggaaccaccgagtcagaacagcaacatccgattcgactagtaactccaactcggtcaacttcaaaactaactctcttccgcttcctcaactccaaaccattgctactactccgatgcggtgaatgatgaagaaaggcgaaccgcctaagtttgaaatcgaactgagtcgcgaaacctctggaactcgccgccattaacacttttatctccacaggtcagtagaaaatgcatacaaagagaaaaaaccctaacaaaggatgagtgagtgagagagagaagaaatgttggagggcaagggaaagagaaacagtctggtgtggttgggttttagaaatttatagacagtaagagtgtttcgattgaaaggcggtggaagagagaaacagtgtttcgatttaatgatttgataaataaataataaattgaccaataggaatggaggagtgaaaatggggcgaatctatgtttgggtacatttcaggactctgtaagagtgagaggaagagagaagagagatgagagagaaaggcggtggagtggtgtggtgtggtgtggagtgagatgagatcgattcatcggcagtggctgtaaatcccgggatttgaattatacacgtgagcacgtgtgggccctattccttgatggtatgccacgtgttattatcttggccgttgatgaaattgagattgctcctatattctcatttcgatgatcagatgagtatctactggtagtagtggctgaaaataagattggttttatttgattaattaactagattaaatttattgttccatacaaaatataataaataataaataaataactagattatttggaacctgacaaaaaaataaaaattaattattggaatttatatgaaaaaaataagtacaatattgggaaaatatgaagtctatacgaaaataaatagttcatacagaaaattaataaaaataaataggattttttcatttttatacttcaaaatatatatatatatnttttttatatttttacgaaattttacataaaaatctttattgcaact

SEQ ID NO: 111302 - DNA, 3872 bp, Cannabis sativa
gagacccatgaagaaggaagaagaataacataagagagagagaaaaaatagaaaataataaatataatcaaaaagtaaaacgaagacacattttgactctcatctttatcatctttaattttaatttaatataaataaaaaacttgtcacaagtgacaatatcaatcaaatcaacactttatatataattttatctttatcattataaattttaagtaaaaaagtaaagaaaaaaataaataatattaaaaaattaaaaaaaaaaattgaaactcaattaaaagtgacagcttttgtcactataaaatatatatataaaggttttaaaaaaaaactgccatatcgtgccaaaaaagaaaagtctgccgaataaaatttaaataatatacacagtaaaaatgtaaaaattactacctgacagtatatatgtaaaaaaatgacaaaaataagtatattatgtaaattttcgaaagattatttggcccatttaaactatttggattaccttttctaattatacaacaaaataaaatgattttgattcgttctcaaattaatttagtaaacaatataataaaatattaaatttatttgtttcatactttattcccttttatttctatttcgctcattttattattttaattctgaaacgtgttcaaatacatcaatgtcaaacttcctctcctctttacctcaattcccatctattttactccatattttactttcatggatatataaagatcacaagagtaatagttttacctccactttcttctattgatcacattcacatctagtttggattttttttctttttgctttttcctttctttttttgggtgtgtttttgacagatttcctcaacaagaaagtatgatatggagggaccttcataatgttcccttggtttgcttttggccacaactccattgctcgcactctacaactagccaaaaaggccagttcttccaaatcactgttcctcatgtcggcatacctgccgaggctgagatcactattgaaatgtcttcttccttattcccattcatcatgatggtcatggatagaacagaatcccaagttgaacatctcctatgagacctcgaacccgagtttgtcatcttcaattttgttcaatggattcacaagattttacgtcctttaggaatcaaaacaacagtgactttcatgacagtcggactgatatttagagcatactacttgccaaaagcaagacaaagacaattggatgggtcttggaagagaactgtctatggaatcggcaacccctcctggcttcccaaattcatcaatcaagctccatcactacgaagcgagaggttgaccgtgtatcgactaccttgaagaattcaagaaaattgtttgtttacgagagagagagaacaaaattcaatgccaatacatgataaaaaagacaatggagagagcagaataaaccgttcatacttagaatcaatttacaattaaaactgctgttttgcttatgatcttactgtactatttctctccatctctcatctagattccctagtatcttattagagctaagtccaacatagtgtcaactacacaacgatgagatgacaaagctctaacctgatttgcttggcattaaaaaatcttccattctctaaccaaacacagcccagctgtagtagccaaacatgaattctctagtgatgagaactcatctgcagatgaattgatataggactgagacttttcaaaaggaaacacaaatatttcaattttcctcttgaactgtttatcgtttaaggagtataaataaattactaaattacttttgagtagtattaattttggtcattgaagaatttccaccatctataggagcctcagcagtgagccttcccatctttttctgcagatccgcaagtgaatcattcaacccttttcctttcggacttctctttccttcaacaagtttgagctccaatctatataatgcacatgtagtgtagttgttgatctcatattcatatagatgccattcatgagaggttgaaggctgtggatccatgtaatatgacctcttcagtcccccaaattccttcatgacttgcttccttgattcatgccaaccacgcccgttgtaatctggcaatcccctctgttttctatttccactttcaaatgcctttctaggcttatcaaaaaagagccattctctaagtttctcaccctgtaggagagaaagatcaaacagttctgcaacatggaaggagagcaattagttgaagaaaatgaaaaagaggccatgtgactgcaaactatatcggagcaataacaataaaggaaacagaaagagtgaactgcatcacagcatcacagcatcaagcagcatggtttaaatagatatgcacatgagattgtcacgaaataaagtaccaaaatggctgtttagcaagaggggattaaaaagaaaatatgctctacgttatcgacttaccaggagcattccacgggcattttgtattagcagctccttcacactctgggattcccacctcctttccctgtatcttcaaactaagagcagaaaacagcggactatccttcattccgatgccagtaggccgtaaaactggagctatgcctggaacaccttcatttaaggctaaaactgaatgacaactactgcaatagtcctggcaccatttcgatccctgtgcaggcctagaacagtcccaaagagcgcattttggccccatgaatgcagagggtggaggggaaatatcaggaagaacattgggtaaaggatcttgtccacactgatttatgctattggctccaacaataagcccttgactgaagtcttgatacatatcaaactgttgatgctccagtccagtaatcaaatttgaatcatttggcactgtctcgtgaaaatctaaaccagatcctttaagttcaggaaatccttgaaaaccatgatcttgtggttccttattatcaaagtagtcctgaaaaacagaaaagcacccatcaatcaccatttacatattgcggaggtgatataacataataatcataataagcaagctcaaatatagcacaacatctactcaagataggaatatgtatttcttttaccagttcaaacgccgagaaatttccaacatcaaagttttcaagattaagctcaggatcaggctcaggcttaggatgtgggagttcttttaatggactagttgcatcgtcctcaacatcgtattgttgcagaagtcgagctaactcttcagaaaacgatccaaggctaccaccctactcaatacaatacactacccaaattaaaacttgaatacccaataaaaattagagcctaaaagaacaatcatttagaaaattgacattgtaattgaacttagttatcagaacatacaagtaaagaagatgctggggttggctcactgagctcaactttccattctcgtagcatctgatggacctgctcctcaaaaacagctatgtccccaggtcgactgtctttcctagcggactcgagatttgaaaaaattctctgaagatcatcgacacggtgcttggtcttttccttcaaattctgatgagacacactctcacacttactcttagaatcattcaacattgatcccaatacccttggaaacctctgcaaaaccagtaagcaataatccattcaatttaaccgcccaaagttcaatatcagaaaacaaaacatgcattgagcactaaacccataattcatcaggaaaaagaaagaaaaaacaaaatccaagcaatcagtctaaatggaattcataaaagcacgtgaataaacaaatatacacaaaaaaaaaaaaaaa

SEQ ID NO: 111303 - DNA, 1511 bp, Cannabis sativa
ggtagtaaacaagaatatcagaaattctatttccggtactgtaaactattcaaaatttttaaaaaatttacagagaaaatattgtaactatattgaatacctctataaaaaatagaaaaaaaaatattttagcatgtgattttgagggtagagattgattaagatgttgcacttcttagtgtctactacacatttagtaccctgtgtctaaatataggctcggtaccatgtgtttttaataatgcttattcggtatcttatattctaaaattatacatatttgctacttaaatttaaatttttgataaaattttatcaatattaaacgtctttaatttatgaattctgaattcaaatttatttatttgattacatataactgaaaattatttgatcaaattgataaaattgtatcattaccaaataagtattgttgaaaacacagggtatcaaatatagggtgcttctacaatgcactttcttaaaaagggatgcactgatacaccctttacctgtttcgacatccagaagaattttttagtctattttttttttttcatattcgtgtatattatagttatttaaaatatcatataaaatttaagaaattcaaaataatatacaataaggaaaatagtgttcaaatatctatttcacatgcgtataaaataaaatagtcacgtgtgtaacacactatttgaattttatttttaatgtgttaaatttttttaaatttcttaaaattttacaagatattttaaataagtataacttacatgactatgagaaaaaattaattaaaaaattatttcgaatatcaaaatagataaaaaaatatatcaatatatctattttgaagagatacattataaaatttctctcacatattttttgagaaaataaagagtgttaaataaatatgttcccttattattattaatagtacatattaaccataaatggtagctagtagctaccttacaaattaagtgtaatattaatattatatattatagtactctttttacatcaacttattaagtaaaataatctttgaagttaatactctatattcttttaaggtaatactctaatttaatataagttttcttggaatgtgaaactgtggattctgtataagaactgtgatagagaatatatattattaaattttttgatgagaagagattcttttttacttaaattatttaccaaatttcacataatccaaacttgcaacaagtatctatatattttatatgctttttattccaaattttcttctaaatttaaacaaaagaaataaaatatgtcattttttgtttcttttgtataatatttttttaaccaaaagaaataaatttcataaaaactagaaaccagctaataaatcactttctttacaaaggaaccaatattttttttttgaccaaatatagtgtaacgagtcttaaaatttagtgaattataagaaaaaaattatttttaaatttttattaaaaaaaatataa

SEQ ID NO: 111304 - DNA, 1885 bp, Cannabis sativa
agatcctggtaaaataacttccaacaccttcttattcttcttctttggagcttcctgctctggtgcaatctatacttcctgtatgggtacaacctcttcaatcccttttctggcctcctggacttcatcggacgaataaaagtcgtacttaatgaaaaagcctcagtggtcaatagtggggtgttccgagcctctaaaaaaagttagagtatcttctgggccttgctcctaagttccaaggtgaaagagggtcagtagtaggattgaatgtgctgaaagctagtatagtttgtccccatgtccttttaaaagtaataatcctttaaaaatctaccatatttggacacgtccatgttcgtagtaacgggcagccatttctcctcaatttgagataagtaaaagtacccaaaacaattttacttgggctggacttcaagtcaaacatccaattgatgtcgtgggcggatgacttaccctatccttgggaagcatacaacatgaacatggcagacatgtacattatgcattaaggagttaagtgggttggacaaatgtggtaataatttgctatctccttgaaataaggatgcaatggaattatagtaccctgcttagcatgaggccccaaccacgcacaaaatccatctctaggatttgtcaccatctatatgggattagggagaaaggcctcaacttttctaaggagaccttcctcaaaaagattgcttaatatcttaaaggttaggacggatggtggtgagacccaccgagcaccccttagacctcaattgtttatgggtcgggcctcagtgtattcctcttcaacatagccccgacaagctactagaactttaccctcctcaaagataggttctccatccttattataaccaccaaaaggaagtactcaaacttcctcccccttttcctctactcctccctcaacctcaggaggattagtaggacagaccctggcctggtcctccacctcttggagttcaaagtccccattaacaatttctccttcctcagtcgaaggtgtagcttgctccacaccaactacaacaaacaaccaagcaaagtctaagtcagcctcagaagctttcctcatagtctactttgtctgtgccatcattctatgtttgggtagggctttaatatgatagtgtgccttaaactgtcacgaaaaactcaacaacagcagctcccttaatagatagagctgggcaagcttcaagcagcgttttagtaactctgggatggacaatgtacgtcgaagaagtagaaagataacacttctaacctttctttaattccctaataaacttgcatggagttgagggtgatgtttgtacaagagctggagtagatactggtcgatatggtgcttgcctcccctgttatcaccagggttcatcctcaaaaagatgggagacaagaaaatgatagttggacggatggaagattaaaaacaagtttagtatgccgaccagacagattaaagacaaaaagaagaaatttcattcaagaataaaattcccaaacccacaagttcaaaacctcaaaagatatctagaaatcttcagaatcccgcgaatgggtgaaaatgaataatttaaagtaaaagataatatgtaattagagattcagaaggtctaaacgaacactactacaaaaagggctattaccaacggtttataactatcttttatatgatttcccaacggttcctaaaaccgttggctatgtgggtgtcataaaaatgcgaaactttaaatgacagcttacaactgtggcaaaaagttactttaaatgacggttaagaaatgttgaaaaaagtcactttaaatgacggtttataaccgtggggaaagacttccgtgat

SEQ ID NO: 111305 - DNA, 2654 bp, Cannabis sativa
tagtgtccaatattgatcaaaaaactaatattgcattttttgtagtttgtttctgtcctagctgcagagatatgatatggaaacatgttctttaatcagttttgagttataacttgtgcatttcaactgcatttatacagtttatactgaattaccttatactagtttgtgagcatatttttattaatctaacttcttttatgatttttgagtttttaattaaactctcacattccatattcttattatggtagattgctgggggactatgcgacaacttactgacttgcgttgtgcgggcatgggactacaagaagcccatttttattgcaccagccatgaacacattgatgtggaccaacacttttacagaacgacatctcatggcgcttgacgagcttggaattactctcattcgtcctgtcagtaagagattagcatgtggggatcatggaaacggagcaatggctgaaccgtctttaatatactcgactgttagactctttgcagagtcacggaatcaacctggtagcagtaataggcagcaagtaccatcatgagcttgttatttgtacttattttcctttttttttttttttaaattaatcaagtgaagttctaaggcttgttctctttccctttgttttacattattcgaattctgtatgggtctgtaaaagaacacaacccatttatggatcatatatatttatatatgtattacccttgcaatttatgctttatgaacttcatttgaagtattgtttgtgtatatgattcttttaaatatttgaacgtgctatcagtgtacctactatggatagctctcccacaacgaagttcgttatagatttttcatgagacctttgcttctaaaaacttcttgtatttcaaagattgtaagatttggaggactgctagcaaaactaggaagccattattggcttcttaaaaataagcttatgcttcttatgaataattttaggcatatatgtgagttcaaagatgttcctttctcgaatttgattagatattggaactattttatgtaacttttatttgatttcttcctgtaatattttgcttactatgatggtggtttgatgccacacttgtatttattaagattcatgtaacaatacaagattggttgttctgtttcaaaaacaaaaaattaagatatattggatttttcatataggttatggcatcaatatctgttgctacagtaggggagccactgccggttactggtccaagaaggtctcgggttttactggctgcgagtggaagtgttgcagccatgcagtttggtgctctatgccattactttgtagaatgggcagatgtagcagcagtggttacagcagcggctttacgcttcattgataaagattcacttcccatgaatatggtgctatacactgatcagtatgaacagaccatgtggaaaaaattgggcgatagcgttctccacattgagcttagttgttgggctgatgtcctggtcattgccccagcatcagcaaatacactaggcaaggtaacaaatgacaatcagtaaagatgcagttagttcaatcttaatatgttttgaagtttatagtagcattctcttatactttgacattattttactagcaattagctctgaaatgtatgttgcttgctcaaattgtggcttttatatgttcaaattttttagtaccaaggaaaagacagtgacagaaaaagggtttatcaattttgtttcaagctgtttcatgcatatggctgaataaatttcatgtggggtatttgagttatcttttggcatagcaaattttctagatgatgatgatcaagttggcaatttgcttggccattttccttggcattgcaaaggctaagcattaggcgctttgcattttaagtagcttgtgtctatcctagttgcagagataagattgagaaatattagtatcagttttgagttataacttgtgatcatgtctttatttatatttcttttattattttagtgtttctaattatactcacattccatatccttacatggtagatttctatgggactatgtgacaacctactgacttgcattgtgcgggcatgggactacaagaaaggactttttgttgcaccagccatggacaccttgatgtggacgaattctttcatggaaaaacatttaaccgatgttgacgaccttggaatagttcttattcctcctgacacagagaggtcagtatgtggtgaacgtggaaagggagcaatggccgagccttctgatatcgacaccgctattagagtctttttggagccaccgagttctgattcgggtagcagtaatgggatggaagaacaatcgtgagctttttcattggaaggaactaacaccagagtttaaatttgtgcatacagcattcatttcataattgcttttgagggctaaagcctttgatatattggatttgggtgtatatgggttctgatgattaggctaattatacgtctagaagtagtttaggattacctgttttggctttgtacatatgcaacattcagaattgtttggtgcatacatgggacttgctttaggtatgttgacaaggctaactgtacgtctagtcgtagttttaggattacaatttttg

SEQ ID NO: 111306 - DNA, 4056 bp, Cannabis sativa
  modified_base (45)..(47): a, c, t, g, unknown or other
gcatttttatttttcaaaattaaattttttaaaaacaaaaatttnnntttcattttgtgattaaaaaattgaaaaacaaaagtattaccaaacggcaccaaaattaatatttatcatctttgtgagggctttcttggtaaaaggaaattttaaacctgaagaaacagaaaaattgtaatgaaaattacttaaaatcaggtgagatggcacagagcactgtaagcttagaattgccaccaagtgattctcgcaataaatgcgttaagcaggaactcttgtataaggcatcttcaggttttccaggctgaggaccctttgctagtgtattaaccaaatgtctgcaatcaaatcaaacaggggtgatcacaaagatgttgcagctataaaatgaaaaggttatttatttaattatttgatcttttggcctaaaagaataggatacctaaaatacgcgaagcttatttcactattatttacaagaataatcttgtgaaactagtgttcatgttgccgcacactactgaaacacaatttctgtaagtactacatgctatcattctagaatactaaataaaccacataatcgtacccaaggcgtgacaaggacttctttacgctttttgcttcccttgcacttcctctaacatcatctttgtttctatccaaaccggcaaggtcaacaaagctcattctgcttgtctttgaactgccaaaacactttgatgaggtaccctgttgcgtaatttatatcatggttagtaacagaataggtacaaaagacacaagtgccggtaaatttataactctagtagttgttaaaaggaaatcatgaaaataaattgtaacataaaccaaatgaataatcaaacgttgtgttcttatgaacaacaagaagttttcacaaaacaattgtttccatttatgagtgagagcaaaccccattttatcataccttactccaggactcgacgataaaagtgaaaacaatatgggacctcgagctcttggaattcacactagttgctccaacttttctacttgagagaccctgcatattcaagagaaaacttaagagcatactacgattgcaatgcattattactgcattgcataaaatgaaaataataaatttaagagcatactacgactacaatgcataattattactgcattgcatagaatgaaaataataaattaccttaataagtatttgcatcacgtcctcgtagctagtcacgtattcttctgtcaaattctcaacacagagtccgttctttgaatcatccttaatctagaacagtgcagacaaaatccatattactatttgacttggtaagttatgaaccaaaatgaaattagagaaggagaaaacaagatcaacaaatcatatcatttatatttttcaagacctcaaggttccgctgggttggatcaagcaaatcccctatttgctcattatatatctgtaatttgttaaaacaaaaacattattaatatagcaaaattttatattctcattccattccgtaagagataaataagaatgtctacctcaaggaaagagcaacggaattgaaaatttgtctgtattccctccgaattattttgctcctaccatggcacaaataaaaccaaacatactaattagttaaatttcgtcaaaattatttcatccttcatcaatttcaatagcaagaaccagtaatgtatcttactttgtctgtctcagtgaatagtgtctggaagatgcgtggaacgacaccctgctgactacaaggagacgggtcatcaacaatggcactcggagggccccacattgtgtatgtctttccactaccactctgatgaaaaacccagaaaattattactcagctacagaaagttcaagtcggatacaaagtaattttcaaatacctgtccataagacacaatggaagtgttgtaccctgctaaagcactctttaccaatggggcaccgatacattggaagacatcttcctgtaaagagccataaaaggaaaagcagttaacatgaatttatccttgaatttcataaacaaatcaagaatcgtataaagttattcaaagtagcatcatattaaacattcatacctagtactactgcatgttgtatgtcattacataatttagctagtgaaatgttagttctttattttgcttatgactacccttttaatccaatatccaacatcaaaatttatatctatttgcactccccgtaagttttaattgctagggtgaacgtcttaatttccaaaattctttctcattattcaaatctaagattttatattcacagtcctgtccttttcatatgtagtataccttatttgatcagttgtcccaaatttctagtacttctacaagttcccttacataattatgagtaaaactcatattacttcatctcttatccggataattacaacccaaaacctccttgggcaaaactaaagtacctgattattttttgagtcgaagactgaatcaaatgtatatttcctgtctccaaccgtcagtgcatttggggaaaccttacttacagttcgatctcttcctcggtcaccatcattagaaggtctaattctcactacaacctaagcaaaaataaagatcacaaaatcaatcaaaaatcacagcacaaaaaaaaaagaactccgcggagtctttaatattttacaactttcaataccttcacgggcgactctgcatccatagacgctcgcttctgagcatctgttgtaacgatctccgtctgagaatttgtaacatctttcgacggtagctgcttaaccaccaaagaggaagcttgactgttaccgtggtcaatgatgttaggatctataggcggtgtgttttcggcattagatttggacttacgaacatcggaatttgagtgcttcttcttagagaaggatgcggatgaggacatcgatctcggaagcaggtttcggatcgaagaagccgatatggtcccgaataaccgaggctccattgtactttctgcgatgttactacgcctcattgtcaagattcaagaacaaagagagagaagagagagagagttgtacagagtttttgaaattcgaaattttgggggaagtgacgaaggaatggaccgttacagtttgatcatctgattttaaacttggttttattaaattattgatacctaaatgaccaaaataccccttggtttgtaaaatgacttatttattactttgacgggcatacgcatttgggctccccatcatttcctaattaaggcatattagtcagatgcgagggcagatttagtcaatggacaatattcaaataactagccgttaccttacggaacagtgaggaaaataaaaaataaattttgtggatccaaactaaagtggcattgtctctacccataagaaaaaaaaaagtggcatagtctctttctcaaacactagacaattttgggtttcaaaaaaaaaaaaaaaacagctaatttctattttttttttttttttcttgaaaggtgattgcaacttccattaaaataaagtgatgtttgatttggtgtaatagaaatgtaatggtaatggtaatagtaatagtaatataatggaataggaatcctaatggtaattaattacaatatttggtttgtggttggaatgagtattgtaattaaaattattgtgtttggtttggtttggtgtgagaatgtaatgcaataaaatgtatattaaccaaaatattcctattatttttattttttataattataaaatatttaaataaaaggtaaaatagacttttgaattttttttagaggagttctagggacactctctatcatactctcttttgcactctctacttaatttaatgataaatgtcatctttttaataaggttaaattttacttaataactagtcataatattatccttttattataactatgccattctcactaatttactcaaataatttttgacttattgtaaattaaatattttaaagaaagcaagtcataataaaaagaaataaataaat

SEQ ID NO: 111307 - DNA, 4419 bp, Cannabis sativa
  modified_base (2595)..(2596): a, c, t, g, unknown or other
gttaaaccaagaaatgccgttagatagacacttttaatatataaagatatatattaggatttggcatggttgggcaccagctgatgccagcaatttcattctggcagctttaagcgtattgttgtagtaagactatttaaaaagcttaaccaatcacaatcatgttagacagaccagactgtaaagacaaagaaagtctccactctacattaaatacagatacatatacatattcattgaccaaaattcattacttaaagggaaaaaaaaagatcaaaattgaaagcatattcagacgtagagtttgggaagatagtgtacaagcaaaaaaagaaaacatagtcaagacatccggttgatgagttgagctgcttttacaccagaccatgtatggcttaaaaggcaagtcaaatgagaaagttttgacttcttactaggtttttttttccctttttcacttgcccaaactcaaatggggttgtgtaactttgatcctcccaaagaaaatattggtatttaagcattactgcaaattctattttgatcataactcaaaaatggctaaaccgctagctctttttggtgggtggattcatcttcattgaagcaacaatggctcttaataataggattattaggagtgtctagaggagactgaataagtaacatttctttttgtaggtaagaacagtaggtttggaaggttgtaggtgtcacgtttaactgaaatcttaaaccaaacaagaagtccacctcaagtaggttcatctctgctgtgcttattcctccaactttagcaaagtaggcattattgtaatacctattaaaaaacatgattaaatgtgtgcataataaaggtcaagctgttccatatatatacattaaaaacattcaatataaattaaagaaagtttgtactaaaacagataaattgtacagctaaaatgacagctgccactcttgtaaagtaaggccagtcaaaccataagaaagagtgttcatagaagataagtgttttaatgccaatcactgagttggaaatgcaagttggcaaagaagtttatttttggggcagagaacaaatggcttgattggactgcatctcattttcttttcactgccatatgcttgtatttttccactcattttagtttaaaattaattggcataccataccaggcagagacagcaagactgcatcacagagaagttgtctaaaatttaaaaaggacttttctcactctcacatgtagtaatttacgtggttgatttccaccattgatgtcattacaattatgactaatattgttgcttgaaaaaccactcgaggctagctcaagtggccatagggagtgcgtgtgtattggaggtcctgggttcgagtcccaagttatactgtaatatataaacgtttaaatcaaaaaaaaaaaaaaaaatattgttgcttgaaaaaaataagagcattttctcaaattatgagtgttcaaagttctaatttcactcaaaggtatagccttttgggatttataattttttaaaatgatgtcagactcactaagagaggaaaataagtgtcactactataaaatgatcatcaaaatcactagcaaaaataacaaaagggagctctagtagtgaaacaaaaagatcccattttccagaaaaagaaaagagatatatcagatcttgtaatatcaaattaaaagaaaaaaaaaaaaaactcaacaaacacacacaattgtacataaaacagatatattattaaacaagcatatatagaaacagagtaaagaaaacacaaaaattaaaaaagaaggataagaatttgaatgtagtacttacaaatcgtccatgaacttggcggagaccatgacactggtgatgagcaagcgatgaacattaaaggagttaatgggcaacaatggctgacactgagtaaaacgatcaagataaacataagcaacgacgaagcaagaagggctacaattggcgtacttgaagatcctctgaaggtaggtgtggatggaaatggtgggtcgggtaaggccatggaagatcgagatcttttgggagtggaatggccgattcaagtcgtttgactcggcaactcgctccagtagagaggagagaaacgttagaactgtgggcatcattagtgagtcttgagtagtgtccagctctgcttctgccatggatgaggatgaaatgaatgaagttgtgttgttttgtttgaattgaagcttcgttttgtgttttggttgtttctttctaataaataaagactctcttctctggtgctttttatttcttccactgtgtatgtattacgtgtgtgttgtcaaaccttaacctttaagccaacctgtaattatatttatttacgagcattgctattaggcacagtgagtggtgatcagggccgtctcaaatattttgaaagtcctgttctaattttaaaaagtaggtccctaacaaaaaaaatttataatttgtaaataatatttttaaatattatcatattacaaaaatatattttacataactaagcatccaaaaatttaaacaattttattaaaattgttgttatttctaatnnaacttcaagctaatatcaaatattgtgggaaaaaaatttgaaacacattaaataagaaaacaaaattaaggaaaaacctttttttagtggaagattgagttaaaaaaaatcttaaaaagttatattgggcctttttaatatgtgggccctgtacattagcactccttgcacgggttaatggccggccctggtggtgcctagcactttctcgacatgtcacgttacgattggctagcgatacttcctaaaatctatcatattaaattatgtatgacctaatacttagttggactaatagcaatattacacataggagggtgctaagtgcggtttagtgtttatctttatttattattaaggattattattttaggggaaaagaaatatggattaagggaaattagttagtcaatcattaataataactaggctgcaatgtaattaaggtgctgtctgtttctggtataagagagacgatttgatcaaaatcaaaatctcatcatactttttctgttttctttttttagaaaaatatatattcgtctatgtttagaagttaaattttaggaagaaacaaaagataagaaaatataaaaataaaaataaaaaaatgtgaagaataaaatatatatcaatttttgaagttaatttaaattgaaattttttgttaaatggagtgtttttttatataatttttttttttttttgaaataagtgggggtgcatcatcaatacacttttattaaggtattgcattgtaaaattttctaatatatttttaatatttaacattaaatggaggttttagggcttatggcaatatttttttttttgcatatatgatatataattatgaaaaattctacaacattccttacaagagatgcacgaagtaccctctatcttattttttgatatccgaaagaaatttttaatccgatttttcttcatggtcatgtacgttgtagttattaattgagacattgtgtaaaatcttgagaaattcagaaaaatttaactcgttgaaaataggattcaaacggtttattgcatgtgagaagctaataaactatttgaacattgatttctatattataaattattttaaacttttcaaaattttgaaggatgacttaaataaatactataacgtatacgattataaaaaaaattagactaaaaaattctcttgaataccgaaacatatcaagggtgtatcggtgtaccctttttatgaagtgcattgtaaaagcaccctataattataaggactacatttctttggttaagtctatatcacatccacataaggggtggtttgatagactgtttatctgtttcgacaactataagagccttttaatctaagtttttctatgattgtgtatgctatagttaaataggattaccaataaatttttataaattttgagtagtgtacaatgccgaaaataatgtttgaatattttgttgtacacgcgactgttttttcttatacgtgtggtaagtaactatttgaaccttataatttttggtaagttaaactatttaaaatcttttgaaaaaaaaaatgatcctatatagctataatacacccaattatgattaaaaaatgtactaaaaaacttttgtagattcctaaagacggtctactaaaatacctctttagatggtatactacagaaatttcctattttttttattattgaataatattgttaagtaattagtttggataaatagcggcataagtatccaaagttttaagtttgtaagtgacataaactcaatgtttatttttagcagcataagtacccaatgtt

SEQ ID NO: 111308 - DNA, 5347 bp, Cannabis sativa
taaattatgagaatcaatataaacataaatatttttatatacacttaagtggattctgaacccttaataatatcttcaaatatcactgaaaaatatatttttaacgtttaaacactttattttaatttgttactaaaaacctaccatttttggaactaggttagagttttattagttagattaaataagtattttcttcaatttcacgcaattcccatggatttgacctcgttcttcacaatctccatactacaataaaaattcgtaaacttgcgagttgataaatgtaaaacgtactactttcggtacacaacacttggttaattttttttagtcaactggcattttctgttattcagttacaaatcagttagctcttcctacttattctagagctatataaatgtagcttcatgtatttggtaattgatcatcaataataacagagactctgttttttctctcttcttcttctttcacactaataaaattaaaagtcaataaaatcatttaaattttataaacaataaataaaaatattattaaataaatataatattaaatactttgaattaatttcaataacattaattagtcgcaaaagaataaatataaaaaaagtaattgttatttaagtataaattttatattttgtgtcaaattcaaccttttagtataccgaatttaacatattttgcattacagatggagcatcattttgtcaaaatatgcaaaaatttagttatacactacatttatagcactttattggaaatattgtagcacaacatgcaatcaagattaatggttgggtaagttggatgggaacttgtactagatatgtaggcaatatatgtcgataaaggtgtaacatcttccatctaaaaacactattctaataactagtaaagtgatgaaactaaaatatgttagtgttaatctttatcctttaataagcattttgtactaaaaacatgtgaaagtatttacatcacatgcaatatccactcacacataagttcatatacatgtacctaaaggaaaaaaaaacgttctttagttcaaatttggctcatgaactaccttttattttatttttctcctccatcacctgcatcacaagaactaaatgagtataatcctaccatcaagcaattttatttacccgtaatatctttgagaaagtttattacatttacaataacaacaaacatggtgggtattctttcttttatgtgtgtgtgtgggcgtgtgcgactaaaacaccatttgaagtacacaattccctaccacgtcccttgtcccgattcaatcgcaaaataggaaccacattacacaaacttcgttctttgaaaccataccttgtaagttgtaagcacttatgcataggatatagatagcttatgaagattaagttgatcatatatttattcaatatcatataagaccttatacataatattcttgtacactgaaagtgggattccacataccttgtatcttagaaataaaaaatgtgaaagatatcccccactccaaaatgcttgatgcgccttaaacctagtcatgtaagtcaatttctgttagtttactctctcaaggatcatcatgaagaatacaattaacatgatatcactagcaaaaactaaagtagaactacactttatgaagccacatacctcgaggttggactaaattctttcaagcattttcttcagctaagatagctttggctgcctcttgattaaatgttttgcaaaggattatataacttttctcaattcccacctgcacaattagttacttcattttaaaacataaccaagaaaacattctcaatagaattcctaaaaagatttattaaatcccttaccagtggctcaattcttgatggtgacgtcattgataacatatatctgtagaaaaataataaatataataataaagctaaccaattgagatcagggattaaggacttaaagttaataaacaaaaaatgggtgataactgtgtaacaaaatgtaaaagcattgtcgaggtctggcaatttcaaacacttggtagtacccaaaaactactccttcaaagagtgtttacatacagcaaaatacagttttctacttcatctgaatattcagtttggtaagtttcttacaaaaggccataagcatacatcttttataatttcaaacacttggtagtaccctaaaactactcctttaaaaactgtttacgtacaacgaaatacagtttttcattccatctgcatattcagtttgttaagtttcttacagaagggcacatacatacatatatacagatattttgtacacatgcttagcattgtagcatatattattcctcaaatacttcacaacggtccttaaaagtacaaggcaaaagtttttttatttgtttataatctcttctattttctgggttggatgggtaggtatagatggctttagtagagaaactgacatcctggaccttcaaggcagaagaccctcacctgttatctcacctggctggtgcacattgtgcaaacagcattaagaaacaccagataatttgtttctacatggtaaatttagggttaaactaataaaggaatctagcttttgtcagtgcacctctcctcatttcacagatttattgactttccacgaaaaggaggcaaagataaacaaattgggtaactgcagtaaaggcctactttctggacttcgtggaaggaaagaaacaatagattctttgaagatggagagagaactgttaactacatttgggataagattaagcagtgggtagccatttgatcatatgatgttaaatatttcaagggtacctctttctatgatttcatcagagactggcagtttatttgtagcagttagtaaatttttctgtttttttatttttgttgtggccactattttatatgaaattttgtcactcacttttgcttttcctggtatttagtcccattatgttaatacaagtctgaggtttatgaaaaagtagtggagaacaaaccatgggtaaaagctataacattgacacaatacacaaaagcaattaattttgtcattcaacccattctattcacagatagaaaatactgtttgaaaaagaaaagaaaaaaaaaaccttaaaacactagtgtagaaatttatagcaccgaagttcgatttctgaacagtcagcatcacagcacccatatcgctctacagaagaaggatatgttttattagtgcctaaattccgcaataaacaatttgcatgttatgtcattaaaaaaacaaacaagggaaatacaggttatacaatctctaatattaactataaattagaaactgcaaatgttaaaacattctattttggtataaagttctcgaaaaagtttccttccgcaaactaaagttctttccataaagtaacatcataaaaatggaaggaaaacaaaagcaccttttgagcaatattctcaagtaattgcatcaagaactttcctagtcccatgcctcgcacacgagcttccagctgcagttcataaacataaagaaccggtatgccttcctccctgacaaatcgaaaatgagcaaatccaaccatagtccccctatctaccagacaattagttatagtccttttcccatcagaggtttttgatgtctcacaaggacttccatttggaacctcgtaaacaaatatatatcgtgcttcaggtgcagccatttccctgcgcttaaccttttcttccaatggccactgagaaccatagtgtctttccatattgacctgtagatattcaagaacttagcaaactgaatcgcctagaccaaaaagaaaaacaaacaaaaggaagaatatcacaaagcaccatccatactataatttgaaaaacaattaaaagaagccatcttaatgtaataccttgagtaggttttggatgtatttcttcacaggagcggagagcttatcaccacgtccagattccaaatacatagacatgcctaaaaaggttggataaataacaatagttagctgataaaatgcggtagtgataagacaaagaacacacatttatcacagtgccaagcggagtaaccattgaatgaaaaatggaattgaagccaaagactgaattactgataaacttcatttctaaacagtgtcaagaactcagaaaatgttgaaaagaacatgaaacgtttatattagagagcaaaacacaacaaacagcccaaaagatatgacacaaataaatttaacttcatacaataagcaaattaaggctagcatttattagttaagattcaagggttatgtgatatgtgtgtgtgtgggaggtgaagagagaggatgagtttaaatctgttacagcttggatagaactcacttctgaaacactagccagaacggtgctcaagaagtatgaaatatgaattcttaatctaaaggacaaaatctttaaaaagatatatattaatggaggaagaaccttaccatgcctgctgtaaaaccgaaaagcagggaaagccgataaagggtccttatgggcagaggcagctttaatcacatcatcaatggccttcttcttctcaagaatctgcctagtgcatacccacactcattacacaaactctgccatttttgaaaacaaagatggtacatttatagatgaaaataaataaatacagatagtaaacccagaaattatgtacctctgtacgcttagtcttaacaatagtgtcggttgatttattgtcgacatagttgcgaaagcttcgagagatcccctcacactccattactgacaagtgaggttggataatttgattgtgattctttagagaaaatgattttttccaaagaaaaatttgaaatgctggattggggttggaaaataacgaagaaagtagaatccgatggctagctatggtgatcaacgattaaggaagttttctctttccaaccaaaaactccacacaccgatcaattatgctcaacacacacattcacctaagcaagctccccaaatcattttattttttataatagaaatcattttaatatttcaaaaaaaaaattaataatttttctaatatttttttcaagtatgtgtttcgaatatattaaagcttgaatctctcctgttttttttttctatgaataaatgcaggtttgttgaaaataatattttttagggtaaatattattttgtactctgtgttttacgaaagttatagatttgaccttatattttgttaaatgataaaataaaccttgtatttttaaaatggtaaaaatagaaccctgagcttaatttttgaatttttttttt

SEQ ID NO: 111309 - DNA, 2856 bp, Cannabis sativa
tttgttttagtacaaaatgttaagagaaaaaaaaccaatagaaagtttgagcaaagctataaaataattaagttaattagatacatatcaattgttatacaaattatagatgtatcctaaattatatacaaaagataatctgatactacatattagaaaatcaataaaccaaatgcaaaatttatatataatttagaacagaataataattagataataattatgtatacatacatgattgatccataacaattatctcaaatttggtactgcaatactatttactaagttttcttccctagacctagatatctaaattcaattttatttttcagattatcaaaagcttacaattgtgatgagacagtgtatatttgtagagttaagaatgacacttaactacaaaactatagttgaactgagcttgctcatcaaagttttagtaaattaaaaaagtctacactatttcaactaaactttacacaaatagatactaagcccattaactattgatcattaacaatataggttaatagagcaaagaattatccaacaacccaagttttaataaaaacaatagaagttaatgtaagtccaaataaaaagtcactgaagacaaaaaaaccagcaaatacactcaaatttcagacttagaacatcaaccagccactgagttggtcattgtagtgtaatgagacaagtcatatacaatattggctctagtatcaccattacagtaccttgaaggatcaacacctagggtgatggctgccagattataaatagcctgtgagaaagaaaaaatagcacagattacaaagagaaatgaagatggttgtaattcatatgcagaggttagtttcttgcacacacaaaaattaaaaaagaaaatctattgtttccatcaaaagaattaaagttgaatatatgtccttataatattagataccaatctactaaaggagtaaaaaggatagtaaaatttacaggatcaggcttcttgcgagggacaacatctccagcaaatatcttgatcttctctgctctctctggtccgagtaagaaacttactattgcagagaccttaaatcaatggatagttaagaatcatggtcaaatagttgaaagactgatgagctaagttatgttaaagaatcaattgctcagaacacatcaatgtactaaattatacaaaacaatatgaaatacttgtaaatgacatttcataatagtgtgattaaaagctaaaaaaactggcagtttagatcatagtaagtacttattcccttcatagtaaaaattaaatctcaagtggaagcatatgacttgcaacgaaaaatatgaactttaagacccaataaagcataccgccttttcattagatgtgctgcatacagcaactttgacaccttctgcaaaagcttgatcaaccagcctgtaaaattttattagaaaatctcaataacccaattgaaaattataatcaagttggctcccaaaagccaaaccacttatttcaaacacatgaggaagacttcaccaaattgtgattccatcaatgagtattgatgactatctaacttgtgtcattaagctcttccaagattgaatttcaaacaaaatatgaattttatttaaacacttaatagaaggtcaggtaggaaccaacttagctacgccgggtcgaagaggcagtagttttttctcaataagggccatgaacaactcggtctttctcttgtgaagtgaagcaatgaattcctttctctcttcttcactcttgggagctttttctggccaacctgtcttgttgaagtaggcagtcattctacaagaaccacaatcaattcattactactaatttaactcaaagttacattaacatatgaaaatgacttgaggaagacccttccttacctctctttcccacctccaatcttgagcagctccccatacaaatcaacatcccaagtaacacccaatcctttctgcacaatgaatcccattattatatacctttaatccatgcaagtcaatattcccatctcctaaatttccaatctaatcaaaacccaaaaaaaaaaagagattgtctaacatctcttctttgttctttcccaacattttccaagctaccaagcaaaattctcactaagtttcacaatattaacaaaacaaaagactcatattctgaaagaagtataatgagagtagcattaagcttcttctaatttcacaatatatttttttggttacctcattgaaagtgtcattgaaagaaatacggtggccatctttctcagtgtcaacaaggactccatcacagtcaaataaaagggcagagggaagaggtgaagaagaagaagaagaagctgagcaagtgatcttagttgtaaaagaagaggcttttcctctggttgtggtcaatgttgttggtcttattagactggtacccaatatagaatgtgataaggtcttatcatggggtttgaggctggcaatggaagatgtcttttggtgagaaagcaaagcttttgaagaagatattgtggctaaggaaagagatatggacgccattgcaaaacctccaaccgtcgaaagagcttcactctgttttttagtctttattttgtaacggtcggacccaacttatccactaccgtccacaattccacgttcacatatttcctctcctttttgggccttcgtgggctacaatatgttgggttttgtacatatttaagcccacttagtttatttttttggagggaaatttaagaaacttacaaaaatattggaatttgggtgaacttttacaaaaatactgtcacatagaaattttttcaaaaatactgt

SEQ ID NO: 111310 - DNA, 7831 bp, Cannabis sativa
  modified_base (7615)..(7615): a, c, t, g, unknown or other
  modified_base (7714)..(7714): a, c, t, g, unknown or other
acacacacattttgcataatatgaatttggctccaaaacgacaacgaaaggagttgatgacaacaaaaacgattatgtttgctttgagaaatttcttagaaggatcttagaaagagtggtttgtaaatcggtgaaaactgtgtgctcatgtcagaaataacatcataattaataatccaaaattgcttcattgttaatcccagagatgaacaaactatctccaaaaccaaaattgaggaaactccttggtcttcatcgttatcaccgagatttttcttgcataaaaacatgcttccaagaaatgaggatgaggcatttacagctttgatgtttgaaaatgtcgacggaagcaaataacaatttcaaaattgaaacgcaaagccaaggaatttattgaattaaaaactaagtcggctggcattaactatgtccggaaatgaagaatcattatgttaagcaaaatctatcataatcgtctgtaaaggcttattgtgcagaacatgaccaattcaatgttatatcttctaattacttttctttaacatgaattgtaaaggtgatgtaaacaacaatgccaaaattgaccctcaaacctgaggaatttggaggaatataacaaaatctaatgacacactactataaatacataactaataaatgaagttatgacaaaattgaaactctttctctttcatgtgttaaggcttgacactctttcatgtattccatcaactccactatcacggtagtaatttataggcacggcacattatatgatccactgcatgcaaacaaaaatcaacagaaaattcatcagaagaggaaaatgaatgaacaaagaagcaatatacatgtgaatatttgcaggaaattaccttgccccagctgatgaacaatcaaaggtgatatgcgagtacagaaaagagaagtcaacttcacttcctcctcttcctgccttttcctagttgtccagaattgaaagcatgttgttgttcttcaaggaaagctttcactttgtgatacttctcagttctttcttctgccatcagtgccttctcctttgccttaacctcgtgtaagaaataattgtccttacggagttctcgaatagcccctttagattcttcttttaaaagtttcttcaactttttcatctcggccctttcacggtctggatcataatctctaccctttacaaatctgcagaacaacaagaccaattcaatactcaattccaaccatccagtctaagtaatacatgccataacaaaagaaagtaaaattaagttacccttcttcgaatttgggtgtaagcattctgataggcactggcttttgtttccgcatttgaagaggttgtcttgatatgtaacattcatgaactttagtcgtgatgagctcagcaacatcttcaatcttatcttgcaatagaccaactatgttttcttgctgtgccacttcacgtagcaacatcgaaaatgggaaaaaattttcaggaaaagaactcaagtcttcatatatgttgacatatccttgcagagtttcaacagctgtcatcaatatactagtcctgcaaattgcaataaaagaaacaaaacgtagcaaatattaataatggaagttgatgttactgcgaaaaataccataaaatcaaatcaaaacagtaccaatgtgtatcctcattaaagcaatttcgagagcacccaaaattgctataaattggacagtccgcacaaaatatgaactaattgagaaaaccttattaagtactaacctaaaactgtcagtgtcaaaaaaggaagagtcctctggcaggtccaatatagtgaagaaattcagtggcttgatctcatttacatgtccacgtatagaaagcaggggcttgagctcatttatttccataagataatagtactgcgacaataaatcaaaagagatgaaaaagttatttaaatgccaaaacaaactacgcatagactggaattacttcatatgatatcagcaattgaccatagattcatatattactcataataggttatcctatacatctacaaattacataatgtataacgaaaacaatcttacttgagtatcctgatatgacatgggtttttcatctttcgctgccatcagcagcattcgcagaaacccaattgcttcaggacagaacttcttagattgtttagcaacctgcatcatgaattacttaattatagagtctgcaattttattttttatgcttttgctgaacaaatagagcctgcaattgctaaatgaaatgactcacgacccaaggaaatccatatgcacgtgtcacatgaacatttataataatagaaaatgcttcattaaataaattaaatgaacaagttgaaaagtatatatatagaatgaaaacatacagagaaaagcattgagcaaatgaaagagccaactgcaatgtcacgaccagacacaatggggcaacgcataagatattcacacatcagtagtatagctggagtcatgaccacatgacggaagtcggaacagggaaatattagagaccaaagcctcaaaagaattaaagtcttcgaagaaggccagcaactattttctgtaaggataaagcaaatcagaccatgtgataagacagcagctacacaatcattaagtgatcaactttctgagagaaataaataaaagaccatctaatagcatcatggccaacctgggttcttgataatctcacaaaattgtgttcgagttcgtaaaattctttgacgagcacatattgcagcaaagtaaggaatctccacactcatttccatcaatggcttcaccaacaaatccagcaagtcaatattcaatggtcttttattccccagtacagcaaaatactgcagcaacacaccataaaacacctgaaaattgcacagaagtacaggtaagagctaagaaaataccactacggcaatagccaatatacttaggcaaaaattcttcaaatatgcaattgatcaaaatatatatgtttaaaagtctcatacttgcatcttcttccgattttctgctgcaagcttgattgcattgctcactcgaatgcgattgattatcaacattatgtcactattagaacaattatccaataatgcagagaattcttccaaggactttggagcttcaattaaataaggaatatctaaccgagtatcggactttttttcatcagcatccttttttctggagcccaaggaatctttatgtctttcacttgttttaacagacagaatgtcctgtgatttatttgaatctcttggttccactaccttcttgttaccaacatcatcctcatcactctcttcaccatcctcttcctcatcatcttctgccccatgtaactcagtttcaacattatcatcatcactctgttcccagtccttgatagatggattcttatcactatcttcgtcagacccttcactgccattttcagaactctctgaatcctcagaagaatcgccttcttcattctcatcatctctttcttcaagaatctcatcaacccaaccccttttctttgacttaggctcttcatcaagcaaaaaggaatcaccaagatcatcaccggatattgctcttggcctctgagtagatggcttctcagcatcctcatcctcttcatcactagagccatcggtggcaagcatcctcttctgtctttcttcctgtacataattacattgtacattatacataattacaatattgaatttcatcttcctgtaagttgaatttaagttgttcacaacaaacattatacataactacaatattatataccattctagaaagaattataaattgtaagatactaaattgaatatcatctttctgaacaagaaaggcaatggtaattaattaaactctacataatgacacagcaagctaagtacacggcaggtgcatttataaataagatgtttgctagaaaaaaatggaataataacttttaacatactaatctaaattgattctttcagaaaaagaatatatgacccgtaattaaaatataaataataaaacataaattttccaacaaaagtaagcatttactaaaccactgcatataaaagacttggtccaacaatctttagcaagcacgtcccattcataaatgaaagcaacaaaagagcagatcaggtacctctaattgctctaatctttctctctcctcctgggctatctcctcaggtgtttttgtcctatctgacggacgagcacgcatttccaatgccatttctttaaccattttgtcatatatatcaggcttttcctgataccaaaatgtataagtaaattgtttcagtttcccataataaaagttccagatgtaaactactagcaaattgaagctatacaattctttttattaaaaataaaggatgaagaaatatactagtaagtaaacaaagagacattagaccttggggaagtacctaaccaaccaaaacgcaaatgatgcaacttgcaggttgaaatttaaaaataatagttataattgagtacagaattttcaacattatataatagtactgaagacaaaggttcatttaagaatgaatagcacaaacctaacaggtaaaagttgtcactagacataaaaaagatcttgtatttaaacagcagacctgattagaaaaatcccattttgtagtggtagaacaatcatccctcgtcacttggtcactcggaatgctctttttcacaagagactttaaagcattcatcttcccaggatcagtaagagatgataaggcttttgattgcaccaaggatgtgaagtttttgtccaactcttccatcaaatgttcattttcttccttatcttttgctttttgtgcctatgaaaagataatgaaataaacagagcaaaagaaatactattaaaggtcagaaaaaaaacacactcaacattacatcaagaattcaaaattggtgaagaaaaaaatatccaccttgaaatatttgctctttgatatgatctcctccatcacttccttcttggttttgtgtttctatggcaagaaagtaataatcaagtgaaaatatcagacatacatccttcacagataaaaacacaccaatgattgggaataaaaagaataaaagacaaattaagcaataaggatcaccaatatagagtaataacactccaaatcgcaatggggtgcacatagttttgaaaaccaaaaaggttaagcggaggaatgtttatgagcctcaaaagtttaaaatgttaagatagtaacaaaaaaaaatgcttacattttcaccaccatcacttcccctttccatgatattcttttcaaatccagctgaatcttctgcatagaaaaaagcacgcaacttcagctccattagcatagttgttctaaataagctagagcaatttaagctgtacaaaataacatatcataaaactatgatcctaatagggtttataaataagcacatactcccaatgtcaggagcttcttcaccaccgtaatcatcatcatagggcaacatctcgtcttcaaaatcatctctctcagaaaatgcaccaagtcccggaatatccaaatcatcttcttctccatccgataagttatacttgctttttttgctcagtttcaactattgaagaatacagtacacgcattaaacagcaagaaagcaaagaaaaatgataaataaataaacttgaattacatccccaagtccattcataggttcttacaaaaaccatacaagcttaaccattgttttttcatcaatagagagaaagagccatcaactcttttaaccattgttttttcatcaatagagagaaagagccatcaactcacctggcgctctctttgggaacggagaatggccttatcgaactcgcctagatcatcgttctgctctccaatacgcttatcaacaaacaccgaagactttccactctgctcgtactctttcagcaatgtatttttcctctgcaccgaaaatcagtgacagcatacataagaagaattcgagtaaaatttaaccgagcggtagcgagctaaattgagttgtaccttatcgatggcgcgagagcgagcgagacctactctaagctcttctcctttacgttttttgccgagaatatcgaattttctcctagaccatattgtttcaaaaggattgggtttagaggcctgaactttcatagctacggactctggacctgacttcttctttttgccattcttcttgctgggattggcgtcgccgcttccagctttcgatgtcttcgccatgggtttacagggtttaaagctaaatgaccttaatatgttttaacctatattctttatcagccacacttaaacctttcctcgaaacctttatattccaataatacccttcgagactctctcaaatatcactcttttatttttattttttttggctaaacgtcaaatgtcactcttattactccaaaatgaatctaaatctttatatatattaaaagtgattatgtaactgtaatttttggttaaacaaatttgttattttttattctgtttaactttaacgaaaccattcattcctactattcaaattaaaatgcatctgaacttttgttctcaaccaaaaaaaaaaacaaaaatatattatgattcatcttttttctctaacaaaaacatattgccatttttaattctagcaattctccatccccacaagaaatgggataagttgataattacctttttttttttgggttaattaaccaaaattaccctcaaaagttttttagttaatttctacctatttttttaattaactttcttaaactacccttgcaacacaactctattccttctttcttaaagtcaccgaggtctacactctctattgaatacaaatatagtagtactagacctttacaagacatttacaacaattgccggaaccgactctgctacaaccatttgagctacatcatcatcaccgcctctgctataaacatcagcactacgtcttcaccatacgaattcttgaaagtaaggaagggtaggcgaagaagggagacaaccacagcagcactactggccgttgcagctacgcaagggagtttatggctacggtgtggtttgaacctcaagatggctccgattgttgttgatgactgcgaagttttgagagagaattataaagtaaagattaaaggaagagatgactacgaagttctagatttgtttttttattgaaagtgtcagaaagggaaaagttaatgcaaatttagaaaagtgtgaaaatggaaaagtataattggaagaaagaatgaaaaagaaggtataaattaaagaaatttgaacagcgggtaaaattgagagacaccaaattaaaaagtgtataccatctaatttccttgcaagaaatcaaaacggttatctgtcattcttcatccccggcccatttattgtgactcttctttcttctctgaaacccatatataacaaaaccctccttcttcccatttcatctcacagcctgctcgattgaaaattttagaaagaaatcaattttctagtacagtagaacctctatttangaatactctattcaagaataacttctaatttgttataaaaaaaaaatcaagtcccaatttggactagttataaataagaataatctctaaattgtaatnagttatacattttctaagtcctctattaacaaattatatctctgtataagaataattacatcttaataaaatatatacatatattttctaaatttatttacataaaattaataattt

SEQ ID NO: 111311 - DNA, 1172 bp, Cannabis sativa
gtgaggggggtatttttagggtttaaaaaaaaaaggtatagtttttttatggtttaagtttttggtttaataataaatttttttaattttttaagtatataaaatcaaaattccatatctgttatcatttgttgtaaaaaagtaatagttactcaattgtaactttaataaatggagagttttgatctttaagttttttattggcaaagtttaaaaatatgatttttttccttacaaaaaaaaaatatggctttctgttatgaaaaagttattttgtgggaaaattaaaaatatgaaataaacagtttaagatatccactcatatcttagtaaccccttctgactaaatattattttatagtcataaatattatttttgctataatatcactaaatacttaccagtaaaaaataattttgttgtgtactgaagttctcccatcctctcctcaactaaaattaattatttaacaagagctagcctcaatttaatttaacatctatcattattttatactcaattattgttatttttatttttttatttttttctaaaaggtgatctacttttatgtatatatgtgtggttggaaaaagctacatgatacatcaatgttatatgtaaataaaagggagtagaaattactgtagagagtacctttgctatggtcccaatgttgctacatttggttggaattatattcatatattaaaaatgtataacattgaatttgggagaggtggtgggggtggaagaattaaaagttgtcaactactttcagaagagtcagcaaatattgatgttcaagtttaataagcctattcattaaacagttgtcattttcctaaaaaaaatactcatcaacaattttaaaatttgaaaagttatccactatagtcccatattataatcaagttcggtcctgagcataagtgaactaaacctgtacctagagcccacctaacttagaagcctaaaaaacttttcccctttgaaattacataattttttttattgattttaaaaaatacaacatttcctttaaataaagacctaagaatatttttggaataattacataagacacaattttttgtaaaatatttacatttttacgtttaaagaatgttttttttacatttttacagttttctaaaaaataacacgaaaa

SEQ ID NO: 111312 - DNA, 3731 bp, Cannabis sativa
ccacgtgtcattttcttatttagtaaattatttttttttaaaaataaaactttaattatacttggaccaatcaggaattgtcacgtgacaatttacttaacactcaaaagtcaggtacttacaaaagttacagaattataacttttaggtattattatcgccaaaaattaaacttaggtatttatttgtcactgggttatgccgcaaattactctataaaatattcatttatcttaaatgaattcattgattatattcttaaaatagaaattattctaaaagcactatcttcagatgctggtcgactcttttgaaattgaacatttgaagttgttcgtatgcataaatattgggaactcatgaggtaattcttccttcgagggtgaactcgaatccaatcccaataagacttaataatctcctcttcaagaatatcaaaaagtttatgatagaatttcttagagcgaccgataattccataaatgtaacaaaaagttggaacaaactcgtatttgaaattagcttagaaccattcttcacttttcttcttcatctttattttcattttcaatggaaaacatcaatattcacagtcacatgaacacgtaaaaaatcccgccattgaaaatgaaaaaggaaaatacgtattaaaaaaatcatgcatataataaacattaaattaaccaactctatctctacagtaaagacattagaccgagaagtataatcataaatattaagttacacaatatatatatatatatatatatatatataaaatagaaatgaactgtatattacgtacctaaaaaaccacaaagtatctacctaataattatgttctgattaacaacactaaattattagcagtgtgaatacgtagccatcatgattaagccatatggcagggctttcataattctaacattatggaagggctaaaatgctatttactcataataatatatttttttttgaaatggatttactcatagtaatatattatcaatttaatttattatatataataagtatatttcgtcaagaacaaacgaaaaacagaggtatgctccaccactagttgagtaaatccgtggctgtgcaacaaagagcattacttttgaattaattcttcttcttttgttttttatttttatttttaaaataacaaattattttagttttatctttgcagattgaaaccaattctaattaattagtattatgattatttgaagatgaagggtcatcttagcaattacaaaaaaaaaagatcagagaacatagaaaaagctcaaagattttaaggttgggtcacactatttacccgtagatcaatctctgtattcaacccatgacacgtgtaacacatatagacagggaccgtatacgtacattgattgtcttagcttatagactcccccacttttgtggtttttcctaaatacatttttactatttttcttcattttttttttgaaaaaaaagcttgttgtcacgtgtgaactttaacttaattaaatgcgtaagctgtacgttaagtttttttttttttttttcattcctaaccatctactaatgtggtatatttatatagctatcttaaaaagaagataaaaaataaaaatcaaaactttattattatcatctgatcataattcttagagagagattaaaaagaacaaaaagctaactaggtttggtttagcatatatatgcatttgggtatagtttagtttgtttgtttgtttgtttggagagaaaatttagtgaggtctgagaagagagagagagaaatgggaagagggagagtagagctgaagaggattgagaacaagatcaacaggcaagtgacctttgcaaagcgaagaaacgggcttttgaaaaaggcctatgagctttccgttctatgcgatgctgaggttgctctcatcatcttctccaatagaggaaagctgtacgagttttgcagtagttcaaggtatatatatatatattttcaccaaaacatctatataatatatatgtatcataagcacaaaaaggtataagatgagctataaagcaaaacttatatgaaagagaaagcttttgttttaatattgaaatatatgtgtgagtatatatatatatttatttattttggtgattcctcttttggatctcgaattactagctagtctggtttaagggttttggcaaagctggtgaaatctctttgtataaagagaagttgtgtgcttatatttgtgtttgtggtgtttgttttttttgtaatttgtttggttgaatttcgaaacgttttttccctttattaccgttttagtgaatgtctccgcgtttttagcagggctgagtgtctctgtggtggcattggctgctagatctgcaactggaaacgccataaaacatcattataattatatatatatgactatatatctcttcttcttttattaatttattcataccatattttatattataatacaataataatccatatatatatataactatatgttatgcttttgttttgtgtgaactctttttctttcaaactttttcttccctttccatattatgcgaaaagatccgatctttcaatggaccaagcttggtaggtttttggctacagctctctctctctgatggcaccttggacaacttggcttcattcttccaaaactgtattttttctgtcacatctttttctctacatttattcatattttcccacttctatgatatgagcctgctaattagggttttctttaagctttcattatttactattaaaagtttttcctttttttttatggggagctagggtcagggcacttgggatggtcatcatatcagatcgtaagttgatctgatcggaatctataatatattaattaattttccaggttgggaaatgaaacaagagagagagaggttgcttctgggtatgggttaaaacattttgacggtatgtagctagctttttcagattcaagagtttcattctttcacatatcactggattaaatctctctctctctctacatttcaatcaaagtcaagtcgaacgaggatgctttcgatcaatctaagtggatcgatcgatcgatccagacatttgactaatcttaatttctgacattagggtttactgtttccaaagctcactttttttttttcttttttccccaaaaagattcaatgattaatcatctgattattgttaatctatttaataactagtattgtaaattaggaggtaacccatttaaaaattaaaatatttgtttttttgggatttactggctacatattattatgtttttttttttttttgaaaggctggctatatattattagtttatattctggtaacaaattaatcattttaggtttttttttctttttgaaatggaattattttgggttctagtttgaaataaatattaattaaagctgttaattagttagaaatttggggttttttttgttagaagtgtgctaaaaaaatgatatgtagttaattttattaattgttaattttcacatttctagttattgtttgagcatctccaattatattttttattttttaattaaaatagagaattattttattgttgttactagttctacttcctactttagttagtatttgattattttaataatattttataatttaaatttgtcaaatataaattaattttatagaataataaaaa

SEQ ID NO: 111313 - DNA, 7664 bp, Cannabis sativa
aaaattggaaaaaccgtatgtgcgagttggtttgaaaaaatagttaaaaactgcaccgcgaacacccctaatttttatattgaagattgtcattctaatatacatttgttttttagtttgctgttgcgatgtttttgttttcaatttcactagctctgacgataactataaataatgggaatgtatttttcaatgtgctgggggtgcagtttgaagacgttacagtttcattatctaaattttcgagagcaattttgtcctatgtagttcgcgttaagattttagctgcccatagttcgacaaaatataatttttgattagacgataagttattctagttcgatgagagtcctgtgctaattgcagatttctgtatcataaattcatgagtgattctaatcattatgttaaaaaaaaaagactttaggtctctatttgtcaaaatttagtagttagggtccaaaatgcaaatatggcacaacactcatcaaaatttcatgtgaattacgctttttcaattactcgtgtctgttcgatttggtcttcttcttcttcttcttcttcttcaaaaatcagtaatcacgtttctttctcaaaatcacacagagaacctaaagctgttccagttgggttttcctccgcccaactcactccgtcgcttctctctccgtcatccttaccaggttacagcttctctttatttttcatttccaccatatcttttgattaatctattacacgtatgtatgtatgtatgtatagaaatgtagtactgagcttagacttttgtaagtgaagtcaatttctgttccccaaagaatagatatgaatatttgtttatgctgggatttgttataaatttgtaatattctaatttggatttcagcttttgtcttttactttagatccgaaaaccaatcaattgcggtctttttagttcaatttttgcttaaataatgggggaatattgctgaagaattgtcttcttttacaattgatacataggaatcaaatgcagaggcttaaatgctgtttgagctctcattctttacattcctggtttgtgataattacaggtataatttcgtgtttcgacatgatgaaaatttttagtccaattttttttttttttcatttcatatggtcgtatacattatagttattagaacatcctgctattttttttttttataaacccatcctgctaaattttactaagactgaattttgtcttcggcatgttaaacttttctaaatttctcaaattactatcagacacaactatgaaaaaaaattgaattatgacgaaacagatagggctgcatgagtacatctcttttagggatgcaccatataattttccttatatatttgttatgtgtattaagctcttttttcctgcattattgttcagctattatatcacaggcgttcagagctgcatcggttgtgattccgagttccaattgctacgttatcaataactctagtcgaattgtggattttgtatccttttcgtgattaatactagttatgaattagaaaacattagccttcaatggacttttttcttgttaaaattaatttccttaactgcaattcagacaaattggattggacatccttttgaatatgatgcagaggtaatcttcttaaataaataaaactattttatgataatgaaaattcagtgtgagatttgatatgtgcagatgacttatgttataatgctgacataagagtttgtcttgatagggacatggctcagacttggttgttcgattttgcaaagatgtggaaactagatcacaaacggtagtcaatgtcaccatgttttcatgtactttcttgttttttttcccttctttatatgagattatgtaataatttatttaatctaagaacaatgttgttacatgcacacctcgttgaatttcagttctgtgaacacttctttcttttttatcatttatcataatcatgcagggatacgtggattttggtcgctttgataagtttaactactttgttgctggcgcaggacatgttgactttgttcaagtgagatctttttgtttctgaatcgttctattcaggagattcttttatataatctgaaaacctgattgtcttagctgtctcagtttctcaactttgtagggcttttacaatggagacctaagacagtgcgaggacagttttgataagatgggacgaacagcacaggttggtttcttgtcaaagaccctctatgcagtcttccccactctcaccctactcacacacaaaagaagggagttggggatgatatgagaacattgttcagttttttattttttaaagatattgttttcccagtattctgtgctctcagctcactagtttgtaatttgcattatttcaggtaaatgtcatatgcggggcttgtccaaatggaaaatgtgaaggtttgtgagcttatttatttactactatccggtttgcattgtctctttatccatgatttgtcactgattttgattatatatcatgttttcaggtttacctggatgcatctgcaatatctcttatgaatctacttgcaggtttactcagaatgccttgattttcatttttatttgaaagacctcttaaaatgaacatataacgagaatgcatctctgttcgaaaaagcttaaaataagctgtttttagtttatataattaaaaaaaatacacttctgcgagtgtttgggtaaaagaataaaaagaccttattgaattttgaagacctttttatagaacctaggattcctagcttatgaaaaaaaaaaagatcttattctgaagccataagagtagcaatacttttgccaaataaagtatgtaggtcatatcaaccaatattatagctagcagagatgtaggggaaaatagaaaatgtgtatgtactagtataatgccaagccatcttctataaaactcctaataaaactagatttcaactgaagaaattcattcgtagtttctctcaattagctttgagaaacaaagtaatgctcagaaaaaattatcttctggaaaatatgccagtaagagtgttacatgtgatatgttttaaatgtattgatctaatgaaattttattgttcataacctctcagagttttacttgatcttgccattccatgtggggaaccaggtccacgagtatttaaaggcttcacggttggcttccatccacgaacatgggaaattgtgaggatatgtttcattaaatcagatatgtattttgcttatctggaaagaaaatatgacaaaagattacattttatgaacatgtaggtcaatgatggcatgactcaactgggttttgaagagtctcaccacgagttcgggtatgaaaactgtaccgtggattgatttgctttctgcaccgttctcatcattgtttctgtctcagttaatggtgaattattatgcttcacattcattaaatttacttccaacacttcctgaattatgcagcttcgcaactgaacaggctcatgtttccctatacatgactgcaattgcttcccaatcaactttggtgcagaaacctattgtcaaggtagtttggttcccataagctagtatttgaaaaaaaaaattaacaattgaatgatatgtttatatttaatctctgttcaaataacaataatcaggttttccctgacaatggccttgaggtcagattatcaggctcaggagcttctggaaaacctcccacaactttgtcacccacagtgttggctatagattggagatgtagggttcagttccttctgtgccatctatattcattaatattcaataaaattctgactttttaattatcaggtgagaaggctcgtgatagtccatacaaagttaatgtcactatcccggttgagggttatgaacctgtgcagttcgttcttactaaaatgtgtggtatgttcgcattcattgtgaaaaaaactgctctcaataagctttacagtcttctaattcatagcaaagtattagcagcagttcaaattgtgtaaacatgaagagaaagtaccgattttagtatactgacagagcctatagatacaataaattagtcctttttttctatactaccacagccagtttttattgttggagcatcctttacaatactggaattaatcactactgccatttgcacaattatattgttctttaattgctttgaatgaagaaggcggacaattgggaatgaaaaataaattgtcagcttagtggcagtagaattatcaattatatgctattatatcaaaaaccattttcatattttacttcaacttagctccattccccagatgatactttatcggtttgttcaaatttttacagaattcaggcaggatcaagctggagatgctacaagaggatgggctacatttggaattttatcctgcatgtatggccaattttatattaaaaaacaaaagttcaccaaatagtttatactaaaacagtaatgcatgctgatatttctgttttgaacggcttgtggcagattcatagtcttatcaactctgttctgttgtggagggtttatttataaggctcgagttcaacaccaggtaagcccttatcttttatttctttattccctttgaaaaaagcttcatttcttttattcttctgtggaatgtggtcagtgttttgggttcagacccttttatgttcatttgcaattaaccaataaacttttttttcttttaataatcatatgcagcgtggaactgatgcattgccaggcatgacaattctatctgcctgtttagaaacggttagcatacttcaccatattataataaggaaattttatggtctcacttgtctgagattttagcatagttggtattactgattttgttcttggataggataaccaataatgtgcctaaatctcagaatataatcaataatactaaagtaggttaccaaattttggcaacaaaaaaaaagggtattattattgcagagaattagaatgaatgattgaatgaaagatcattcaagttcgttatgtgataatatatagtattttattacacaatttattaggggtcaacctttgtcaccctggtagatccaatttcaaagattttgactagcttacaaaatcaaagcttagattatttcaacaaaggtaaatttttttgttggtgtgaaaataggtgagtggaggagtagggcaaggttacacccgaacggaagatttgaataacgcttatgctagtgaagcttcatgggaacgtcctcctgtcccggccgctgcccaacaaggaacgagaagacagaccgaaaggaaatacggtgcaatttaaactaaactactcaataagaaaatgatttactttcaacaaccttattctgttcctttatgtaatatctaaactcatttgagtagttcttgtagttgtagcctttgttgcatagcctagctcatttgaactcaaaattttcaccaaaggttttctatttaaaaatatatatttttatatatatatatagatgcttcattatagggtttttgagagacttgtattgtactctaaatttgtggggattttttattggaagggaaggatatgaagtctttgaatttacaaaacaaaattactcagaaattcaattacttctgcaccatgtaaatttttaacaaattattttaaaattcacatataattatgtggctttagtttaaggccggctccaaattttatgcactctaaaagctcatttggtatgtccatattatattacattaaattatatatatatatcactttttatataatactatattaaattttaatttataaaatattatatatttatatacctatatatataatttaatataatataaaacaaaatgtaatgcatgcagtgtactaaactaaccccaaatggcttcattatatctattaacgaggtttcacgtttttttattttacaattctcacccaagagaagaaatattattgtaataaaaatatacactgatgcgttcattgataatatatgtaaaaaaggaaaaaagaaaatcaaatgaagtgttcttttgacaaatttttatacatacatatatgttgaataatatattttttcttaataatctattgtggttgctctactaatatttaattttattcaaagtgtaaatgtgtatttcaatttttttaaaggattttctattgtaaaaataaatactaatatttccttttagaatttttttaacattcaattacttaatttgagcttagttttagatttttttttggggggtgtaggcgtgtagcatcaccttaaattatttatttatttatcatatatatatttttcgaaatggatcatctatatatatatatattacattatagtaaaatgctagttaatttttctattatatgacattatatatataattataaacaaacaataactaactttgaaactatcaatgtccatacgaattttatgaagaaacaataaatataagttttattacataaaaaatatatttcaaaatattattacttctatttttttttttcaaaataattttaatctaaaagatattaccattttttattaatttgaataaaaaagtcttgattattttcttataaatttattcgttatttaaaagataaattttaattttaaaaattgactaagaaaaggctaggggcggcatcatttatgtaattaaattaatgtaaattatttgactgctattttttttatttaactttgtaaggtaatatgtcaaagacccttgattcataaaattcagattaaattatacaaatttctagtacgcgttgcatggaaatgataattaattatatgttaattttgtcgtgaaactaattatttgcatttaaaaaaatgattaagtcaatcaaacgatgtaagcatcattatcaaaagctaatattaattaatggtaatatctttcaaaaaaaaaaaaaattaatggtaataaaaagtacgaataataattaaaaaagcctcatcaaaagggagataccaattaatattctcttaacttaatctttctctcttgcaaattaagataataataccctcttctcttgtaattgaagaaatagagcctaaaaaggagtacattagctctcctaccccaccaagattttttatataatttttttttatataaagtcattgttaattaattttttattttttaaaattaacctaattaatattctcctttatcatgttgtagaattgtatttttccctatgtcccgacacacacaacagataccacctaaaattaatttattaattaattaccatgtttttagattgggaggaattgaaaatgcaaaggtccatgcatgcataaagccaaaatgtaaagttgattagaaagttttttcatgaaaaagaaaagacataattaacataatcccttgatagggtgtatcataatcatatcaaatcccattttgttgagtggacaacactatagaatttgtggaaattagaccccataagaaattccttttcacattttgtccacaacttaattatttatgtttaaatatattattagggatatgattttgtcccgtgatgtactttcacagaa

SEQ ID NO: 111314 - DNA, 4020 bp, Cannabis sativa
ggccgaaggccaacttagggctttgcttgtatttactgttttgtccttgtgttgatctgtatttggtcttaatatcagtgtaagtggaggtttattttttaacagtaattatcatagaattaatcctacaagcccatacttgtcctatagtgtgaaatttggtgtgagtttttcacaaattgaaagctttgaattagatgtttgattatgtatataaaaagaaacaagaataccttgatagctcatcaacatatataatgttctcatctcgtattgtagatttaatcaatgtaaaaatattgagatttagggaacttatggttaaaattataatttcttaaaattatttatataaccatttccattttctattctgatttgaaccatacaaattaaaaaaataatgatatacaactctacatagtgtagaacatgtcaattaatggcgagtgttagggtttatgccttgtaaagcctgtacatatattttaaaattgaactaggattgtacataaatttttgtaaactgcccaacccaaataaactgcccaaatcaatccgagataactcgacaaaaaatacaaatcgaaaaacttgacgaaaatataacccgtccaatctttataatgggcaagttaaaaataataccaatctacccaatcaactcgaactaacccgactaacctgattaagaaagttttttttttattttatatatttatatgactatttaataaaaaatataaagttgaaactattatatatatatattttatggtggttgatttgaactttaaattcaatctatttatatttgtctcattattacaatgatctaaaatataacaattgaatgtaaaaataaaataaaatttaaaaaatattagtggtcagtttggacggttaacttgaccaaaccgaccaatttcattgaacatgttactattttcttttctcttaattgggcgggttgcacttaaatttttgtaacccaatctttgttgtgactaaaagtaagaatttttatagtgaaagcatataaaatatacatatagtttagtaattgcaaaataaaaaatgaaaaagtaaagtttggatataaaaatgaattgacttgtttataaaatacaggctgacacttctaaagtatgacacgaatccgtgcacgacacgaaatacatggtgtaccttttaaaaatattggcacaacacgacatgacctaccaacacgacatgactaccatatttttgtatagcatgacataacacaacctgtattttgaaaagcgggaataaatacgagtcaggttagcacgatatggaaactctaaactgtgcgtagacacatttttaagcttaattttcgcaattggcatatttgggattggtttttattttttgaaataatatttgggattggttagttacataattttcttatacgtatcatataattgatttctagcttcttcctttttttatttattaattttgtcgtttcatgcatcagtcatattaaagaaatttatatttcttaattaattttctttccaagcacgtagaacaacatatatggtgatgtaattagtattgagggcaaaggaaactgacgaagtttggtgtcataatttggtaattaacaatttctaatatatttagtagttaaataaattaaggatatatattatatatactaatcagtggttaaatacatgataattaaataacattaatttagttgatacatcaccattatatcaacttctgctactctgtcggtgacaggaaatctcaccaattatccttaccttcctatatatattattgaataattatagtcgtgattcttcgtttttaatttatttgtatttattcatttagattattaaagagaataagtttgtgtatgatcagtagagaggagggaaagaatttcaaaccatatatataattgacacccatattgatcgctagctaattagctaaataaaaaccatcacgtactatccactattttctagcctcttatatatgattaataatccttttatagtccaaattaaaaacatgacagttgacctcatatactgtaaatttcacgaaataatagaaagaaatatatatagagagaataaaaggctagctagctacatattggtgtaacatacatgtatgtaaaatttggttttcggagagatgtttagaggaagaaaaagctttaatttcatgtaggtaggtcaaattaataacacaactggaggaaataatattaaataataataataataataatttattttaatgaatatcaatgattaattagttggttagagaaaaaaaaaatattaaacaattgaatgcaatgacaaaaccgaattctctaaacaatgactattataaagattaatgaaattgaaagagagattaatataatcttccattttccattcatcgtcatttgcattctccaaaaatgtccacacctgtagagagagctaactataagctataactatattaacattaacaaagtaggcttttaatttggagtagaaatatataataaaatgaagcttctagctcctttgtcatcatcatcttcttcttcttcttcttcctcagctctaaaaaagcctcatcggcaactgtctcaataccttttctctttactagctttcattgtgttcgtcaccattctctacagtgaagacttcttatgcatatttcgccagcaacagcaacagcagcaactcaaactcgagtctgccgactcggaccgagtcctctctcgacccggtgagtcatcctataatttttttattatgcatggttacatatagtatatataatatgtgtatattgtttggtaactcttcaattctgatcacaacaccaatcatcgctttcatcttctacacctttgtttattgatttttttctctttccttaatattaggtaactttatacatagtaattaagggttttgatacgataaatatatctctatttctttcaccgccattgttaattttcattattattattattattggcgttttagtttcttttacaaaattatcttacacaaaatatataataatatatatatgttctagccaatatgtacgtgtaaaataaaaataaaaatataggttcaagccacattataaatatgtagtactactattcattctctatttacaatatacaaatatattttattaatttaataaattttattgcaaatatagttatgataaatggccaatatccgtagttaaaagtattagttacaaaaattataaatttgttgtgattaaatgtgtttttagtcataatacttattgtgactaaaactaaattagtgacaatttgtagttaaatactacattttaatcaagtaagtttttgttgtgaaagtaatatttagtcataaaaaaaaatatattgtgactaaaaaattatcactaaaaataagaattttttgttctgaaaataaaagaattggaaattaattttgttttaatatattattttaaaattaaaatattttttaatgacgtcacaattttattgtaattaaaatttattatcaaaacgtctaaataaataatatatttagcccagttaaaaaaaacaaatatatttagcaataatgacaaataatacactaaaattgacggatgttacaaaataatatattaaaatgttttgtttaactaactttgacttcgcagaattaataacatggatatttttttcccaccttataaatgaaagttttcattatttccaaatttataattaccattaactcattaataattaagcattagtaccatgcgagaatacttatgtaaagtcggccacattgcccttgtaaaaatagagtaaatgctattttagactctatatttttcaaaagttatagattagatcatctgttttgttaaataataaaattgaccctatattttccaaaatagtaaaaatagtaccctgagcttaatttttgacaa

SEQ ID NO: 111315 - DNA, 3656 bp, Cannabis sativa
  modified_base (3561)..(3561): a, c, t, g, unknown or other
  modified_base (3610)..(3621): a, c, t, g, unknown or other
agtggtgttcaacactttttatattggagtcatgtttagttggcgatatttttaaaaataatttttttaagttatatgagatctgacatgtattaatcaatagccggtttgacgccgagagagggtaggtacataggggtgtcttttagcctttctctatatataaatagatattaaagcacatgaaactcatgcatatatttataatgtatgatctcaggtggtctcaaatcgcggcacgcttaccaggaagaactgataacgaaataaaaaatttttggaactctacagtaaagaaacgactcaagaacttgtcatcttcatctacaacctcaccaaacacaagtgactcctcgttcgagctcaaggactcatcatcaatatccattgatactaatactaataataataataataagatcatcatcaacaatatcatcccgggtgcttctagtcaagatcaaaacaccatgttttctacttcataccttcacgatttatcatcacccacttctctccaccacttgataaggccattcccagccgtgcaatttgatcaccaccatcatcatcacaacaacatgtttggtacatccaatagtaatgaattcttgaataataatattaatccaatatcatcacaaattgctgggatggttaataataatgaccatgataatcttggtttttttggagaagtagttggtgggatagaaggagaactgtttgttcctccactggagagtgatgaaactactgatcatcatcctcaaagagtgattaatatgagtaataacaattacttgatgagtagtaacagtactactactagtgtcaaagctgaaaatggtgatcatattcatggggttgagactagttatttccaggcacatgagctaacagttggggaatgggacttagatgatttgatgaaagatgtttcaagttcatttccctttcttgacttccaactccaataattcatttccatccatttttctcaacaaacacaaaaagattgtttttttccctctccctctcctcatcttacattttttgtttttcccaaaatatacaccttaaaataggcaccagaagtagaatataagtaacatccttttacatatatttgatgaactcagctggtttttagcgttattcaaaaccatggtcatcatggtcttctgatgaagtaattaataaaggtcacagtagtggggtacgtacgtatatatatatataatactaagtgaccatattttatatatgtatatgttgtatatgtatctgcaatatgccaacaatatatatatgatgagcttcaaccatgtgtcatcatcatcaatatatatatcgatctatacacaataatatgtatacttgtgaagatataagtgatgtgaatatagagcttcatgaaaagtacgtaagtaggagaaagaggttttatttttttgctatgtcccatataaaagatttaattagttggtatatataataatatatagaaacttttacttaatagtactcttgagtcttgagatgtataaaacaaatgtttgaaaagtgcggaagttgttattagtgggtgacaataagtagtaggttttttttagtagtttgtattacacatttcatgaaatacgactaattcgtactctttatttttcttctcatgatcatatctaatcatcttacaaaaatattacatgtagtcttcataataataattataataataacaataaattaacaatataataacaattaataaaagagagattaacatagagaacaaacaatataattactttaatatatataaatatttatgaaaattctacatgaagtagattattgtactgctgtactatacaaattcactttttcaataatgatggaaatacaatttgattggcaatatatatataaatatatatatatatatatatatattaatgtttgatattgactatatactcaaaaaaaatattacatcatcaattagtatcttggaaaattacaagaaaaaggaaagaaattcagggttaattattttcttcaatggggtcttaatcgaatcatcatttaacagacgtgcccacttattaaatttgaactaaagaaaaaaaaaaaatctataaaaattactagtaaagctatatatatagtacttaaagaatatagagagacataaagcttggtctctcattgtaaacatgggtgttattaatattttatagtgcataaataattaaaaatatatttagttaattagttaggagcctaaaaaaatgttagattcaggaaggtaattataactcctgtaccatccatacctgtttatatataaacttgctatatatatagctaaagatagggataaataataattattattttgagaagtcatcaatgcaaaagagaaaattatattcacaagaagtgaatagaaagcaactatggaataggaccttcttatgctaattttatataatatatatagatatataaatatagaggaagaagacaaagtgaccattttcacttcaatgacagtcccttattaatattataagagagtgcattcataaatcatttcactttagatttcaaacttaccataactaacattttgtgtgtgcattaacaataatttattttgaaaaggttgtcttactttgagaagcatattatatacagtaaaccgatgattacgcctgtatttcatgtaaatgatatcactctttttctataatactaataataataataaaatttagtttcttaccatgcccaagtcaatttttacaaaatcaaaattcatctttactaggaaattatgtcacgactcgagtcctaagccgtagtagatatgcaatattcattatttaggtgattaaaaataatataataactcttatgttttataaagaaaatattaataatcaaatcagaactactcaacaagattaataatattcacacatttatgtagtcaccgaatagataaatttaataagtcaataaattgccaaaataatatctgccatccttcattcctcatttttaataactagtatacatagttaatttaagtcatatagattattcattcaagcctaaaaataaaattagttttcaatagaaagtttgataaatagaataaaactaacctagaaaagaatttcttcctcaacggtaccatcctcatccactagcatcaaactgagttcctgaaacaggagaaaatagggggtaagcttatagggccctatagaaaaataataatatcaaaggaccattggtttagtaaaaattcatgcatggttaacttttaaaaataaaataactcatcaccattataaaattgtataaacaaattagaaagaccataaataatcacaaaataaagcttaaaatgcatatcacaccgtcttctagaccccttactctcaatacctatcatacaaaattacatccataaccagctagtcgcacctcataactaccatatataatatcggggctcagatttaactgttggatatattttaccangatctagatttactaacaaatatggttcattaacatcctaatatgaatnnnnnnnnnnnnaaataaacacataagagtttaaagatcggaagagc

SEQ ID NO: 111316 - DNA, 1383 bp, Cannabis sativa
ttcaatctaggaatgggaaccaaagggacctgagacccttgtggtttcaaaacatatggcggacctggcatccaaggataacccatgggtgccattggaggatgcgggtacatccccggaggaggtggcgggcacattccaccaccaccacccaattgctgcctcaaagaggcgttctctgccataatataagatattttactattcaaatcggttatggtagaatgcatattcctaaccttgtcttccagctcctcaacgtaatgcttcttcctctgcctagagagctgtgcgctttccctattcctaatcagcctagccttcttcttgtcgtcctcttcattaacgggagtcaaattagactgcgaatgtgattgagaattctccaccagcgttgacgacctcctaaatttggaggttctcgactccccattcccttcttcagtttcctttttcctctttgacatgcaatttttctcagtctccaacttcaccttcagattactaaaaccattatccgaattcacaggcgaattcacgccttctgaaacagcagaaccgcaattccctgagccgtgagatgaagccggcccaccggataactcatgatcatcaggagacgcaacagacatagctccagcaacatcatagctaccagactctgacgattgacaattgagataacctgcaacatcataatccttacccccagaaacagtagaggtatccgaatccgtagacgctgacttcgaacctacagcagcttccgaagtagtcgggttgacccctcgatccgtatccaagccgggggctttatcaaacccatccgtagttagaaaatcgtcggtatcagaaggcaggtaaagatcttcgatgtcgtcaaaagtcagttcatactcacaattatccggaaaccctaaccctagatctgagaagaaattgtcggaaggtgcattgtctgaggaagagaaaaactgatgatcgaagggtgggatgggaagagagtcgatgtcggccgagaaatgaccgtcggtggggtgcatcggtaggtcagcgaccaccgggtcaaccatcgtccactctttctaggccttaccacaagagagagaaagatgaaatgacaaagtcaccctttttggatcagaaacaaaggaaacgatttcctttgcgtgctttttttttacctttttccctttgctggttttgatttgaactgagaagggatgaagaacttctttttcttcttgtttgggtttgtttcgtggacttgggcttttttttactatagggccaatccttttaaaacaagatataggcccaatccttcgtagagaaaaaagacaaaaacaaaaaaaaattacataaagtaccattttttataaa

SEQ ID NO: 111317 - DNA, 1440 bp, Cannabis sativa
  modified_base (1381)..(1383): a, c, t, g, unknown or other
ttattgtagatacatttattacaatgttgaatatagaacttatgatttatataattagagtaaattttattatctagcttattgcaatatctgccctattttggattggttgtataagaagcatgggatttttggtaaaatatatgtaaaagaaaaacaaatttgaacaacacttgcgaattgtgcggaaatcgacttacaatgcaaaaccttcataggctgcttgttaacaaccgacctaccctattgagcactagaggtcggtttgtacaacggacctcattgcacaccataggtcgattctataaccaatctcccatgttgcacaacatatgttgattaggcaccaacagacttcccatgttctaaatagtaagtcattgtatgggagttcaaccgacttcttaagtaatttttttgtagtagtatattgtattattttttaacacattagtgatgtggaattatttttaataaaaatccagctatttttcaatgaatttgtgttgcgtatgcatatgtcttcccttcgatgtctataaacaatgcatttatgatgatcatgagggatccatattcaaaatatcagctactaagagacatgtatatacaagtgcaagtcgagctactcatgtgatctctcttttggcttcataatatcgtacaaattaccacaaaacttatgtgcattttcaataactcaaaaagtaacgagacaaatagtcactttcacattcatattcatctaaatggtcaagctaccaattaatgctttacaatacagtttcaagataagcatttttttaatgtatataaaagacggtgtagttaaagtacacttgattggaataagatgaaggcaaaaccatcatcatatgaatcatgttaagaaaaagaaaaaagaaaataaaacactcctatcaactttagttgagatacgcaaagtacacaaaagggtttttatgagacaagatgaacaatctttgtttagaacttaagatgtaatttcttaagatggaaactgacactaatattatatgttattatttgcagtaaatttaccttttcttgtttttgttttaatgaaataaacttacaaaaagcataatgtttttagtggcctttccctaaattactgtcctcatgtgcgacaaaagagacagctaacttaggtcaccattaaaaaaaaaaataataaataaaatagaatttgtaataaaataaaaaaataatattcataataccaaatatatgttgtaattcagtgataatttattacattataattagactgagataaaaaaaattaaaaaaatggtcaaatataatgaaggggctttttcatttttacatttcaaaataattttttttgcatttttannnaattctacatagaaacccctattacaactagcactgcaacgtaaattgcaacaaaaa

SEQ ID NO: 111318 - DNA, 7639 bp, Cannabis sativa
cttagacaataaataaaaatcacaacagaaaaagtagagcataaatctctaatatcattaagaaagtaaacccaaagaagaatccaacatcgttaaactactgagcttgttgattaaactttgataatcggattcaacttgtggtattttttttccttattagtgcttgatacaggtgaagtttatgttgaaattaaaaaaaaaaaaatacatacgcaatggagatcaatatcaatgttacacaaggtgcattgtatagaaaacaacactcaaatcacacaatggagacttgtgatcaaaccctttctgtactaggaacttttagtcctaaaacaatagagaagccacccttttatagtaactaacttaacagaatgatgacataaaacaagtcataaagtctaaagagtcacttataacttgtaactaaacaccacacaaaacaataatcttatctttttaacataatcacaaacacaatgggctagaagaagtttccatgattgatgatgatgatgatgtatgtacaagtgttaacatttgtgtttttattttcaatttggcagtacaagaatctacaaggccttcatgtttggtaatccaagtgtgattgtgacgacgcctgaaacgtgtaagggagtgctgacatatgatgatgcagtcaagccgggttggcctcgtgcaactgtgaaatcttttactgggatttcatgtgaagaacacaagtggttgaggaaatggtctaacatgggataaattgaacactcgcgattcactcgagccaagctcttaccttcctctctctctctatgacaactctttttgtgtgcttaaatggttctttcgctattgattttattttcagattatgcatgtgtgacttagaacacttttacaaaaatcacttggtatatggtgataaaattatactataaacagattttattattaaggtccaaactgtggtgaattggattcacctcaatcaattaatcacagcaacgtcaaatgcaagatctacaaaatggttgaaacagaaaagttaagtacagaagaaaagtaatacaaaatacatactcgaatcacacaatggagacgtaagattcattaatctttaataagttttctattaccagttttttttgcacacagaaatctttaataagctcctttacaagtgatttttgtaaaagtgttttaagcaattttacaaggttcaccaccagaaatttggggctactaccttggtgagctgcctcaaagaagctcagtcaaaatccactatcaagatcagcaattacaccaagtttcaaagatccaagacacagtaatcatctggtaggtcgtcatcttcatatcaggtatgaagttataagtcttctgatcatgaatccttctatttataatagatgtgtagctgagtaggttagttaggatcaactaactgattcttgataattgttaactatgacaggtcagcttatatggggaactatttcaacaccaggacattttacaaaagcatcaatatggcccaaagtaaaacattccacagacacttcccaatcatcattcattccattacaataacaacccaccactcttccctacacaatcaacgtgaatactattccaaaagttagtttggcttttcaccccctccgcccaaccaccataaagtttagtttctgagaagaaaacaaaacttgggaaatacttgcaaaccactgctcgcaaagccgtaaatgcaccagggttccccaagcctcgggcattccaacataaaagactcatgactcctggcgagcttgcatagcaggcatcgcgaacatatcttccaacatatcaataggagtattgacactagtattcaacttcctctttttgctggtatcatcatatttctacccatctcagtcttattgtttccttattgtttggtttaataattggttcaaaggtgtgttgcgctcgacgaacggccaaaaaaaactcccaggttaaatcacttctatggccccaacccattggtttcagaattcaaataaacagtagttctccacttccacttttagtaaatcacttctatggctccaaccaacccgaccaagatgttaaccagataagctataattaccttacctacaagatttgaattgatgttaactcaattgtactaaatatattataaatattaaatagtgtgtgagtgttcttctatagcagaaatgcaaaacaataaagtaactatgtctctataatagcacgacctttcatagcatcttcttctcaacttacaaacagaattaatggtcaaaaaaccagaatcaatccacaaacacaaaacattacattgagatcactttccaaaacaacatacacaaatgtttaagaacaattataaggtagtgacactaacaggatcataaccaaacaaacaaacaaacttacctcctaatagaaacaagactttttacataagaacaaactgaactatctaatatgctcttatccatatcacaaacatctctcatctcttgggtgaaaatgttgcaatacaccaattttagattagtcatatcatcttccttccagatactcattagaatctcatcattcttccaatatggtaacactttgtgatgattgtgtattggtccaaccttcacatcatattcggtacaagaatcttcttcagcttcatccatcctaaagatatgaatgattaagttttcagttgtcaaacacatcattactgaatcattccacaccgaaaggtggagccaataaccacattcaatgcccaaagcttcaagatctggcacatgaaagagttggagttcctcattactcaaattgaaactcaagatcatgttatcatcctcaccggatggatccttaaccaaccagtaacaaacacctccccaacataaaccgccgtataattcctcaacttccgtcatttcatcctgtatgtcatcccatatgtcttcatgtgtgttgatctctctccatgaattagatcccaatgtgtatacctcaactttcaatccttcgtaactgcaccaaactgcaacacatttgtaatcattgctcactgggtcgaatccaaatactatagcaggtaaagccgattgaaatgtgttgttgtacggtcgtggaagaaccatgaattctttcaaagcaggattacataacaccattgtccaaaacttatttactagcaaaatgagtccatcacatacataagcctccctccattgattcatatccttgtaccttgcatcaggaataagtattacactgaaatcttcatcatcatcctcatcctcctcatgggttttattcaacaaccggttacaaataagcggtacactacaagcttctgtggatgctacgaaatgatccttcttaccatcatcatcatcatcatcatcatcatcattataggttatagtcaacaatgggaatgtgatcaagcgatgatccacatggggggatggcaagttgaaaagtaaggatgtagtggactggtttttggtgatgagaaggtgtttggaaacaaattccgggttgttgatcaagcccgagataagggaataccaaaacttgttaacaaatttaaactgaaacacagaatcagcaggtgcccacaacatgattttctcaattatttcctttggcaaatcacataacctcaccatttctgccacaatgatcaactaatactaaactgacattaaataaaacaaaaaaaaaagaaaagaaaagaaaagaaaacttaatatctcaatatacaaatcatgttgtaaggtaacgacaaatacaatactaaaaattcaatatttcacatccaaagtatctatattgttaaatttaatatgaaattagtttctaacaattacttactgctactaacataagtaaataaataaataaataaatattcaagattactcattgtgaatctaaaatcatgcatttttgttcagtgtgattaaagaagcattcgattctgaaaattggaaattaggtgtaataaataaaagagtatgaaaataaaggaaaagttgccatttttacctttgattgtttgcagaaaaagattggattgtgagtttgaaactagtatgaactgatgagaaagagaaagaagagaagagagaatgaaacatttaaaaatgtttacagttacaggctgtccaattgatccataatagctgtagagatatgtagagatggtctactctatttaatctttataataataataccctcttatcactatccaaccattttccaataatataatacattaaaaaaaatagtcctttgacttgtatattattattaatgatcgagttgagctgtagttagattgcaagcttaaagctcttcaaaacgattgggctagttttttgaccactcacggtattgttcacaaggtttctcgtcccaaatcatgaataaaatggcgttgttgaaagaaaacaccgacacttgatggtagaatgtgatctttggccatataactctaccaaaatggtaaaaaagatattcccattactttaaaatacagtaaaataaataataattcatttctacttcattacacctaaccaaacagacccttaaagtctggcaagaggtgttatggtccttaactatcatagtgctcaaatccaacttatatatcttcttgaccatgcacattgccattgtcatccaaattctccactccaagtaaatcacttctatggctgaatatataataagtattatatatgtaagtgttcttgttatttttagagagagttttgaaattgactgtgctgcaacacagaagggatctattagactaaaattaaaggttctgttagttttaattatctagatcagtagatcaccattattgttacattcccatgaatgatatctcttcatgactatatatttgaatgctataaattgaattattgtaactgaataacagaataagagaagattaaccatgaaagagaacatcctttttctcaactttatcatatgaaacagagtaaatggtcaaaaaaaaaaaagaaactgaatcattccacaaacacaaaacattacattgagatcactttccaaaacaacatacacatatgtttaagaacaatcataaggtagtaacacctaacaggaccataaccgaacaagcttcacctcctaatagaaacaagactttttacataagaacaaactggactatctaatatgctcctatccatatcacaaacatctctcatctcttgggtaaaaatgttgtaatacaccaatttcacattaggcatatcatctctcttccagatactcattagaatctcatcattcttccaataaggtaacacattttgatgattgtgcattggtccaaccttgacggcatatttggtccaagaaccgtcttcaacttcatccatcctgaagatatgaatgattaagcttcgagttgtcaaacacatcattactgaatcattccagacagagaggtggagccaataacgacggtcaatgcccaaagtttcaagatctggcacatgtaagagttggagttcctcattactcaaattgaaactgaagatcatattatcatcctgacaggaggatggattctttaccagccagtaataaacacctctgcaacataaaccattatataattcttcatcaaacatcatatcatctattatgtcatccattttgtcttcaggcatgttaatctctctccaagaatcagaacccaatgtgtatacctcaacttttaatccttcataatggcaccaaatggcaacacatttgtactcgttggttacaggatcgagtccaaatcctataccgggagaaggtgatttaatcttggcattcttcggttttgggagaatcgtgtgttctttcaaagcaggattacataacatcattgtcccaagcttattcactagcaaaatgagcccatcacagctacaaacctcactccattgactcatatccttgtaccttgcttctcgggatataaaatcctcatcaaaatcagaataatcatcatcatcatcatcatcataggttctaggtggtacactaaaagcttctggggatgtcataaaatgatcatcataatcataatagtcatcataatcatcatagcttatagccgaaaatggtttgctaataagcgatgatgttattaaatgatcatcataaccaaaatcagaatcataaaaatcataattatcatagtttctaattggtggtttgctaattataagtggtacacttacagcttctgtggatgttataaaacgattgttcttaccatcatcatggtttatactcaacaatgggaatgtgatcaagcgttgatcggcatggggggaacgcgaattgaaaagtaaggatgtagaggaatggtttttggcaatgagaaggtgcttggaaacaaatttggggttattgatgaaatccgagataagggaataccaaaacttgttagcaaatttaaactgaaacacagaatctgcaggtgcccccaacatgattttctcaatgatttcctttggcaaatcacatagcctcaccatttctgccacaatgatcaaataataagtttattatcaaattaatcacttgaacatgacatcaaataaaacggtatagaaaaatactaaaaaagagaactcaatatatctcaatatccaattcatgttgtaaccctaatatactaaagactcaaaatttcacatccaaatacctatcctattaaattgaaaatgggaatagtttcaaacaactactattagtaaaaattaacctatgatgattcaatggaaaatgaaaaaaatctataatcttgaatttataattcaatgaaaattggaaattatgtgcaaaaaaaaaaaaaaagtcatagataacaatttcatcaaaataagcgaaaaaacagtagtagcctaatggtaaagtttagaattttaccttagattatttgcagagaagattgggagtattcaatggattaaataaaagaggaatgaagtaaaagtgtgtgattttcaaatgctctttttaattataatttatatgaatttggaaaccgacctctctcccgcccatttacatcaccactcactatcattctccaatcaaactttattgcagttatttagaaaaaatatgtttttagatattcccttattttagcaactaatttgacttaattgattcttttgtagttaatttatatactattgcaactagcactctaacttaaattgcaacaaaaaaatcgtatagaaaccctattgcaattagcgctaaaaaaaaattaaaaaaaatagtatatagaataatttcttattttttatgtatttatataaatagaaacagcataatctcaaaatgaaaacaacataatatcgaaatagaaataatttttataaaatggatatactataacctcaaaatagaaacagcataaccttaaaatgaaatcagcttatataataaaagttgattatattaaaaaataaaattgttgaaaattaagctcatggttctatttttaccatttaacaaaacagatggtccattttgtcatttaaca

SEQ ID NO: 111319 - DNA, 4748 bp, Cannabis sativa
ctctctctctctctctccctttatttgtgttttctcatttctgcatttgattatatttgcatgaagttatgtagttgttttcctctttttttctttcttttttctgctgtaaaggaatgttgtcgtaataaattctctaactctcagggatagggatgatgtggattctgaagactcaagtacagtagatgattcatcttatatagctaatacatatgaatcttcatctgtttgttcatcttcaaatgatgaagaaaaaattgatcagctgaaggacctttccagtcaaagttttgagcttgaagagaaatacttatctgggttaagcttctctataacttctcccttcaataattatgaggaaaaatcttgcgaatgtgaggaatcacttcatattgaaagtgatgcagatggactttgtgaaagagatgtacttcatgggaaacttttggatcaaatatctgtggccaaagaatcacaagaacaaaattgggcatgtagatctgtcaataagtatctagaacgtttacccgacaatgattggttaggtcatttgaaaagttctgtcagtgttgaaggaagttctggaggtgattcaaggtcaaatctggaggactgtgacccaaggatgagtacaaaaggaaccattgaggacggtatctcttattgtagaaaattgatggtcacgagtgattctttttctgaggagctgtttagcaaggatggacaagagaacagcataaataattcagccttagttaccaagaaagactggaaggttaactcacacaacaattttcttagcataaatcccatgctaaggaaatcctctttcctaaaattgcaaactgatcctggagagggagatggcacacgctatggcaaagccttacctttttttgacttttcttcagtagaagattcttgtaaccgatgcttggaaaacctttctgcaagacttttggaccctggtgcttcagccgctagtaataagattgatcttcatgttgaaaattgcaagcgagatatgttgttggttgaacccaaaataagctatgataattctcttttggaagtgaaggactataatcaagaagatactgcatcagcacttgtttctggaggaagtagttgggagaggttacttggtagatcctgtaacactgtcaataacggtgttagagatcacataaaaagttcattagccaaatttgacataccacttgactttatcattgacaaatgcttgctgcaggaaattatgcttcagtatccttatctttgtgctaaatgtactagtgagagtatagtatacgttttcgcagactttttctcttacccttgttgttctctttatcctaccttggttaaggctaactaaatctttgaactcatatgaaatgtggtttaagctgactataagttttagtttatatgaaataaggcaattttgttgctttcatgtgaagttttgtggtgctttacagaatatagagcaattagggaaaaatagccatattaggactgtttttttttttaatattttctaatgcttttttgcaatgcatccacaggactttgttttgtgagtaacaatgtaaaagtttggcttttaattttcttgcattattctatatttgattaacttactgttggctcagttgtttcctctacatgatgtttctgaaaaaagtgtcttatccttaagaaaaacatagatacaagtatgttagcaagttaactattaagttgcttgaagaaggatttgattttaaagaacatttattagcacttcgacggtaccacttcatggagtttgcagactgggcagatttgtttatcatgtcactttggcatcatgtattgttctttagtaatcatgtcaataaattcaataatctgttatcatttaatgtactcatctgatgatgtttttcttgctctttaaatgacagaaatggtgcatcacagaggcagagcaaagacttgcagaaattcaaggacttcttgagttgtcaattcagaggtcttcttgccaatttgatcataataaagacagattgtatgtgttcattaaaggacatgacacaatgcctctttcagcatctgctattggtacattactgttttttttttttttgaaagggatatacattactgttctgttgttatgttcttgctctttttttttagtttttattttttcttttattttccatagtcgaatgcccctaataattaattattactccttcaacgttggtgtttctatcagccttttttttttgaaatatattgttctaatatatgttctgttatcacagggctccattcttttgattttctaggtttgggttatcgcgtggactggccagtcagtattgttttgactcctgaggcattgaaaatatattctgaaatatttagttttttgataaaagtgaagattggcattttttcattgtctgatatatggcgctcattaaaggtatgcttttatactggattgcgatttgcagtttctcatttagttttatagcacctacactatgtgcaatttcccctttaatttatagctctcactccggtttgcaatttctcacttgattttatagccaatataagatatacattcatggatagaatatcattcttcaatcttctggaaagtggaaaatgactagtgaagaaatttagaaactttgctaaaatatattgatgtatttgctaaagatatatttttgtatttcatcatactaaccaactaagtttgcttttaatatttgtggataggagttgaggcccttgatcagtgtcaaccaacaggctgaactatccaaacaggaagtgggtcattttaacttattgatgaagatgaggttagtgtatctctttaggctttgtagtattatttaaattcccaatatcaaaccaaactaacacaaagttactttattatataaaatttaccatactctcactttaattgaaacggcttggaacaaaggtaacatatttgaatacaaaacacaacagtatcaacaaaaagtaacaaaaagtaaaggccaacaatcaataaaagcttatgaaacagtctgaatgtgttgaggaatggtcagagcttttggtgatccatgatgccaactaaatggtttggtcttgggaagagtttttgctctctgattagttagtacttttcatgattatggcctctgcaagctattgccattttaataaggatatagagttagaacattaagttttcattagaaaaggatggtggattatattccactttagctttaagtgaagaataataaagctaggtaaaatatggtggatttggatggagctacatggatatgtaatgttgtcaagaagaaagtcatggagtagggaagtttggagggcttcagaagcaaatgtagaggtaataattacattcatccttaatttggtgcactatgtgcaaaaagaattctgagactgttggtcatctatttctctgctcttttctcagagccatgttattgaagatcctccatttgatggggattgactgggcgtggccttgcttgaattgtgatatcttgcaatgggggaatggggagctaagagaaggaaggatataaactgtggaatgtgggaactatattggataaggtttaaacatttggtggcacttgggttgggtctaatgttacttgttttgcagaatcagtggttgtatgccaactgttagaagtgttaatttgtccaattgaattttgaaaacctagggcacattatttttagtgaaggtatctcaattggccccaagaagatctcagctatggtggggattgaagggatttcttggtcttattggctatttcgaaagttcttttcttgttttgggaagattgttaacctctgacagatcaacccaaaaaggacaagttttggtaatctttattggccagggatgctttccaaaattcaagtccacaataactttttttattttggccttagctcttccggatttcagctagctggttgttctagaggcaaaggcgaatgagttttgagttgtaatgcaaggtggttgtccaattgtctatttgatttatgagtgtgaactgatggccttacttcatcctctaggttggaagtttgtgatctgtacagactagactagagtgtgaaaggtttaggagagtagcgttttctttatttagattttcaaaagtggctcactgaggtccttggttatgattttgacatgactgcccatataatagagctggagatatcttgcatgcatgttgatgccactttattagctctaattgtgcaaagtgttatctagttggagggactcgctgatcaaagtattcaaggtctccttttgatgggtatatactcaaattgcaagatggtgcattgctcataagatttacacattggagcaattaaatgcaacaagaatgacacaagatctggctacctgccagaatgctcctaaagtatttgaaattgtatctttcccgtggccattatgtccctaagtctttatcacataaatttagatggaatcatataaaggcttctcaccaacgctgcatctaattccgccgtcatagatatgttgttattaagaagtttcaaagtagttaacattgaaaaagttgaaaactttgacgaattcttatatgctcctgaatttacagactgttgcttttactgggtgtttttttttttttttt

SEQ ID NO: 111320 - DNA, 6368 bp, Cannabis sativa
  modified_base (6318)..(6343): a, c, t, g, unknown or other
agatggaacattaatcttccaaagttttttccagtagctttcatcatccaaatgtagccaattacctgttgaagcttggagatgtttgtaagcacttttatttttttaattttaaaacgtaataaataggtaataaagaagctaaataagtagaataaattaccatctaaaaataagggataaattgataagtttgtttactcaaattaagcacaataaacaaagagaaatgctcttctaaaaaagaaaaaaaaacaaatattaatacaattaagtatgggatcttatatattattttaatttaataaaaattttaattatctatttaatttggtgtcacaatttagtatatagtcaattaataaataatacatgtctactaattactaaaaaatatggataactttttatatagcattgttcgcagtggcggacccataatttaattgagggtgggcgtaaaaaattttcatatataaaaatattccaaaaaataagtaaatataaagaaaaacacaattcaatatttcaattcccaactaaaaatatattaaatatcaagcatttaaaatcttctaatagataaaaaaaaataatctaaaacgatgttcaaaatatataacatactcaatattctaaaattttagcaaatatatcaattttcgagctcatatctttagagttgtcatcgacgagttttcatgttctgaaaacgatgaataataaacttgttgtcaatagcattaaatacattctttttgagatatattatcaaactattattcaactattgatctcctattttgttgcgcatttgttgtgggtaattaaattaattaaaagattttgttttttgagaagtaaaagaaatattttttttttcagcatgggcttaaacacacactggtcttttattgggtccgccagtggttcgtaccatcactgatacctgagattataacaatgctcgtaaataaattgtcactaattaagttgcttataaataactcatgttaaaacaaattgtcacccttatcgctatatatgctaatgtaagataataaagattatagagatgagcctaccaacctacacaacaaaatctagctagtttattatgctctacatgaaattttgtacatatggatgagaatcttgtatatttagatcacaatttttctttagtaattacgagataaaatatgtaaaatttaagagactttataaagtaatatttgaatataggaatatgagtcatatttcaaaattattagttaaaaaaagtagtagtgatccaattatttctcaacaaaaaacaaaggtggatggagtagataaagtcaacttatatgataattcaaagtcaaatatcaaatgataatgagtttatggttggttggtggggttaacaaaagaaaagtccaccaaatcaacggtggagatgcaatctcatctcaattgacatgacctgtaatctataaggttcttgttttctcttttatttaagcacgattgtattcaattattatgccaattttatttattttttaaaagtttacaatacaatcacatatatctatctaattgcttatcaatcttaattattttgctgaattaaattaaacaaggttgaccaccgtaccgtacaatacatttgcttctctgtattttggttaatttgtgctttaattataagtattattatatggtaggattagctaagccatgcagactaattaatttgtgtttatacataaattattaattaatttaatatacatatagtactgttttaaggaagagtaaaccaatcatatcaatctcaatgaatattccaataactattggattattgtcaacttgtaaattgtaatcataatttatcaacatcaaaacttctcttaaaaaataataattatcaccaagtttatttaaagtagtgataattatagtctcctattacaatctcaaaaatacaattttttttttctattttcgtgacggtatttacaatattattctagtaaattttttatttttttaataggttatagtgtcgaaaacaaattttaaattttttgaatatttgtagctggtatagtggaatataaagaattctctcttgtgcaaaattcataattttttgaaattaaatttataaattttatattataagtaaaacaaatatcatcataaaaaaattcaaaaaaatattatagcgtgtgtttttaataattgtaaatgttaaaataagaagttgacggtaacactatttatttattaatttatataaataaaaatgatagtttattaattaaatataaaatatttatggctatgcattacaacacaaagtataataattgtcaaatttaataccaattttgacactgtattatagaagactttttttttccttagatgagcataaaattccaatatcgatttatttataaattaaataggggcctcagttgcaaattaagttatgataagggtatacaagaaaataaatagtgcctcaactcaattatgattcattaacttattccatttgaaaagagaaaataataaagaacaagcctgcactcaatcaattttataattaaaattaatattttcatgtatactcttcaacatttgtttgtgtggttgactgtgcatctacatttatttattcaaaaataaatatacaaaattatgaattaaaaaaatgaacatctgtcctttaaagtgaatcttggggtagcctaaaacaataaataaaatttaaaaactaatatgtttttaggagtttttcagtgtactccatcaactattccatgtttataaattgatccttacaaataatatgaaaattagattcttaattttatcaataagccatattgttgtctcaaataattgtaggtagggataattttatcaataagccatattgttgtctcaaaccctattatcgaatcgaactcacactcgtactccttttatatatacgtatcatttgagctgacctcaattagtaaagttagttaaaaaattaattaaaaaaatatcacttttattattgatatattgtatcacttctaccttgttatgtaaaatatgtgatcgaaaattcgtcaagtaaaagtaatcaggtaaaaaattctcatcttgcccaaagtcttatcaaaattctttttgtgagctaaaaaaccaccaaaatcttaactcaatcaaaccaaataactagcacctcatcataagtaaaggactaaaaatgagttcaaattttgttacaaggaccaatttgcaaatcaaataataattcaaggatggtatttaaaccaaagaaaagaatgatgtgtagatgcgtattcagcacccaccagtataatattattacggtgctaacttacgcctttggcggtaaaaataatatattttaattaaatttcattacactataaatagccgtacaatgtgtttgagacagaaaaaaaaaagaaaagaaatattcattgagaatttgagagaatgggaatctgtatctccaaagtatcctctgagattcacaacgctgattccattcacggccatcaaaacgctgtcgttttcacccattctcaaaccaaccacaaacacgaagcttctcttagtctctactccagagaaggagccaagtgcctcaatcaagactccgccattatctaccaggttagattttatgctcttattcagttttgagattctgtacatgaatgaatctgaatctgtgtgttttgttttggtttttagggttttggaagtggagatggtgtttttggtggtgttttcgatggtcatggacctaatggtcatgtagtgagtgagtttgttagaaatcgtcttcctctgcttttgctgagtcagaaagagtctgttgataaggttaatggagttgatttcaacgatgaaggagtttacgaaagttttagagataaaacgatcgatactgttactactactgatttggtggatgaagattctcggaaatggaaggaagctattactagctcattcaaagtgttggataaggagattaagcttctacagaatttcgatttctcttgtagtggaaccaccgcggttgtcaccatcagaaaggtaaaattaacaccaagctttaaataatttatatgttatgtttatgttcttgttcttaatttctgtgttctggtgaaattgaaacagggagaagatctaatcatagcgaatttgggggattcaagagcaattttgggtacaagaacagagaacaatgaaatcaaggctgttcaattgaccactgatttaaaacccagcatacccagtaagatcttgattaaatcactgatcaaaattaattaattaaatcgaattttgcttaatcaattaactaattacgctgctgttgtaacaatgaaggtgaagccgatcgaataaggagttgtaatggacgagttctagctctgaaaaacgaaccacacatagagagagtatggcttccgatggaggatgcccctggcttagccatgtctcgttcttttggagattttcttctcaaagatcacggcgtcatctctgtccccgatgtcaccttccatcgtttaactcccaatgaccaattcatggttctagctactgatggggtatatatatatatttgaattcaggtttaatttgatgaaatgaaatgaaattgttttctgatgaatatggttaattgacacaggtttgggatgtgttgagcaacaatgaagttgcgtgtattgttttggaagctaagagtgaagaagaagctgcgagaggagtggttgaaggtgccatgggagcttggaaaaggaagtttccttctgccaaagtagatgactgcactgcggtttgtctcttctttcatcaccatggaattttcagatgaagaattattagagacaacattaattgttgttctttgtttcaatttatcaaaatatatgattgcttgtttatttgctttctcttttgtgtatttttttttagaatggagaaggctccaatgataatatagagtagactagtaagagcatatgataatatatttatgttatatctatatatatgatcatatatagtttgatcatatataatgtgataattgatgttaatatatagtctatagagagatcaaccttgagaagttgatattaataaaaactaaatagacatttcaatttcatttatctcttcttacattgcattttattatgattgtgcaacttttgtatatttattctttctttggttagatattctctgtacaaattgtttttgtataaattattttaattaaaaaaaaggttatttgtaatttggcagattaataaaaaaaaaatcaaattagtatccatatatatatagttcataatatataattataaattaatgttgtgtcgataaatattctcactaagaaagattgatttgttgggaaaattaaaataaaacttctgaaagaaataattaagcttcacaataaattgaatgatttttatgtgtaaattttattttatttttagagagaaaaaaaactaaaaagtccacaaattttattgaagaaatatatgctaacattacttgggtatgagaaactaaaaaataatgtacaagtagattagaagctattgataatttggtttggccaattaattcataatttgaagtaggaggtggcataactaagttttattttattttaaagaaatgaaatgaattatagtagaagaaagactaattaattaatttattatatatatgtgaacacgattgattagaagagtcaaccaatgaaaccaactaacttaaggagtttgataagaaaaagattgattaatcaaactaatttttatattacacattgtgattggaacttctaagacaatcacgagctaatattaatatatgataaataaagtggtgtttagggtgtgaatcctgttagttatgttattggttgaatcctattagttatgttattggtaaaattaaccattagattttatatgaatattgctattgaatatttatgttcttgaagtacatgattacagaatgaatagtaagtttggaaatcggtaccttatatttattggttagacatcaatgaatgtcataactaattattaaaatattataattaaaatagttatttcactataataataaatatcgaatactttaaaatgtaattaaacaaagaattattttctttctatttcattaactcccacaaagccaccttaattattttaaagaacattgttataaaataatataaannnnnnnnnnnnnnnnnnnnnnnnnnaagaagaagatgaagagagaaagag

SEQ ID NO: 111321 - DNA, 5513 bp, Cannabis sativa
tcaaattaaggtattttttgaagacgtggcaaggtattattgtaaatgagatttgttaaggtatttttgaaattaatttgtattttaagtatattattgaaaaaatcctataattttaatgggcaaattgaggatacataatttaatttaatagttgtaataattattaaaagataatgtacaattttcttagtaacaatagtgtagaatttacaccactatttagtatagtagttgggatgttttttttataagaatattgttattgaggtattatcataatgaagtgtcatgttataattagttagtaattttttgtaatatttattaaaataaaataagtgagattcgatattatgttgtaccaataataatattatattttacaagagtgctaagcactatgagcgtcctttaatggttgctatggagttagaggtacgactgtaataaaatcgtaaaataaaatacttttgttgctatttttttattagagttatttgtgtaataattataaatattaggaatatttacagtgaaatcccattaatatttacaattattacaactctaataaaaaaaaatagtaaaaaaaaagtacggctgtaatataattgtaaaataaaatattgtaaaataaaatacttttgttggctactttttaattaaaatcatatgtataataattgtaaatatcaagaaattttcgccacaaatatcccacataagaagactatagtgtaaaataaataaaataaaaagaggggtatttttgcaaaagaaaaagaaaaagggaaaattggacttttacaccaaagcaacaaagaaagacagtaaaaaaagagagaaagagtcaaactttttgagagtggaagaccagacaacaatggcagagagagataatattatataatatacacagatacatacacactatctacacattccaaccaaatcccgccataatgttggggatgatgatgatgatggagtacaagatctgctgttagctttaatcaactggtttaaacgcatttcttttacccaaaacgacaccgttgagcaatcacagtcatcagctggggagttttgatttgagcccatcaaagtagcggagagaatcaattccatagtcgccttcatggacccttctcctcataacaaggtcagttctcttaaccctaaccctaaccacagccccttatttggtttctctctcctctgttaatgtgataaggatatggcacgcaatttgagaattttggaagcatttttttattaaagttgcgtccttttcttaactccattaccacatacacaaaccccttttctttattatatattcttctgttcaaagttttcatttttggaattattcttctctctctctcttatatatatataatgtattgactttgattgttttttttttttaatcttgtcatttctttgtaaggatgatcactcattcataaaaagaactcatttttgacagattcaaattattggtgtgtgtgtatatatataaattattacatatagagatatataaatatatggttgtggttgtatttgattgattcatataatttggtttgtcatctgaagagtggtggcattccaagcaaggaggcttttttgtgattcttttccttcaaaaaagaaaaggaaaagaacaaacaaaaccagttatcttcttcttcttcttctcattgattttatttcatgtgttgatctattgtgaaagttttgattttaattactccttattgattatgtaatctattttgacttttagaattatctgcttgaacacatgttttcctgttctaattttatatctattcatagcccttttggggatatatcccattataattttgtgcttagttttatgtattgagtttaaatttaatgttcttttggttggttttcaatcaatctaaatcccaagtacataaaatcaaatctgaaattatgttcacaaaaccaaacacagagtatatatggaacacttttatgtttaagttagtgatttgttgctcttacatcctatatagtttttcactaaagagtttactaatcagagtttcatttaattcagacaatgcttgacaaagaatttttcacagaatatggggaagcaagtcaatatgaaatccaagaaatggttggcaaaggtagctatggtgttgttgcttctgcaattgatactcatactggagagaaagtagctattaagaaaatcaaggatgtctttgagcatgtctcggatgctactcgcattttaagagaaataaagctccttagattgctgcaccaccccgatatagtcgaaatcaaacacattatgctgcctccatgtagaagggagttcaaagatatctatgttgtgtttgagttgatggagtctgatcttcaccatgtcattaaggcaaatgatgatctcactcctgagcatcatcaatttttcctttatcagctacttcgagctctgaagttcatacataccggttagaatatcgcctttgtttcgtgtgctttatcatagcatagtttgtggattgctctaactgtcattctttattgttttgttgcagcaaatgtgtttcatcgtgatttgaaaccgaaaaatatactagctaatgcagactgcaaactgaaaatctgtgactttggacttgcccgggcagcatttaatgatgccccatctactgttttttggactgtatgggtccttatatgagaacttttcttgtttgcggttttgctagtactttcaaactcacattagtgctgcatattttaaatacttgggtttgctgacttattcatttttctaaggattatgttgcaactcgatggtatcgtgcccctgaactttgtggctcattcttctccaaggtataagcatttccattcttttgtgttgccattattgcggtgatgagtggacttttgagatttttcttgtcaattgtgcttttgcagtatactcatgctatagatatttggagcataggatgtatatttgcagaaatgctgacgggcaagccattgtttcctggaaaaaatgttgtgaatcaattggatctaattaccgatttgactggcaccccttctgaggaatcaattgcaagggtaaatttagttttttctgttgatatttcctttttgttagttctcttacatatctcacaagtgaatccatcacaactttttgtagattcggaatgagaaggcaaagagatatctgaattcgatgaggaaaaagcaaccgattcctttgtcacagaaattccctaaggcggatcctttggctcttcgtttacttcaacgtctactggcatttgatcctaaagatcgcccttctgctgaacagataagcctttatcaaaatagttgtttggcatagctttattccccgaaaagcatgtaaaaacatattttttgataaaggagattctttcatttacaggccttggcagatccctatttttttggattggcgaacttggaaaatgaaccatctagacaacccatctcgaagcttgaatttgattttgagaggacgaaattaataaaggacgacgtaagagagctaatatatagagaggtacaactcatggcattttgttataactatggctcttagttgtttaactcttatgcaatcctttgtttactgttctctgatccttaaacatttgaatcataacagattttagagtatcatccgaagatgttgcaggagtacctccaaggttcagacgatagcggcttcatgtatccaaggttgagaattctgtcttttttctttccaatcattaacattgatcttaaagatgttttcatataaatttaaaagattcttggagttacccaaaatgattggaagattgtcatttcagcatatttatgttatgagtcgtcatcttttttgtcgagtatcgtttcacaaagaatcgtaaagaaaatgagattattctttttcaagtgtcaagaagaacttaactttagagtttttacgggaacaaatcacgtgtttaaccatttgaattactcgtttgggaacggtttaaacaactaatatactacaacattatgtcaactcagtggaatcgatcaattcaagcgacaatttgcccatctcgaggagcactacagcgaaggtgaaagaagcactagtccactcgaaaggaagcatgcttcttccctacctaggtaactatactattgaagatattctatgctctgataatttcttcagtgtcttctaaaccttgtgtttttgtcttcagggaacggatttgtgtccacatagatgatgattccgagcaaaatgatcataagaaaaactctacaggttcacttggccgagcagctattcagagccctccacgagaaaaacccgaatctgcatacaaatatggaccagttattcgaaatggatgtagcaagcctaagaatagtcctaaatgcttattgagaagtgctagtattagtgcatctaagtgtgttcaacacactcattgaattcggtaaaattaaaaaccgcctttatgtttttctttcaccgagttttggaaactgatttttatgttttcgggtttgatcttatctgggccaatgttttgcaggaagatagagagagaggaacaaaaatgaagaagaggccatcaataatggtggtattgttgttgagagtaaaaactacacacatttctagtcttacttatatttatgaacaaaaaaaaaagacttaattctgtctgttaaacccataatttaacagggtttagtggcaataattggattattgtgatatttttaaggttatatttgttataatttatatatatatatacactatttcactcaactataatggtgatttggtttactactactaatgtcatattactaattggtgttgcaatagcttttgatttttgtgagtttctttttatgaatgtagatcaaaataatgttatatatattatgtatatgccctttttatatataaattctagaataatgaaatagaatatcaaataaaaataaatttaatatttttgtttgatattttaaactattggaatattatataccatttttgcttaaaaccaaaaagaagaaaacttgattaatttattttattttatttaggtaaagttttttataatatgtgaaaagtaacaaagactaataattgagcatagtaatagttttttttgattgattaacaatattctttaaaaagtttttacatttcaattgggtttatttagataggaaagccaaaaattcatgattagtgttagtaattcaaataattaaaaagttggtgaccaactaagaaagaatatttgaaattcttatgatgattacatatgaatttctaatgttcattgtgttattattgctacttaaataggttcgaagaaattattaacaaaaacaaaaatagaaagtaaaattaaaattaaaagttacttttttttttttttttt

SEQ ID NO: 111322 - DNA, 1930 bp, Cannabis sativa
  modified_base (1899)..(1904): a, c, t, g, unknown or other
tgcggtttgaatgttcacccctaatatttatatgtagtcccagctatgttatggcttgtgtaaggcttgtaaatggacaagaaattatctataagtacaacatatctatcaatcaataatactttcaccttgaatcctattatgaaagaaattgtaaatagtccaatcaaagtgaacagagtaaatattttctttattctatctaaataaaagttgtgctgaaaaatcacaactcaagaataaaatgaaaaattaaaactctatctatcaaaattcctatttttttaacattaactttcaattttctaaaaatcaactaaaggtggcactgacatcatttgttaaaattttttatcactcataaaaatatgcaatatcaaaattgatttcatggacaaacatatcacatgttattataagcatagatctaaatgaaatttttgttgattcaaagaaaataactcaaatagcagaagtatacctcaatctattgatataggtgatttatgtggtaattttgagtaatgattttccaagaaagtaagacttgggttttttaattttctctcttaatgggggaagaagagattagattggctcttgtttcttggggaccactaccaatatataacctcatagctaggttattaattttaagtatttctaatttaacccctcaataatttagaaatatcctttaatgtatttatacatttaacctatgatactttaatatctatgacccactgttactaaaatgatcggatcaaacttgaaatagcaatacactaatactatactatggaagactccaagaaagtttagagtggaagtttggctatccaagctatatatattataacaattaacctttgaagaatggatgcattgtgtaagctacaaagactaaggcatatatagtcgagctatgtatgactcaaatgagtttaatttctccctatttcaaaatgaaagaaaagatataaacaagtagtatactaacaagtagtaataagagtagtatttataaataatctatgtgtgtgctactctatatatatgtattctcacatgtgacatgtctaagaatattaatattatacaattattgaatgaccagtaatcatattcgtgggtcgttattctataaatatatataataatatattgtaaataacactgcacatgctagctgaatttaaaaaatgacaaaaagaaaagaaattaattgaatttacatgctagccgaaggctgttctttgctcttcccagacctccaactcggatcatcgtcctttgtgtctgttttctggtggtttggaagaaaaaattagaagatgttttaagtttgaggaagcctggactagggatgagaggagaaaattagtggtcgaatctgcttggaagtctgtaattcactcttgggccccgaccaggatctttaagaaaattggggctactcgggttactctcatgcattggaatataacccaatttagtaaaattgacactcttatcaacgatttggaaaggagacttaatctcattcaaaaatttattgtgagatcgagagagtgggcgactgaaagggacttacgtcgctctgttaatgaggcacgggtgaggaaagatttgtattagaaacaaagggccagggtctcttggctgaaggaaggtgataagtgttccaagtttttcttcctctccgcatctaccagaggtagaaggaatgccattcagagcatcctgaataaaggcaatatgtggatcaccaaaagagagctaattgtcaatgaattcatggagttctttacaggaattttcactggtacagagaatggccatgaacttaattgtaacgacttaacccaggaaagaattgttaggttttatgccctnnnnnnaactccatttcaatgtaatctatttt

SEQ ID NO: 111323 - DNA, 2271 bp, Cannabis sativa
ttcaatgttggcgtaattagacatgagcagtgccttcagtgaatttggggtcctcacatctgtaccgtccatcaggtccaattccaaaaccttttggatctgcaaacacattctccagtagctggttacgagctggatagggactttcatctgcaaactcaacagcttcttcaacaagatcatctatcttcttctctatggccttcaactcttgttcatttgctaatttgctctcaattaagtgtttcttcaaggctgcaattggatctctagcagcataacgtgccttctcagctgcaaaatcaggaacccaaaaaatgattgtaagcagggaactccaataaaataacacatataattacacatttggtattgggatacaaatagcaatgctaagaatctccttcttacagaacatactctagtaataaacagaagaaaattcgtgaaaaaacaatgtgatcaacatgcaacattgattataaagagaattaatcatctgaaaaatacaaaataaataataagtgaagtactgaccagggtcacggagctcatctggatcagccaatgaatgtcctctgaatctgtatgtctcacattcaaccaaggttggcccttctcctctcctggcccttccaatggcctccttagcaacctccctgaccttcagaacatccatcccatcaacatgaacacctggcattccaaaagcaggtcctttcttccagatctctggatctgaggtagatctcaaatgggacatcccaattgcccacaaattattctccacaacgaaaatgatgggcaacttccacaaagctgccatattcaagcactcaaagaattgtccattattacaggtaccatctccaaaaaatgcacaagttacgtgatcagagccgggctctttcaaaacctccctcctatacttggaggaaaaggcagcaccagttgccaccggaattccttcaccgatgaaagcaaatcccccaagcaaattgtgctctttggagaacatgtgcatggaacctccttggcctcggcagcatccggtggtcttcccaaagagctcgctcatcactgcacgggctgggacgcccttactcagtgcatgtacgtgatccctgtatgtgctcaccacagagtcttcctttttcagaagtttgatgaatccagttgacacagcctcttggccattgtagaggtgaacgaaaccaaacattttgcccctataatacatctgagcacacatatcctcgaaagatctgcccaatatcatgtcttcatacagctccaagccttcctctttcgtgagcagctggataaaatcgaattaaaaaaaaagttcaatacactaaaatcttaaaaccctgttcgagaatttcttgttgcatgctaaactttatacattaaaaataatccctttacgttttaaggtgtcgaaccaacagtttttggaagataactaactcgaatttcaccatcgaacaacaagaattgatacacaaatcttctgatttgcttagttgaggtgtcaaatcgatgatcaaacagtgttcagctgatcttacttgagtgtcacaatcacacaaatcttaggaaacccaatacggtaaacaagtaattaattagaaacaaaatagcaaaacgctaaggttttcattaaattcccataattcaaaacaaaaacaagaagaaagtgaagctacaacagaaaattgaagcagcaaaacaaaaagggtttaccagattggtggaagtctgacgctttttctccttaacgacgtcagagacagcaacaacggcggatcgacggtaagaagcggattgatgggatttggtgggaagaggattgaagcgaagcttctgggtagatccaaggaaagagcaagtcttaaagagagatggggtgtcattggatctgggagtggaggcatggagaggaactggttgagcgaacttagtggcggagaacgacattggcgtgtgtagtgtttggaaaccccaggtgagaggcaattgagagaaaccaatgtgtatgggtgtaatgaagaagaagaagaagagagaagagaaaaagaattagatgggaaaatgagggaaagtgggagaaaataagaaggaagaaagaggcggaggatacgagggtgaagagtttggaaatgtccgcctactgtgcggagccaggtgagagcgttggaccataagccacccaaacccaactaatttctcactgctatttacgtttcttcatttattattattattatt

SEQ ID NO: 111324 - DNA, 1496 bp, Cannabis sativa
  modified_base (397)..(402): a, c, t, g, unknown or other
tttttttaaaggttctatcaaatatgatccttgtctaaattttttttatgtgtatatttgatgccgcaaatctataagtgagataaaatgtctcaatatgccttttatcctattttttttttttatttttgttaacttaaaaaatggaataaaaagtcctatttcttgtagtgacattattacttaaatggatattaattattgatagttattaaataaatttaactataaattttaattctaaaatattaaactattagatactacaaaaaaagactacttttaatgataattttttagttataacataaattttctgtgactaacggtgacttttactgacaataaaaaattacttgtgactaatacatagcatttagatacaagttgtcactannnnnnttttaatcacaacaagtattgtgattaaaaactcatttagtcacaacaaattataatttttgtgactaatctatatcttgtgaaaatactataaagttttaccttcacatttaatacaactttaactatctttagagaaaattgtcacaactgctctaagcaataatctcaatttactaacaactataaataaataaattaattatccccgcgtaattaatatcttaaaaaacaattaaatattattttaatctgaatattaaatcaattcatcataaataatttttcttattttctttattgaattagtaataagattatataaaaatattatacttaggacataaaaccaaaaatataataacactttttttttggatcgggacttggatccagaattaggatccgactcagatccggactagaccccaaatcccgaacctttgaccctaaactccgactctagactcgaacccacccagagtcgagtttattaaaaacatattataactttacaatttattaatacaaatcaataccaaacatattattgtattaaataatattaatacaatacaatataacacaataatataatatggcgtaccaaacgagcctgatcagtaatgtacagccgagtttgttcattcgttttcgtcaaaatatatagttggcaagcatgttgtcgttttttcaaatttatgtaatgttatttttatattattgtcgtttttcataatttctgtaagatttcatcatgtattaattttgtttttcttaatttacgtatagtctttcaccgttttatgtcgtcttgccaaatttgtgtttttcaagttcactacgttttatgtaatttgatttttaaaaaaatatgtcgtttttcttatttcatgtcgttctttcaagttttatgccaacttctccaatatataattctccattttttttttattatttttatgtaatttgatttctcgaaatattgtcatttttcttattttatgacataattgaattttaattaaaaggaattgtttcatatatctattctatataaagtatgcttatataactgaaattcttggtttatg

SEQ ID NO: 111325 - DNA, 13922 bp, Cannabis sativa
  modified_base (5957)..(5960): a, c, t, g, unknown or other
tccagtgggagaatcaacgccgtctgattatgtcttgggcgatgcttaagaaaatgattcttctccgatttcgtgcggtgccaacggggtttttattgaaagaatttttgtcagtggttcaaacgggttcagttcgggagtatcgggttaattgggaaatgttggcgtcgcgggtacccgatgtaccagatcacattcgggaggggaactttgttaaaggtctttgagatgacattaaggcggccttgcttattcttcaaccccaaggattggcttagctaatggagacggcccaaggagtagaggagggagatcccagtaaaatatttgtaatgctttacagggagatcccagcttgtgtaagtctccgatatccttgaaggttatgatgttaacagtagagaagggggttgaggcttattgggatcaatttggctcattggccactgaagaatgcgatgaatagccactgatactcaccccagtcactcaacttttcgatcagtaccaagatgtgttcgagttgccgcttggacttcggtctcgtgacgatactatcacgctgaaactaggtaccgaagcaatctcagtttgcccttaccgacatgctcaaattcagtttgttgagattgaaaagatggtcctcgaaatgcttcgagtggggatagcacagccaagtacgagccctttttccagccccattttatcagtaaaaaagaaagatggaagttgaaggttttgtgttgtttatcgggctctcaattgagcaactgtagtcgataaattttccattatagtcattgatgcgttgcttgacgagctacatggtgccgctattttctcgaagttagatttgaagttaggttaccaccagattcgaatggctcccaatgatgttgaaaagacagctttccaaacacagggcattatgaatttttggtcatgccatttggcctcaccaatgccccagccacttttcaagctctcatgaatgaggtattccgtgattttcgtggctcttgtgttttagtcttttttgacgatattcctatgtatagtccaactttagcagcccatattactcatctcaaaatggtcctcgaacgactctagcaacatcaattgtatgctaaccggaagaagtgtatttatgttaagccacaagttgaatatttgggccatgtgatctcggccaatggggtgtcggccgacccaagtaaaatatttgtaatgcttcagtggccaattccatccaccatcaaagaattaaggggttttttgggtttgatcgactactatcaaaagtttgtttaggggtatggaagcatatctcatcggttgaccgaccacctgaaaaaagatgctttttatggtcctcgaaagctcaatgtgcctttgaccagttgaagcaagctatgtacatagttcatgtattagctttgcagacttctcagctctctttgtccttgaagcggaggcttctagtatgggattaggtgtgtggttcttatgcaacatgaacgaccccttgcccatttcagtcgcaccttgtctcctcgcgctcgatcgaaatcattctacgagagagaattgatgactattgtccttgcaatacaaaaatggcgcccatatttatttggcagaaagtttctagtttggaccgatcaacgtagtttgaagtatttgttggagcaaagattggtttatatggaacacaaaaagtggctcactaagctcgtggggtatgatttcgatattcagtataagtcagggtccgaaaatagagcagccgatgctctcttgcgggtttcagctaaggcttctttggctgccattactgttcctagtgtgctatccattcctgatctacaagctcaagtggccgctgaccttgacttggctaagattatctcggagatttctcgcagacaagatggtgggagtttctctttgactcatggctgtctcaaattctgtggtcgtgtggtgttattggcctcttccccttccattcctatgttatttattgaatattatagcagcaaagtgagaggccatctgagtgtctttaagacttttcaaaggctagccgttgagttttattggttcggaatgcgcaaggatgtctagaaatttgtggcagaatgttctgtcaacaaaacaaatacatggctcaatctccggtggggttgctgcaatctctccccattcccgagcaagtatgggatgacatttctatggatttcattgaaagcttacctctctccgatgggtttgattccatctatgtggtggtggaccatctcaccaaatatggtcactttattccttcccgtcatcccttcatcgcccttaatgtggcagcagcctttgtgaaagaagtggtgaagcttcacgggatccctcgctccattgtgtcggatcgagacaagatttttttgagtttgttttggaaggaattattctgcttgcaaggcacttccctaaagtatagcaccgcgtatcaccctcaaacctatgggcaaacaaaggtggtcaatcgatgcttggaaacctataggtggggcttcataagcttcaaacccaaccaattggtcgaatggttaccatgggctgagttttggtataacacttctcactacacctccatcggtatgactcccttccgggttttataccaccgtgatcctcctctattccgttccgggcctcaagtactcgagtttttattgtggaccaagtcctctcggactgcaaagacttactcgcattgctgagacaaagtcttcttagggcacagcaaagaatgaagactcaggctgatcgtaaacgtcgcgatgtcaattttgaggttggtgaccaagtatatgtgaagctacgtccgtaccgccaacgaactatggccaaacgaccaagtgagaagctgtctcctcgttttttcggcccctctccggtcctagctcgtgtcggaccaacaacctatcggcttcaattacccctcgagtctatgattcatcctgttttccatttgtcattacttagagctgctttgggtccccagcaacaagcctttcctctcccttcggtctcacttctgatctggaatggctgctcaaaccagaaactttgttggccattcgccttggcactcacaaacaagtcctcaagctttgattaaatggaagaacctcctagaatttgaaactacttgggaagatttctcagtcatcctcaatttcctcatttccaccttgaggacaaggtgaaatttcaagcgggcggtattgataaaccacctgtcacttatgtctatgctaggaaaagggataggaaactttatataggggctgccacagggatttaagtgactgtgcaagttgttttgtaagtggtgttagtatgggacttagcctcacggaattaccatggggtaagggatataaataaagtgggaagagtttgtgaaagtttttagagaggattttactgaattgtaaggagagcccaggctctcgagtacctggggattttctaataccagtacccttttttcttcatctccttcttccttttattttctgtttgttactgattgaatcgatagggtaggacctatcattaaccttctattattaatgggattattggtttaggggagttgaggagtacgctgaacaaacataaaggtcctatcttttctctgaagtggaacaagaagggtgattatcttcttagtggcagtgtggataaaactgcaatagtgtgggacgtaaagactggagaatgtaaacaacaatttgaatgtcattcaggtacatttatctctattaaaattatggctgatatgaattgtgttaaacttatattatgtccttatactactaactatatttgtatgtgcgcgcacacacatttttatcccttcaagtctcaatggaacttaaaccaatttattttttcagctcctacactagatgttgactggcgaaacaatgtttcatttgcttcatgctctactgatactacaatacatgtttgcaaggttggagagaaactaccattgaaaactttctcaggacatcaggtttgtctttgcaatgaaaagatcagtgctcttatatcttttggttcaacgaaaatacatttattaatggcaaataaagaaaatagtaggagagctaagagatagatgagggctactgcatgttctttatcatctttctatgtttttttcagggtgaagttaatgccattaaatgggatccaaccggtacattattggcttcttgttccgatgattttactgcaaaggtgattacttcaaatccaggtccttgtataaaagattcttctcctccaaactccataatctgtggaaagtgtcgtgtttatgagcatgcctcatatgctcatgcttgagtatctcgctgtttgaccttcaatatttacttctaagggtttttcactagtttcccccaccatttctttttaagctctcttttgaacagaattgaaaactccaaatattctattccagatatggagtttgaaacaagacaagcacttgcatgatttgagggaacacactaaggtatttgtcttttccaatttgtaatttggaattgagcaaagtttaaaatattaatggatcgtggtggtcaaaattataggagatttatactattcggtggagtcctactggaccaggcacaatcaatcctaaccatcagttagtgttagcaaggtaaatttcctacatttctgacatctacgtctcacaacggggcaaagtaaaggaattaacctagtacttgtcttgccccacaaattcaggttattatggcaaattgagagaaaatgcttactgttattgggcaactggccactgatattattattgcttaaaaaaattaaataaaatcatgtatcttcaattgttattttttgagcagcgcttcatttgactctacaataaagctatgggatgtagaacaaggaaaactactctacagcttcaatggccacaggtaccaataagaaactacgtatatatgaattttgtgtttttgtctgtggctgaagaagtgatttagtatatagactacaagcattcgattaattacttttctattaacttatgggagcatctcttttgttttttccatgcatcgacatagcctgcttgattatgggttcctgaaattaattaactttcaaccagattgataattactttgcttaatcataaataattaattgcctggtcaaatttcttattccccgagcaaattatttttattatattttaattgcttcaagattattcgatggcatttgtcgaatgtggtatcattttattaatattatttttaggataaatagtggtggtataagcgcactcaaattagatgagttataatgtttttttcttcaaaatagagaaaagaaagatgaaaaaaggtcaaaaaattggctccatcctatgagctattttagctcaaaatttaaagaatggcactattcattcttcaaacaatatttaattaatattttatgcataattattgtgtattttatatatattaaaaaaataatatttaaatgaatgtaaagaaaaaaataaaaaaagttgatgtatggtgtaaagtaaaagtttaagggtaaaattaagaaagtagagttttggtgaagtattttaaagaaaatagtagagaagttgatgtaagtgctctaaagtggcgtttgattgggaggaatgataatataggaataagaatgggaatggaatgtaataaaatttaaaatgtataaaaaaaaattaataaaaaaatcattaaattttttctcttgttatactggaatggtctttccttcctttgtaaaatggaatagtcattccactaaaatggtggaaagagcattccattataatatcattccaatactttaaaatgcannnnaacaaaagaatggaatgaaaattgtttcctttctatgattttgtaatcagcataaattcaatgatttttttagtggtataagtacttaatgttaataaaactataattttcgtccaggtttgtcagtacaaattctattagtgttttaaagatgatacatgtaaagcctagattctaaatcaatgggtctggacggaaacacatagtatcagttacttttaaatcttttttaataatttaaaaaactaagtttagttagaaatttaaggtactaacagagtctgtactgataaaaatagataaaaattacagttttactaacattgggtacttacgtcgttaaaaaaatttatttggtttatgccgcttacaaatttaaaattttgaatatttatgctgctatttatcctattttacttttttttaagaaattttattttaattttttgttaaagaagaatggtggagattctccacctcaatcacctttaaaataaataataataataaattgaagtattgcgaagccaaatctaaactctttgtgacactttattattaccaatcccagggatcctgtgtactctgtggcattcagcccaaatggggagtacttagccagcggatctatggacaaatgcatgcacatatggtctgtcaaagaaggtgaaattgtaaaatcttacaccggaaatggtggaatttttgaagtctgttggaataaggaaggtaataaggttgctgcttgctttgctaacaaccaagtctgcattttggattttcgaatgtagaagttggattattcatatcatatttgttcacttcattggattgtatgtgtttgtttattcttgtaatataccatttttgttaattttggggacacaacagcatctgcttccagtttatcatcacaaatggacgcatgaggtactgtagttcgaatggacacaaaaataattatagtattcttccaaaaaaaaaagtgtaaacaggatgatttaatttgatcaaaagtgtaatggcttggtgagacggagatagtttaaatagaaaagtgattattctgttagcatcagcaatggtcactataaggaattatggaaccaacaactggcacaacaatgacaattggacaaacagtgaagcaagaagcaccatggttcaacaaaaacaaagaggcaacactttgtatagagctcaaaatagctcgaataaagacaataattagtatcagattaatgacattggcaatcgtgaacaagatgtagatagatcgaggacgtcaccataattgaaccatgatatgtgtgctatagaagaatctataatattatgaaataccatgttctttgttacttaatgaatcatgagcacaaaattaataaagcaagccttgaaggactaggcataaaaaaaatcatctgacaccacgagcggcaacaattgtggaacctgacaacaattacaccgtgaagattctcatggaagaggatgaagaggccatcactcgtaaacacatagacaaaagtcagctgaaaagtgggagtgaggatgatgtattgtatattatagatagattggcaaatggcaatttggaatacagccgtacaactcgaaaattatacaaaataaatatgtttcagtgacatttaattatgagattaaatcataaaatccccagaaacgaggaaagaaaattacgtttttaaggatgtttataacttttttacatattttttatttatcttttataaaaaatatggattattgttttttggatttataaaaaatgttatttttacgttgcaaaacatagtataacattgcaacaacgtaacaacaacgttaattttttaaaaaaatagtccactaaaaaaaagatccgtagaaaaataaaaataataaaagtgcgattttaaattgttgtgtaaatttccttttaatttttgtatcatgatcgtgtctacacgttataaaaaggccaaaatgttttacacaaatattaatatgaaaaaaacttttttactcattttatttacatatatatatatatatattgaaaaggttaaaattatgaatggtaatgtttgtttgtatatatataattatgtttattgtatcaatttcaggttgcgtcgtaacatatttcatcatatgttaaatatgttagcttttggtctatgtcacgtgacacgtttattaaatatgttgccatgtcgtgtcatatagtgatatcgtgtgatctattaaaatagtatgatgtttgagattttgaaacgattaataattgtatcgtaattgtgttcaccataaacatgttaacataaatactacgcaataacaaaaactgtgaaatattacattttgtatatagcattttatttaggatagatttattttctattttatttattcgtctttctctccagctatattttgttattttagttatgttacttatctcggtttaggtcgttttcatttctcttgagtctatatattcctggctctctttcattgcaagtaaattaatttttttttatcaattcaatacaagaaatttcatccatgtttattcgatatttcttccgcaataccaaccttagcaaaaaatgttacaggaagagcattatcaatcaaaatgtcaaactaatttagattgacaaaatgaagaaataaccaactttggagaaaagaaggcacaaccattttaactgcgcgtcacatgaaagaagaaactcaaacaaaatttgtggtagttagattatagatagtagatacttgtagcaacttcatgtgtggagataataaggggttgagttggatgaatccttttaagcttggtgataaagaaattcaacccttagtatctctaatatcttttttgctccacaatttgtaattttttgtgattttgaaatcaacttatatagctgttcatatgacggaacagaatggtgtggcaaaaataaaaattatactattacgaatacggtatgaagttttgtagttcaaaatataatgactgaacatattagagaagatgaacacaagcactaaatcattcataaatatttggtggattgcttatgcccgtattcatatatatgagaatacgaagatgttacatttgataagaaaaacaaaaaaccccacggaatgagaacattatgtaataaagaattcgaccaatttatatttagtcttattataaattagaatatcataacactactcaagattaagatctcttcagttgatgtatatgaatttctctactcaaacagaggttcttagaaattcatatgcatcgtgtctcagcctacataatgaatattgtttagagtacctcttttttaatgtctccacattaatagttttttttttcttgatgaaaagtgtgattatattacttaaaaaaaccgctaaacctcacggtcattacataatagttcaagaggaatagaatcaacagaaataactccaaacttctggtggaaaaacgtccaattagctacattatgagtaacgaaattacaaagtctactaatattactgaaaatacaactcgaaaaaagagaagaataactattacaaaatgaaacgtagttatccaatgcccaacaagagtctttcctattaagggcattgataactaccctcgagtcactctccacaatgataaacttggaacccatatccttcgcgatcgaaagagccaagcagcaagccgccgcgtcaccgcaaagcgcatcaaagaagtccagccgaactgtttgaatccagacaatcctaccagggtggttcccggcaacaactgcagagcacatgctttctaatcccactttaacatcacaattcaattttatccaatcctcacagggagaagaccagacctctttccatgttcttaacaataatagttgggataatctatcatgttcttaacaataatttaaaatttacatacatggtgcaacttctgaaaaagggtgcacggtgtgggagtgtatttttttagaaatatatgaattttcttttagatattcttaataatttattatgcaaaaaaataataatttaattaaacaaaacacgtgcacacaataaactctgtctcaattctacttttagcgtgataaaagtaaagttctaaatagataaataattataatgtagactaaaaaaaaaccagcaaaattatctataatattaagtaataatattatatgcacatctataatacactgcgacatattagtaactattttcaaccaatctcatttatttcagattgactcacatttttaaactgtgttacattaacgtgtataataatttgctgtaaatttagtactctataaaccagcaaataagagtgaaattaaactttatatgttacagatttccatcataagttgagatttgttttgtatcattaatacgaacatttttttttttttttgcagaatcctagttccctttcaaaataaagataaaaaaagataaaaagaaaacctgaagtatctattttcaatcatagcgacactgttgcactcagatatatgcacatggtcagaaaaagagggcattatcgtaaataaacttataccaaaaagaatcttcaatagataaaagccacaagaaagaattggctgtaatactcatttcataaattttagagaattaaatgtaggacgaaaaaaagctcataaaaaaaaataataaaggaaaagtttcaatactgtactgtgctgcactgctgctgtggactcgtaagtctgaaaaacaaaaagtctttttttctcttgtcgaccagaccaattattttcttggctatctgccagcatttacttcaaatcaagctttgaattgctactgtggataattagatttcttggtctaagacaaatgtcaatatatcaataagaaaagaaaaacaaatgaaagcttacattagttgcctgttcattaaggtcgtatttcagaaactatacgcataaaaaggaaaaagataaaaaagccgagctgcgagacaatataaaagggctaactgcttcattaagaattttcatgtcccaaactatacgcatacatcattccaagtgaaatgaaccaatgtcatcccaaaatgttgtttgccatcgtgagaaaacaactccacctcaaaagaatcactaagaactataatatatacgcaatctcactacaaaagttgtagagagtttccagcttcacaaccattattgtgagcagcaacagcagcagaatgtcatagtagcctatttccaacagtctggaccaacaaaatcaacttctattgacaaacccaagtcatccaaaaatcaccttttctctatcattgtctaatatctccaaaatagtgagttggtatctccggaggagaaggcatgatcgccacagatttaaactgttccaaaatataacgattcaaatgagaacaagcattctataatactagaaatagagaattattgtgctttcattaatctgggcaaacaatgtgttacaaatacaattgagctaaaataccttatgttgcttgtatttccttcttgaagcttgataagactcccctcttctacttagatacaaatcgtgtataataagaacacattgctttaaatcaggtggtgtgtatcttgaatgattttgcagggtcaacgtctgctaaaattgcatacctcatcaatttcccttcacatatatcaagtcaaaaaatattgcaaaggaataaattaatatgaacaataaattcatacccaaggaaacacctttggcttaactatgaacctcgcaagaaatataacagatgctgccaccaaagaaggcaggaatttcacacaatgatagtccaacaaacttagctcagcaagatagtaactcaaaaattccaaatgtaagtttggaggaggctgtttcgaatgaacataaagataagttattattgtgacaagttgcagttttaggattaaatcacaaaaaggggatagatcaactgactttgttactctcttgagcaacgttaataaatctcctgcaaacaaaaatagaaatagcaacacacaatcaatccatttttcttatcaacaaatactagcgtgtttaattcaaaagttaaatatccctattaccttacaaaggtctttatggtaggattgcccaattcaaacttcaatgacttaagtacttcactttccatcttcactaccttcacaaagagctgttatgttaaaagaaaataaaaataataatagttaaataattcaaaatagtgaatttaatgacagagaaaatgaataaatcattacctcttccatagtgtaagtattatccgttatatagcaaaaatcttcaacatgaggagggccaatctcttcatactttcttcttatcagaataaatttgaaacaccaacaaaacaaaaatagaaagtatcatttccaagccagaaaaaaacagtatcattaatacagaaaaatccaaccctttcaaaaaaaaataaaataataaatataaaaatcgaaagacttgggacttacgacgctatcagcattgaagaaactcctaataactgaagactctggcgatccaaagtcttcattgacaaaaatctatcaatgaaggaaatagtgaggaataaagtatcggaaagtagtctgtattcctctgcaacttctaccaaccaatcaaccaaaattcccctcataccagctgtaatgtccttttgaactttctccatgtaatctggtagaggtcgtctgtttggatcagcctgaagattaacccataatcactatattttactcacaaaacacaaaagtggatattatacttttaagcaggaaagccctcgttacctcaatttcttgaagatatgcataaatgtcagagacataaggaacgcacatttgtggatcatccaacgccgccggttcacgattcaaactctcactatgttcgtctccggtagcttcggtggtggtggtcgaggcggttgcgggcaccaccttctgaagcttcttcgttttggtaacgcgtttgggctttttgggatcaaccccagaagaaacgacattagacaagttggggagctcacccaaaacaacgcgccttttattcttagacgatgggcggtcgccgtcgtcgtggaccaaggaggccgccgccgcagacctttttttagcagaacgcgtgacacgcacgctctggtgttgctccgccatgacagtgagtcaagctgagctgagaacaaaaaggtgaagtgaaggaaacaaaatgggattagggaggagaagtggagatttcagccccaaagcggagggaattgttttatatatttttatttatttatttatttaattaaattattagcttttcatatattttgattgggtgggactcagggagatgagggagggagttggagtattaaaacccaaaataaagcgccatttttttgttccctacttttatttgtttattatttggggccaataattatgtgtttgcgcggttggttggtgctcttttttatttttcgtttttgggttttggatttcctatttaaattttgaaattttgagcgttttttcagtcccaaatcctttgagcatctctatttttagatcccggcgggcttttcaaaagcctctctcaaaactcaaaatatcaattttttcagttttggaacatagtgactgtgactgtgagagagggaaccctttactgaatttatttaatttaatttattacatgaccattactcactttatacaatttttgttatagaggttaatatagcttttggaaattatatttatatgagataatattagggttttacaaaaaaatttataaaccgcctaaaccgaataacccgcccaaaccgaaccgaaaaaaccgataaaaattacaaaccgaaataacccgaaaaaa

SEQ ID NO: 111326 - DNA, 8500 bp, Cannabis sativa
  modified_base (1158)..(1165): a, c, t, g, unknown or other
  modified_base (8435)..(8437): a, c, t, g, unknown or other
  modified_base (8468)..(8472): a, c, t, g, unknown or other
tgcaaggtaaatgaaatattcctattttacttactaagaaaaacctaaatctaggatttctcttgctccatccaagttaaactactagatctagccctttcgaaacaagatatagcttaacaaattgttactcatggctaagacataacaatcaaataaaatgacaagcttacttgaatgaataaagacaaatatgcttaaaaattaatcatacccaacataggagttcatagccattcaagccttaagaaaattagctcatgtttaaatcaaaaaatataattcaaactcgaaattgttcatccatggccgctgccctttttacaaattatcaagtttctagtatttaagacaagaaagaaaaggaaaacaaaaatatagaagaaaaagaaatgcaaacaaatagggcttttgtccttttctttttcttacacttgggtccccatttttctccttcctcttttgtactttttctttctgcacttaatttcctcaaaaaatggcagctgccatcatgttgaagaagaagagtgtacttagttgcttttgctcactccttacaatttaataccttaaaaatagaagcccaaattatttataatcttggcgcattaggtattgtctcctccttccacaacgcataactttgagtgactgctacataattgctgatgtggataggtgaaatttgtttttcaaacttcttccacgtcactgcctagaatgttatagcattatggcagcatttcttgccaaatttaagcttttccttccactttgcctttgcatcatttcttttttcctagcaagttaattcttctttcttacaacaatcaagtaacaattatttaaaaaaaaagacagctaaaataataatttttacaagacttaaaagttagcttactaaatagaaaataaaaataacattacttaaaattaagcaaacaaacacactttcactacccttctcacaataatttcagtttaaaagcataaaaaaataactttataccatagagatattaagatgttatattattagagagaaaatgatgtcattataaaaatttgcatggatgctatttattattttttaataaaaaattaaagctaaaaagttattgtagctgaaaattaagatatatattaaataataannnnnnnnatcataattataatatttttaaaaagtactatatattaaagtatttttagaagtaagattgtcaaaaataataaaatattatatttttagataatatataagtttttaacatctactattgaagatgttatcttgtcccgtttaatattcggggattgaaaatcgttcccgtccatatcctacttggtgcacatattggcaattacagttggtattggtaattacagttagtattgacaattaccattggtatttaacggtaagatttaaatggtgtttgaaataagaaaagtgaagtttaaataactaaattcaagggcacaactttacagaagaggcgcttaatagggttctgggtttaattctaagctcgaagtttaaatttgcaaagtttccggataatcatggcggccaatgcttctccctttaaggtagtgtttttctctcttggttattagggtttattccttctctcctatgtaaacttctgaaaggaatgatgtacgtacttctttggaagatcgggagattatcaagttttctgtttgattgatagttcaatatctctactaccacatgaattttcgaagtaactggcgttaatgctgtgcagataattttgggatcatcttcagtagcacgtcggaaaatattggctgagatgggatacgattttacaatcatggtaaaatttctgaattttattttttgtttcgaattttctgagaactttaagtgtttctaattgtagactgcagacattgatgaaaagagtatccgaaaggagattccagaagagttggttgtggctcttgctgaggccaaggtcagattttaagtttgatagtttcatgttgatttgataagttagtgccgattggtaaaactctagttatttatttatttatttatttatttaattttttttttatggggagtctactttctctgttttgggtgcttgagttcaagtattttcctttgattacaaatcaattactcactcaggcagaagccatcatatcaaaattagaatctttgcataatcaaaacaaggatgacacgccaacattattgattgcagcggatacagtatgtcttttaatcttcattttaggcatatcaaaagatggtgcccctgatttcaccaaaaaaaaaaaagatggtgtcacttagggccatttatggatggagaatgtaatacgtttttgctcaatcagtaatgctaaaataaacaaatatagatattgacactcactgatttgatatctattctaacaattaataatataatatggttattattttgaaaaaaccacaagtgatcaagaagcatgtcctattcattgtgtgagttttttcatttattattaaaccattacaatttgatccaatgaccaatattaaaaggaaaatttgagtttctatgcttattttagctatttaattaaaaaaaaaatctctttatacactatcaaaaatatatgtacatatcctcaattgacaaactatctatgatcattttttcctagtttggtatttcagaaaattgttttttggcccgaaactaagctgcttcaagtagcgtttgtgctcctttgctacccgtttagttggtagtaaatatactgggtatttgttagggtcctagctctacagttagctgccttgtctttgtatttttatactaatgcaatcatattattgctctttccaagcactactagcgtggtggtagtgtaactgtggttggcacttacctggtggaaacttcttctcaggcggcagccatccttccaaggatccccactggtgactacataaatgatgtcgagccaacactgttaattactgcagatcaagtataaacaaagctctctatatttttactcacctgattcgtattgtgttgcatgtgccttttgaagaaaactggaaaataggttattgacatgttggttttttaacccttagcctttaacaatttagtttcgcttgttaaatcaagtagtgtggtaaagtcaattatgcagtctgggcattttgacaacttggctatttctcttctttaaggatggagagatatagaagtacgacttgaacatttgtaaattttttcttattctttcaagtggagatccaggatgaagacttccttagattttcattttaaaagttcaaattctagattcacaactttccaatatttttccttttttctctctctaaataaatatgaatgaaaggtctttttttttttttttttagtttttgtaagttaaatattggagtataaatgaaaggaatcgtacctcttggcatatacagaccaatctctgccatacatttttctttccacctttgtgctcccgttttctaaaattttaaaaggaatcatctcttattttgtgatatctgtctcctaatgatatctttcagtagcaagtataaaacatgagttctccagcataggtggccctttggtgatgatcatatttgtttacacatacaattgctctctttacttcgagatgaacttatgtttgtgttatttcttacgtttgatgtaaaatgatttggaggtggtggtctatgaaggtgtaatcagggaaaaaccttccagcaaggaagaggctcggaagtttatgaaaggtttgattcatattgcagcttcagttttagactatttattcttattgactcctatttgtgatgtaaactgcagattactccggggggcaggctgctacagtcagctcagtgtttgtttcaaacctgaaaactggatttagaaagggagattgggaccgggtggaggtaacggttttctattttgcttaatgaattttgttttgagtttttttttttcatcttttctcatttctcttgttaaacatgattcccattagcttataatagagtagtgttgaactgttgacttatgtattattaatgtgctatgcaatctacataaaagatgtagtgttgaactgtttgtgcttccaacttttattttatctatttctctatatgcaattgtatttgtgtagtatttgagtaagatcatttttccaattaaaaagatatttatttgaattaaaacttaaaaaaattgccttcactttttgttaaggattagcaaaataatatttatattattatcccctgcagatccattttcatgaaatacctgatgatgttattgaaaaattggtaaggaagtcgcatctttcttcaattttagtttttactatttattatttttgattgaacaacaatcaggttggttattcctctttatatttatgcaagattgatgagggaactgttcttttcgttgctggtggactgataatagagcatcctttaattctcccgttagtaaagaaagtggttagtatgtttgtctctttctatagtattcttggtgtatggatttaactcttgagtttgctacaactctgttctgggtatgaaaatgttaggccccaagtgagattccggtattttattctagacatagcggcaaatttggtattgtgaattaatgcgtaggctgattatgttggtgtgtgaggtggtgtattgggagtagaattcaaatagtggttcggttaatgttgggtttgctgaatatatttatatgcgaggtgcttttgtgaggggtaatgataatgcacacacttcttttttcaccaaaatactactcacactttatgtggtaaatttttgtaaccaatgaaactcatgctactatgttaaaaagtaatgccatgtaaaacgtgtgcacataacattactctttcgtgagagggtgatctttgctcttgccgagagtaccaagcctctcaaatgcttggagtggctgtattttgacctaacagtggataactaacaacatccgacatattttctactcaatatcagtttggggaagcaagttgaagtctagttgtattccatagagaaagtagttagcactatttgtgaggagctatattgtgaggttggtttcattgtgattgagatgcaaatgatgctacaaagtttgattaactcttcaaaactcatttgaaacttaaccattcttcttcattggctagcaacaaggagtgagaagtgaagcaaatgagggattttttttttttttatttctgatatctattttagtatatacaaagggtatatagtatataatgtgaacatctagtaatactagagtaaatgaaaaatgcattaaatgtttacaactaatttacagctagcttgatcatacactcctccccaagctagatatatactaaacattcttaatttggaattgagttccctaaagttaggacgatggagagctttggttaagatatcagctgcttgttgtcttgagggaatatgcttcaaggtgatgatcttgttttcaatcttctcactaatgaagtgacgatcaatttcaacatgtttggtcctatcataatgaattggattctttgctattgctatggctgattgattatcacagagaacatctattgggccttcaagtttgattctgagttcatcaaggagacgtttaaaccacattcctttacaaattccatgtgctaaggcacgaaattctgcttctgcactgctgcgagctaccacttgctgtttcttgctgcgccaagctacaagatttccccaaacgtaggagcagtacccggaagtggatcttcattcagtgagagaaccaacccaatttgcatctgtgtatattttaagatcttagttgagatttttcctgaatattaacccttttcctggtgttcccttaaggtacctaagaatccagtagacaacatccatgtgttccttaaagggattattgagaaattagctaacaacactcatagcgaagcttatgtcaggctgagtgtgagttaggtatatttactttcccccaagacgttgataacttcctcgatcaacttttgttttgattgtcagtacttcaagtttggtattagtgtccatcggagtttcaattggcctgatcttagtttcttgtaataggtcaaggacatatttccactgagtgactgagatgccttggctggatcttgcaacttccatcttcgaaaaaattttaattggcctagatctttaatctcaaattcactggagagaagctgcttgagatgagaaatttcttccatgaaattaccagtaactgcttatgtaaacctgtcaaaccaggctcgaggggattgcttgaggccgtagagagttttttttagtttgcacacttttccttgagaatcggtcttcaaatcttggaggaatgttcatgtatacttcttctacaaagttgccattgagaaaagcatcctttacatcaaggtagtataaaggccattcattgtttactgcaatagataagagaactcggatggtgtttaacttaacaacagtagcaaatgtctcttggtaatcattgccatatgattgggtggaccctttagcctctaatcggactttggatctttcaatgctcccatcagccttatacttaactaagaagatctatttacaacaactgtgcgtttgccgttaggtagatctgtgatgatccatgttttattcttttcgagtgctcttagttcctccattgtggcaacattccaattgggattctgtaaagcttcctggaccgaaatgggaatctgaacttggtccagagcggtgataaaagctctataggtaggagataagcttgagtaactcaaatagttgtgaatgggatgtttgagtgcaagagcgaatccttttcctaagagcaatgggaatgcttagatcgttaagcacattttcttccacgataggttcaactcgagcatcttcctgttctagaatgaatggaatcagattgtatgcttgactttgctgagtttgagtggtagcttgttcattgtttgctagattcttctttctccttgagtaaacccgaatttctgtgtttgggttgtggacaggcaggatttgaaaagattggaggagtttttggctcatgtgaattggctgaatggttgggttggtcctcgttgatagggacaagacttaaggaagggattggatgagaatttcttggttcatgtgatttgactgaatagtttggagtatgagtaacagatgaatgaggagtttttgaagcaatggtgttgtcagaagaagaagaagaatgagtatcaatgagtgaaacaaagtcccaattttgtagttcttgactatgattcttcccctaaactgcaaatttgggataataagactcttcttcaaagaaagtgacattgatgaagttgaacatgaaattggagagtaacatttgtagccttttttattagatgagtagccaagaagaatacatttagtggctagagcatcaagtttgctgcgatgtgaggagtgaacatggacaaatgcaacagaaccaaagacactaaatggaatttgagacacaagatgtgagtgaggatatgcttctaggaagatttgcagctgagttttgaattttaatacctgtgatggcattctatttatgagataggtagatgtgagaactgcttcaccccatcatctttttagaacatgggatgaaaaaagtaaagatcgggctacctctagtaaatgacaattttgcgttcggccacaccattttgttgtggtatgtctacacaaaaactttgatgaacaatcccgttggattgctaatatgatccaaggacagaattgaagaagtcacgagtcgatttttaacacttggatgtttgtttggaagtagcttagatcattttgcggaaattttggaaaatatgacttgttttttatttttctttcacgaggaatgtccaacttaggcggttgtgatcatcaactagtaataaaaaccaacgtgccctactgatattttggattttggatggaccctatatattcccatgaatgagtgaaaatgggtgagagggttgatgaggtcttgaaatgaaagagtgacgggaatgcttagagaattgacaaatatcacacctgagagactgaggatttatattgacaaatagggatgggaataagtgtttaagatacacaaaatttggatgacctatacggtaatgccataacatgatagtattgattttattggattgatttattgaggaaagagattgaccttgggagaaacaacaatgattttcatggttaaacacggggttgtcgatttttagcagatacaagnnnttactgaactcagcatagccaatcatcttcnnnnnttccacatcctgaaaaacacaaaactta

SEQ ID NO: 111327 - DNA, 1693 bp, Cannabis sativa
agggataaatattctttctacagaaaagaagatgttcttggaattcataattatttaggaagaaattcagagaagggtattgctaaaataataactaccttatctattctgggagaaaataatgtaagaacatatcaaaaatcaatatatgtaaaatataataacgaaaggaaaatatcatgagaactactggattctaggttcttgtaagacgcagatggtttcttactaggaatctctggtaccaagggtccggaatggaatgagaatgaggttggaaaaatatgttgttgattaaacgaagaaaataagtcaaagacaagtcgtgcatgcaagagtattttgaagaaaagtagattttttctctcccgctttgtatttcatatgaagtaatgagaaaggtaatagtaaaaacctttttcataatgaaagaacgaagtcactgatcatgttttaaattagattaattaatttattgggatattctcagcaattaaaagaaatggataaaaagcccgtcacatgaagcatgtttaattaaatattaattaacctttcttggggaaagtaaaatcgtcaaagaaacatactcattactgactagaaaaagagaaaattatcccaccttgaatcgtttaaaaaaaatcttccagttccaaaaagagctttttatgggcaattattttgcccatatttctagccataactatagacatgacacgtggataataataccacacattaaaagaatttattgaatacaacgattatcttttcccaagataagctataataaatagatattggtctcgtgttgtgccacaatgaggacgatgataatacatagagctgagaagtaacaatattctaagatcatcgcgaaagctaactaggataactcaaaaaaaaatacaagaattgaagctacatcatttgaaatggtagataacgagttctttaaagagcttgcagttcattgacccacatactcatgagtatgttaaaagactatggaaaataagcttggagcgaccaatcttgaaattcgaaaagactagttgaagaattgtcgtaaaaggcaatggcaatgctaaacatctcaactagcgtctcccaaaagatgaccatctatttctaaacataatagaagagtgcgagcaatgggtggaatatgttacctctgcaatggcaaactgtttcatgataagaatgaaaagcggttatttgcagttatttcattttgtccacatgttgtaaatatgaaacataggaattgttcatgtttcattaacggtgacctagataagattgaaagagaataattgacattcctaaaattcctataaataggagtagaacctaccaggaaaaggatggatcattttgggtggaaaaatcctatgagattgagtgaatatcccgagaaattctcttgtaatccaaacacattaaaaagaagggtaaatactattttggaccctgtgttttgtacaagttgccaattagaccctttattttattaaataaaaaaatagaccctatattttccaaaatagtaaaaatgggaccatgagctcaatttttaaaaattttattttttaatctacctttaagataatttctaacacacagatatagaaaatataaccaattttttcgtaacatctctagatcagattattattaagtttta

SEQ ID NO: 111328 - DNA, 6728 bp, Cannabis sativa
ttcttgaattttatatgtgtttaaattctattgttttagaaattcatatttaggatgtcaaataacatgcatggtagtaaatctagatcctagtataataatccccaacacggattgccttgtctaagtccccgttgaggtaccaccttcccaagaacttctccattcagcaaaaaagagaagttaaccgacgtaacacaagacataactttactcacccaactatctaaatacccgagacgtttcatcatagcatcaataaaatgccattctaccctatcatatgccttagccatatccaacttgagtggcaatttcgatccatttcgaaacctattcttcctcatagtatgtagtgtctcaaagcaaataataacattatcatgaataagtctacctttgacaaacgcactttgtgattcagaaatcactttccccagtgtgggtcgtaatctatttgccaagcactttgatacattcttgtaaatgacattgcctaggctgattggacgatagtcttccaccttcttcggtttctccacttttaggatcattgcaataatagcatcattcaggcaactaacatcacctttgttatttaagatgttcagacacacagcaataacatcgccactaagcttagaccagaacttttgataaaagagtgtcgggagcccatccatactcggtgcttttgtcggagccatttctttaactaccgcagtaacttccttagcttgaaaaggtttctcaagttcagcattcatggtgtttgtatctcttcttggaacaacgtccagaaccgtgtctaatacagactcattcaagtccgaggatgagaataaaatgctataatagttctcaatgatgttctgaacaaaaatcttatcttcctgccaaaagccaaactgatcaaacatgcctttgatatcgttctttttcctccaaaccgaagctttgtgattgaaatacttggtattctaatccctgcacttcaggcatattgctcggctttgttgtctacaatatttctcttctttatcaagggggcttttcaacttttttctctgttgcttgagttctttccaaaccgaaggctgctggactaaggagagttcatggataatttgactttatcaatgtctcccctaagtttcttcctcttccttttattctatttcatcaacatctcaccacacctcttgctacgttgttgaaagccctttacagtagtaataatatgtttattcttccactgttgatccacaatatcaacacactcaggttcctcactccacgcttcttcgaaatggaagcggctttgtcgtcccgcaccttccctcagaatcacgtgttggcatatcaacgacaagccccctatgatctgactctccccaatccaaaaccatgatattagcaccatcaaacatagatagccaatcttgagggcatagtcccctatcgagacgctccataaccatatttgcttcatgaccattataccaagtgagctcacttttattagaaccaaagtcaataaaccgacaatcatcaatgacctctcaaaaatcttccatcaacctagaagctttgtcgcgaccccccaccttctccgagatgctcgtaatttcattgaaatccccaacacataaccagggaccactaattgaatcccttatattctgaagtaattcccatgagaaatgtctctgtgaagaatcggggttcccgaaaaaacacgttaaattccaaggaaggaagcctttccccatcacgattgtagtgatatggcccgaggaacgagaatcaacacgcaactgaaccacatttttccaaagcaataataatccaccactcataccaactctgtccacactccagaatttctcgaattgcaaaacatcacacaacctctcagcttgaggcctcctcaacttagcttcagacaaaaaaacaatagtcgggtcaaattcccgaatgtgggattgaagggctctcaatgtccaagaattcccaattccttggacattccagcttaacattttcattgcgctcggcgaccttgctcaacaaggctcgccgcttcaacattagaaaaagagaaaggtaaccaacatccgattgaattccattttccacagtaatgtcttcttccaccactattgaacctccatctacctcaataccagacctgatagctgcttgggctttagcttgaacccaagcttttgttttaatagagatgcaccatcattaacccttccccaattgatcacgtagcagtggttcccccagagaaaaactaccaatctccccaatagcctactcctcttgaacattcttccccttatcctccccgtggtaacccccttttctcctattgccctttcttccattacctacagactgtaaacacttttttttcgttgctcagcatctgggttcgtagattcaacgacaaagttactaacatcaataggcaaggacggtggtacattaccaaggttttgtttagtattttggttgaggttaaagacacttggcccatcaataaccttatcacgtgccattcttaaggaagatgggcctgttgcaggtccaataatagaaggcccattattatattttcactctcagcagccttcgacctataaggcacttcaacttgaacggtttttcccatattttccaagttgcccatagcattaaccgtctccaaaataaccatgggaaatggtttcgtggctagaaccacatccaccggaggaatgccaacaactctatccactgtcgtaaacataactttctgactgccactaccctccccttcaatcccaaaaaactcttcattatccacaccagtcatccctgtccgctcctcagtattcatttccatagattgtctctatttgaaggtcataaagcaattcaagatgggtttatcttcattcagccatgtcccatatctaggcatggaaacccctgtttcatccatctccattaattagcttttggtgcaatttctttgttcatgtccccaccacctgcaggtaaaacagaggattggatgacgctcaaactttagctgaattcaatgtttcttaccagccacagtaataaaccaaccaacaaaaatactctccttgatggggaagttgatacgcaattgtacataaccattaaatagtatttgttgagtagaactccatcgcaattcttccaccattccagccatttcccctatgcgcatcacattatttttggtgaaggctttcaacaaaaatcctcgtagtcttacccaacaagagaccttgtctaaccttgtatccttccatagcccagatgatggccacccctctaaaagaagtaaacctccattgacaagccacggttgtttctctaatgccaatttcgagtcatgttggttcgagaattttacctgaaagaaggtatcatccccttcggtgcctaacttcttcacgctccattcccccactttcttccacaaatgggagaaaatcgtcttgaacaacccctagtcaattctccacgtgcaatcactttgccaacaaaacttttcactaaactttgaaatctcttcctcattttcttccccattcctctcccgtattcacaaccaaattattagtacgattgattagatcgtcaaccccacctggaggtcccatcgttgccatcagaataagcatgtacattagaacaatcatcattggaaggagtcacagactatcgcatatgtaggtacctgtagatcattttttttcttttctatatagatatttatttttaaaaaattgttttacttaccaactttgttatcaattttttcatattaataattaattataacaatattaattatttaagtactttttttgaaaggaattatttaagtacttttgtcgtcaatttatttacatacatagttttatcataattatttttatattaatttgctttaatatttttatttgaaatattttattaattttttttttatcaaaaaagataatttctattaatcaaaccgagtcaattacatccacaatgagattccccttcggaagagaaacttacaactcctttacaattttaagaacaatttacaaaaatatgaattattattttttatgttatttttataataacattgtagtatgttgtttttaagttatttttatattacttttatatttgtataacattgtttatatattgtttttatattgttttcacggtgttccctaatattatagtttaaattctgttaaaaaataaaataaaattcatttaaagtaatttttgtaaaaaaaaaaaaattcttttaaaaacaaaagtaatgaaacaattacctacaactttaactaatatattcataaaattaatgtgatatttaagttaattttgtataaaaaaaaagcattttatgatacatctacaataattaatttatattatatcagtttattttctcactttaactttatttctcctcacttaaataaaaagcaaataaataaataaaacttaagaaacattttttttttaaaaaaaaatgaaaataattaccaaacatactgttattattattttttttaaaacaaaagagtatagtctcccctccaaaaaaaaaatagtcatagatcctctacacctaacataacaaaatattttgtacactttatttttctttaactataattagttagtatacttccccatggcacggggacaaaaccgtaaccaccactcttaaattaccttatatatataaatagagagatatgaagtggtgaagtaacgttctaaaatcacttcaaagttttttttttttattctcttcttaattctctcatttttcttaaaaaaatcaaaaaaaaaatattctttttttattctcttcttaattttctcctttttcttttaaaaaaaactaaaaataaataaataaatctacctaatacattttttatttgtatgatttattaaaaaattaaaaaaaaattaaaaacttgcattaattccttatacgttttttaatatttttttttataatatggtaaatgctaatatatatataaataatcttaatttaaacctaaactctaaacatatatatctaaacttaaactctaaacttataaatctaaatttaaatcctaattatgatttttctttgtcggtaacaaataaaagaaatgatttttcttttctttcgaaaaaaatggtaaattgagctctctttattaatttgttttatttactttcttgtgcttctagattcatcaattccttcagcctctatattaatggtggtacttctctcatgacccattaagcacagcttatgcaaaagaagaatcaactacataaactttcgtaagtgatactacagcaacaatacaaaatccttatcactggactaccgcgccaaagtactagaaatcaggtctatattatttttttcatgtctataacatataataaaagatagttcacatcctctcataatacaatatatattttttaataaatattatttgcatgaacattcgctatagttttattatgtagccaaggacaactttatctattataatataactagaaaatgataccacactttacacagttttataagaattgaaaactatacatatttgaataatttttagtctacttctatattgcactctgaaaaagagtgcactgatacatcccccactgttttagcatcacaaaagtattttggttaaattttttgtgttgttgtttatgttacagtaattttaaatattttgtaaaattttgagaaattcacaataatttatatataaaaagtactgttcacatagtttattttacacgtatattaaaaaaaatagtcacgcgtgtaacaaattatttgaaccatatttttactgtgttaaattttgaagaatttttaaaatttttacaagatatattaaataactacaacttatacgatcaaaataaaaaattggactaaaaaattctcttagatgccgaagcagtaatagataagagtgcattaatggatcctttagcatgggtgcatttataggttttgcttaatttgttatttttatatttaattttatatattttataaatttattttggcgattatctgttataactacaatataaattgttgtatatatatcttgtctaatatataaaatgcctatctaacagtttttgttgtacacttaacagaatataccaaaaaaaaagttaactttaacagacacatattcaattcaattcataagtaaaccaattttatttacaaaaaattatacaaaccaagacaacctttcctcatttgcacaagcaccaattctttcacacaactcataaatcataaataaaacaaattgtgacttttcaaaaagtttcaagaaaatacattaactaataatataaataatgtttcataatcataatttggagcagttggaatcgtttcttaaacaataagatttcgaaaatgatcagcctctatcaatgataaagatgttgtgctattgatgaggtgtcaataggagatcatagtgcttaacaatatggcggctgagaaatccttcagggtcattccaataggcttcttcttttctctttccatatctaaaaccttaccatatatacttgcccaagaactccttgaaaatatgttttgtagc

SEQ ID NO: 111329 - DNA, 2592 bp, Cannabis sativa
aaatcttaatgcaaaatttaatatgttatttaatgctcatttaataatttattaaaaaatacaaaataataataatgcaaagttaaatgtaaaatttaataatataataataatacaagtcaaataatgcaaatgagtatgttagctaaaatttaataataaaatattaaaaataacataataataagtataaaagcataacatttattgtgatgcaaattttgcatcatgctatattgtgatgcgaatttagattattttttattatgtgaaatttttgcatcataatttagcacactattagagcagacttttaacaaagtgagctatattttgtatttacatcgcttatttacatctctattgaatatgttctaaaacctcaaaacttacaaaattcacactacaaaaatgtgatgccatataaaccatttatactattgtcaaataaataaataatatataaaattttaccaacacaataaaaaatacacatattattttttttgaataataaaaatcttccaaaaactatggaagtataacaagtgggtaaagaatccccactaagatcatatgatcagcctcaaaaagagaagcccgcgccaaagcatgcgcaaggccattagcagaccgtttaacaaaaccacattaatcgacatcaaataaagaggttaacaaccctctacattcttgtaaaacaaaaccataaggagaatctaaagttttagcattcttaatatcatttataagcgtaagacaatcagattcaataatgacatgatgccaatctttcctcttgatctaacttagagcctccttcaaacccattgcatccaccattaatggactccaagttccaatttttcgaatttggacagcttcaattacattgcctgagagtttctagccaccaatccaaatccgaagcattcctcttccgaaaaaatgggaccatcaacgttaactttgatgaaaggatcatttggtttaatccaatgctcaacaaatctcccttgttgaccgtggccagaaggagatataaaggatgttttttgagtattattccaagatacaaagttaagagatgttgtggataccacttcctccactgaagattgcttagagttccaaccagagttgttgcgattattccaaatagaccaacataacattgcagctccaatttgttcctcctttttccaaatacacatattattaaaacttcaagaacacatttattcaaaaatacaacataattcaaactaatatatacataatcttttaagacatgaagtaaaattaaataaaaactataaataatctttaaagttttaaaatccacctatgacaattattatatatacataaatatttgttttaaaaaaaaatgttgaagtcttactttatatagataaactcaatgataatcactagaacaaaacttatatttgaaacttaaattaaaatttaagttataactatataattcattgtataaatttatagaaaatagtgtaatgcaattcaaattgttaagattaaatttaaaattacaaaccaaatcgtactgcgcgattttgcaaaaatgcaaatcccaactacattgtgaaggatagaggtgttcacggtgtgagtggtgcagtttttaactttttttcaaaccaacccgcatatgcagtttttctaattataggaaattttacagatttatccctacacaactcacacacacattaactttcaagttcaattttgacctttcatttactgaataaatgagcacacaattgacacgtattatatttgctgttattgttttactttgactttgctttaccatatatttgctttgtcgaaacaaatctttgaaggacaaacaattagggcaaaacacagtgtaagagagaggttagaatgagagaaccaactctgttcttgagctggtttcagagaaaataaacaacacaaagtgattaacagattaaagagattagggtaagagagagcaaacacagagagattttacaaggttcacccctaaaattggggctacgtccttggtgagctgccttatagaaaatcagccataatccactatcaagatcaatgattacatcaagttttagagctccaagacacatgaatcgtctggtagctcattcttcaactcagttatgtacaattctctcaaaaatctcttattttcttccctctcgggatcaaatagatcctctttctttcttctctctctgactatttttctttttcttcttttaacacgtgatgagtttttactggatctctatcttcatccctttatggtttctgagaagttttgtgaagctgcaagtatttatgtgtttagatccttctatttatagttgatgtaataactgattaagttagttaggaataactaacaatggtcttcatcttggattgcatatggttaggttagttaggattttaacaaactgttttttttacttgtaatttgtgataggtcaacttatatgaggaattatttcaacactaatttcccaaatcgcacccgcaccgcaatattaaaaaattgcaaaaaatggtgcg

SEQ ID NO: 111330 - DNA, 3956 bp, Cannabis sativa
tttagatctttaaaaaacaaatgcagaatcatttaaattgcccatcacttattttttaaaaaaatatatattaattttcagtattggtcacagttcttttctatatgtttatatatcatatatattctgtcacatggtaatcttgcttgcatcatggaaatgctctccaagtaacgtaaacttggtcagaagagctgtcgtgattagcaagaaacaaccaacagattctttggtgggcctaattattgtgaagaaagcaaatatctcatgtatatatctataagcacagagatatgagaactaagcaaatacataccctagtctccaaattgatgaattaattaatctatactcaacagacaaaagtactttgctaaagactacttatgcaatccgggaattacatgatgaaaaagtatgaaaattattaattaatgtaggtagtgatgtttcagaaagcaattactaattaaggttcaataatttgatccaggagtttcccatgtctcagctatgatgctatgtagaagacaagtatcttggtgacattcacgagaagaagacaatggtgacatggtagggtcttgctcttcattcataacatcttcaatcttttccaaaacctcttccatagtaggccggttttcggggagttcagagacacacttaagagcaatattcagcaaaatgaaagcccagtgagctgcttcagccttagctatttccctatcaaacacctctccagtccactcctctcttatcatggcattcaccaatttaggaaggtctacacctgttctctctacaggttttcctgtgagaagctctaagagtatcactccaaagctatacacatctcctttttcggatacacctttctctggtgctgtgtagcctttggaggaacatatcccatctcccttggggtctagaaatctcgagtgcccgaattcgcttatgactgcttcatcattgtcatccaacagaatatttgaaagtttaagattcccatgatgtagtattgtttcatgctcattagtaattctatacatgaagctcaaaccccttgcaattcctcctgctattgacaatcgaagtcttaatgggaaatccctcttgctttcgatataatctgcagatacatgctcaaacaaattatagcctcaaagatctaaacaaaaagagaaaaaaatttgtagtaattttttgattttgatcagactgattatgtagtttacgttagaacagcataattttaaacatgtctgattaattaagtgcaaaaatgatgaaattaactcaccttcaaacaggttaagcagactgcctttgttttgatacttgtagattaggagtttatcttcaggagtaaaactataagcaacaagaggtaaaatgtttggatgcttcacatctccaatcagattcataattttgcaaaattcctcaaaggaaacttgcaatctcttcaatcttgtcactgaatacaccgcattgttcttgagtattaccttgtacaaactacttaaaagactctgacttcttaaatcagctgtggcttcaagaaattcctccatttcgaatctctcttcctcatcaacaaaaaagacaagatcagatagtattctctctggcttcacttcctctgttgtcctaacttgaggggtcatagttggagagtaatgaagagacttcagaattgccttgtctcttgccaattctgatgccttcttccccgccaagtatgtcacaaaaatgaacaaagagagtccaataactaatggtatccagttttgtgatctcttgagccaactcttttcctcagaattgtcactttgggaactctctggggacacattagtatgatccttaaactcttccaggtacataattctactattcggtttcttcgattccacttggaaaatcgggatcataccctcaaaatgattattggagatgtccaatttcctaagatatttcattttggctagatcccttggaatcctcccacttaggagattactgcttagatttaaataggtcaactttctgcaatacattatggcgtttggaatgtttccttgaattctgttttcggctaagctaagaactcgaatatttggaagcttgcataatgaatttgcatcaagtacaccattaagatttaagttttcaaggctaatttcaagaatgctggtactaactatgttacatttcacacccttccacttatccaagcatggatttttgcttgatgcatcctggcctaaaaaacttaacatgttttgaggatcaacagctctaagaaacaaaattaatgattcaaattcagatgactcacctcctaaaacagtaggcattcgaaggaagacaacaccaataatcatccccatcaaaaaccggttcaatcctctccttgtctgcattattttctttattctttttaagtctctattggatcttcagaaactaaatgaagatagtcatacaaacatatatgcttctatctttattgatcctcctttcattattccacctcagaaaacgatatattctttcgtttattacaaagctttattgagataaccaatgctctatgtgtattcctaatcgttatgtactatgtcagattcatatcacagtcataacaagcatgtgtaaaatcacaggatattgtctaatgaagctcaaagacttatttataaacacaattggtgaacttatttataaacatgctgacacaggttggtcttattctgttaaaggtttgtttactttggtggaaacaattgcaatactagctctgcgtgattcatagattcatcctttaaccaggtgtatatttgtagtccaataatgttggactaggaaagtaaaaaaattttgaaagcaattaaaggtaaatattttgaaaattaataatttatatatatgcatgatattaattaaataatataattttagatttaaatttaataatttattgtaattaattatactagcattataacatcaatagaataaaaaaaaaaatcattttcataatgaacctgttaaaacaacaggtaatacaatctcaaattcaaaaaaagatacaatttacagattaaataaaaaaaaagtacaattctaaaatttcataaaatagactaacacaaaacttaaaaatgataaaatatatataaaagaatccccggagctccgtcgtcagcactcgagatggttgctcctttgtcagccacagcttcagctacggcgaaaagagaagacgagcagggtcgtggcttcaactccgacttcagatcttggtctttgttgctctctctttcagttctctgtagcaaaaccatcatctttctcgtcctccatcatcatcattctctctttcaacttcggctttagctccggcgaagtgagacagagagaatggaggaagttcagtacatggagaaacgtgcgcggtgctggagaattggggccggagaaacaaatccaccatggagaaacgtggatgttcagttcatcgtgttcggaggaggacgcagcggaggacacaatagtggtggaggacttgagaaccttggtgaagagagaagagaaagacagatgaactagcaaagaaatggagaagagaacaggaagtttggtgtggcgtgcggctggtttgtgatgatgagatatatgctaggctttttagtttttaaatggaaaggaaaaaataattatttaataaataataaataagtataagtaaatactatagtaataaagatgaaaatacatatggtattgaaattcggaccccttaacaaaaatataaatttggacagtttttattcttttttttttttttttgaatgatcaattggtttattaaccaataacttccgctaccaaacaagtaacaaatcagttggaacatcctccaaactgaatcgacgatcagggaataa

SEQ ID NO: 111331 - DNA, 2257 bp, Cannabis sativa
attaataagtaaatctggttatatgaaatgagttttatttagggcataaaacccaacaaaatacaccatcaagcatcaaaaacaaaatctaccattaagagtcaagtttgagcttgaaagctcaactcatgctcaaacacaaaaacaactaacaaaactagcttggaacaacataattatctaagaaataactctagaaagcattgccaaacttaaaccaaaacatacaagaacaaaaccttaaaaacatgcatgaaaaccttactttctactaaataaaacaaagagaaaggatttaccttggcttagctatcaaaatctttggattcctactgaatttcctcttgaattctggtatgaaggtgatggaaaaccctgagttttcctttatttttcttgtggccgaaccctaagggcatagagagaagggggaaggtttgaatttatttttttagtttttggataagtatgacttatctaactatattcaacttatatataattaattaaacttaagaattactatacattccactcaaaattaaatgataacaatctaggaaaaatgacaattttacccttgcttaaccatgaagtaacccaaataatctagggtaaactagtgcaaaaccacaaccctaaatactctcgacattccaaatgtttaactacttttctctgctaattctaagatactcaactatatccaagtgattttgttggccaaatcgtcgcattccattactatcgagcataaaatatgaaatataaaatttcatatataacataattaatacacctagaattcaaatatatctccataattgttgaaataataatttaaagtatatttcggataataaatactaattatatgctaattctcataataaaattaaatgatcattacagaaatcgttacccaatttattcagaaacagtaaaccgtttcgctgtagatttcaaaaactcaaaattttcttcctcagttataacccaaacatggtcaaacttttcaaaatatcttaaaaacaagttctaaacatatttcaacactcaaatgcatcattaaacccctgaacaaaaatccaccattattgagctaagtttgagttctaaaactcaaactcactccaaacaagctacagctaataacactttttcaaatcaatcacaaacaactatactcaagctttaaaaataatttctaacatccctaaattcttacggaatcgaattctcaaaaatcatgcataaaagccaaactttccctcttcaaagctaacaagataataggttcttgggtttaccttacttttccttccaattctttctaaagttctgctgaaaatcttgctggtagggtgaatttgatctgaaaattacttgtgtttcttggggtttcttcgaacacacacagagagagggggggttaagagagagagagagtattatcttatttttgctcttgcataaactataaacttcatcataaataaatctcatcttctaacaaattcactagggatttctagaataagtttaggtagtaaaagacaagaatactcttacttcactactaagaaatctcttaaattaggagtaaaatggtcataaccaattatccagcataatcctaagattctaactatccataaattttaccccactaaattatagatactaaaccgtatcaaagtgacactaattgacaaaccgttgaattttctgtgttaccaagcataaattatgaaaatgtcaaaattcatatgaaacatgtatgacactcctagaagtcaataaaatctttgtaattgaaaaattatataactaaaacatatttcttataataggacttattttctaccaatgcacatataatcataaataataattaaattactaataaaccgctaattatctgctaatttttatgtctaaatatacgtcattcatatcatatatatatatattgtatgtgaataataaataatttgtaaaattatttaaccccaattagaataaatatttgataacatgtttatggccataaatttaaatttattaaaatggaacaatatggataaatatttaaaaggaataaaaaaatagggaaattacctcaaatactatctttaaatttttttttttcaaatttacagtttgggttactctagtggtttctatgtgggtttgctatatggattttgattgcaatttaggttgctccgtaagttgctataggggtttctgtgtg

SEQ ID NO: 111332 - DNA, 6194 bp, Cannabis sativa
aatcaatataagtagctcaccctccaattattagttcataattagagttgatcaaaataccactttacccttctaattatctcttcattccttatgtactattaattcaatgggcttatggttgttagggcatacaaaacaatagagagaactttaacgaggcatccgccatattcaatggcttatggttgtgagggagccatcccagtagaagccactattccttcccacagacaagagacttacgatctaacctaaaaccactcactgctctaggaatcttagatttgatagaggagatctcatcctaagagtattctctacttcataagaactaggagtgggggtcttaggacctaattgggaaggaccttataaaattcaacgcagggtgggtaatagaacatatcaacttaagaggatggatggatcagaaatcttgtgtgcttggaatgaagactacttaagttgctattatcaataagctaggggtatccagatctaaacatctttttagcttaattttaatttcttgtatatcttccttcttaaatgtaagcccgtgggaaaaatgaaatgaaaacagaagaaatttacaaaagaatctgcactttttatctctggccacaagctatgtttaaattaagtgatcaagaattcggagacgtccaaaatttctagctcacttggcaggagtatacctagatatgtgccctcaaaaacatacaatgcccacctattatttttatgttatttatatttaaattttttcaagtttcttcaacattaaagtgaaatatcacctggatttcattatattttcagcctctttcctggtaggaagtgttgcctaaaatctattgcatattcaacttttttttcccaccttcatatttaaaatttttaattttttttaactatgaatgaaaacatcacctgaacttcaatacgtttttaacctccttcctagaaggaagtgtcacttgaaatctgatgcatatttatcttggttttcatcaggaacacaatcagtatgttgtcatcctctttcctaaaaaggaaatatttcctaaaatctattgcattgtgagactggtctattgactaaacctttggattttttacaaagagtgaaaatgaggagttttgtctgaaatcccttgcattttcagctgcccttttatcacaattttgaaaaatacctattgcattgctagccatctttgttacattgaattacagtaggggtaatatagcctatgtattgatccgttttcagccttctttctcaataagaaatgttgcctaaactagttacataaatagcccctttccgtcactaaatataaataaaaaaatttgctaaagtagtctacttaaggcaattaattgtgaagtacctagaaaggagtgaagcttcgcgttcattttggaaatctgggaacaagctagcgatccctctatgctacttataggtttaatagctaagatttgtaagcaccatgaaggaactctagaaatgttgacgcctggaagaaagaatttgcaattcatatacttccaagtttcaacagaccacgtaagacaaaaactttaaaggtatgaaactttgaccattggaaccacaagctttaaatatcgtaaaggaaacctattaaatggtctaccggataagagaaagtagatattaagcaagttaaggatggcataaacaaacataaataaaagaaaatttgtttcaatgatattacatagagccttgcagttatggtgaaaccaaaatgtctctagaaaaatataaagtaattaatgatttaaaaataaagacaagtgatagagttatggttgagggtaatcttgagcttggcctggaagtggatctaaagcttggcttggaggaagatcttgaagctaggcctcagaagggtcctagagcacttgtgcaccgttctctatagagattacaacttctactgagggctcgtctatgaatttctttgccgggtcttctacggcataatgtcaaaggtgtcgatataaatatctaactcgatagcctccacccttcacatgtattcttcctcatcttctccaagatacctaagaactatattattatttttccacaaggtgtggagaagtatggagagggccaagttcaaagactaaagacgaattttgtgtatgcgagcatccacgtaagccctcaccctagcttccaccttcgtaatgtgtttagctgtgttcgatatgagttggcaagcagttgtgttgatcttctacatgaatgccatagctataaaagccttcttgccattgcccagtcaatatgaagattctttccacaacttccttttagcagtggcatgaagatcacgggcctcccaaacacatcacagggtttctacttgggagtttatcctatttttcttcatctggatctccccctttagcttcttgaaatcatactagaaacccttaatcaccaagtctttaaggtttatttgagactccaagttgttgacctctttgagtttatcattaagggtgtttttcttgatcatcgcccgagctttagccttatctcttaaatcttttacttagtggatctctttagtcaaggaggttatcagagagttttgatggtacttctcatccttgtgctcttgatcaactgtggccttatgtacatcttatggtatttgtcactagcctcctgtaatgccatttttcagtaatccatggcatcacctttcacttggtcaatctcagcttaggtttctatttggaccttcaaaatcatagctctacttcaaccttgatcccattcacctcagtagtggtctaggctttaactctcttaagtgtagaaagtaaagctcatttttattcatgtaaagataggttccttgaaagttgtcttaacaatcaaagcaatctagcacgaggaaagatctaaggcaataattcaatatgaaaacaatagaactgacaacataagaaccaaaactatgcttatccctactccctattgtttagttacttgagctagagtgaagagttcagtgttgctacatattgcccatttttgagaagttatctggcaaacattcctcgcaatttggtctaagagctctacaagaaaaggagccaactctctcccaaccctagggaccagctgttttccaagtgccataggatggatcactagtccagaaatgttggtacgcaccccctccgtcatttcagccattattaaagaagaaaggaagtcaaccctcttttgaagcactatttactacttttcatgccgcctcctaagggactgctctacatctatgattttctttaggttgttgttactgtgtttgttgttgattttgtttgttgtgtggttgtattcgtagtgattattgttgttgttatgattatgatgttagtgggattgtttcctttggatcttattgtcgaagggtggtagatccctgaaggtctccttctgctcctggtgaccattgcctctctgaaactaatctagctttctaagcttccctctcagattggggagggatactggaacattttgcgactgcaatagtagccttctttggaaagactggacaatctaggttgttgtcaaatgcgataacagcctctagaaccccttcggttatttcctctgtaatcaacttggacggagccttctttggggctagatgtgaagttgggtctgcttttgcctcgccactaccggaaactaccatgtcttgagaggcctccccagttgcaatttgggttttctctaccctagaaggaacctagagactaggaggtgctccatgagtctcaaaaagaataagtggaactgggaagcctgggcttgtaggacctgttggccctagccttggccatcccttttcccttgtccccctctatcttagcaaatgacttggtgatcctatccatcattgacttcattaattttggttctgtattttctgcaacagaataaagaacaacacaattagaaacaaccatccaacaacatattgaaataagtattagcatgtaagagcatgagctaaaggtgttatcgtgggtgcaaccattcaatgagtaatcataaatttccaatgagcaaagaagattatgtcctcctaacaaatgaagcttccatactctccaaagttgaggaaggacatagtcaagaaaggacccactctaattgtatccggagatgactctaggttacttggactcctaataatctcatctaacccatcaatatatatgttccttgggtaattaagattgtctaagcctaagaagtcactatcaaaaccccttggttcctgaaggacatgcgatagaggttcagggtagaaaacatatggaagggtctattacctcttccacaagtgctagctcctaatgaacttttatctcagtatgttgtatcaaaccactccaggatttcctcctcttctatcagggggttagggtggtggagtgcctagtctgcctccaagagtttttcttcattgacggcttcagctattatttttttttaatgactacggttatttgttctttagcttctttggaagcttggctctagcccctaccacttacattatcaatactttgaaagccaggtaccagcccatgcttatggagtagtttgggggtgaccaatccctttacttttagcttttcaatggagaaggtctagtactgagccactttcttttgtagttcctcagtctcaaggcttcggggaacaagctctgtcaaaaataggatgataaaacctcaaaaagtagccaacttagaaagtttgcaaatgaaaaagaaaaatatataaaatttcttctctaggattttgaagtccaaaggaagggtgggacccctcttctgggaaggtagtggagaaaaccaatactcccagagatctgcggagcataaggtatggttggtggggcagtacgcgtcagaatacctctcgagcttgtaaaattgaaactttttgcaattggtatgcataggttgagtcttcacgccatagaattataatatctcatccgttctaggaaatttgagcttccaaattttgcaaaagatgtaccctcttaatctagaggtatcagctagaacaaagctattcccattctcgcacagaactctgcaaaggatgtcctaagagggttgtgtgcttcccttaccatgtgagcccagctctaggtgctaaacccattagtactcacggaggtttattcttctaccatagatagcctattccacatcaattatggtatgctacgcacaacagccttagtggcataggttttcatcatgtcttaagacctaaagctattgggttttttgtccatttcccaaatggagtcattatgaaactttaaccttcccctttgccttagtttaagttgcttccctagacagagcaacttctaggactaggttttgttgaagttcctctctgagagcaagaattagggattcctcaacattgacctccttagcgaaggttatggttggcacttcctcattatttactaccttgagactgaattctttatttagatcaatcactgaaaaaatgaacaaaaagaaagaaccaagaaattatatacccaacatcctatatgagtattggggaacgcctcccctaaaattgcttggagagttccccgtcgaacccattacttatgaagtcctcccttcaccaaacgatacctcgaagtgacatataggaacccaatggagaattaccaaaataaactcaaataacttccaaaaatcagacccatttggagttttcacaactccaaataggcaatcagaagaaaaatggatcaaaaatttgctcaaaagttcattttttctagttaagacccaagtattagagttctaagaacatgcaaatgatctacatgactcaagttgtcatgccctaactattcagacaacatcaaaattctctcgaggggacaattttgacctaactcagtcctagaagtacaactctatggacatccttttaccctttgcatatatacccatatccttgacctagcttgaacttagaatttctatcctagatatgatttgttgacaaatttaatgatctgattttaatcatagtccaattgtcaatatatcttataaataatttg

SEQ ID NO: 111333 - DNA, 2475 bp, Cannabis sativa
  modified_base (1391)..(1404): a, c, t, g, unknown or other
  modified_base (1523)..(1528): a, c, t, g, unknown or other
  modified_base (2040)..(2040): a, c, t, g, unknown or other
acccatctaatgtaccacacagaatacattcttctgtgaaagtacatcacgggacaaaatcgtgtccctatgtatatatgaattgtactgacccttttcttgtaggtagaagaactttgcagttttcagatcaatacaatctactagtttatgtactatatgattggactcttctaaagactatttcaatctatgtttttgttcataattttgttttagcttctaagttattcttctttgggcacttgaagtgttatgaaaagagattagagtgaccattggcttcattatcacttttattccaatgacaactgatgattagtttgagtaataatattctatattatgccccacgttcttaacttttttcttaattacttattattgtagcttaagattgatccacaaaaccttatcaacttatcattatctttatataaatacatattaaatactagttcctatgtgcataaaaaaatattgtacattacttttagttttatatacttgtagtctttggcttgatctcatctattatcatcacaccctgttttcttctcttttgcagctgtttttatttttctttattatataattgagaattgatgactacttgaatagtagaattagtccagaaagtgactcaatcttatcttattacatcaaatcaaatacaatttccaattttgtaattatgtttcgtgatattagcacctaacctactactactactaccactactctactactacttttttttaaaaaaataaagcgtttgatatatatgaaaattagaccactcggtaattacataggatagtatcaggtattgaagaaggttttacaaaacttgagatgttctgggtaaatattagtcacattatgggcagcaaaattataacgacgagaaaccaactactctactactactattactactagcacacactatgtagtaaatacttactttttgttggtaatgttatttgtttgagtaatgaaattacaaacaaataatataatacattggtaagttacttttgatgatccatctttttgtctatgcctccaaaccaaatttaaataatattcttaattttagtaataataataataataattgagaaattaacagtatgtttggtctggaataaggaaaaacaaaattgaataaaaaagaaaaatatttaattatgtttattaatttggttgtagttttataagattacttaatatgaattgtttgtaattttataacatgttctcctgatatgaattatttgtaattttatagcatgtttacctaaaaataacatgaattatttatttagtaattcttactcatttaggtgtcgtttggtaacacttatgttttctaattttttaatcannnnnnnnnnnnnnaatttttgtttttaaaaaattttgtttttgaaaaacaaaaatgcgttttgtaactttttatttttcaattttaaaaatagaaaataaaagtattttctgtaaaatttatttttattttnnnnnnttgattttatttaagtcgagtttaggtctggggtcggattcagggtcgagtcagaggccgggttcaacaccaggaccgtgggaaggatttggatctgggtctggtcggaatataaaatattgattaagaaaaaaaaaaactgtttaaaaaaatattgaaagtgactttttttgtttttaaaattttgattttcaattaaaaaattaaaaagtaaaaagaattttataaaatatgtttttgaaaaatattttcacttttctaattttaaaaacaaaaaaaactgattaaaaagtgttaccaaacgccaccttagtaaatagtaagtatgataatatttgttctttatcttttaaaatacattatcaaaatcttaatttatttattttatagtaaatttttacattaatttttctattactttctttatattctaccttttagtatattttaaatatataataatcacatatactcatattctaattattttgtcaaaaaaatatatatatatntatatatatatatataataataacgtatacacacatacctatacataaaatataatttaaaacaaaaaaaaagctaataaaatgaatttagagcaatgaatagtgctctacacatgtagagcaataatattcataactctaaaaatttatgtaaaataaaatattgtaatatgtcaattttgataaatttgtatcttctattctctattttaaagaaatataaagtttaaaacacttatttggcagtgttctagctaaagtatagttaggggtaataaaatgaaatagaaaaaaaaaacaattttttattctattcttttatttggtttaatattaggagctgttggaaaagttttcattacaagagagaataagaggattacaatcaaaatactcaaaatacaaatagaagtatttcatcaagattacaagaaa

SEQ ID NO: 111334 - DNA, 7111 bp, Cannabis sativa
gggttgagggtttggacggttgggacggtttgggtggggcggcgaagagatgccgagacagagagagaaagagagatgtgagagggaaaggagagagaaagggtttgagtttttgagaggagtatttttgaaattttagaaaagtggtaatatattttcaatgtagaaaagtattagtttaaggaaaaatttatcccctagtgcatgcatagaaattcaaatttccctatgtaaatcaaaattattactcttctattaaacatgtcaaatctgctgataatttcaaatatgtctctagaacattttattgtgtctcttcgagtacctgaaggaaaaattatgaaatagtagatcatctactcttcccaaaattatatatatatatatctcattaaattaatcaatataatatgtatgcatatgatacatacgcatgatttatcggaatgacatttaccgattgatatgtattcatttaaaatctaatgataatatataattaagtagagagaaaaacaaataatatggaggacgcccacctcatacaatatgtttgtatatatgtacgtatacattgtttatattattagcattatctaatatatataaatatataatgtgcctcatgatgcgtcatgatctattataaattcataatctatgcagcaaagggtttgtgtttggcttaataattaatcatatatagataaaataattataattaatagtaagatgctaattaattagacattcttgtactactcttttgtttatttacaacagttgacattccaagaggaatagactatagtctatatgtgtaattagttagagaattatataatttaatgatctatggttgttattactctaaatttaaaaggttaatttatggtcaaaatgttgccaattaaataaaatgtcacgagaaagcttaatgttgtagttgtatggatggatgaaagaccaactaatattacttagtatatatctccattgttttttaataattatatcaaagaacagctaacacgaatgatcaactaaatagaatatttatctatattatttttttttttaaaaaaaaacttaatatgtattcagttggcttcgcggtgttgtttgtttgtctgttcggtttgatttttttctcattattacttacgtaaggggaaaaataattatttccatcttactagtttttggatgaataccatttagaataaaaatgataaaatcgaaaaataggaacacaaatttttgaagcaaataaggtacctagctaatcggtgtgcaattaattgatgatgcaggctttctcggttagattattttggtcattttcgaaaactccacacttttgttatgtgattgcataatagactttatttatgtttgtaaggagtgatatttattatgacatatatttttatttagtagcatcacatttatttattttttgactacaagaaaccttctctttgtaaaagctatatataaataaaaggaagcactaaagagagctgggtactaccgaattttagaactagaattcagatcttccttgagctctacaacacaaatatctctctattattcttttccatttattatattttgctccctgaaactatatacctacgtacaaacgcatataaatactcataagcataatgcttataattatttactgtacaaatgctcagctacatcattgtacttgttgctttttatactatacaatcctgatacatgaaagtacaatatatatatgctgagctaccagatcaaccaataatattattgatttatatatatttacatcgaaaaccgtgtttctatatataaattaaaataaattataagttttgaaaatttataaatataatatagtttaattagtaaaatcattacattacatatatgtattttgttaactaattgtcggagcagtacaaatattgtaaatatatatacataatacatatatatgctttttgttattattcacttgtaattgtctgattacttgccaataccatgataataattaatacgttggtacacatacattactattggtgcacatgataattatagaacattgttaattaattagtaatcttaaaccaaattaataatatatatataacagtgttctaaataattatatcatcaacatcatcatcgtgagttgtagtgaatatataaaaagttgattctagtataatcctatatagagacacacatgatagtaacagtacaaaatagtgcacaaaaacatatatacgatgagaagaaatttgtggtgttgttacacagtaaggaaggtagggaaaaaattgatacggttgggaataatttcacgggggtgagaatatgtgtgaacagtttagcattgtccaaatttgggcaagaaaaaagtaaatttaactttatatatgaatggaaggatcatcgatcagccactattggggaatggatggatggaatggggtgtgtgtttttgtgtttactatatagtgtgttttatgttagtagtattgtagtatgtgtaacggttgagtctgtgttttaaattttgtagggcccattgaaaggggagcacatggccccaacatgtcttgggtttattaagacaggattaggggagggtgcctttgcgtgggcacccctttgttgggtcaactagagcatatttccccacctagaccacagaaacaagccccaaaatagacagccttgttcccatgtgcacaaatttaagagcaacattccaaaaccacaacccactttgtgcccttctctctttctctctctctttcaattctctcaaaatcatctttttgggaacaaggaaattagaagattaggaagaagaattctccccctccctaccagtctcttccacatactatctaagatgattatatgtttttctcaacttcacaattggattttcattagattccttcctctccaaatgctttcttctcattctcatgatatgacttttgattattatttggcctggaccatatttcttacatatattcactgtcggtaggagttacattatgtatttttttttttgctggaaagtaggagttacattacatattacacacacacacacactttatatatttttccttacacaattaataaatactatggtaataataaaattattttaatatatattctcatgcatgtcatacaggttggagaaagctactgcaaaattaagtagagaggttttgtcttgtcatgagatagatatgtatttatatataattaaagaaagtcatcccgtcgtcttgatttggttacaactatttcaaaatcatttatttattgtagtgagctatatatagctataaaatagatgatttattattgaatgaagtcatgaagttgaccctataattctttatcatacgttttctgtgggctattttcatacgttaacttcatttttaacgtcctcaaatagtaaccattcaaccatattaaatgtcaattgcttaggtaaaatatacatatatagtcgttacttttattatttattatgaatggagtgtaacgtacatgtgatttaatccggagagcgttttattttaagcccttaaaatgtacaatttctctctctttatatatatatatagttttgttgtacacctaccaaaacaatagatgatatattttttttaccctaataaaaataaaatccaataattcattattttagataattatattttttatataatattttgaattagatatatttatatgtatgaaattaatactatattatatatacaggaagaaatattatatatacaggaagaaaagggtatcagggataatactaggtagttaaagaagggccaaatttccaatgcgagtacatacaaaattatggattcattttaataaagaatacattttttttccccttccaaaaaccaaaataacttaattcaagacactacaaatacaatcatcgagaaactggctaaccaacaaaatacatatattcaccactaaaaattgagttttttttaactgtcaagaaacataaattttaaatgatttttttattcatattaatttctcgacggttttaaaaacagccaagaaagacactcactcatgcaagcaggacttttttcttgaaaaccatgcaagcaggactttaattaatatagatatcatatataatttaaaattatgcatagcatatacaattttagtattttttttaaaaaaaaaacaaaaaagaaaaaatttatttatgtttgtctttttgttacgtatatttttagttatatattatataattttctttataatattattcaataaacgtcattattttgtattaaaaaatatctaatttaagtgctatttataaaaaaaaaatatattcaaaatttactgttaattataattttaatttaaccgtaatactttttattttataatatttttaattttaaatatgcataatgagtctaactttgatttgaattgtaatgttataaaaagaacaacactttctcttatatatccatatttaatataatatagatataaatatatttttttaattctattataatattatattaagacttatttaattatcttctaaaaatattaaataaagagagaaaattaaataattatattttgatgttatatatttatcaacaaaaattataaatacattattgttaatgagataaaatatttaaatgaattaaaatataatgtttaaatgagaattcactacaataaatgtcacttttgccagcacatttttgtgttggcaaaagtttgttggtattgcgctggtaaaatggaatttacttctgatgtgttggcaaaaggggttaacaaatcaacgttggtattagaacttttgccaacataaaataaaaaatgctggcaaaaatgacttttcccagagtgtaaatgcgctgataaaagttagattttagctactgcaaatgtgctctggtaaaattttgacctttttgccagcgctggtaaaagttacttttactagcacagtagcaaactgtactgataaaagtgacattagagaaagaaatagagaagctatgtacagtgaagtaaaattttgaggtaaaataaataaatttgtgttttgatgagccacattaaatgttggaataaaacagctgttgggaatgctagttatacataaatcaaacttagactatgttcgtggtgtatattttggattaaatttgacccaaaatataccataaaactatatttagtttatattttgtatttgtgctctaatgcacagagtacaaattagctataaaagttaatattaccattagtgctcattcaaaatatacaaaataattaattttatttatattactttaatatcttataaatattaataagtggtaaaaatataattaaaaaagatagtatttattgtgggctaaaatttggcccatgctattttttgtattaaatttgacacacattttacttcactattagagttaaattttagcaaaatattaaaaaaaataataataacaatatatcacatttatagctctttattgaagatactcttttccttatcatcattaaaaaaaattcaagcttagtccatttttttttatcaagaaggaagaaacttcattaatcaactcaacacaatacagccaaatgaactactctaattctgttaatggtatagtgaacaaaattaaaaatgatgtgaaaaataggttatacttgataaaagatagaaaagggacaagagtggaggaaagcttactccaaagattaatatgtaattattagttgattcgattcctccaaaaatgataaatcgtggctgtgtagtacgagaccgaagcttttggacagaataagagtgattgttagtaaaatatatatagtccaattttttattaaatataaaatatagcatttgaaaataattagtaaaatctgaccaaaacaaataatcacaaaatttaatcatcctaaagagaaagagtacaaaaagtggagttacacggctgacttttttttctttgacaaatttacgtttgttatagaaattgacatatagttacatggctttatcatgttttaaatgcgataggatgaaaaaaatatgtatcatcatcattcatacattaattttattttttataaggaaaaataaattagaattcgttacgagagtgtacttatttccaaggaataataatgtctagatcttatttacacctcatgctgttctgttctccagaaataatataagaaagaaaataaatgtcaagttactgaaaactcctctgtcacccatagtccacgcggcatttctgagaaaaaataaaataaataaagaatcacaataatgttgaatagtttttttgtgaaataaaaaacatgataacaaagtgcctatatatagtttttgttttttaaaaatgggagcataaattattgaattagctagtagtcatattatgcacaacctatttcatgaaacgtataaaataattaaaaaatttgtaatacaatgaatttgaatgagtacgtaaccgtcccccaacactattcaatacccatttattaaatttatacgaaaaatattataacaggtagacataaataggaaactttaatgactaaaataataaatattatatttttgaaatccagtcgggggttgcatacttaccaaatatgtataatatttgaaatttgaatttctcgatattaaataataattaccatttttctgcaaaaaaataataaatgaagaaaaataactttgaggttgttgtttttaatcattatctatatctattttcagtgttttcagtacataaataaattataattttgttttttttttcttcataatgatgttaatataattacgaatgtttaatttttcacaaattcttagaaaattttagatagcttaatagtgaattagcaatttttcattcgaattttgacatatatcaaatcatgcttcttgaacttttttggtcattaaaaattccctgaactattaagattgtta

SEQ ID NO: 111335 - DNA, 12543 bp, Cannabis sativa
tttttttgtatttttacgaaatttcacataaaaattctcataataactaacaaatcaacttaaattgtaatcaaaattcacatagcaatccacataaaaactatcggagcaatccaaatcgtaaatttaaaaacaaaaattaaaaaatagtatataaaataatttatcttttacaaattattttaacaaataaaatatcaagaattaataggtaattaccacctaatatcaaaataaatcttctacttgtaattttataattaggatcataattaaactactagcacctttcaacaccattcaataatagagtggataagtttttgtgagggttaaatagaaagaaaaatgaaaagcaaaaaagagtgacacaaagtggtggactcttctcttttaattattcataactaaataagaaacaatggttttggtttctcaacatttgagtgccgccattactctacgaccgccagaactcacagatggcgtcggaattcgctcaaactccttgaggttccttccggcgagtaaaaagcccatctcaatttcctttgccgccacgtcacaggatgcgattccttcacaacctgtaatcgagctcgaattcataggggtgagtagtagtagtagtagtagtagtacattattaagcattttgaagttaataaggtactttagaaatggaaattggtaatttgggtttgatgttgcagccgaaggcaggaaacgacgggtcgtatccagtagagagggccaaagaaataagtggagagaagttgctgaggaacatcatggcggataataagattcagctttacgccacctatgtaagtctttccaaccatctattcatactcatcttcaaataaatcaaataatttagattgttcaaatcatataaaaatgcatatcttgtttaaataaatatttgtctatttataattaaatagtgaataaatattattataaattctgtatttttgtaaaaattattaattaaatttttattttattaaataataaattgaaccatgtaattttttgttaaaataaaatttaattataacttggtcagaaagtattataacctgactcattacattttttatatttttgtgctagaatttagttttagattggttatgttaaaaaaaattacaaaaattgagctcatgatactaatttgtgtcattttaaaaaatatagggtctaatttattatctaacaagtctaattgataacttttataaaataaaaataaaaataaaaaaatacaaaaagaaaatcaaaaataatttttatccttaaattttcctatttggtattctcaaatgcacatattatatattatatattttatgtattagtacatcaattttataagaatattactttaagagcttgtttggtacatattaattgattgatactatatagtgttttattcaaacatagtatttttttatttaatgtaataggagccttatacagcttatcaaacgaaccataatgtttaatttaattaaacattaatgcttattatttgtgtatgtgcctaatatttatatttgtaagtaaaatcataaaatgaatgataattgtatcttttaatatagttatttcctactcataaacctattgacccatagctaagtttgaggttaaatttagaggcaaaaggagacttagtaggttgcttgctaggctgtaaatgtagtaaagtaggtctttttcaggacaataatagttggagagcacatatttcacttccttagtaaccattgactgttatacctaaatttaaggaagaaaaaaaaaagcttaatctcatcattgtgtatgaaatgatggatatttttctaaaacttcatttaaatttgaatcaaataggtatataaattgttttcttttaatagcatttttatctttaacaggggaaagttatgaactgtggtggtggtggaagctgtggaacttgtatagtggaggtaagagtagctgtccttgtgtctttctcatattttttttaattatttatttggttttactttggaacatgttacaactttagttttcgaaagttgaaaggcgtagaacttagtggccaaatcattattatgaatgaccctccaatacgacataagaaaaatgtaactgataggatgtatatggaaagttgaatcatcatagtaatgtcctaagagttagttttatttggaaagtatataaaaataaattaagagagtaattttaatagggcttaagtgaaatctagttgtgtttgtgtctcaataaaagtcattccctcacttcttttttccctattttattgtctgtgttattattgtgtatcaatggttgttgtccacgggtttagtttctaagccatggaggacaaaatgagttatgttcaagatgaagaactcaagaagttaacagccttggagaagagcattgcaaacctggtaaatatcatcaaacaatttattcgtgcagaacaagaatgagctcaagcgccatttaaccaggagcacgagatcccaactttttccaacacggaatagtcccttggacatgaagacatgagcagctacttagaatttcaaggggccttggcaacattcgaatgagatacggttgttcgatgagatttgttaccaagaacacttgaacttacaacctttgatggtgacagcccaaaaggatggattctcaaagcgaaatgtgaagtggaaaccatggaattggctcgcgagtttgaggctaacatttcttgccttaagatctacgaatttttctgcttcttctaatacttcagggacttttccaacaacctaacctagaaacacgaattattgaaacaccacaacgaaggacgatgaacgatgaacaagcaaggtcgctttgtgagaaatggtaaagtgcaccaatggtgccgaaccccactataaggtatcatatctctactagtgcaattcaatatttggtcccacttattttatttttataataattatagaaaatcgctaactatttataggacgctatttcatggtggtgttgaacaccatgctgcttaatagcagtactcttttgcttcgaggcttagctaaaggatctagacttttcttttagaatggcccatgactagggagccaaagtatggactcaactcaagcctataaaactctagaaagttttagagtacactagaatgtgcttgggggcgttggaagattctagaatgttctaaagcgtgcaaaatggtgcaagaaggatgtggaagcctctaaaagacttcgaagcatctagaaccattaagagggaactagacgttccagactactctaactctatgtttggcatgaaggacttttgggtggatgtagagggatggaaacaactcacaaatctaagggaaaaaaaacaaaaaagacgaaataaagtagattaaatgtcttatttatcctttaaacaattaaaatatatgagaaatgctagaaggtactagtggtgcctagcaccctccaatgtgtaatattgctattggaggagagttgttatccttcccatttatcatactctccatccttccactttctctccctcttaccaaacatagcgtaaaagttgactagacttggttagaaggttctacacctttatagttgatgtacccattcattgtatattatagaaattcaataggatcttgactccatagttctactaccccttttagcttacacataatcaatggactacatgtttggggcatgcaccactgtatcccaaactcatgaacattgataggtcttctcctttgtaatacctcatgaacattgatcttatcaatcactaataaccaattgaaaacttttacctgggacgaagcacaactcttccacactattttggcccatttttcttctgctatgtgactagaaacaagactactgaaggcacacttgcaagagaaaattccacttgagtttggtttcaagggactagatacctctagtaatccataaattggattttgtgattttgttctaatatgctcagtaaagacttaaaatactaacttccctatccatcaaatgtcttctgaacggaaggttctaccttggatttgagtcttttattcttggccatagaaactcgagcttagtttgggaacatgaaaaccatctcaagtgtaatataaagcactatccatactttctttgtatcaggatcatttgggtttgagaatgttgacttagtatgacgaactgtgcttagtgcatcactcttcattactcaaagtctatatatttctctttaggatcatttggctgacttagttttcttcaactcatgacgtataactttcaatgtcgctgcacaatggctagcgggtttggtattaagaatgacatgttgctttacatgggaagactaatgttgccttgcctattggggccacgcacttcaacaaattgttgcttagtttcattgggtgagcgcgcaaaaagatgtcgcaaagtgggtgcgtgaatgtgaaaatgtgccaacaaaacaagacaaaggcttctcctgctgagctaccgcaactaatcgcacttcaataacaatggcttttatgagtggctgaccaagtctgatgggaaggacacttttctcgttgtggttaatcagttgagtatgtaagctcatttcatttctccttttaaaacatcattttactgctaaaagtgtggttgagatctttctaaagcttctatcattttagatcaggatagagttttcatgagtcatttttcgccatgaattgtttaaattgcatgacaccacattgaagcacagtataacataccatcctcaaactgacggtcaatctggttgagcgtagcaatgaatgtaagattaagctgacaatcgtaggtagacgcaatggaagctctatccgcgctactatggtctgtatgaagtacttgcttccattggcaaaatggcctacaagttaggcttacctaacacttcttccgtccatctggtggttcatgtttcactgctgcgacgagctcatggggcatctaattcttctccattggtgctgcgacagttgagtccggatttagagctgactgtgcagcctgaagaagtgttgaggggtccacaataccaactcagaaggcctaggagaggtggggaatggggatgctaatcaaaaggaaagatttagccctctttgaagcatcaaagaaaagttacaattacttgcagcaacaatttcctcattttcacctttttcaaaaaaaattcctcattttcaccttgaagactaggtgaagtgtagttgactggcagtgggtgataggatgtacatggaatgttgacttatcatagaacaatgtaatcatcccagcatgccctggatatattttgttaatcactctagaatgtcctagaattagttttatgtatatgagaaatgtagcttgtggagagaaaccaggtctctcgaattacctggtcagttgtgttcctatttcagttaaaatcactccctcactttcttcttccttgtctatcagtcagtattactattgtgtatcataatacttgactatctttcctgtttcttagtgcagattcttgatgggaaggatcttttaaatgaaagaaccaatactgaactcaaatatttgaaaaaggtaataaacttaaattgtaattaaaattgtgtagataaacaaaataggagcattcccttttcattttttccccttcattgatatttattacttaaaaggggtcatccatttttgacattggttaatattttacagaaacccgaatcatggagacttgcttgtcaaactattgtgggaaataaagaaaattctggaaaggtatatagaaatgttgtgttctttagtggattaatcagctttaaaaaaatcaaggaatttgttctatatttaattgtgttttattctttactccacggctctttctgttgctaacaggttgtggttcagaggattccccagtggaagaagtgaatgagagccattgccatgtttttaacagtgccttttatcgattttttcagaaaataactcattaaacagagctctgaggctcacatatgccactggccagtggccacttctttgcctttctccattgtagaactagatttatattgtcattttaagtacaattgtaagaatatcaagtaacttggatgttacttagctgtaagaatcagaaacaatagggatattcgcagcaaaactacttgaattttacatcttttaacacttaatcacaaaaattgaaattttgacggtaaaatctactaaatgcaggtttcattttgctcattacacttctatccaaaaacttcagttaagtgtcacagtggattgcttccacgtgtacacaaatgtaaacgtagcaaatttttagtggttcacgtaatattaatgagtattgctattgggcaccaatggtgtggtacctagcacctctagacatgtcgtcttgcgattggctagcgatactctctaaaattttgttacattaaactatatgggactcgatacttaattggaccaatagcaatattgacatatagaagggtgctagtatgggtgttcattggatcatatctaatgtttttagacctattcagatcggatccaatgttttcagtcatctaatcgatctaacatccaatggatgttggattggatcggttctatctattggatgtatttcaagtatatctatttgtttaatttgagtttatccaatattttagttttagatcgaatcggatccatccgatattttagatccaatatctattggattgaatttgatctatccaatccaaaaaaaaaagtaaaatttttaatgttaattttcatatattcacatgttttttttttatgtataacaatataaaatataatacttattcaaactaaataaaaatatgaattagttctattggatttttggacaccccatccaacatccgattcgatctgattgggtatttataaatatcattcaatctgattcgatcataattagatatctaatgtttggcggtcggttgtaattagatcggtcggttgttattggattagatcaatatatgcacacccctaggtgctaggcaccactagtgccttttaacatttctcaatattaattattaaaatattataaaaaaattaaagatcattaaaaaaatattttctttttcattttcattttccttttctttttattttttttttcttttccttcttcttaactgcaccaaaaaaaaaaaactaactcatctcatccatctcagtggcctccccttctctctttattcctccctcttggtgcaagcagaaggccagtggacagccaggcgcagaccctctcctctctctcgttctcgcgtgacccagccccctctgccccgctcggtgacccagactggcaacccagacccaaccacgctggtcatggttgggatcgtgatttcatggtcatatccaaccacagtggtcacaatttatccattttcctagctgctcacctagaccgagaaaaaggaaaaggttgtgtgctttgttaacctcctcctccggatttatactccgatagatgcctgtgctccatataggaattgtcgcagcaatgagcaattgtggacttgatggctctattgcaatcacggttgagaaatcgagtcgggactcgtcttcaagcttgggagaaaaaaatagggtagagagagaggatgaaagagatggaattagggttagggttattagttttaggttatttaaaaagaaggataagaagaagaagaaaaatatatatatattttattattgttttatttttataatttttaaattatttttttatgatattttaataattaatattacgtatactactaaaaatttgtcgtgtgtgcaggcagaaggccgtagaaggacagtatatgtggacagtctactgtgtcacttaataacagtttttggacggaagcataagtgcaattcaataggctttgctgctaaaaaaatgagtttatatagttaaagtggtacaaactataaaatttaagtggtttagccactaatatcccgaaacaataacaccattttgttgttgttatactcttattgaaagttgcattataacatacaacacatagttcaacaatatcgaaactttcactgttccttcaccatgccatatgtaacaagttcttccaagcctttcctgagcctctttgcagcaacatgacagctctctagaggcatccctccatacgtgactcggatgcagccggacacaccacaagcgcttcccgggagaaccaccacgctatgtctacgagcgagccagcacacaacttcaaaatcatcatttgagtacttttctgggagtctggcccataggtatatagctccttctcctgtcactgcatctttgcctagtggtgtaagggcctcagtaagtagttctttgtttttgccaaggcttttaactttgttcttgatccactcatccccagcttccaagcagtagagggctagatactgtgaaatcattggagcacagatggctacattgtcttgaaccttgagaagctgagttcttagagccgttgcctcagacgggtaagctatctgaaaagaatcaagtaaaatttatatcatatttacaagataagtaagaataaaatggattaatagaataataaaactataaaattgtgtacatatccaactcgccaacccatcattccatatgcctttgagaatgaaaatagattgataatatggttcccctctatacaactgtgctttcgaccatcatacataaagtgcctgaaaaacataataagtgatttagccgagtaaaatagttagtaaaccaccatgtgtacttaccccttaatccattttagcaattgaataaatgctatgtttggtgtgatttataataataataaatcaccactaaaatttaggatcattttgacattgtgtgaaatagtatttttttcaaattcgtaatatttaggggttaagttatagatttgtttattatgaaatttcacaaaattttcaaaagttcgcttttaataaattagataccgttagaaaaataatccaaaaatatataattttgtgtgaaatagtattttttttttccaattctcaatattaggggataaaaaggggtcacaagttaagaaattttataattattttaaaatataaaattatttgattttatttggaattaaaattggatatttttaattattttatttgatttatttagattttaatagtaataataaaattatttaataatacaattgacatatttgttgtgtagaattgtgtgtgtaatttttttatgtattcaaaacttatatgacaattaaaaaaaaattcaaataaaactgaatcacacctattaaatatatcctggtatatatgataaaagtgtacgtaaaaacttaaatacatataagaaacttactcatatgcattatcaattacaagccaagatccagccctttgacaaatatctgaaaatctctgttttaggaaaacaaataaacatgaaaaagaaaaagacaaaggagttagataagtgaaatctagccaaggaatagatgcaggatataaagtttagggtaagtgtataggaaactctcctaaatgggtgtttcagtgcacttctttctgttttggtattaagatagttttttaattcaatttttttcatgatcattgaccttgtaaattttctctaaataatttataaccttaaaaataaggttcaaacgtttacttacgcgtataagaaaaaatcaattactcgtgtaacttaaatattttgaaccttattttgatactgttattcaggattttttaaaaatttacttatgatcctaaacaactacaatgtataaaatcatgaaaaaaaattaaacaaaattttttttgttctgaatgctgaagtagatagtgagtgtaccaaaacacacattttaagtgtttactataatagtgtttcatataaatatatagatatattattcatataacatacctttagaagaggctctgaaatgcatttcccagatggatttcctggattaactaaagaaacaagctttggtgtaggttttgtttctgaaagtgttctctctaaccaatctagaagagggaatgaaaaacacaaaacaaagtattttagtgtatacaattcataataattaagaatgatgaaacttgttattgttgaaaattactgtaacaataatataaatatatatataggtataaacctgtatctggatctagtgttatgggatcacttggacctatcaatatgttagtgatgcctgtcatactaaaggacatgtgtgcattgaagaagtatggtgcaaacagtactacagagtctgttgcatcacatagtgttaacacaaggtttagaaatccctgtacatcatcaaagaataacatttcaatagtcactttaatattgtattgtatactgtatatagtatgtatatgtatgtattgagtttacaaacataataataaaacaagtttaatggtgtacctggtttgaacctgatgtaaccataacagaagatttcaacaatttatttttctcgcgcagctgcatatcggaaaatttcaaaccttagaattgcatttggttggaggtaataaaatggaataaaacggaaaggaatcaatttccattctatgtcggcctttggttgcattttaaaataagtagtgctattgtcaacctcttaatcaaccttcgttcttaaaaacataaaaatactttttttaaaaaaagaatcatggtggtgtacgttatagttagaacattatttctataatttttttaataatttagaatagttcacattgtcgaaaataggtttgaaattttttgaacacgcatgataaattagaatatcaagaactctgtattcagtactgtaaattattcaaaaaatttcaaaaatttacaaaaataatattataactataacgaatactgttataaaaaaaatattccgatatgtgattttgggcacaaaagttaactaagagaatgttgttattagcacttctgttttaaaatattgaaatatcatacttttcaaaataaagaaaagtccattccaattcaaaattagaaaaaaattaatgatttcttgtactaattttttttaatgcattttaaattttattgtgttcctattttaatttttcttccaactcaaccaattaagtacttgagatttcattgttgtgattattatttggcaagttaattgtacctttttggtcaatgcttcattgagctgtggaaggccttcatgaggtccatacctactagttgttggatcaaatgttatatgtttaactttttccaaagcctcttctggtggttgccagtacactgttccctgcatatcccagaaaattcactttaagaatatgtatatatatatatataaatatatataatttatgtatataacagagctggaaatcaaaccttagccagaggcattggatctttaacactattggtcaactcaagcatctgcaaaaacaacactaaacttttaaaaagaatccttataacttcatcacacattcattcattattcaaggaataccatttttttaactaaatttaaaactatgaatgaatattttaggaggaaaaaaaaaaaagaaaattaaaaagagagttaaattaccttaaccatgattggaagatcagtgttgagagctctagtggccaagttcttcccattttccatttacccaaatagataggaaaaaatgaatggagtgagtgtgagagtgagagagagagagagagagatgcctttttataccacttttttgactaattccacatcaaaatcttaggcccattattatatttagattttgaagatttgattattttcacaggtaggtgtagtaggtgtatcactactattatccttgcatgtgcaacctgtcattttctttttgttttgagggaaataattcataccttcattaatgtccaacctgtcattaatacattcatatatttttttttcttctcatcattcttacaaaatgctaattaattaaattggttggtggtggataaattaaaataaaatgagtaataacacgtgtacaccaaaaaaaaaaatacacacacaaatgtgacacatttatgtgtaagttacttcaatcaattatttttatttaaagttggtctcagttattaaaagtaacttaacatgtaaatgtgtactatatttgtgtatgttttatgtttgattagtgtacataacattcattagtctaagtctaagcatactttttctctctggaacactctggtaggtatgagaacactcttctcgtttgatcgtgttttggtccctgatatggggattttggtccaccc

SEQ ID NO: 111336 - DNA, 3538 bp, Cannabis sativa
  modified_base (40)..(49): a, c, t, g, unknown or other
ttgaaaaatattttcacttttttacttttaaaaacagaannnnnnnnnnaaaagtgttaccaaacgccacttttggacattgatatactacgtagtagtaataagcaactttgagaacaaccagaatataaatatggctgttatgtgttgtgtattctattttttccaagaatttgaacagtatcatacattttttttttttatttttgtaattagaggtcaaatatttttgtcttttcttgcagtcacgaaggagaaatacttggaacattacgttttggacaacgtgtgaaatctattggaaatgaacctgtgattaatgagataactgaggacgatgttaatgatttgagtgatcaaattcgccagttgaaggtattatcactaagcatttttctctgttttgaaaactgctatattgaagttacatttttatatttgtttcttatctttcatttaattattattgcaggaagaacttattagagcaaagtctagtagtactaacattgttgtgagtaagcatgggcattttcaaggaagaaatgtacgtgatagcttgaatcagctaagagtgagtctaaatcgctcattattattaccttgcgtagaccacgaatctgaggaggagttacacattgacgagggtgatgtaaaagaattacaacagcaactgaacaagctacgtaaatcttgggaagaaaatgtggaagatcaattttgcgatggagattcctctacccagctggctgaaatttgtgagaacgacttgaatagtgaagatgatatgaagggaatagatgaagaatcagaaactgatgtagtcaatctggaaaaatctcataatgaactttctcatatggataacattacattgacagatgacatcagaggctccttaaacacctcaagggctgtcaattcagatattagaagcagccttttgataagttcatgcaggccttcaatactccaagagccaacattgtcagagtctccaaaaataggaaagagcctgaggaaaagtgtggctgtttcagcgagtcatttggatgataagaacaatgttgtagacaattcccagacatcaaatgtgttgagacagtcccttagccagactgaaagtatccgatcttctcttcggtcgagcaagatatttccaggccctgcagaaaatttggcggctagcctccaaaggggtttggatatcattgaaaaccatcaaaggggctctgctttaaacaaatctgttgccttctcttttgagcacttgacactgcaaccttgtcctgaggttgataaatcgagttctgctggtcaggctatcctttgtgcttcttgcagaacacagattaacaaaaaagatcccaatgacgtccaagatagtttaaagacatggatagtaccaatcactgaagatggagactctaacaaggtgacagaatatgcaaagatggcattatataagcttttcttttaatatttattctcgttctttactgattctttttctttctgttttgtctgaacaggatgcaacagacataaaggaagaagctactacgagaggcgatcttgaaaaactttgcatggaacaagcagctagaattgaacagctgaatcagttggtaatgttatcacctttggagcttggtgatttgtgaataggacattaatttttgtcttacattatcatctcaaatttgcaggttgagcaatatgaacgtgagaaacatagttccgttttagaaatcagtcaagaaggcaacagtcagaaggaaataatagcatttgatgagtctcgagatggaaatactgtaagaatttttttgtcttctttaattcagcatattcctcttttcaagtgctgaaagttttttttacgatgttgtgtttcctgcagcttttaaggagcaattctgataactatgagatcaaagaagttcagaatgaatcagtttttgatgtgaatgaaaaggaagcgcttctcaaggaaattcaaatcctaaggagcaagttgcagtcagattccagtgcatctttaaacaagtccacagataaactaaggtcatctttattgtcacgatcaatcaaactgaggagaagtgatatcttccaaaataacaatgaagatgagttggagaaagaaagacaaaggtggacagaaatggagagcgagtggatttccttgaccgatgaactgcgaatagatattgacatgcaccgccggcgagctgagaaagtggagatggagttgagatcagagaagcagtgcaccgaagagttggacgatgcactccatagagctgtccttggtcatgctagaatggttgaacactatgctgagcttcaggagaagtacaatgaattggctgcaaagcaccgagcaattatggaagggattgcagaggtgaagagggcagcagccaaggcaggaaagaaaggtcagggagctcgtttcgctaagtctcttgctgctgagctctctacaatgagagtggaaagagagagggagagagaacttttgaagaaggaaaacagaaacctcaaacttcaactcagagatactgctgaagctgttcatgctgctggggagctccttgttagacttagagaagctgaacaagcagcgtcagctgcagaggtaagtgatttgctttaatcaccatatttcattggaattactatacagggagaaaaaaaatagataagtaacatttgttgatattctaacaggaaaaccttgtgaattcacataatgataatgagaagttgaagaaacaattggagaagatgaaaagaaaacataaaatggaagtggtaaccatgaaacaatacatggcagagagcaaattacctgaatctgcattgcagccactgtacagggatgattctaatgaattaccacagagcacactcccagacgatgatcaggcatggagagcagaatttggagccatatatcaagatcattactgatcatagttgatatattatgctccaagactgaaccaaactctcaaactatttgattttgcatgaagagaccctacttgggttccatgcacatatctccctcacattttcattcatcatatattaatttcgtgtgtatattttctttagaactaagtttgttattcttatggcaccttgaaacgaataccaatttttttcctccccctggtaatattggtttggagactactatttaagcctactaaactttcgtcatttttttttgacgtgaaacttgtcgtcattgttccataatatattttagttttttatttttttaagggcaatatattctagttcaaaacaaaaaatattattgacataaaaattagaggtatttggggccataatactcaaatcttataaaatattgaaattccaatacccaaatggttttatttgcggtaatactctgtgcaatagtggtaccttgccgttaacagctaaaggggaggttcatacttcacactaggggtgttcatccgatccaatccgcactaagtgcggatttcatatttgg

SEQ ID NO: 111337 - DNA, 1191 bp, Cannabis sativa
actttgtaagtaaaaatgtagacataggcgtgtagaggtatttaggtaataaattgtgcaaaatggatttttcatgtaaaaatttctatattcaattattattttttagtaagtatatttgttgtaattaaaattaatgatatttaattgctaaaaatctatattatgattaaaatattattactattttttttaattgtccgaagatatttattgcatgttttgctaaactttgtatagattcttatcaccaattgtttttatttattatttattgtattaatattattttagactacaaagacaaaataaattcccatatagatattaatatatagtgtgaatattaaacttttttcttttatttttgttattaagtgataattaaataagcgccgccattaattagataaaattatggacgaaaacctaagtgaagtcatgtcttaattattgtcgtctccacgcacaaagaaagaatattaagtttcaaaaccaaccacacacactcaaattaatgtattatatattgactatgtaattattataattaatatatattagaatatataattacacatcttaatcttatatagctaggaatatactcagctgcaattggtacgaaaagtttaaaacaataataataatctgtttaatttgaatattaaggaaaataatataattattatatgtaaatttatcgtttcccatgtttcgatccgatttctaaattctattttgccatgcctaaaatctacatacaactgatgtggcagctttggccctgagcataaacaggttaggtttgtgcttaagactcacctagtctagtggtcaaaaataaaaattctttttaagattatatatattttttttattaaaatacaatattttactctaaataaaaacttaaaaaaaaaaattatatgtccactcaaatttagagctgaccctacaatgtggataaattatatatgtttagttgtgcatgcaatttgattaaatttttgttaattaagttatattgtttgataaaatatttgaatattaatataaattattaatatgtgctatataattgacaagctgtctcaaatattttagaggtcctgttttaattttaaaaagtaagctcctaacaaaaataattataatttgtaaataatacttttaaatattatcatatta

SEQ ID NO: 111338 - DNA, 4572 bp, Cannabis sativa
caactatttaatgctcaaacatttggcttaaatttcaatgtaatgtggttaaagtgtgaagaacctaaagtctaagaaagggatgaagaagagagagatctgaagaggtcaaaaagtgattagaaagcggtccccaaaccctagccaatcattatgtatatataggctcagggtttggtaaaatttccacacaagtcagggtatctcactcaaaatcccttatcttatcagaaaataatgaatattaattgtaaataaataaaaatctagtaaatgatcccacatttataagaaaatatcccagtaatcattgggattgtcgttaaacttgggtagattcctatttttcttaaagtttgcttatgtgtcatagtgcttcatccttggacaataagaaaaatagagagatgtgaccatatgcaatagcccatctcggtattagggagtatatgaccacgaataatgtagcatagctctcccaactaccctttgtggtccaaccttagtaggacatacaaatttcagtgcaaagtctgtaagcctatcttgtaacacaattttgagcctaatagcttcagaattatgctatgaacaagagacacgcataaagttaaatgaagtcatttggataaataattgagagagttatgtctattttaccaaagggttgtaagtacatttcagctccaaattcgacttgtgccacgtcatcatgcaaaaatgtggtagtgttcggccatgcatgttctcgaacacttttgggtgtgtttttaatttttttatggtgaataatttttttaagttttcggatcctaaaacctcatctcgacctttaaaatccaaattacagacctcttccatcttttggttccaaaagatgacagtgctaggctgggctattgggaagcattttgtagtgtttcttccttggtttggtcacatggatgctagaaaactacacttatcaaattaattcttggccaattggtgggagagagcactgttatcttttaggacacaaagatggcagtggtcgaccatggggtttacacactctttggagacttttctcgcttatttttggtaccttgatattgaaaatatactttggctaaagaaattattcaccaattgatgtggccgactactgccctcttttgggacacaaagatggcactggtcgactaggtagttttctacactactttgcggcttttctcacttggttttgatgtcttgatgataaaaaattatatttgcaaataatctcattccccttacttgtggccgacctgtgccactttattatgtataaagatgacattggtcggccatgcttgatggtgcatgagaaatggttactttcaattgtgttatactccttggtattacaggaccgcatttggaaaagttcatttagtgatttggaagtagagagcactaccacctttttatgagaaaagatggatatggtcggcccggccatgcctcagggaatggtctcctagtgcaatgttgactttatgatcgagttttagcctttctatgcctaaatgtttcaattccttgttggattcattaccagattggggtctctaggatgaaaacccttccgtgggctcttaaactctaggtcgggcacccttgggtgcgagtcctggctccaaatgattggttagtattttctcgagtctcctagatgtgccatggggccctcaaatatgatgtcttaactcatttgtctttgttaagtcatggcaaagtcacatagttgacttttaatttctcaaaaatcgtatataataagctatgacaaagagaatattagagtctttccaatgccttcaccaacaatagttgtggaatctgatgtgtttttgcgttcttgattcctcatttcttcaggatgcttggttaactctttacaattctgcctaacattttcttttttgtgacaatagtagcactccacttccctttaagagcgtgaatgagtgtgattgtctcttttgtcatcatatcttcctctcgatgtactcctaccatgacttaattctgatctcgtcataagagcttgatcaacatgatacatactacttggtttcttgataatatatatatctccaaaagagtagttgacacctcatccacagttaaggtagtctttccaaccaaaagtgtagtaacttgtactgtctcatatgatttttgtgaagaagtcaacaaaataatagcttgattctcttcatcaattttgacatctacacttaacaattgagttatgcacttattaaatctatttatatgatccctaacatcatccccttcaattatctttaactcatataattgtttttcagatataatctatttgttagagattttgacatataaaacatttctaattttttccataacttaaaaggacatgtttcgttcaataaactatactttaatttaggagtcaaacttaatgattttgcctgcagctcctcccaatcttcatcagtcatactctcagtcttctttacctacaatgctttagaaacccttgttgtatatcaacacatcttccactgtgctctaccctaaactgaaactattcttcccatcaaaaagctcgatctcaaattttatggaagacatcaacttcaacatttttggtgtaaatctgaacattggctctgataccacttgtttagaaaaataataaacttagtgaaataataaaaaaaacgaagcattttttttactctgtttggtaaaattaccaaacctacaaaagagatatatttcacttatagctttaaattacatatactagtatttcaatctttctaccataatctcaatacaccatttgcttcttcctcactctcactctcaccacacaacacaacacaacaaactcacactcatttctcttttcacaactcactctactctcacacacacataccacatatatacctagaataaataaattaacttaggcatcaagtcattccaaaactttcttaagtaggctcttcaaaacgtaaccaacaagaatattttaggcataccaagtattcaaaattaataaatataactaatttaagtaaaatattcaacagttccaactttgtaaggtttttctttattagaaatctatcatgttaatttgatttttagctgatttatgatggatttaataaagtactataataacaaataaataaagtgatagttgagacataaataacatagttaattaattattttttgatgagcaattaattgttttaaaaaaataaaaaaaataaaaataaaatataataattatttctcgaataaatatgggtcaaaatgatacaattttaaaattattttgtctctcaatgaatcgagatgatcgttcaagcttaatagaggataacttttacaccatgtttttccatgacaatcaacaaaactaaagtgaagaataatctcttatacatgaagaattgtatctctctaaataagtatttatgtcattataagaggaataatcaaattaaatgatgatggtgagatggaaggtccaaccttcacaaaaaatattgtataccaagaagtagcattgtttagattatattttatttttttttttatagatttaatcacactaaagtagtatttattcaattattaaaacctatcaagctactaagtataatataaatcttaaaaattaatcacacatgaataatatgggacaaacacacatatgtcttttatatacaaaatgtgattatgtaacgaaattcttggtttaataatatttttggttttctctgttaactttagtagaatatactattacttaaaaaatcattttttttattatttttataaataaaaattatgtagatattttatatgagaaaattttaatcaaaatttaaaataattaaaatattatagatatttttaaccacttttttaattttgtacatacaaatacattatactaaaagaaagtgttaatttaaaagaaataaaaataactgtcaaataactttcataaattatatgagttaatataaaaaaaattaaatctaatttaattttatcatattttctcaaatatgcaatgtaatttaatatgagttattttaatagagaattaaatttgaatatattaaaagtaaaataattaattaattcatataatagtgttaatttttaggtacgttatcttatatactattttttgatttttttttttgttttgaaaaattacagtttgggttgctctgttggtttctatgtaggctgttatgtaaattttggttgcgattttaggttgttccgttaactacgtgagttcctatgtagatttctataaaagtataaaaaaattactttaaaatataaaaattaaaaaactcctaatttttatcgtcagtttaataaaaaaaggctaattaggatttcttcttgccaaactttgacatgtatcaaatcatgccccctgaatttttttggccattaaaaattctccccgaactattgagattgttagatttcaggacttttgtctaattt

SEQ ID NO: 111339 - DNA, 3000 bp, Cannabis sativa
  modified_base (1446)..(1462): a, c, t, g, unknown or other
  modified_base (2950)..(2969): a, c, t, g, unknown or other
aagtgttaccaaacgccaccatagggtccatttttcatttaacaaaatagagggttcaatctgtaatttttgcaaaacacaaggtctaaaatggaatttacttttttttttttgttatttaaatactttattgtcttataattataatttttttttaattttattttatacttcatttatttctatactgcaacgatacttagatatactgttgcactaaacagtataaaattaggtagtccaatccaatacaattttgcatacaaaaaaagcccattcctgtttcagcaatcttttgtccccatgctgtcgtgctttgtctctgttctatctattatattcattgaataaaatccttcacataaaaattatgaggcttttctcgaccaatcttatagttgctcattgctgtaggttaggagtatgaaacgtgcaagagatattagagatcaacttgagggacttctggagagagtagagattgagctagtctcaaatcccaatgatttagaagctataaagaaatcaattacatctggtaattttttttattatgtttcaaatttaatgaccatatatagtggtaaagcttcattttcttttaattgctaaaactatttattaaagaaagctattttcaggttacttccctcattctgcgaagctgcaaaagaatggttcttatcgaacagtcaagcatccacaaacagtccatatacaccccagctcagggcttgcccaggtaaatggaatctggttgtcactttgttttcctttatggtgttcttatttgggttcaatttgctaaatagattttagtcatgatgtcttttctgaagtgggtagctgaatctgttttgaactggggatagtttagtacttgttatttgagtacaataaatgctattgactacttgctctgggctagtaaattaattttacatcgcaaatatccatagggatcatattatatcagctgttctagccattatcttgtgtcctggtcatttttttgcttatacacacctttcatttactttcaaaagaactgaggcatgcaaaaatttcacttgcagtgaaaattgcacttgtgtcatatgcacaatcacatgtactgcttgatcacaaggagttctatgaattgctacatatgttgtattcattatttcgttgtcatgttctcaggtgcttccaaggtgggttgtataccatgagttggtgcttacaagcaaagaatatatgagacaggtaactcccctcccattgcagggtttaaatctgaactctattttgttagaagtctatcttcaattcattgttttatacatctagttacgtatcaaactgcaggttacggaactaaagccagagtggttggttgaaatagccccacattactaccagcttaaggatgttgaagactgtatgctctctctctctctctcnnnnnnnnnnnnnnnnnctctctctctctctttgattttttgttttggggttcatatatagtactgcaattcaagttcatattttacagctttgaaattcctaatactactgtgaacgtctagggtatttggttgtatcatttttcgtgcttataccaatgtttggtgtcttgtacatgaggagagagtacaaggcacaaaatttgttttgagtctgcattacaactcatagtatttcttaccatattcaaataaattaggtgtttccttgcactcacaggatgacttacaaggatttgcgttagttatgatgacactcacgtctagtggtccagtttgttttctgatgactattttgtgaaaatgctcaatgatcattcaacagcacgtagataattaagtgaaattttcaactttgaatctgtcagaatttgttattttgacttttgagtgatgattctattttaggttgattcttgttatgtaagatattgatttacagctagtcaagcttagggttgttgtgacataatattttttgttgatctttcgtgctgttgagctgaatgaaatttatgtgctaacttttgtaatctatggcagcgagtacaaagaagatgcctcgtggagaaggtcgtgcatcataggaccaaaaattcaggtcacgactcaggaacaagattgaacatatagcaaaaatgacaattttgcttacacccgtgttattttagtccttatgctgacttctatcaccacttggcagtaaacacagagaatatgcactgaggctgtatacggtaaaggcggtgaaagcgatcacattgtatgtacagctagtggccgggaatggttggggataaagttaatcaaaaaggtatagaaagtgtactattgtacatacaattttgtataacagactaattacaatttttgtacatgcatcatcatagagtaaccatcattgtaggtgcccctgtaccgttctctggctcctttcccttttatttaatttaactaaattttggatgatgtattacttagttatggaaattcactttgtttagtatggaatttagttacttgaatcgtaatattgtcttttgaacccaatttcaatacaggatttcatttgctgcgctaagtagcaactgattagtttattaagattctgtttctgaagttaccttccagaactgggctacccattgtagttgacttgactattttgatactgatgataattttgaagtttcattggtgcttctagacactaacaggactggactcaaattcactttatttatgcttaaaatatactagcaaaggtacccacattgattcaacaatgaagtgttagaaacaaagtatgtaaaggggtttaggagtaaaagtatgatttcattcaacaaactacatctattccacattgattggagctattttttgttggaaatattttaaccggatctagatttactactatgtatgtttcattaacatcctannnnnnnnnnnnnnnnnnnnaaataaacacataagggtttaaggaaatctt

SEQ ID NO: 111340 - DNA, 2229 bp, Cannabis sativa
  modified_base (32)..(47): a, c, t, g, unknown or other
atttcaatgcaagatttgaaaaaatttaatannnnnnnnnnnnnnnntttttatgcattttaaatttttttccattccattcctattctaattccaattctcattcacattcatattcctatatttttattccgcccaatcggacgccacctgtgtattatatatgtcatatgtgaaatttattatttttatgattttttgctcggtaacgatggaaaatgtgaccgatggtcgttagagtaacataggttggtttagaacctttattttagtggggcaattataagtgatagttagaatatcgaggttagacgaagttgtggtttcaaactattttactcctaagtcttaaggtttcttaagagtaaagtaaagggcaaaattagaatttttcgtaaagactttacttttgtgttttagtgattttattggaattttcgtttaggtataatatgaagcattttaattaataaagaaaataatgaaaataattacatgttatttttttaacaaaagaaataattttattcaaaacagaacaatacaaacacatgagactgcagcaaaaacaacagcaacatctcacatcaccaaaaactcctatatatttgaccacttttttaatctcactatggagactaccattagtattacaaacagcatcaaaaacaaaactatttttacttttctaaatagaatacaaagtagtagcaataaccacattagtcacttgcttgcttcatatcaaaaggggtgttcaatctccacttctgcagctactggatatctttaagctagcaaacaacaccaaaccagtaacatatttcagcaataagtttcttagtgtaaatgcagttcatgaaaaggtagcagtgagactcactttcaatctcacacagggcaaagatcagaggtaatagacatgaatctaatcgaattgtccttagtaagaaggtgactattgcagacctaccaatatataaatttgtgtttgggaacaagaagtttatgccaaacaggcttagtatacacaactcctgagccacaaccaaagaagagtaaaagtgtttgacctgaaacttatccttccttacagcaagcaaaagatccgcctcattagtgtgtttccttagcctcaataaattcttgaaataccagctcatatcttgtttaaaggaattttccacaagtgttgatctttgagataaatggagttgatccatttaactcaaagactatcttgcttacaagaaatagcctaaagataccttaccgttgaggccatgttccatttcttccccttatgaaaacctacaccaccaagcttcttaggaagacaaactttatcctaagatggtaggtgaagcttactcttgttgcctttaactcccaacaaaaaatcgtgacaaatttagtcaatagctactgtaattttatgaggtaagaagaagaggctcatccaaaaattcctgacgcctaaaagaactgaaaggatcaattgagctctaccagcaaaagaaagattcttgctagcccaacaattgagctttctattaaacttatttgaaatcactcaacagtctaagactttccatcttgtaggtctcagatggacaccaagatacttaagagggaataaaccttcttccatgtgcaccatctcaagaatcatagctttgttaccctccttaactcctccaaagtatatgtgagattttgcgttgttagcagaaaggtcagtagcatcacgaaagcttttgaaagcgtcattcatatacctcacagagttcatgatgcccttgaaaaaaattgaggagattgtctgtaaagcacatgttcattagtctaagctacttggacacaagatggaaaccaaacccctttctattagaactttaagctaaaagcttggtgagatattccataatcaagacgaatagaagaggggacattggatctccttggcaaagacccttttctcctttaaaagaaccataaatttaccattcatcaagaagttatagcttgtacctttcaaatagaccataatccatttaatgaatcttgaagataatcataagtgtttgagaagtttctcaacaaagaaccaatcaacagtgtcatacgctttgcttacactactagaaaaatgggtttcagtgacccatgttgagtgactctaaaactctttagtgacacttcactgtgcgtcactaatgagggtgactg

SEQ ID NO: 111341 - DNA, 8687 bp, Cannabis sativa
  modified_base (99)..(100): a, c, t, g, unknown or other
tacaacagaaaaatactgtattttctgtaaataaaataaaaaaaaatcatcaaaatatttaaaattccgtaaaatcgtatttttgtaattttttttgtnntttttgtgtatttatgaaataatcgcatttataaaattgattatttaaacaatattttttatattataaattattataaatttctcacacttagggtgcattaaaaaactatatattttttaaggtaaatagtagcataactacctaaaattttaagtttgtgggggacataaacccaatgtttatttgtagcggcataagtaccaatgtttgtaaaactgtgattcttttgtcagtacagactctgttttaaatttattaaaggaatatttagaagtaactaatactacatatttccccaatgatcaagaatttagaccttatatgtggcatgtttaaaaaaataacaaagtttgtacggacgaaattagagaaaaattgcagttatacaaacattaagtacttatatgccgctaaaaataaaaaaaataaatattgtaaatattggaattattggaattatgccacttacaaacttaaaactttgattcttatgccgctatttaccatattttttttgctagccaatgcctagaagtgggaaaatttcccaagaaatggactttgctttccttagcactctcagttgaaaacgacgtcgttttgctgctggggccaatctggacgaattggaatgaagggaagctgaccctggtagttgtcgtccgtacagtagtagtagaagaagaaaagtagtaaggtaacagttgaagaagaagaactgaagaagaaacacaaacagaaaaacaataatggcgtacgttagcatgggcgaagcgcacagaagaatcacagagtacctgaatcgcttctacgatgccgtttcgtaccaggacggagcatctctcaagttcctcctctctctctcctctaactccccctccctcctatccctcgccgatgccctaaacgtctaccaggacgccaatagattgatcaagcaatccgacaagtactcccagcttggagaaatcctcgtccctctctttcgagctctccagacctatcgactcgccaatttgatcgatgcctaccaatcgtttgaaaaagcttccaagtaattttccttttttattttttttgcattttttcttcattaatttcgattattatacgtatgtgtatgtgtacacatgcctgtgtatgtgcgatttggtgatagagtggattacagtgctttcattcaggagtttcggaattgggattcggcttgggctttggaggcattgtatgttgttgcttatgaaattaggattcttgccgagaaggtaatgagttttgattttgtatttgaaatacagaatgttataatgtagggttctgataggtttgtattggtaaaggggcaattaatatactttctttctctttttatattttaggctgatagagaattgggctcaaatggaaaacctccagagaaattgaaggcagctggttctttccttatgaaagtctttggcgttcttgctgtatgtttatctcgtcctaccttactccttaccatgcacaatctcgtgattctgttaactctaaaactaatcaaaatcaagaaatgagtaaataaatacaaaaagacctgaactttttattgtttatgataatgatcaagtgcattaatagttatatggaaattaacattgtatctaagttttccttaattttttcttgcaatgctacttttattgagatgattcaatatggtgttgtgttatagggaaaaggcacaaaacgtgttggagctctatacgtgacttgtcagctctttaaggtttacttcaaggtaaaacaattataatgccttaatccttttgcttgctgacattcgtttattattaataatctgcttcttttgattcttacaagtacataaggttttgcactgattttttatgttgtggtattatctcagaggaatcatgaaaatgattttactgaatcattttattctctttcaagtacttaaaataatgctatcaacatgaaccacacttatgcaaattgggaacttttttttgttaatttgcagcttggtacagttaacctttgccgtagtgtgataagaagtattgaaactgctcgcatctttgattttgaggagtttcctaaaagagataaggtctgaatttgcttttccaaatcaatttgcatactgtgttgtttttctgtaagaaagttcactgtcatgacttgttattcaggtcacctacatgtactatacaggtcgtctggaggttttcaatgaaaatttccctgctgtaagtaatctacatccttcaatttaacagtttagtttattttcttgtcagttagtatgaagttatttttcttggatgggggaatatccattgtttacccttgtttcgaggactctgattcggctaacattctccttctctaccgaatccaactagaaaaaaaattatgttttgtatgataaaaatatcatctataatgatttcttagcatcttgaaagaaacttgttgcttgccaattatttattcaaatcatatcaaatcttcaactattcaactttgtcatatgcatgagaaaaatctgaaattcatagttttgcctattatgaagtctattattcacataatctatttccatgacctggcaggctgatcacaaattatcatatgccttaaagaattgcaacccttacaatgaagcgaatataaggttcaatacatgtgttcttgactcactgcaactctcatgaattttagttatatatgctctggtttattttggtgtattttttgattttgaattagaagtcttggatatataaaagttaaagtcgcaatattttctgtctcacaaattcattctttgaactgggataggatgatattgaaatacctcattccagtaaagctttcaataggcatcttaccgaaggattggcttcttgagaagtacaacttgattgaggtatgtcattcgtttatttctaaagaatggagatttttctacgtggctttattgttgcacccctgattaaccctctgatataatcttggagaaaatagcataatcaaatattgcacgtgataattctcatttgtagctcttgacacctagatggctagatcaacaaatttctaactcgattgaggaacttggttgagttggttccatatctctgataattaatactcttttcacagtataggaatgtagtgcaatctctaaaaaggggcgatcttcgacttctccgacaagctctgacagagcatgaagatcggtatgtgtagggattcttttaacctctagaagtttaattctaaaaggttttcacggcattgagaacttacttatctgcattatcaggttcttgagatcaggtgtatatcttgttctcgagaagctagaactccaagtttaccaaagactgttaaagaaaatgtaaatttccaagtcactttttaaaactgtcatttgattgggaatttttggtagaatttttcctgatttccccttttcttatgaaacagttacatactccaaaggcaaaaagacccaattaaagcacaccaactgaagttggaaataattgtaaaagcattgaagtggcttgagatagagatggacctggatgaggtactacttctgtcttccgtatttagctaatgaaaactgtctaaaacctctctttgtcaatgtttatatatatatatataactgatggctgatctggcaggctatcttatcagatacattttctctttgtgtgtgtgtacaggttgagtgcattgtggctatactgatatacaagaatcttgtaaaagggtacttcgctcacaagagcaaagttgtggttttaagcaagcaagatcctttcccgaaactaaatgggaagcctgttaactcatagtgttagttaaacaaacacagaactataactatagaaatgctaccaactccggatggtctagattgagtagaataagtgccttatcgctccataagtttgtggcactttaaagcttctactctagttggtagatgtagaacaactcgcatcactccatttttgtgcgataatttcgaagagattgttaactttgtgctctgtttaaaatcagtgtctacgtcatttgaattttgaaatatataatttttactttctgtatttgagtgacaaaaatgacaaaaacaagtatctattggcttcgtaaatgttgtcacctaagatattttttgaatgtgtaactaggttgcctagtaattgcaatttattttaaaatataaaataacattgtgtaatatctaattacaaaatagatagcatttaccaattacatattgcacacccaatttcttcaatatgtaattactgtgtaattgattggttaaactaagtaattattaagcattacactcaattcgaagtagctttttctaaatactcttagaaagtgtttagattaagaatcgtactagaggaattaaaaactacaaacaaattaatgctaaaaatggaatctacttgggcatacaaactctcaagccatttacttttgatttactaaacatgggttaacgtttactttacagtatcaaacgatccttctattttaatcgtgaatagtgataaatgtaatgtgtgcacatatcattactcaacaccctataccgtctctacattacctcacttcgtcatccattagttattttaggatatcattcatcaagagttgccattatttaattagttaaccaacagtcattaagtgttattaaatataataaaactatcctattgaaattgggaagtctgattatttgcaatctgctagacatacatatgacacaacaaaaatatcacaaaatataattcttcaacaaaaatcaaaattggcatacgttattaaaatacaattcaaagccaaatcgccaaaacaatgcattatgttttccaaaaaaagaaagaagcaactgcaaaagctattggccaaacaaaaatggtgacactatgcacgggagatggagatgggattttggaaataaatcaaaattttgttggtctttctgcaacggggtttcacatttcaggcaccctcagagggaagtgtattttgtatgttggacggcatgagaatgttaaaaccgtctcctgcagtagatatgatcatgcctggaatctgagaattccaatggagctcttttatgtccttttgtccctgtcgaaggagaggaagagaagttagctatcttaacccattgatgattctaaatgtgttgacaagttcagagaatagttacctggtgaacgaaaagaagttgaggaggtaaatcttgtggggcattaacttcttcttcagtcttagctctgaactccgcctcctcttcttcgtctctctccaaagaaaggtcccatatcctgggtacaaaagcaaacagaaaatgagaaaatatgttcgccttaaggtaagaatgaccatagtaatgctgtaaaaactctagaaatgaatcaattcatgacatattgatcacttctataattggtcattgtgttgcttacgtgagctgattatcagctgaagacactgccaaagtggaagcttcatgtggactccactcaatagatgtgataggatgtttatggtatgcaaaatgtgccaccactgtatcacgttcctacataggtagagtgaaagataatgatgacaagaatgaaaataaagtagcacaaatatcagccctctcctctggattttatctctggaaaagtagtaaaaactgttatatcattctaatacagcagtgtataccttgttcttaagtgatctgagatcatggatggaaaaggtcccatcatcacttccagatgccaacatacaactagcaagcctaatcatagagaagggccaaaagttaaatggtgaaacttgatgacatatcaagccaatgggaaaagaagattgtcaagtttttaacctgttccatgaaataacattaacgtctgcatcatgtgccttaaaagaatctacagctttcttccctacacggacgtcccatattgctatagttccatcgacagaacacgatgcaaatatgtcttgttctgttgggctccactgcaattataaatgtaaatggaattgattacaacattgaattaaagtaaggcaacctaaacaaatcataacctggagaccgttataaagtgtaaagaccatataacattgttgcttcacaagttcaaaacttacttgaagatcttctacactggcagtgtgaccaataaaaggagtattatcaactttccatgatgcatcagatgtaggctcccaaaaatgaatgtagttcttgcagtcccctttaataaaagattactacattattatttgtacataaaacaacaaatttaaaaaatataatatataattaaataaacaaatatcttgtaagaataccagataaaagccttccaggcacaagtggactccagtcgatagcaaacccttcatccttgtgcccaaatttaaacaagggagcctgagtatgaactatagagccaccttcaatgtttgattctgatgctgccaaatcattgagatgagagctgaagtcccagatctggcatttagtgaagcagggtcaaattacatcacaagtaatgttataataagtggatgaagcattctaacagactctgacctggacatgacccgtatctgcccatgatgcacatatatgagggctctgtgtcatggcacgaatgcgattaacacaaccgctgtgagccacacttcgcaactgtaaaacacaagaaacaagaaactaagatacaaataccaatagtgaaaagttgagaataagcaaagtttctcagcaactaaaattaataattaaagtaaaaatgcagtattgcctgcagcacttgcgacccagatccatcagggccttcatcttcgctttctgattcactatcactgtcatcatcatcatcatcattttccatatcagtaacaggagtggtggattttttaggagggactagttcccgtcttttcccagaaatgttggatatcttaaatattcctatggagtttgaactagctttctctgcctgcagagcaacatagactgattaacattgttataaacaattataaaagaatattctgatgattccagcagctttctctgtctgcagaacaagaaaaatacatatataaataaaattaagccttacctgagttcctgcaacaaaatacgctgtatgtggaaactctgttcgtatcatccccaatgtatcacgaacaatatcaaagctgccaagaaatttaacaccaattacttaaatgaaaattttctgtaatccccatggaaaactaaataatttatttgtgttggagttatggaaacttttaacatctaaaaaatgcacttccccgtcatttttgcatcccttaaatcaaactagagcattaaaaaaagttacttaaattcagaagtacacttcatatagttgaacttccataattaggcatttggctgatcaaagttcttaactttccggagtagcaatagaaaatattatattcttaaagaaaagggtaaaaatttaagcttgacgcattttcctgaactttctcgggaaaaaagcaatgaaactctagcacatacctcaaacatggccatccgatgtggaaggcatgaagagaattataggcagaaggatcacactggagctcttcaccttcctccagcttgtccactcctggttgccacacttttactggcataggcggtgctgcagcagaagacgacccaattcctttaacctgaaaaaaaaaatccattcaaaaatcactactcaaaaaattcgacaattgattcaagcatgggaatttgaatgtcaccttgttctttcgtttcgctttcttggggtttttgatgctccgaaccattttaatgttagggtacttacgaaaatttacagcggaggttcaacgttagaagtaggaattcagggctttaatggtgctcgctagggttttaggtatgtagtatggttacactttcagcgtgttcgcaaaaactagtatttctacgattttctcacgattttgctatattatacttttatccacaaactttgtgatttttctcaaatgaaaccctacaaacaaaatgacggatcagtccttttttcaatatatttttgacaatttcttttttgaaaattttacaccaaaaattcaaaatgataaatttattacataaatacatcatttctctcatttttctcttttttttttcttttatttttcatttattttcagttttttttttctaaaaaatagtaacctccatatagctgaacacttccctctccccaatcccaactccattttccctcttctttttgttcttcaaattttttttcaactcccattaactattttccctctttttattttttttcttcatttatatataaacatggttgtatttcattcttcaacaactcattcccctgttaaaaaaaattctaaaatggagttgaaatctttagctaatagaaacaagggtaaacgacctgttgttgaggaggatgactctgat

SEQ ID NO: 111342 - DNA, 921 bp, Cannabis sativa
  modified_base (884)..(896): a, c, t, g, unknown or other
cctcaataaataaatatattttatatcatgtattgtatagaataaaaagtagctagaaccttatttaattatcacaccaactactcaaagggcattattgtttgtacaaataaacttagctgtataagcagttcaactggcaaagcttctttagggctagctagctatgaatatgcttcaaccatttttctccacctactttttggagctcttatttaatttccagaaaagactaaaattttagtaataatatatacttataatatgtaggtacttgttacatttataaatataggcttaattaattattattttcgtttatagtatacactaaactaagcaaatacaaataaaatatgtacagttacacatccttaaatgcatttttaattcgagtccttttttctttttcttttcgtaaagaaaacagtattttttgagctctctctaatgcatatatgaacattgactatagagtcataaattacccctaaaaaatgtccttaactattaagtttgagactgtataattaagaaattttaaacaatcgatttaagaccagagtaataaaaaaattaatactgtagtgtagaaagaaaaagacatgcatgaaggacaacaaattagttgattaattagctttaggttatattcacacaacgtatttggaggctaattaaagctcatgcatgtacgtaaataagttagttgagttcacacttcacgtcagcaatatagtactatttgttttaatattgtctattaattaaagttcaacctagctagctaatagttcccaataatttaattattattttactaaccatatattttaactgcaatctgtttttttttttttttccgatccaatccaatccgcacnnnnnnnnnnnnnccaatccgcaaaatgcggatatccg

SEQ ID NO: 111343 - DNA, 3837 bp, Cannabis sativa
  modified_base (3791)..(3800): a, c, t, g, unknown or other
tatatatatatatatatataattatggttgaaaaataattatacattgtgcataatttaggcgtgaaaaaatattattgttaatatttaagttattttcatgttatttttaaattatacaaattagtataatcaatcgatctcaattgttgttgatgttattgattgtggggtttaatttagtcgcaaatcaaggttaatgtcgtttatatatatttggctattctatttttgtgtcgtttcttgtaaaagttaatgtcgtttatgagcgtttggatctattgtagtgttgtttcattttcttttttaaaatcaaaattataatgtcatttatgcatatttggctattctattttcgtgttatttcttgtgaaagttaatgtcgtttaagagtgtttgcatttattgcagtgtcgcttcttaaatgagaagaatgtaaatgaaattggggtgagaaaggctcgaactctcgacctcaggataactcagtagctatgagacctatgcactagccaactgccccaccacccattgattatgtatacctctagagaaaattgtggcaaaactcataaaaaagttcacttagatccaaataattctcaaactttaaaaaatagcgacaatacttctcaatgtcttaattattatatgtctttaatacctaatttaacaacaccattaaatactgataagattgtcacgtgttgaaatttttttttatgaatcaaatacttgtattacttccaaaacattataaactacatcacctgttaaggcttgaaaatttctaattacaacttttgattattcatcacaacgtgctataccactcacaatcactttggctcaatttagatggctaatggtatgtaattctattttttacactatctttaatcatctttacacttattttcggtctaatgagcttgtgattccataaaatatcattgcgaacaagtcaaatttgataaattaaggttgttattatagctatataacaattttttaatttactcattttgtcgctgacaatccactgaaggagtctgtgaaaatgttagatttcgcttgccactttgtctactctctaacctgctacaaacatctcaagctatattcacaatcaaagaataaatagtgcaaagtttcctcatgcattccaaataagaggtattcagaagtgtcaagaatacctattttctttaacctctccttggtctgatcatgattctatcccaaactatcagtcatagcataaagttatgctttggtatattcaatcgatcgagtccaaacttctttggaccattggttcttctatttcacctcatagcagttgattgcctttcttgacatagtattcctcattagaaaaaggattgcaatgagatgaagcacttgatgaattttttcttgacatctacaattttcctccaataccagttattttgtaagagagcattgtatgctcaccaatcctcctttttcatatacactataacgtcctaactcgtaagggcgccatgtgtgtgctttaattaatttataataataaactaacatttaaaataaaattgtggattaattaaaactttagtaattatttctttaatatataatttaattttcttttcaaaatgtttccaagttagggatcctatttttcctataaactttactaaaatatcactgtattaattattttattacaaaatattaatacatattcaaaatactacaaaagtcagatcctgtcaactaagcacaaaatacaacgaggttgatatgtatattcgtcgggagacctctgactcatggttgatccatttttcctttttccttacctgcaccacaaagtacccataagtcacaatgacttagcaaaaaaagtgagaaacacaaatctcatgaataacatgaatcattacataatatcaagcatactcttaaacatacaatcatatagttgatcacagtataacccaagtactaataatgaattatttgtctaataagataagctaatatttgatattttataaagtatccttaactcttgtttccaacaagtctcttatgtcactatcgttgcctaatgaggcaaccgataagtaaaaaacctaacaataattttaaattagagttataactctaccaaattaacagtaattagtaccatatcttaattagccatgcaatacgacacaattgacttttcttaccttaagtccaagtttaagtgtgtgggccaacttgagtggaataatacctgacgatctcaagcctatatgtcacgacaatggtaaattgataaataacttaatcaatctcattctaagacttaaactcaaaactagaaattaccctatcgataaatagcatgataacaccctaaatatcgataaaacacaaaaaaaaaaaacgtaggtgctggaaacaccccaaaatggtctattattttcctaaaacggtccactgttattctgggttcagccctagaaaaacggttcactgttctgtaaaaacggtaagccatttttccttacagaaatagcccaactcgagttttacaccacaaatccaaccaaatctccttcaaacctaatcaaactttctagaatagcttaataacatccatacaacaaatctaaacaatcaaatcacttaattaccttaaaattacgaaattaccatggatactcaaccttgagttccatgaactcaaacttgagtttccaaccaacaacagatattcaagcactagaactacacagtatctaataattaagcttggtaaaaatattctaacactaactcatctatatagaacaaccctaaaccaaaattagaccaaaaccttatatttcatcaagaatctcaaagggaaaagggtagagcttcacttaccttagtattcttctcttaattctatccttgagcaaggttccttggctgaacgatgcaagaaatttagaaaagtgatgttttttccttagcttctaaggccttcgagagagagaaagagaagaaggatgagagtgaaatagtttttttctttatttttatttgtttttgatatacttaataaataaaacctttatactaactcagcctagaaataactaggttttaaataagataaaaacctaactaaaccaaagaaaagactattctaccattggtttaacatttaaaaaattctaacctatgagtaatttgatcgtaaccgattagtctgagattccctgacaacaccaacttctaacaaaacattctggtaccactaaatctcattctattactgtcgtgactctcttggccaatcgatcgagtttctccagtcaccgaacctaaaaatactttatttcaaaaatagtatatacaatactcatatatttcaataaaaattttgtaactaattaatgaattgcgattatttagtcattttctcaaaagtctctaattatttcataattaactttagtaagattataatcttactttttttattcatataactacatatttaataaaatatattcaattaaacataattatacttttcgagatattacatacacatattctagatccacttcacccaaaaattttcttttttagtaaaagtagcccatatatgtttaccaattgtcgttgtattccaatggaactatttttaaacccaagggcacttgtcgattttggtctacacaaatatgttggagtttattttttttttaccaggatctagatttactaccattttttaacatcctaatatgaatnnnnnnnnnnatgtaatttaaacacataaaagttatgagaaatctta

SEQ ID NO: 111344 - DNA, 1829 bp, Cannabis sativa
ttttttttggggggggggggggatttccaaaaactatataagtacctcattctttctttttttcattctttacttcttttttatattctgagcaaaaaactctctcaaagactccatagagccaaagccttgcaagcccgagttcttcgtggattttcaaggttttgactcccacactcgtcatgcggactagctcaagccttgcatcttctcagtgtgtacgttcaaagcttcctctctcttcttcgttctttggatttctgccattgatgagttttttaagcttttatgaacttcttgattctcatgtcttaggatagtttttatgcattataatccgttcaatagctttagaatgcataatgtatgactctttgatgaaaaagattgaatcttgggctttgttttgagattttaaactttagggttcgaagaacacgaagaacataacttcaaatttaaaaaaaaaaaaaataggcttttgatctgtttaggactttgcttggtgctttatcctatccaaaaccctacccggtacttagatcctttacaagatttcaatctggttcttctcgagtttgatctatcctggccagttcttgatgaaccaactgtaagctagccggttcttggtgaaccaaccataagctagtcgattcgtggttttacatccagggaccgtccagttagttcgttcaagtcttggccattaaaatcatgtttttatcctcttcttatttatgatatttggttgttcacctccttttgtctttctgcacagatgaacccacgtgaatattggggaggtgacatacgaaatgacaaggatttattagtctttcgtatgaagactatcgttcagctagttcttcttctcagagctcattgggtagctctttgagtgactttgaagtcagtagtggttctctagaacctgaggttcaacatcaccactattatgaacgaataggtggtgaaatctacagaagattcttctggaaattgaaccaggagtggagacagttccttcccaagtcttggacttacattgttcgtcagggtgtgcctgacacatttcatgttggataggcgtcttctttgtccaaagatcttcctatagtagcggttgttgtgactgttgcccagtactccgagaaacatccaaacctagtgaggactaagcaaatgtattgtaaggcacctcccactgatcctcacattatcgagctcatggcaagaggaagggtttgccaagttaagtaagttgaacagccagaggccagccaggcaaaggagcctattgtcgttcaagaggaagagcaagaagttgatcatgttgagcctgaaatagagtctagggccactccgaggcatcctagggagtgcaatgtggttgagaggaatgttgaattttgtcatccaatctagtccaatcgaattgagtcatccgatctgatccaatagatgtattagattggatcagttctaaccattggatgtgctgattagttttttattagattggattggatccatccaatccaatttagctaccatttaagttaattttattaaaaagaatatatatatatataaagtatataatttaaaacttaatgatccaacatatataataaacattagtttagctcaacttaattctcacgatgtcataataaaattgttaaaaaataaaatttattcaatacgtattgataattttattagcatttaaaagaagagaattaatattttaaatctaaagtttttttttctttaatctcacgtattaaatgtatattaaatcaattaatatatatttttaaata

SEQ ID NO: 111345 - DNA, 5497 bp, Cannabis sativa
ttaaaaataataaaaaatttatataaaatattcaaaaaaaaaaagtatttaaatagttaaaaattgtgattcacaataaattttgaatagtattatgttttttttttaaatatcacttgagtatttttttaatgaataacataataaaaaaaaattaattatacaactaaaaatatatatgtgcacaaatttcgagtttggtcatagagttttttaattaggcaaatacgtggtgtccgtaaagcaattaacttatcaagtagtgcatgcgaattacttaaattatatattatattttcattagtttgttatctgacctaatttttacgtgtgtttcgctttgggagagtctccgcctttgctactttcacagtcaacgtcaagggttattgggattactgcttagaataaataattagtaatagtactgcacaagtattaaggaaaatccataacccctgctggaaatctattatgcatgatatgtgtttgaatttcaccatccagtgttgatcaatataggctagctaactgcatattcatcatatattaatctaattaattagtgatttaaaacaacaaactatatatctttggacatattgaaatcgagatcagagggagatcgacgatcttccgatatgccccaaattattccaactacttataattatatgataaatatataatgtgtattttcttagggttcctgatgcaaataaatatttatatatatggtatgtatattatttgtaatcaggtatgcattgttttcgtacgatattattaagaaccaagatatacgcatagctaattttgaaatcagaaattttgtagatattatatttagataattatatatatgagaatattagaagttgaaatctgaatgtataatatcgaatatcgatcagcatcgatttatcaattaggtacaactacaaaatctttcgacatatcataacaaccactgattcatttgcagaggccttgatctacatatagattgtatcaaaagtactgtcaaaatcaagcataatgtacaattatatatttaattcactgatctcatcactcgatcgataaacataatttagtaattccctcattaccctatttaaaattcataaggctgagttttaattactcttgatcatcctcataatctacactctaattatattaatctacatatatatagcatctagctaattaactaaaaataatctagttgattatctagtccgtgtgactgcaccaaactcaccatattgccagcaacacataaccatggcaacatgttgaaatcctgagcactcaaaatcaaatctttagctctgtcgaaaaattccccacccataatcataacatgattattaatgttgtcaaaattagtagtcgttgaatcccttttgctataattttggtcaacgtctacactactgttgttggggcacttcaataaaccaatataagtctccaaatcgtgaacgcaggaaagattttgcatgttgaagaaatccaagaccaactcaactcccacgtgtgtgtaacacgaacaactccaagggaactcgtactttcctcccaaaaccctaaaattctcgttaaatagaaccccaggcatcttcgtaataggatcattcacgttgacaatcctcaaaactcggacacccaactcctcgcaacgcttcttgaactctgagtttcccactctcggccctccaaacgagaaaacggcaactgggatgttgtcgtttttagccaaaccgagctcagcgatgtcgtacgctagtagaacggctaatgagctccccatactgtgtccggccaaggttatgctcatgtcttcatctttgtacttgtttataagcctcgaaatttccgaaaggagctgctctcggcagctatcgggcccgaacttgctcgagctctcgtccgatgtgtacaaactcaagaaccccgattccaccttaacatcggggcgaggatgatgaggatcaagccttgccggtgttaaggagctcatcaaattcgccacccactcggggttggtgacggttcctctgaaggtaatgacgacgtcccttcttcccagcttgcgagctgcttcgtccgtcgacactgccacgtaaccgatccatcgactgcatgtgtcgccgatgttgatatcaggtgttgcgtaaatgtatttggtgacttcgtagcctgatttttccaaaccaacctctctcatcatgttcctcttcccgtacttgcaattcaagtagcgtttggagtttgggtcgaggtcaaaggccttataagaagcagaaacgaattctccgtagcgaattatctcgcttcttagtaaagggtgtaatgggtcgacaaggtcttcccagttatttgagccttggatctctctccaaatatcggccagtttagaattagtaactggcttagaaggctgacacatggaggttgaagttacggttgtggttgtggctgtggtgggtagtgttgctagaaaagtagcagcgtcgactgttagagaagaagaagaaattgaagtttttgtgtgggatttgatgggcaacgaaacctgcccgaaagaatgcggacggggccgaaagttgtctgacaatgtgacgtgatgactactattattggctttagtagtatgtagaatttgttggattgtagctgccatgatttttatgttatagctcccaatcaagagagttgtttttgtttgttgttgttttccttttttagagagctagagagaaagagagagagtgaagagagagaagtgggtttcaagacttccaatggttttggtgcgagtgagtgagatttataggaaggtgaggtttgagtggagggggctgagaggaaggaatagtttcattcaacatgtggagccacatgataattaaaaggaaaaaaaaaattgaaaggtaaagagaatactgaaaagcatgttttgcgagtattgactaccaaatatttatatatataattatttttgttttcaaagttttcaaaaatctattaattaagtggtcggttgggtttttgtctatgtggacagtggacataaaattactaggagaattgctaaaaaaaaaaacagttatattctataatatatctaatatatccctactaatataattaaatattaaattatttaatataatttaataaaatattttttaaaaaatattagtaattaatcagattgcatcagttataaaaaataaaatagtaaatactaatatccaataacaatagtactgactatgctacggctactatacttttggtgattgtaataagtttcggttgtattgaaatagatgacaaatattttataaacaaaaaattagaaaaatcatttggaaaatctgcagaaaaatgatataaattgcactgtatatttattttgattttacttttatattcatattttttaaaatgtaccaacttttatagatgatatttccaattatactcttaaattaatataaaatatgagttacatttaagtgtgaaacaatctattataaaaatcgtgaatatattttaatataatataatatgatagtcttttcaattaataaatactattcatcaacttatcatctactaatacgtagcaaatgattttccaacaaaatactaatattcaaacctaattattatgatcacacttccgaaacataattgcattttttttgtgtacgaagcagattttttctatagcactttctcttcttttttccattttttttttgttatttataatattgatctaattaaggtgatccatctttgtaagttattaattttgatcgcactattatattgaagaatatattaacattttttcatcatctattctacaatttttttttcaaaaagaataaatggactattatcaatttatcataattataaatgatttaatttaatatatgaaagtaaatgtattttttcagatatatttatttttcagcaagtatatatattttctttaacatatgcaataatctatatttaatagcattctatataataaatattagttttgtatcgtgaatttttgtttcttgttttttttttctttttgtttttttaacagttcaatttttgtttttattatgtattattgtttttttttttgacaaattttattatgtattattgctatatagatatatatttttgagattgactttcctggtgtcaaatcaagaaatattaatatttatttactttatctcttatttccactgaaacggatatgcattcaacattttgtccaaaagctacaaggataatgtaatagtttttttatgtagcaaggataatataacagtttgtttggtgaattatatctgatatttttagctctatttatattagatattgaattttttaatatatatcggatctaattaattttagctatcttaactgatctagtgctcattaaatattagattggactaattttatccattgaatgcatatgtatatatattagattgattcattacacctatttaataattttttttaagatccaatccaattcattcaatattttaaaattaatatttattagattgcattagattgataaaaaaataaagataaatactattttagaccttgtcttttgtaaaaattactaattggactatgtattttgttaaatgacaaaatagacactgtattttccaaaatagtaaaaataggaccctaagctttgacaactttttttttttaatataatcaacttgaaaacaattcctaatacgaacagatacagaaaatgtaaacaatcctaaaccctaaaccacttttagatcggattataattaaattttattttgacaaaaaatcaatccagggtcctatttgtagcattttagaaagtacagggtccattgtgtcatttaacaaaacaaacggtccaattgataacttgcaaaacacagggtccaaaataaaatttacccaaaaataataataaagtaaaaataattagtaatatttaaaaatgagcttatgcgatataagtatctaaaattttaaatttgtaaaacggtataaattaagtaattttgttagcgaaaaaacccaattttagtaaaacattattttttgtctagttttctcaatacaatctattttgaatttattttaaaaaattaaaaatgattgatactatatatattttcatccacagtaatgatataggacttatatatatcatgtttaaaacaataccgaaccaaaaaattactgaatgaaaattacaatttttttaatattaggtatttatgtcattaaaaatatatttcgatttatgtcgctaaccgaccgatccaattacaacctactacgtaccaaacattgaatatccaattgatcagatcggattggatgttattctttaatatccaattggatcggatcgaatgttggatggggtgtctaaaaa

SEQ ID NO: 111346 - DNA, 3101 bp, Cannabis sativa
  modified_base (2485)..(2486): a, c, t, g, unknown or other
  modified_base (2620)..(2631): a, c, t, g, unknown or other
aatctaacatccaatatataatttgatcggatctggatatgcctaaaaacattagatgtggtccaatgaacactcctataggtcatcatcaactctatttttctctttcacactcaatcttcatctaaatattagaagacaaaatagcaataataacataaataatattaatttttttaaaatttcaaatgtcaaatttaatattaatatttattttataatccaaaactttcttttatttatttttagtctttttatgactctaacaataggagctcattttagtagtgagagggtaatttttagagtgaaaaaattatagcaaaatctctcttcatttttttttctcatatttctttctagaatttttatgagaatgctgagtataatggcctaatattcctttgaatgttagggatgattccatatgcaaagtgaggttattttatatcttcgattcacttgttgtaatatttatttgagtaatgcaagttttcattccatttttatttttatgttcttcgtccatctatattactatatatgatattgtagtcatactttttatatatttttatttagtgattatattaatggtagtattgcccatgttctatctatcatattcatttttatttactctttgttaaacatataagtttagttatgctcttcttatgtgtctaaaaattaacagaaaaaaaagtaatattaatattcatttccttcactatcaccaccatctctatctctatctctttgttatattatttttactatatgattagtcatgctctttctatgtgttactatttagtaaaaataatattgatgtttagttttatgtttaatcttttattgtattattgcttgatgtataatgtcattcttaggttctacgtaaaattaaatcatttcttttaagaacttgtatactcaaaatataatgatttttaatgttacattatttatgtcaactttatgaattaaatgtacaaactagttaaacaagcatatggatgattcttgaagtctttctctcttttactattgattacacttttatttgctttattttaatattaattaccaaaataaaaatcttcaaactcatttggttacttatttgttacttcttattaatattttgtgtttatttttctactaacgtttttattcataatcaccttcttgtggaatcggccgcccgatatatactacaaccaccgctagtagaagtcatatttgggcattaaatattgtaagacttattaatatcctaaccacgtaaaaatctttatctattttatatttacttattttctttaagctcaatctatttcttaattgatttttgaaaaaattcggtaaacactactaatatgttggccacaaagcatgatttattacgagtattttttaccatgcttgatcatttaaaaaatgaggtattctttaaatgcttcatcatggtggggttaaattctatagacatgcattattttatttttttttggtcatagacaagaattcaatatttttttttattatgtttcggatttttggacaaatagaaagttattttattttcatggaattgttagacattatttttcttttaatgaatttctctatttctattaattttatataaaggtatttttgtaacttgtaattttttatttctatttttttttttttatgaaatgtcaacttcattaaattaactctctgagtacaaaatatttagcatagaaactggagcattagacacagaaataagacgaccagagagagaccgtgacatccaagcaacagcatgtgctaggtgttttgttaattgttcaacaaaacggattttaacaaaaggcaaagaaagcataagtgaaatacaatcttgaaccaaattcccaaaaacataaaagagaggtgagcggctccgtatggcttggatagaaaatacatgacctataccttaggtatcttaggggttaggtggatatagttttttatcccttcttgattgatgtgatctctcataaagtagtcgttactagccttattaatcatagtgtaatagttgtataagaggggttacgccgtcagaattattgcttatggcagttccaatacgttttttcccatacggcattaaatgagaggtgactgttcaaataaggtcctgttcctcctggagatcccttggcgttcccctggtctccgggagtacgtggagcctttacctctcctccgggagggtacattcttgtttgacactcctgaagctaagagacttagtcgattgatccaagagtcacacctcttggatccacgtgtcgttgccacattggtccacgtattttgggcaaaattaagggcaacaaccacaaaatcaattcaaatcccaaaattaagttattatacagaaaacaaagggataatttcacaaatacacaaaaataacaaaaatacggtttcacggaannttaaatatttttacgaattttttgattttatttacaaaaaatacggtctttttatattgtattcatgttaatttgttgttgatttttgttatatgtatgttattttttattattgttttgatgttatttagatnnnnnnnnnnnnttacttttatgtagttttcttgttttttcgtattgtttttacggaaaaccgtaaaaatgtaaaagaaaattcattaaatgtaaaaatgtaaatgcattgtgtaattatcctaaaaacaaatttgtacacccagcgaaacattcgatgtctttgggtcatccatcctagccacccactcccggcatgtgtcatgtgtgcaaaaataataaaaatttatagcctatcttttaaattgtaataaggtttttcttttatgagaattaacgcttgatactaagtagagtaatatgttgtaacatttacccgtaaacaaagtatattatagtagtaggagcaatttgcggtgaaatttttaatttttatacattaactctcttttttttgtggcaaaacttctttatattttaatttttatacgagtaatttgcggcaaaaatacataagttttctcccgagtagcagataaatac

SEQ ID NO: 111347 - DNA, 6803 bp, Cannabis sativa
  modified_base (48)..(54): a, c, t, g, unknown or other
tatgatatataatccaattcaatataatataatacaatacgacctaannnnnnnttccaaacgagcccttaaagttttggtacttcggtattatactcctccaaaacctactagtttttaacgacgtttgtaaatgtacacaatcaaatataaatttatagtataccgaagttcttttgctttatctattaatttcattttgtcttttatattttgcatcaaatttcatgtttatccaaaattcattaaatcaaaaaggaaattccataaggaaactaggagacttcaaaatcccttaatggttacttcataagtctctattaagaagcagaaagaagtattttgttcaaatatctcaagaaatcaaaaggataaaatatgaagccgcactgcgtattggtccaatttgcactgttcctttataatatgtgtattatgtctgtcttgtatacttttgctactctcatttgcatttacatttgtatgtgatcttagtacttttctgattcactccatatttaagacacgtgttctataacttcaatataaactatgttattgaatattgaataatattttgtgaagttgatgaaatactcgtatgaacttttgcagtcggttactaagcgagaagcagaagatcgattagttgaggttggttttattttgctcatgctttctattctagatctttgaaattatttaatctacttgcaatcacatatagggtatgaagaaagttgaagcgacatttaatcacaaagggaaagctgttgatgatttattaaacattgctaaggtagttttttatcctttctattctaaaacatatttctattatcccttctactcgatctcattgttgctacttgctactatataagtttggtaatcctcattggaatgtagcattattacttgtgtatagtagagataagcgtaatcatttcatttttatataaattaagctggggatagtttttttttttatatatatatatatatatataatatacaatcttgtttcgaaaaaagtaatatatagtttcatacttatagtagtaacaagaaaggatctaagtaatatatattctagatttcccttctacttgttgccataaagatatctatgaactttaagtgtcgaatgccaagttcactaacttctgtattgaagttgctgaatacctttagcaagtgaacttgatgtagaaagaaccctcaacactagctgctacaatcaagattcctcttaatccgaggtgtgctcttgaactcctttcaagcatgtcttggtatcctaccaacttgtagatgtttggtccctctcaatcaagttttcttggtttcttcaatttaatttactcaagcattcagctccataaactttgtaacaacactgcagctgagcatgttacaaatatttttccttgagaatgttctcccaaaatgatgtaagaatacatgatatgattgtaaagagttaaataagaaaatgtcagccatcttctatttgtatgctttcgtttggccataccccaaaatctgattaattttgtatttttcaaaatccacatcagccgaaacgagtgttgtcttttgtgaaaagctgtcaaaattttataaaagaatttcaagtgaactaatgcttgaaagacaattaagaatcagacttggcttcttatggaaactttggcctctaaaactttaactttctatgcgagaacaatcacagccaagaactaattttttacattagtttccatagaaaaacctaatgaataatatttgcagactttgcgagcaatgccagtggttgatcttgaaacaccaacactttgtcttgttggtgctccgaacgtgggaaagtcatccctggttcgtgtgctctctacagggaagcctgaggtatgcctacattgtttaacaagcactgttctctttttgtggtttgttacattttatttgacatgtttcattctttggtttagatatgcaactacccttttacaaccagaggaatactaatgggccatattgtttcaaactaccagcattttcaggttaatttctttatcatgtaaattcctaattttactggattatcatttgatcaacaattaaatttagacactacttgcaggtaacagatactcctggtttgctaaggagatgtgatggtaagaaattgtaaaatgtttcgttttatatgataaataatgtgatcggtgtgaaattaaatttgtttcacatgcgaatagtgtgttaataactttacaggcattttcaacagagaagagagaccctgatcaataattcttataatgataagaaatgattacatttcgtctttcataatgtcaaagatttggtttcggtatgctgtcttttgtgaatatatatgtttatttattatctctctcttttgattgaatttgcagaggacaggaataatttagaaaagttaacccttgccgttttgtctcatcttccaactgcagtactttatgttcatgatctctctggagaatgtggaacatctccttccgatcaggtaccatattattatctgttgttgtgggattgtgggatatatatatatatatatgtatatagtcttatcttatagaactacgactcagacacttcaacacaatgtctataccattgcataggattaggaaagtaaaggaaaataaatttgaagtgtgtacactttattgggcagtgtcttgattgtggtgtgaaacagtattggtaatgctgtttgttttctcttgaattgaattgaggataaagcgtgaatgcttcttctcaatattttagttttacttttaatgttgaaaatcaaagaataatttgcttatagtgtgcccatgatgatgctgctctatgatactttatatcacctacttacatggtatactcttttgaatgcagtttatcatatacaaagaaataaaagagaggttttgtgatcatctgtggcttgatgttgtatccaagtgtgatctgttacaagattcccctgtggtttttgtcacagaaaatgctgatgaagatggtcttgagctagcaaaataccgcaaaatgggaccagatggggctttacacgtatcaattacagacgaagtagggctgagcaaggtaaggtttaaggttttctacaagttttgtgacaccctttgttgagtttcatgacttgaaagtgtaacgaatcctttatagtttatgcccagaaaagaaaccaaaatgtaaatcttgtagatttagttagtgatatgaatgtgtcactttattttgttatttgaaacttggtatctgttaaatgtgatctgtaacgtttcgaaataaaatttgactactcatctgctttgtatgatgctgtcttgtttacataatgtttaaccatttatgtttctttgaattttgaaatgttccccatatttcattgtttttaccaactttcttccataaattaaccgaagccattcttgaaaatttatcagttcagttgacttgttatgttctgcagttgaaggataaagttcacgagatgctcagtcttcaaatggccagaatccaagctgaaaaaggcacacaagaaggtgaagtttcgatatgagggatcacgcatatatctatcaaagagtggagtcactgcatttctgttgaaaacttctggtggtaagtatgatttgtcacacaaatttgaaatctgcaagcaagacgactgactacaaacctgccaaattattaagctggcttagcgcatgtaaattcttgcattgccaagccaccgccctcttcatacctcacggttgactcgtcattcatgcaataaattggcaatgaagaccagcaagatcaacacatgagtagctcatgtgctttagttttatgtacaatgaaacttctctctagaataacttttcctccatactatatagaagcaaaaggcagattttatgctactcatttgaagaaaagcaaactctactctataagcagtctggtcattttatgtatatttttgtttgcttcatttcttttctttcatattgttagctcagaatcagtcttttctctcaagaactttcttttctttttcttcttgatttttctatgttactataaaaaatttactttttgtgtttatgagtgaggaaacacaatagttgggcattggtatcacttgtaatcagatttacaaattctggtaatggatcatcacccttgaatgaaggttcgaaactggagggttctctactgaattcatcagcacaagaataaatttttatttatcggaataggaaaagatgaaactacaaatacagaaataagaaccaataaaaagttagccacgatttgtcaccaaacatcgtgttcaaggaattacacaacatacttttcaaagagcacaaaacttttgtactcgtatgtgcaagaaattttccaaccctcaaaaattctacagaaattgttggctatatttttcacttctccataaaactttcattaattttcatcttatctctgatcgaaatctcaactagcaaaagttctttatttccaaccgaaatagaatgcagagaagaatcttaaagaactgacaaattagaaacaggaaagaaacaaatctaatatgctaagatagtactgtttgcaggatcgaaaaaataatattaaccaatctagaaatataccttgacttgaagaagatttttgaatttgaaatgatcattgctttatgaagacacacatctaagtttgtcaaaacaatgtaggagtataatgaaactcaaataggtagattacttggactaaaacaaaaaagaggaaaatttttagatgtgataaagaaggtatgcctgtagttacgatggttgtgattgaacttacaaatccataaatctcataaggttttgaattgtgttctccaggctgcccaaatctagacgacttattatgaaaggacacgcttgcctgcctcctcttcaatagactgacaattcttctagggctactatatgaatatgagtctttcatgcttagttctaataacattctaggatctcaacttcctaattgtgtatcttattgaaaaaaattatgattcagtgattgtagcttgcagcatcacaaatttccattatatttattaaagttaaaatactaaaatgacaattttttcaaattaaaaatgagttgtgatattttgtttctattcatgactcatgagcttgtttcaacaaaaatacataaatatgaattattacctaatgtatagtatacattatagacataaagcagcaataagtctttcacactcagttcaattcacagttaaatttttgtacattctttaacttccctttaatgataattacaaatagattttgtagtttttagctcgtaatttatggttaactactacaatctttatgtatcaaactttgttttcatttcaaatttcaaagcaaacttatgctattaaaattaaaaaccctgcctttttgagcaaagagaatgacatgtacttgattctatgctcctttatacaaattataagagaatgttttagggacatttttacaaacttgtagtgagcatcacaatataataaaaaaaacacaaatcaaattcaaattaagactgcgaaaaaaaataacaaaatcaaattaaaaagtctataaaagtggacttattgattgattcataaaggagaactatgaatttggatacacttacatgtgaatccacggggctttcctttatggtttttaagaaaatatttcgttctcaaggaatacactaatttagtgtggaatttatactaatttagtttaaaatcttttctttttggtgcaacaatttcaatgattcacatcaaatgtccaaccaaataaatatattttacttaaaagatgtctcattttatattatttacatcaatatttcaagataactgatttatgatataattatatcataactactagtaagaatttaaagttaatttagtaaaataaaatatttattaaattaattaaatattacacattttttttaaagaaaattattaaaattctatagtcgattctaatatacgcgaaaatttttaaaatgagctcacaacaatatcaagcatctcagaaatatcaagattctcaaaatacttcaaatccatatatctaatcttttgatattcttcaaggttaggatcctaaagtgatcaatttgactattacattattatttactttaatgtttatttttatcaatattgttgtttttagttataattttataacttagtgttatgttatttttattttatttcatattagtatttttgttatttctattttgtattttaaatatgttagtgttttaaatcaattatttttgagataaattttaatttgtggattaaaatgtaagattatttttttaataatgaaataaaataagagttagaatgcaaaaaaaaaaaaaaatatatatactaaattggtgtagattcaaaattcaataccattaatagtgtagatatttggtacacactaatttggtgcataattttatgtgttattaaagtaaaatggtgtggaattttacatcaatttagtgaaatgatgtaatgttagaaatgctcttaagaaatataccataaaacttcaaggatattaatttaaaaggggataattgtataagacaccattttttataaaaaaattacattttcatgcttaattttttatatatatatttttacgattttctataaaaacaacaagaaa

SEQ ID NO: 111348 - DNA, 2430 bp, Cannabis sativa
  modified_base (2092)..(2094): a, c, t, g, unknown or other
aattttattctaaattataatacatgtataaaatattatatggacttttttatttatactttataattgattttttattttataaaaataaaaatagcataaccttaaactaaaatagtataacctcaaaatggaaataacttttataaaaataaaaaaatgcagtatatggaaattttactcaaaagaataaatttattgtgatgtaatattaaatattgtgtttattgttattgttgtcctaataattttattatgacatattattaatgagtgtttattgttattttatattttttttggtgttttgaatttttttagtacttttatttaattataatctctttattagaataaaatttgtttaattttaagtgtatttttagaatgaggttttactctatatttattgagaataactatatacaaatgtttaataattataggttaggggaagcaatatttattctttttccctaagaaattaaaccatcaattggttaattttatttagtttttattttcatttaatatgttgacaaaataaataaagaattcatttaaaaactcataattatatacttaagaattaagataattaatttattcccattttcaaaagaagaaaaataaaagaagcataattaatatattttttattgaattgcaaacaaaaataataattaattctcaattaataagacataaagcatacattagaaaattggttggagattaactatcaccaaaaatctccacttcaagctaaccaatcacttcacagctaaaattaatgtttttcattttaaaaaatgtttaataattataagttaagcaatttttttctcaagaaagaaatcatcaattggtcaaaaaaaaaaaaaagattttgaattttcctttgatatattgacaaaaaagtaaaaccgcgtaattaaattaaatgcttaggataattaatttactcccattttcaaaagaaaaaaaaaaagaaggataattattaatttattttttatttccaaacaaaaataatcattaattatcaattaataagacataaagccatagtattagagatttggttggagattaacaatcaccaaaattagtcacttcaagctaaccagtcagacacttcacagctataattaatggtctttcatttttctttttaatttcatttattcgtttggtaggaaagaaagaaaagaaaataaataaattattaagtgcttctacaatatacccacatgagtttctctttccacatttacaaaattattttagtataatttattttataaattttgaaaaattaaaaataatttacattatataaaataatgtttaaaaaatatttttttatacgtgtataaaataaaatattcacgcgtgcaattgaatattgttaaattttttcaaatttatcaaaattttgtaatatgtattaaataactactacgtacacgataatgaaaaaaattaaactaaaaaaattatttataattaagatatttgtgacgaaactccttaacatttataattgttaccatatgatcttaataaaaaaaatagtggtaaacgtatcttatcttacaattttgtttcagtcgtacttttaaatattagctcaaaaacacggggcgacatatttttttagtttatttaatacataatctaataatatgccgccgcgtgtttttaaattgatacttaatgactaaaaaataataaaattgtaacaaaatcataaaataaaataattttactaccatattttttttgattaagatcgtaataattgtaaatgttaaaagactttccttcctaatttgattttttatacaaattagaaagaaaaaatataatcacgggagagtaaataaataaataataaaataggaagataaatgacgtggcagataatggttggttaggacaattgtatcttgtaatggagggcatcataaccgcccgtgaaatcgttaaatactaacggcgattacgcgcgctagcagttacttagttactcctctcacacactaaaaactatacaaacacacaaacacttcattctctctctctctcnnnctctcttctttctctctctacaactccatatgagtagttctttctaccatttttgaaaatgtatgtaaaaaatgaatgtttaagctataacaaattcacccagttcatccatatatacatacatacttctcaggtttgatttatttcatcttttatatatgtactaattagtgttttgttcagaatttacatgtcatgtaattaagaaaatgtatacatatttatatagattttgaatcgtattttaaggagtttttcttttattattattatttgttattgatcgattcccatatttgggtttttgttttaagttttctgggtaattatgtaatg

SEQ ID NO: 111349 - DNA, 2670 bp, Cannabis sativa
agaggtatgtttcaaataggtaaatttgattaattgatgaataaaagaggcatttttcaacttaccccttattataaagttactatattagtatatttttactaatccccaaatggtatttgcacatcatattatatgcattgtttggtttattctttttttgatgttttattctttttattattttattgttcaaatttatttatttatttattttttattttttttgaataggttcaaatttatttttagtttttgtttatatttagtttttaggaaaaatttgagagatctccatttttggtaattttagtaattcagcaagtttttttgagacaaaattagataacttgaaggaaaaatgaaacttctataagcttgaatagatttccattaccttaaatgggtcaaagattattttttcagcaatttcgtggtcaaaggtcaagaatggacactttccaagatttaagtaaaaaatcaagaaataaggaattcttgccatgaaggtcgcgacattcccttgttcgttggaagaaaactgaaacaggaaaccaccaaagatcaatgaagattcaaaagttgtaattcgcttgcatggctgcgacttagtaagcaatgccacaaccttggaggaaaaagagaaactcaaaattttcactatttaacgaaggctcgtggcaatctttgaagacaattttcgaaaatttagaaaattttgaacatagaaggaagctaggagcagaaggcaccattgaaggactccaacaatgttctatctctttcatctctatcttttatatttttaattaaatttctattatattagaatgactattagtagataattttcttttaaggattattatgtgaatcacttgagtttattttatggattaatgtaattgctcaattttttcatcttctcctaattcagtttcatacaatctattttaattttacaattatttactggctatctataattgttatctataaattcgaatcaaaattctagaaagtgagatttgaatatactctgattgttatggatgcaaattaatttaggatgaaagtatctagattatttgtattagattatttgtatgattttataagtttatttgcttaatgctatctttgtgattaaactttatcataggaatataaggagttttcacatagattgggtataatatctcagaaacataattgtgaataattaaaatttattatatattatgggttaatcatgtaacaataagtagaattatgatcctactaaccttttaagcgtaaattatgaattttgtcataagtggacaaatgagtgtaagtattaatcacggagatttatttagaatatgtgagtacaatgtaaattgtttgtgaaataaaaatatttccagatttggcgaccttgaaaatctgatcggaggccaataatataataacatgtttagttaatggttttaatagggttattatggtaagttggctttagacatatcagggtattttggggtctcggggttgaccaaataccttagggttaaagatttcttaatgcgtaaaaaataacaaaataacatttattaactaaatttttgttattattattgttactactattatcattattgttattattattattattaatctaatatatatgttaagttttgtttttatactgaaacccttagactctttctctctctttttctcgtacgaccagaccactaacaccaccattaaaaattttgtttcttcagcccgaaacccatctcttccatcagttagtagcatctacaggtgaagcaagaggagtgatagcttgaggtaagatgtttgagtttagttttaatgaaatgcagcaaaatggatttctcagctcaaatgagactgaggtgaacttttcattaaatagaaaaatctaatacaacaatgccaagtggcatttatagaaaataaggaaaaacaaaaaaagagagaatattctctcaacaattattacacaataacagttttaccaactgtagaagtttaactctctagctctaaggtgcgccaaaatagagtggacactcatcatgcacacacacactcattcatgctttctaacaccaccccttaaatgaaggggtgactcttttatctcgagtttgttaatgagaaaccaaaaatgagtgtatgtgagactttttgttaggcaatctgctactttatctgaagagggtatatagtgaatttcaagttcctttttcattactttgtcgaacacaaagtgtatgccaatctggatgtgctttgttctggtgtgatagacagggttggaattatttatagtagaaattgttaacataattatagtagaaatttatataaaaaattatttataattattaattgctaaaagaggtcttgttaaatattcaattaattattttaagaaaataattaagtataattaattgattctaaaaaaaaagttttacttattgttaacctgctattatcggtaaaaaaaaaatataaccatgatagttacaataaaaatataaccattgagtagtcactcatatttatatatggatgcactcttaatgggtattacccataaataggtaaaattataaaattttaagtttttatgcttaatttttctat

SEQ ID NO: 111350 - DNA, 1813 bp, Cannabis sativa
  modified_base (1749)..(1778): a, c, t, g, unknown or other
actaagcggtctttacaatatgtatattaagtacaaatatatacatgcttgagcatatattagattccaatataaattaagaatcttctatatatcttgaattctaaagttgcttttagggcaataatttagacagcttattttctttagctacaaacctatcacctggtatagcatctttcatgccaaaatttttgaatactttattgatatctcttttgttataattcaagaatatctcaagaacattctcaacatatcttaaattcctaatataaaatgagtatatcaacagtggcaagtaatttttcaccaatatgttatcaggatcatattcttactctcactgaacctgtgatatatacacaatcttcaaaagcttctatcttaaaacaaaatgagaatgcttaatgaaaattttataatcattgacaagaatcttacttgagtttatacatagatttcctaatttgcaaatcatattctttggatctttaaatacaaaattttctagttgcaccgcatagcttttttcatcaatattaccattgataaatgaaattttaataatccatttgatataactcaagaccataatgagcagtcagtgccatgcttgtactaaaatagtctttcaattaaactaaaagaaagtctatttaaaatgaatatatatttcatgagtaattctttacatacaagacataatgtgcatctttccttgttacattttgagctagacttgcgactattcccatagctcttctattaagtctagtgactcctagagcagagattggttatgggtagggccgtaagtgtctcgccaatgggacaggataatggtgtctactgggatcaatgcttcgcatccgtaggtcatttcatatggcgtatgccccgttgaagttctttttgtcatcctataggcccagagaactcgagggagttcctctggccagtgggctttgcaagcctgcatcttcttcttcaacgtggtcttgaggattttgttgacagcttccacctggtcgttagcttgcaacttggctacaacagagaagcatttcacaattctaagttgggcacacaaattggtgaaatgttcactgtcgaatttcttcccattgtgtgacacaatcttataggggagtccgtatcggcacacgatgtttttgacaataaaatctcatgtcttcttagagttaaacgtgttcatgccttgacccatttggtgaattagtcaatgacaacaatagcaaacttgactccacctttacctgtggggagagatcctactaaatcaatgccccaaaccgcaaaaggccaaggactgttcattagtgtgatttcaatgggtggtgcgcgctgactttagcgaatctctgacattgatcgcacttccttacatattccatgcaatcccttttcatggtgggccagaattacccttgtcgcaggattttcttggaaaggctgggtctggaagtgtgatctccatagaagccttcatggacctcatggattactaccctaatctctgtccctgtgatgcatctcaaatatggcatagaaaaccccctgcaataagcttaccatccataaccacatgacgcggagcttggtattggatctttctggaggcaatgcgatcagtggggagttcccccatgctcaagaactgataaataggtgccatccaagagagtgattatccaccacggcattcatgttgggttttatgccctnnnnnnnnnnnnnnnnnnnnnnnnnnnnnntacttattaataaagatcagaagatcggaagagcg

SEQ ID NO: 111351 - DNA, 2277 bp, Cannabis sativa
tcagtttgtacactgataataaatcaatctaagaatacatttaatcacacaatctttgtttactttccagtgtattgacaacacaataaacaagaatatcgatgtgataagggtttggatgaatttattgattaaataagtaaatagatgatcacatgaaccaaataacacattaaacaagtaatgaaattaaatttgtttctttatattacattgaaataaagttttatttagggcacaaagcccaacagtttcattgtcgtgacataggacctaggatcgttgagcattgttccactaggtcgggtcggctcgcatacctgactattgtattggttggattgaggtaagaaaagtcaattgcactgcttagcatgtcaaatgtgatatgattactatcgttggtaacttaattataatcaagataaaatatggtcattaccgttgttgagaatgagtaattactcactttaatactacagataggtttcttacttatggattgcttcatcaaggaacactagtgacatatggagctcgttggtaataaacaggaaggatgctttataaagcataaagttagtttgtcttatgagaagaataattgtttatggaatattttcttacatttcgaataaatgtttatattggataatgaaattgttggttatgcacttttatgatttctcgtgttatgcaatatttgtattctacttgcttttcttgttgagtctttgtgactcacgggtgcttcatggtgcagattaagggaagagaaaagtgcaacaatcatgagtcagaggtctcctagcgatgtacatatcaaccgctatgtctcagcttccagtggtcaggattcaccttttgatcatgttttgaaaatgtaacccctttttgtaatatcgattttgatacatgttgtaagagttcataaataggatttcttgaatttagcactattttgaatataaatccaagttttttattcaatccaaaaattttaattaacccatacttttcttaacctattattttataattatgaattaatttataaaatcacatacgtggcgtccatatgggataggacattacaacatggtatcagagggactaatgtttaaagatcttgaagactggcttgatatttacattggttgtaaagactcgttcaactcatggtatagtaagtgttaattgttagttgattattagattatttgttaatcgcttgaactacctacttatttgagtgtgcaagctgttagagaagcatgataggttttgataaagatttttaaatatgtatatgcatgtaattagcattaatttttatttttggagattctaatgatggaaagttatggtcacaagtgtattagaatatgcacctgaggcgatctaatagggttaaccgcaagctctctgggcttagggctagggtgagggtgcaaaccctaggtgtgaattgggtcagagtaatatggtagtaattggccatctccttgaaatacagatgcaaagacaggattgcaccctgttggcatgataacccaaccaagcacagtaaccctctccaaggcctattgccagctgcccaggagagggaaggaagcattcgacctgccccaggagaccatcttcaaagagattagccaatctcttgaaagttatgatgaatggtggagaaacccatcgagctcttgttgcaccttttttgcttacgggacgagcctcgatatactcctcctcgacatagtcctaaccagcatccaagacttcacctgtctcagagacaagatctacctttttgttgaagccaccgaggggcagaacctgagctaccccctcttcctctttgccctcggcctcataaggagttccaggacggaccttgccctcgtccatcatttcttggacttcaacatctccagcaatctcctcctcctcgatagcaggacgggcctgttctcccttggccagggtagccagtcaagcgatatgagggtcggcggacgaaggttatttgatagtttgcttggtctgtgccattattttacgactgaatagagtttaattagaggtgtgcctcgtaacagtcacagtaaatttagcaatggagttcccttcagcagttgtaattggacagccttcgggcagagtgttgaccactctcagattgaccctgtatgtccagatcacaggaacataacgtccaaaacctttcttcagttcccagatgaaaccaccgcatccttctgttgggttttatgccct

SEQ ID NO: 111352 - DNA, 6803 bp, Cannabis sativa
  modified_base (6768)..(6772): a, c, t, g, unknown or other
taagtcttttaagccctaattgtgctggttgtctgcgtttggttatgttctctcttcacggcttgaatgaagaatggagaggtaccagactttagtttttcttttaaatttaatgactaaacttgtttaattaaatccaataaatttgaagcccaataaaaatgaggaaaccccgtgtttcagaatgtagagtattgaaacctacacttttgatagattgaggcgaaagtttaattttttgctgactcagaacaacagaattaatttataaggcataaatttctaacactttcctaaaccatgtacttacaaaataagtggaggattttttttgaaaagcacatttttgacacttgggagagggaatttgaacttgacacctctttatgaggagagatgtagtaccaccaggttatgccaataaccactttgcaaaataacttctatgtattttgttttggtgaggcgaggtgtaagtctcaaacatttaattatagaagtaccagtaaactacctgaaagtgccaaatattattaatcaaaattaataaatctttaacataaattaatgctagaaatttatagtaaaattgaaattacatactcaaagataggataaaatgtcccacaagctatctaaaactttcaattaaggaaacaaatgaagccttctattttatttttaattttctatagcaatataatctacagtgcaaggaaatttttttggttatacatcaatgtaattttagattgggctgtcagtattgcattaaaatcactattgggcttactgaacccattaaagtgtttggccaagcaaccaagttagaaatgagtccagaaggcacagttaggggccatttgagtcagcacctgaccccatggaggcatacgcttagaagccttgaggcctttcattaacgcatctccaactgtggctctactaaagccacttttattttgaaacaaaaattagtaatggagctttatctttatctctattttgaagaaatcaactatttgacttcaataatgaaggcaaaactagttatatagtcagaattaattacctacaatagccttaataatatatttcaagtatatttatattctcttataggctattataaattatttattgatgataaaaaggaataaaaagaagaatattctttcttgaagtaatttgaagcagcgtgttggaggatgaaatagtaattaaaggtgataaagtgaagttgaacagctttaaaataatgtttgggttggagatggccttaccacctcacaataacgtcttttgtacaaattaagatatgacgtgagcagagatgcccaaaaggatattaagcctgtcttgtcatgtaagtggggtatataaacttgctaatattaagataacaaaagtttcaacagattaatagagtgggtatgaaacatgtcaatatttagatccaaagctcagtctaatcagctaaagtactattttgaatcactgctttcacttttaaataatgttattcacggcttattgagccaatgtggtaatgagtgcatgcaataaatttggagttcacttccccaatttttttaatcagcaaatattatttgcacttgtttaactattgttgtaagcatgagttgtgagacatcatttgggattacttttagagtttttgtatcatcattttatgcgtacctataaatccttcgcagagtgttgaagaagctgagtgtcggagagcgtatgattccgcagcagaggtttatatgtcttcatttgaccgttcaaagcctccagaagaagtaagtgatgatacagtattcttgtttatcaggtttctattattttcttctaaacacatttttgtaggatacgctgagggatgctcatgaagaagcagtacagaaatcattggctgcattcaatgctgctgctgtaggggctggttcagtaagaaagaaatatgagggaactttgcagaagttcttcaaaaaggcgtttgaggtaattatcaaataaatacttcagctcaatggttaaaattaggtttatgcactctacagcctaagaacataaaaaccactaaatgtagacaggcttcaacaaccagcaatcatgtgaatgtagttcttggatgactttcagcacagtagcactcttgaatatctacctattttaggcagcagtggctgtctctgtatacatgctcatgtgtttgatcattttcacctagcatacttaattattttattggctaaacacacaggattacaagaagagtgcttatatggaagcagaaatgcaatgttcaaatgctttgcaaagcatggaaaggaagcttagaacagcttgccatgctagtgctgctaatttcgacaatgttgtgaaggtaagcatttttggtaagtgtgtttcttagtcttctttgttaagtgtagtttcaacaatgtatcaattttattactcagactgcattttttttttttgtgtcgaaatttatcgagtttcctcatccctgccccccttctttgcaataattattgaataagaaatgaaattccaagggtataagaaaccatgttatgccctgcaaattagtctagtgaatgaaccactctgaatcttctttcagccgacaatcaccctgtaaattgcatatgaaatatctactctggagcaaccaatggagcttttagctccagaaacaagctattaagtatatagagctttagctattgtggaaacctttggctttggagttgtgagtggagctggtcttttttctatttgaagctttaattttgtgtgaacatgtttttcatttggagtcacaaagggcacatctagcaattcccatataaattgtagtcctttgttgatttgtttttattttgcaatcttctttgatagatgtatgtagacttgaccttcattttcttgtaaaaagttagaagggaaacttatcttatgtgttcagtggtggttgttttctaggtccttgatggtcttgtatcagagtatgaaaagtcaagtcatggtcctggaaaatggcagaagctggccatgttcttacagaaaaggtttgcaatgatttttcctttgttttaatttcgttttgtgtgtgaataatgtgtgtaagggcatgccttttgaattcaataaaatcccagttttgaaggtccaatacttgatctcaccaagagattagttgaccaagttggatcagagaaaaatactcttctattaaaatgccgatcaattgaagataagcttgcgttgcttaacaagcagctggaagcaagtgataagtcaaagtctgaatatctgaagcgttatgaggaatctattggcgagaagaagcagctagctgatgaatatatggctcggatagcaaacttacagagtaattgcagttcactgggtgagaggtgctctagcttgttgaaggcactggattcagcaaagcaagaatctgtagactggcaaagaaaatatgagcagatcttatcaaagcagaaggcagaggaagatcaagcaagttctgaaattgcagttctcaagtctcggagcagtgctgctgaagcaaggctagctgccgctaaggaacacgctcagtcagctcaggaggagtcagaggagtggaagcggaagtatgatgttgctgttagggaagctaaagctgctctagaaaaggctgctgttgttcaagagcgcacaagcaaagaaacacagaaaagagaagatgctcttagagaagagtttgcaattactttggctgagagggtgagctcttttattcttccatctctttaaatttttcatagttaacaattgtattcgcagggtgctgattttttgtggtttgtagtttctatactgtttctgtaattttttttttatatttgttaatggatatacaggaagaagaactgaaggataaggcgtcgaagattgaatatgctgagcagtgcttgactacactaaaattagagttgaaggtaagctgtattttttcacatgatcaataaatattatgttgttcatctttcttctcacttatgcctgttttgatcagcaactagctttttatgcttaacattaatgcttgcaactggctatgacggtgcaggctgctaaatcaaaagtagatagttatgatgctgaaatggcatcaacgaagctgcaaatcaaacagttgagtgaaaaattggaaactgctagtgccaaggctcactcatttgagagagaaaagaagatactggagcaagagaagattcatttggagcagaagtacttatctgatagcaaaaggtttgaggaagtccaggaaagatgtaaaattgcagaaagagaagctgccagggcaacagaaattgctgataaagcaagagctcattcagaaattgctcagaaggataagagtgagatgcagaggttggcaatggaaagattggcacagattgagagggctgaaaggcttatagagaatttgcatagagagaaaggtgacttagccgatgaactagagagcattcgtcgatcagagatgaaagctcattcaaaagttgctatgctggagggaagagttgaagaaagggagaaagaaatagaatcacttttgcaatcaaataatgagcaaagggctagtacagttcaagttcttcaagatcttctggatacagagcgggccgcacatgctgatgcaaataacagggctgaagctctttcacttcagctgcaagcagcgcaagcaaaacttgataagttacagcaagaattgacttcagttcgtataactgaaacagcactggatagtaagctcaagactgcttcacatgggaagcgtataagagcagatgactatgaaatgggttttgaatctgttcaagacatggacacaagtgacagaactcgagcaaataagcgatccagaagcacgacaagccctctaaagcacactcaagcagaagatggtggctctatattccagggagatgatgatagccacagtcagcagaccaatcccgaagactacacaaaattcactgtccagaaacttaaacaggaactcacgaaacataattttggagcggaactactccagttgaggaatcccaacaagaaggacatcctcgctctgtacgagaaatgtgtcctccaaaagtcatgaccttgtaaagcagcatacaggtgtaatctaccgggagacatcgtgatagacttattacttaggacttaaagttttcagagggttttcatttggtacctttcatattgtgtaactgtttccaccctcctagtttattgtagtttgagtagtaatatttttttaaaactactgctgtttgctgacttctagatttcaataggtggcatatatcaatcttttacttgtttaattttttggtggtttttgtgtgaatttcccattcagtatgctgtgatcgtccatcaatgtgaactatttaatgtctaggacctgtgtgaagtgaccaagagactgttatttataaagcaaactgagatatagggcgaattcttctgtcctcctttacaagaaattgtcctattcactatgcctattatctgtgctaatcaatgttattacacaatgtcacaatctacatctttggaatctctttatcattgtgctttcttaaatatacttaataataacattttagttgacctttcatgtttgaaattatatgctaggatattatttttaattttttttcataataatatttattatagttacaatattttttttttttgaaaattttaaaattttttaaattatttacagtatgtaaaatagagttcccaatattctattttactatgcatgttcgaaaattttgatcttatttttggtaatgattacttttcgaaatttttcaaaaatttacaggaatgatgtaactataacaaagaattttttttttttaaaaaatatatttcgacatgtattttcaaacacggaggttgactaagaggttgtaatagacatttatagtgacacttatataataataacaatagtaataataataataacagtttttcaacttctttgtttcgagcatctccagccatactttaaggagaatttttttttttaattatttcagtatcatcaaatagacttttaacttccatgcatttttttttcttaactacagtagaatctcttgtcatcccgaattttgcccaactgacgtggtatgtcctcgtggccaagatcaatgccatgtgggagtattaacttatcaacaagaaggccaaatcatctactcaatactttaactagctggaggttcgagtacttaggaaggatgacgaaatgactaatcagccacactaagggggttggtcggccctatggccagcataggccggccagcctgtacttggcaggcctttggtgcgcaaccttcatctgtgtacaacaagctatgttgcgatttggacttcaacaactctcaaaaatagggggaaatatcagctgcctccctatttttgaggaataattaactcatttaaagtttattatttaattatgtaaataaaactttatttacctatttttaaggagtattagttgttaatcttcatgtaagctctattatataaagagcaccagcctaaccctaattctctaagttctatgtctttgagctctcgagctctaattctgaaactcaactctctcttctcttctcacacgccataggtatactctctctctctctctctctnnnnntctctctctctctctctcttgagatttgcca

SEQ ID NO: 111353 - DNA, 5426 bp, Cannabis sativa
tacacatatattaatgtaaaaataagataaaattataatttaaaataaatgtagaagcacaatttttcttattttttggaacctagttgaagaggcatgagcgtagatctttcttagccctgaaatcggtagcaggcttaggcttcatcttagaccctctcaaagtctaggccaaccattagtaagtcacgtattctgtgtgtgcgacgagagtgactataaaaattgaaggtggtccaatttcccatgtcaagaatttaaagagttctccgattgtcaacttggcctacacaatagtggacccaagaaccggagttattcagtgtctgcaaatcaataaagagagaatgtatcatggccgttggatcattttcttgaacagataaacatgaaccgacatttccctcttggggttggcattcataataatattaatactggagttggtattggtgaaatttacgtttactatttattactggtttagtaaagagagtaaagaacactgacaatccaaaactaccctcttgccgcgcctattgagtatttgagtacgagtcacatttacgatgttctcttcactactaaatctgtctccaactcactatagacaagtcgcattataacagagtaagaggtagttaagttgttcatttcactgcttttattttttcttcttttttttttagggtgtacatttcactgctcattggttatcaaaaccaaatcattgtacaataaatatctccacatttgaaccaaaattcactatttctagtacaagttaccactaactaaattgatgcttcaaccatattttccttcttaatgtctttatcaagagacatgagcaactgtcaccaagtagaaaatgacataataataatatcaccacaaatagagggagggagggcaatggcataataagccacactgacttgggccaaccttgcttaactaacaaccttattaattgatctacagctgtatatatgtattttaatcttttaataggcccatccactgttataattgctgccaaaaaaacagtgtgtgcatatctacatacaatctcctagcacagcacagctagctagcatggctagtgaaagtgggcttatgtaatccaccaaggttacattttcagaatcttctttcatatcatattatcgtgcatggaaaatatacaaataaaagtaaataaaataaaaaatggggttttctaacaatagtgattaccaatgacgaacaagacaaatttcagtgtttctctgtgaaatcacaatcactttcatatcgagccaacagcctaaatattcgggtagatgaaataaaactttcacatttaatttacagtatagttgtagaacatcaaccaactaccatcacaattataattctcccttttttttttttttgcactttttgttttccctaagttcaaattaaaaaaaaattctctaatcctttcccctccctcacaactactttcagaagaaaaaaaaaaaccaccaatttgattgagaatataaaagctcaagatacttaaaataaaaggaaaaacaaaaaaaaaaaatataatatttgtgcctaggctacactgccatgatcggaggtgtcttcataatagtaaggggacagtttgccgtccttcttggctgccttgatctcggcggcaccaccaacttcttgaagcaatttcacaacccttctcattgagggtcgattgatcggaagagggctagtgcaaagcagcccaatattgaggactttgcacacttcttccttgtaacatgaatccagtttagagtcgatgatatggtcaactcctttctgatctaaagtggtacaaacccacttaaccaaatccttttccccaaaatctggatcaactgggagtctaccagtgactaactccagtataacaactccaaagctatatatgtcacttttttcattcactcttagtgtgtatgcatattctgcaacaacaacagtacaacaaaaacagagcataacagttagaagatatgaaatttgaatgacaattactctaaaatcgattgagaactgattttggcaatgaagagaatgagttttagttaactaaccaggagcaatgtatccacatgaaccagctatgacagacatggacttaggccctttcccagataaatcaaccaccttagcaactccaaaatcggccactcttgcaccaaaatcgccatccaacaagatattattagatttcacatctctgtgtacaatgggaggaacacagtcgtggtgaagataggaaagtccctctgctgcatcaacagcaattttgaaccttgtcggccagtcgagcagacctcctttactgctgtgaagcaaatcgcctagactaccattagacatgtactcataaaccaggagtttgcaatccctagttgtgcaacagcaccacaatttaacaatactcttgtgcctaatcttccccaaagtctccacctctgcttcaaatccatcatcttgaccccctcccttttcgaggtcatcactttcgcagtcctttttcacacctccccagagctttttcacagctacggcctcaccattgctaagaaccactttgtagactttcccggaaccgccactgccgatgacattatcttcatctagacaatcaagaatctcatactcactgaaacccagtttgtggaacgacattaatgtccatttggacttgtctatggctctctttgcgttcttgaatttcctgtacttcaagtaaaacaaaacgacacccaccacaaagactaagcttgcgagaatgaacatgcttctaagaacccaaatgtaaccttggctcttagcctcagtactattatcgcataagccttttaagcttccacaaaggcaaggattgcctataaaactggttttgtaagtggccttagctagtgaaggaggaagatcaccggaaagacggttgttcgatagattgagcagattgagtttcagattctgaagcccaaaagggacttctccagaaaattgattgtctgaaagatcaagataattaagcacagccattttcccaattccacttgggattttcccggaaagtttgttgtttgctagatttaattcattgagcttcttccatgattcgattttggttggaaagtgaccagagagctcattgctgtgaagatccaacgttgcgagctgtggaagactcactatactctctggcagaggaccactaagaccattgtcgtaacccaaaagctccacaagattttcaacccacccgatctcttctgggattggtccggtgaaattgttcttcgagattataagaagggaaaggttcgccgctccggcaatggtcttcgctatcgacccagaaagtttgttctccactagttccagcaaataaacacgtgggagtccccaaacaccggccggaacttcgccggataactggttatgtcctaaacgaagccgaaccaaactctcgcagtcgccaagacttgctgggatttcgccggagaacgagttgtctatcatcagaagctcctctaactcgcttttttcgcaaagggtctctggaatttcgccggtaaagttgttgctagaaacatcaagccaccgtaacggggaattcttgccgagattctttggaagctctccggtgaggaagtttctgaaaagccttagctcgtacagtgccggggagttgacaatgctctccggtaactttccttgaaagcggttctcgtagagattaaggctttcgagggacaaattgcaaagctcctccggaatcgtcccagacaactcgttcatcgacgcatcaaggagcctcaatgccgttaagttcgacattcctggaggcaactcgccggacaacgagttattgtagagctcaatctgaaccacacttgacaaaccaacgagggaagatgggatcggtccgtgcaagttgttgatagccaggtccaaatctttcaacatcttgagttgacccaacgagtcaggaatctcacccaccaaattacagtccgtcagccacagaacctcaagattcgtaaggttgccaaactccggcgggatccgacccggtaaaaatgggttgtaagaaaggttaagcattttcagactacttacattcccaaaaaacggaggtaaaacgccgtcaaaaagattataaacaagggatatcacctcaagcttctgaaaccggccaaaactgaccggaatctcacctgaaaagttgtttccagtcaagtccaagtacttaagctccggcaagtcagcaagcgagtggggcagagcaccagtgagcagattctgagacaggtcgagatgacggagagactgacacgtggagacatcaaggggaagagtagaattgatagagttgttgaaaagagagagaaaggtaagattttgaagcctacaaacgactgttgggaaaggtccggcgacgttggcgttggagaggtcaacggagttgactgaacgagaggaggaatcacatgtgacgccgcgccacgaacatggggtgtcatcgcggtcattccaggaggaaagagccgagtcaggatcatcaagagaggtcttgactcgttggaggtagagaccttcttggttaagaccaagtgtcaaaggagaagagatcaatagaaataagaagagaagcattttgcttttttatttcttattcttcttcttccactcttttggtttttcttggcttaggcttctagaatgggaggttttggtgtgaacataataataatatgataaaagagagcaaaatatgacagagacagcaagtttgagtgactttgtgtgacactcttagtgttgttgtgaatctctgcttggtgtgtgtgggtttttgtgcttaagacaactcagaaaacagtgtgaaagatagagctttttctttttctgtgaaaagagagagagaaggagaaaggaaaggttttaacttttttcgaagtgagtgagaaatttctgttgtttatatatagaacggtagatgagatgaaataaaatcataattaatacttggagccaaaaagggaattaccaattaatactccccctactaaatgtaataattctgcttaaaaataaattatgtactatgtttgttttctagtgtttattaaagcctagaaagtttattttttatgaaaaaaaaaaatatgttagaaacttttatgaactcttcttgtataaatatagtacgaataggtttgtagatatttaaaataataattaaatttattttgtcaatttaaaaatatataataaattaattttactcacattttgttaattaattttttgattttgctttattagacaatattgtcgtacatggatgtaaaaatattgaatcatatataagaacataggctact

SEQ ID NO: 111354 - DNA, 5141 bp, Cannabis sativa
agtttaaaatgtattggtttaagaataaaatattaaagttttttagtatagaaaatcaaatttccctttccatatcaagtttaatcgcagcccagccaattttacccgaattcctagaatgaatagagtgaataatctcattggcaatgagaatgttatcaaagatgtgacgaccagtgaggaaagcactatagttattagcaatgacatagtgaagaacactcttaatgcgatttgccaggacctttgagaggcacttatatatggtattacataggctgataggccaaaaatcacgcagggttgtagcatttttcttttttgggatcagaaccaaaatagtttcattaaacagggaaatatcaccattatgatttaggatgtcaaggacagcatgacacagatcagatcccagaaggtgccaatgtttttgataaaaaagagagttcaaaccatcagggccaggagccttatcaccagaaagcctaagcatagcctctttgacctcatcctctgagaaaggctcatccagaaaggagatttgggtgggggagaggtgattagtgacaccctggaggatggtattgatggcaccctggttaactccttgagattggaaaagatttgaataaaaattgagaaactgggaaagaatggtggaggcatcattggcaatagagccatcaggaagggtcatgcttctaatgagatttgtctttttcctgatagaagctttatgatggaaaattttgtgttcttatcaccagccttaagccaatccacctgagctctttgcttccagtaaatttcttccttctgaagaagagcatccaatttggattggagggtgtttgtgtgagttaaaatatgaggattaggctgagtgatgttaagaacagggtgaagctcatgttgactgttggcaatttggctcttgattggattttgagaagcactccaatccttaattgccgagatacaagtggattatttagcaagaaaactttgaagaggggaggaggaagaggttgaggtagaaagaccccaggaagattggatagtggtagaaaacgaagcatcagtgagccagtgattttcaaaaagaaaatgagtgtttctgggaagttgtaagtctatcctccaattgaactttaagggctctgtgatcagacccgtaaaatcccaagtggaacagagaggcatcagggaacagattgttcgaagactggttcgccatgcaccagtcaaggcgctcaaggatgtggccatgcctccaagtgaatttattacccgagtggatgaggggtaagtgtttaaacttatgcagaaaagagtgaaaattgtgcatagcatgagtgggaggattagtattagaatttttatcactgagagagaggtaatcattgaaatcccttataactaattatggcaagagaggagcagtatcgtaaagcctatgaagtagagtccaagtaacagatttattagtaggataaggagaaccatagtacccagtaaaatgccattttatatcattaaaatacttacaatacaatcaatatgattaagggaataagtagtaataaggacatcaatacaattgttccaaaatagtaaaagtcctccccctaaaccactcctaggcacttcaaagacattatcaaaatggagctggttcttgagatatatgccacggccaggtttgaagcttagtttccataacaaaaaacaaaatgggtcggtgttgcttgaccagcagggagaggttacggaatgctcgagagctccctaaacctcgagcattctagctaagaagactcatttttctcagtggggtcgcgaagcgacacacgccgtttgatcatcatcggacatggaagggaccaccgcatcgtcgctcgacacagctcttgctctcttgagcatgctacggactaaaccaccaatttgggcagtctgccgagtgaaaggacgcctaaatccagtagaggcagcaaaagtggaaatgaggcacggttcattaatggtgagacttatgtttcgggtaaagttgtggatagttgggcgaggagggcagggatcaggcatagcaatgcctttacctttgtcaatgtgtgttatgacagaggttgtcatgatgggaggaggagtagaagattgactgaaagggtgtaccagtgacagctgagggaaaggattataagagtgagagggatggttggtggtcaaaacagggctagagagttgtggttccatgagaaggaattgatcaacagcctgctgcagaccctgatcattgttggtactgtgaggtatgtactctttgatgggggttgagttggagatttcaaaggggtttttttttaactagttttagtagaggctcggaggtgttctttgtatcccaatttaggaggaattgggaagttatcgcagcgcaagaggtatttcccacacttgttgtaagtatggtccaatagtccacaaaaatagcataaattttggaggccttcaaacttaaagctaatccatttggggcaatcaatagagcaaaaatggatattcataccctttctcaggggcttagtaacatccagaagaaccctgatacgaagataatgaccaaaatttttaagaagggacagggatggatttcgataaggtctcccaactcatctgcaatgaactgagccaattgggggcttttgcgtccaaaaggaatattgtgggcttgcacccagaaaggaacgtagagaattcggtcagacatgggagtatcagtgatatcagggtgggtgaagaccatgaggaatttatcgaaatgccacggctggtcctccaaaactttgcgacggtccccatcgcactgaatggtggcaaggaacaaacccgagtgatactcagatatttcaacagggaaacggagggtccatgcttcagtcatggtcttttcgatccaagcaggcttgacagatttgggagtgagcaatttgaagattaaacagaaagagtttgagtcatcagggtgatttagggagatatggtcgaactcttgtattagattctcttcatcagtgacaggagtgagggtattggaggtgtttgaggaagataccatgaggaaggagtttcgtatagaataggaagacgaaggtaagagttgtggatttggggatttagaacaaagacttaaataggaaataaaccaaagggtaaattttaacaaatacctggagagcaaaagacatcttgatgattgaaatgatccctgcaagatctctttagttcttggaagggttatctaggagatatcgagagtggcaatgattacgcttatgcagcacctggagaagagaggaatggcggttggatgactgttcaagattggatgaaggaagaggaaagatgagaaaatctagaaatgcattaattgtgataaggagtgagctgtcaaaattaaatgtaaatgagagagggagaggacattgaagagtatctgggaacgagagattagggtagtaatcatggagattttggctgacatcgtggtattaattgcgagttggttgtgggtcataaatgaaaaagacaaaaaataagaggtgaaattagtggtggacagtggagaggggcgatgagggagagaaaaaacaacctagctgaaagtaagaggctagaagaagcatgcacttagggttcaacagaacacgtctgtaggaagcttcaagaagaagaagaacaatctttgattctcaaatataattgatatcactattacaggaattattttagcatcagtttcaaaagaaattattttcatatcaattatacattgataacaacattgaattttactttttaaattgttagcgtcatttttaaagtgatgctaaattttgtctatttaacagattatttattttataagtcgtaatttcattaaagtaaacactgaggtattataacatcccaacttgcattactatacaaaataccacttttaatgtaatacataaaaaaaactcaaaatcgttaaaaattacagtgggttttactttggaaaatttatatttacacattaaatttataacaattagaaatatgttagatacattttattgtactcatatattttataactgtttaatataaataccaaacatttaaaacttaatcaagtataatatttctactacttttataattactaaagtatgtattaatatactattgatttaaaaaatatatattgaattactttattttttatatatttatatttctttactagatgaatgttaattagttatatttgatttttttaaaaaaaatgttatatgaaattcttaaataaataattttacaatgataattgtagaaagcataatagtaattttaaaaaaagtaatatattgtataaaattttaagaaataaaaattaaactcaggtagtaaaatataacaaaagcaataatatttaacctatgaaattgagagctaaataatatataaattgttgatatttttgaaaaaaaaaaaaaacagatctatgtcttattgttaaagaaaacaaagtataaaggttttcaaaattagaaagaaacctacaatttttaaaaattaaaagggaataattattaaataaagttttaacaatattaggtaattttttctattcttcaagcattcccaattaaagtaggacttctaattctcttgcttagtccttggaattcaaaaataaattaacaaagaaaaaaagttgaaaacttatcttttaccttttttttttttgaaaatttgaaattttcttatttctgtcatggcattaggattaattggatttgaatcctaatcctagttgtaaatgccattcaaaaggaaaatttcactattcagccctaataaattaccacatatcaaactttagatcccttactaatttgtacaaaacaattctactattttaaaattctacccaaaatacccctcacatttaatttttcctctctctttctttccctctctctctgtctttccctcttcgaccttcgtcgttgcccacgacgagtacccaacaacccacgccggccatccacccacgaccacgaccacgacccaaccctctctctctctctctc

SEQ ID NO: 111355 - DNA, 6832 bp, Cannabis sativa
ttaagaggcatttttcaacttacccacccacatgtattagctatcctcaaatccgtcaattatttcattcaattaccaaaccgaaaatttattcaaaaacaagaaaaaaaattaccaaaccgaacatatttaactcaccactcacaagtaataaaaagagagagaaaggggggatgatgaagaaaaaatctagagctgtaaatgtgaaacctctgcgaacgctacggccatgcacagacgcacattccgatcgccgccgccttctcttcgccaatacccacgcctcatcctcattcagactgcctcatgactggttggttcagcgtaaacctcgccctaagaatcctaaacaaattgacaaggtctttttcttcattgaataaaataattggggacgaaaataagtaatttattattatcattttttatttatgaagaatttatccgcaattgctacaaaacacatgcattggtttgcttgttttatttatttgctaaaatatgagtgaaggaaggctgggaaatggtggtgtgtgggtaatttgtttggtacccaattcaattgagaatcaagacgatcaattatgttttagttttacaattacgttgctactgttattgtactgggttctttataacatgcaaacgatttgaagttgatattacatttttcgaactgcattctaagatggtcgatttcaagtcccagaaaagagaaaaagaaaaaaaaaacaacttaaaaagtgtttgggttttagtgtactcttgttcttaatatgaacattatgtaagttagaagatatatttttgtggttctatcatggaaatatgacctaccaaaatttgtgcagtattacattgaacccggtacaaaaagagtgtttcggtcgctggtagcagttgagagatacttaaggtatggagaaacagatgcatccccaggcaaagtattgaaagaatcagtcaacaaatgtgtaagtcttaaacttgaattatatatctcttaaaaataatagcagaggaatataaagaggcttttagtttacttatgtcaattggcttatgtgagattactacgggtttcaactgaaagagataacatatatgaaagaatacatttatgttttttgggtttgtctcagataagttttcttgtaggtcaaaatgcaaaatgttggcgtttgcttttattttcacttattaaaattcctcttgtcatatttggcgaagaaggccaaggcgatggaattaacaggaaataaaatattgaaaaaggaaacagaagcttgaaaacttttttacagttcctttcaagttcacaccctgcagtaaacttatatgagttcctattttcccataaatgcttttgcaagcggtcggaagtttcatagggaactcaagtattatcgaatacatcaagtcttttgtaattgatttcagcttgattacaggtcatttatttttaaattaacacgatgtatgtactgaaatatatcatgctggagtgctattaggattattctgttgtgaaaagctgcatagattctttcatactatccatgatttgatatagggaccctgcttcataatggtgcttttaatttggagtaatccaacaaatgtagtccatttatttcaacttgtaatataagaataggggaaaggcttaaccttttagcagatttaattgataaattttcagctattactgtaacagcactaaactatagaagcaaatgttcaaactttatgattaaaaacacttaaaaatattcattcagttaaataatactgcagatgcaaattattcccttcgagagcacttcaaactttgtacttcctgatggttggatcattgagacaaaggttagaactagcggagctactgctggtcgtattgacagggtatctctcctttccaaaatttgaagcatcacttttttttaaaaaaaaaattaattgtaaaaggtttatagcgttctgtatctgttgaaggaaaatccacttttttagcataataaaattttgtgcagctacttatcttgttgtatatattgatgctctttgtttattatacataaatagatggatgaatgagtgcggaaaaattcaatacatcctgatattctttgattatcaagcatatggctccatgagatgctagagaatttacaagctgatttacatttgcagtactatgttgagccagggactggacgtcaatttcgctccccaagagaggttgagagacaccttaaagaaacaaacatggtcacagcaccagtcaaggtatttatttgaatatttgacgagcatcatcaaagtttatatgcaacaaatggattgttatttgtttgataaaggtgattcttcacatatacggcaattcatcatctccttccgcaggtgattcaaaaaaaaaaaaaagattttatgaattcattccttgggaaaaaaaaaagaagaagaaggtgggtcaaaatttaactttttaaaggtgtttaatctcatattagctccagttgctctaacataacggtccttcacttattggtataattgaagaagctaagtccatgtgtttttatgcatttaactttattttttttaaaattcaatgccactaacatgcactgttgaagcatctttaataattaacctgtacggctgaaggttggtgctctataacttggtatctttattcacaagtgtctttgaatactaatgcacccatatcacaagggaaaagacttgaacttactggatttggaagtttctgagatttctgcattagtcaatccacttttatgaaggaaggatttcattttgtaatgatttaagttttgcaggaaaatcctaattaaaattaccgaaatgaaattacgcagatccaacattctcctcttatcactgagagcccctcgaactttgtactacctgatggttggatcattcagaaaacacgtcatcgtaaggtatattctgttttcaggttaagcctctttttttcagttgtcctgggcttattgtgaattatgtacctgctagaagtaattgccttttgagctctaatactatgctcagtgacttccttgccttatgtatgtattgaaagtataatgtcggtgaaggcatttcatgttttcatggtgttccctcattaataagcacatgaatccatcagaaactagtttcactcacgtagacttggacaattgtcagttcaatgctttctgcttctctttcattattaagcacatggcaccatcagaaactatagaatttatatgctgatttacatgtgcagtactatgtcgaccagaacaccggaaatgtattcaggtcattaatagctgttgagagacacctagaagaagaaaaagaaaaggaatacacaatgacactcaatgcgttcaagcattcccgtaagcgtaaggtatgctttattacaagttacaactgaaagtgcttatttgattctttgatccctgaccaaatgtaggttgcttcaaaatcaggtttccaccaaatctgattcccataatgtatgtgcacctgatgagacatgttctactaaagttaatgatgacacccctacaaaatatagtgaacaaacaattatgtcaaaagaaatcacacatcacaatatttccggagtaagtttatgagctcatttatgtttgtagctgaagattagagcaagagtttagttgatatttgttttgactatgtacgtctgtctatactcttttctagctttcggggcattctgatttgcgtaaaaatagtaagttgggagagaaattcgaagcctcaatggatgatttttcctgcccaccatcaaagataaagtgggttcttggtggttctggtggagatatgtggaatccttttgttggtgaatttatggtcccagaatctatgaagcaaaagtggtctgaaacctttatatcatccatctgcagtgaaaaacttaaatcaggcatttaagatatgaatgatattctggcaaggtggtgttctcctgttgagtttgtgaatatgaaagaatgtaacgccacaaggttcatttacatacttggagatgagttttgtctcaagcagaagaaatatataaataaatgtacatattttctcatggactgaatgcaaagataactaactggttgattagtctgcatcccttttgtttgagaccagttttttattatatgaaagaactaaaattcaatgttttgagaatttcattgtattgaattatgttttggtattgaattatcataattcaatcgtgattccgtaaattgacttgataaataatatatttacatttatgattaaaaattattgtgacaattaaattaaggatatttgtgtcataaatattttatctttttagttttaaacacttaaatatcatatatttttttttacagattaaatattttaactatatttatgttactactattatgttattgggtatttatataaatatgggaacaataaatctagtttatataaatatggtaaggaaatttaatgagaaaaaatatgatatttaatataaaaatttaaaaattgttcaccttttgttcatagaaagtagaggtatttagacatggggcaaaggcacactttttacctacctaggattttgtgctctactcacaacaagggttggtacgaccgtcaagacgatctgaccattggttgataagaagcttttccatcgtgtggtgtacacctatagtgggagattttgtacaaactaggacacgtatcgtgcaaaggtttctcctttacaaaatactctctaaccaggccgttggacaaaatgcatgtctagaggtgagtatgcgcactacaatggcctatcatggggggtaagatttgatcttgtgttagaaaaagctataacctcctatagagcaatttccatacgaagttgacgtagttcttggccttgagactactgtcatgccccgcaaccattacacgggaggcctccacccggaggccatatacttcagctatcctcccggtcccatagatgttatttattcatagattgctcttctcgttaggtgttcagtgcatatcccccgactcgtcgagatatccatgggaaagatttataagttatctgattaatcctctaaattaatacatcttttctcttaatcatgacacgtgtctttcgtttgaaaacgtgaataatagaaagacaaagagggcatgcaagtttagagaagatgttggttgagaaattttcaaagctggaaggtttcgtgggttgaaatagcgaaaatgatggaaagtttgaaatttgtacctaaaagatggtaaccatttgatcaaaagaaaattgatcaaacaaatgatagctgtacgagaaaagaatagtcagaacatttaataaagaaatgattttcctcaaagttttgaattgccaaaatcaaagcatgtaaattttaaatgagaaaaatacaataataccctcgaagacatttaaaaggtccttttttattaaaaagcactttttaggaggaaattggtataccttaatttcggctaacaaccagaaactaacacgtgtaccagaaggaatatgaatcaacttaataattgcattattaaatgcacagtaaataactcatcttaagaattacggttgatagaaatattcaaactcactgctacttaggcaagtatgagataagaataataactataaatgagtaagattggcgggacaacaagactatctcggaataaacagaatacataataaaagttgttcaagacggtacacaaatagcttgcaacttattgacccacatactcgggaataagagcttgcaactcattgacccacatatttgtatgtacaaagaataacaacattcgtccatctcgctctttatacattgaagtaaccacctcgctaataccttccaaggtgataaaagagaactgtgggaagcattacatctctatacttagcatttttttctataaagacggtaaagaaggataatgtacacttggcaaggatcattcagtatagtcagcataaccgttaatggataatgacagaagagcagttaaacagttatttaacattatcctatgtgcacaataataaaatgtggggatgtccacatttcatgagcagttatgaatgaatagatattaagggaataactgtcaccctacacatatataaatagggacagaacccagggtaaaaagaaggggaaaatctagagagaattgtcattgatactattgtattttatactccctatactttttctaataagatggactcgtggattatgaaaaatcaacttcaaaactacattaaaaactttttggtgttcatttattactacaattaattctgtggtatatttattacaaaatggttaatatttttggttgataaaaatctgcgtttacagaatcatagcgataggtcctcattatttctcgagtattatcttctatgtattacgatatatttattacataataatgtactttatgtggcaatgtacttaagtaaataaactctaaattttatgtttatttaggtcctctaaaattttctcaaatgtaaaattaagatgtgcataaatacgagaaaatatcaaaataagagtttcattaataattttagttgtacaacaaaaaactacataaggggtaactgaatctcatatttactttacgatccttgaaaatttgtgttgcagcatgcctttagtcaatgatattgcaatcatccatgtaaagcccgcttagtttaatttggaaattatcagtt

SEQ ID NO: 111356 - DNA, 1345 bp, Cannabis sativa
ccgaacccgaccacgcccaactcgcaatacccgacccgaaacccgccatacccgaacacccaaaaatcgggttcggttgtgcatttttaagactcgaaatccgaaaacccgaactcgaccacccgaaaatctgaaaacccgacccgtgtgcaaccctaactgctaccacctatgaaggttttcatcccaatgatggtttcaccatatcaagttgaccttcaagcataattactcccaataaaaatcgtaataaaggctttactacaactataccttacaacacttggtaagtttgagtgttgttgtactaaagtaaagttcaaaatgttaagaaagaattattattgttatttaataatacaataaattgtatcaaaatcttaccaatgaaaaatacatctaaaaatattataaaaaaataaaaataaaaaaatgatcttaactacttactacaaaatatagtcattccttcatgataaataatggaacgtttttattaagcactattggtgtctaacatatgaagtagtgctttgtgaacattaataataattcaatgaacaccaatacacaattgtttaatgggttctaaatctattaatgttgttaattactgactaaatatccaataataattaataaattaataaattaggtaattaaagaactaatattgtaattaaaaattatacattaaatactccataattattaatggtactatttaagtaagaaaatgttcataattatttgacacaatattttatcacaacatttaacatagcattgaataatcatttttcacaatgcattggttttaactttggatatatacacatcatctaatttatacttatggttgaccagattagagaaaaatatgattctttggttaaactttttgacaaagttttgttacagaattatcaaatacaaatacaaatttaaattttaatattcaaatataaaagataacatgaagttttcatcgcatttacatgcttctccttagttcactttctattctcagcaaccaaataaaaaatgtgtatagagagatgaagaagagggagtgagaataatttttaaactaacgagaatattttatcctaaactaaactttgaaagatggagaagactatgaatgggaagaagattacggataatgtgtatggagagatgaagaagagggaggagtgagaataattttaatcaatttcaaaagttaatatttttttaaatatgtaattaaaaataattaaaaaataatctagtgccacccaaatattatgaaattccgtattttaatattcccagtttgattattcaattaagtgattaatta

SEQ ID NO: 111357 - DNA, 5750 bp, Cannabis sativa
  modified_base (5707)..(5710): a, c, t, g, unknown or other
tacttaattggaccaatagcaatattgacacataagagggtgctaggcaccattggtgccctttagcatttctctttttattaattaatctttttatttgttataaatgaggattatgatattttcacgaaccttattttatttgtactttagcattatataagttttagtaaattggtcttaaaattttatttttttacaaattagttctccaactatataactattagcaagttgatttttaaattttattttttgataaattagtccctaaatttttatttctttagcaacattaagtccctactattagatattaatatttttattaatttttatttatttaaatactttaatttattttttgtgttaaatttaaataattttatttttttaattttaatattttaataaaaagaattatattaatattaatatttttatttttgaagtactcatataatatatactgtataattataataattaattattttaagaaaatatttaaaatatactttatttatatgtattattaataagaaaaaaatatactttatttaaaatataatataaacactagcgccgactcatataatgactatagaatttcaactctctcatatttttatattttaacattaataatttattttattgttgatttataaatatgcagtattataattttaataattttttaattgtaatatatttattaattatttaaattttacatgaacgatgataaaatttcataagttcatcgtggatcataagttaaaagaaaattttaaaatataatttacttagtttataaaaatattattatttgagtcttttcaattattcttttcttttcttcttattttgacatatttgaaaaaaaaaaatacatataaataaaaaatatatatttatttaatttgataatatattaatataaaactatttaaaattaatataaaaatatcatttaagagtgatgactttatgtttttaaaataataaaagtttgggaacaatttgctaaaaaaaataaaatttgaggactaacttatcaaaacttatataattttgggaccaatttgctaaaaataaaaatttaaggatcaacttactaaaacatgtataatttaaaatctgcggtacaaataagtcataataataataaaaatgtgaattttccaatgagatattgcaacgacttttttaagcctagcccaatgtttaactttaaatatcacaattattagtgattttaaatatatacaaatatttaaatttgtttcatttaactagactagttcggtctcaacaacagaaatatcactcatattattagagctcaaaaaaaaaaaaatacaatcaacatttgaatctgttctttttagaaaatctaccttcttataacctgatatgaaaattttgaaaacaagtaactattcttagttgttgaattaggcatatgatttcagttgattcaattactcaattattaatactaattaactatttttctttttcttcatcatcataaatgtcctaaattatatgccaactactgcatctctcagatagaacaacatataatttgcattaagcaataatctaaaaattacataagctatgtaaatattttcgttttacatcaacacatatgtttatttatttatagcattcttaatattcacttttcaaatttcacataggatcataaattatgcataaggtaatcaaacttaaacatgtaataaacacaaagatgaataaatcacacaatcaaagaagaaagaacaattaactaatattaactcacgaaataatctaagacaatatctattaaatccctacattgagagtttaactcataatcaaattcttaattaaactaaacacaaataaaaacataagaaatcaaaggaaattagatggaggattgtcccggatcatccacgttcactccaagcttcttcttctcgtgtttttagggttccattttgtctatccctctaaaattcacgaccatgtttcattaaaataatgtgtttcaacccaaaattaagaaaaacaaagttgctcatatcctgtacggagtcgacgccacaacgactgtagaaaatcaaaaaaacaccacttctgtataccctcgtcgcgaccaccattagcctcgccgtggtgacaattcgtcgcggcgagaagacgtttttttgcttcgatatctctcagtaaaatatgtataacttttacatagaaacttcaaatgagttgattgaggatgagttggaaagctgaaaaagagatctaaaactaatatgttttgactttttccaaaatctaatcagaacatagttaaattttgatttgaagtttcagttttattttcttacaaaattttctctattttatagattaccatttttcaaaatttaaccaatttatacattctaagtgtcaaatttaaaattaaagaaaacaaacgtaactatgttccaaaaaatagtaatgaagaaaaaaataattttaaaaataatccgacaaagagattaaaaatagcctaatatataagataatattacaatattaaaaatgactttatgtagagttattttttgtaatatatattaattaacaatacaatcaaattatgtgagtatgctaatgccagctatatatgttacatgtaaggaaaatatttttatatttatagttattatgaatccctaaatatagaattaaaacagctataattaataataataatttaaaaaattaaattttaatcacaggataattctaatgagtcagcactgagtaataatggataaaatgggaaaagtcataacaaggaaaactataaaatccaaaagcaataaacatcttttacattttcgaaacattttcaataaatgcttagataaatcaacattaaggttgatagagggtttgaattaagtttatatatatgtaaatttatttgtgtatatgtataaacttaattcaaaattttgtattgttagtgaaatattaaatcatgggagagaatgagattagtgataatggagatcatattttgagtatgaagaatggtgatcatattgatcttgatgatgatgatgattataataatactaatatcccacatgataattcaaacatgtgtgccaacatagcttttgctcaaaaggtaagtttgattatattttatattttcttattaattttatgtaatttatcttatttatagacgaaatcagcttaaaaatttatagaggacaatatcgacaccctcaatcttcctcttttggttccgtcattgatcttatgatattatttttatctgagacatttgacgaaattagaggaggccggggagtcttatgattcttatttttaaaaaaattacattaaaaaatggaaataattttttttacatgtattgtcagttttttttttttttttgtaaattttgttaatattttatattttatttatctctaacatatctgcatattatatgtggcagttacttggagagttattaggtacatattttatgatatttgctgggtgtggttcagtggctgtgaatttaaatttcgacaaaatagtaacatttccaggcatttgcataacttggggactagtggtcatggttaatgtctatgctctcggtcacatctccggtgcccattttaatcccgccgtcactattgcttttgcttccgtcaacaaatttccgataaaacaggttaatatttagaattaaatatgcaataatgtgtaattaattttgattgtcaatattttgaaacaatatcttaaatttagtactattttgttggattgagtagctggtacatgcatgcataagtattaactattggatgtttaattcaaaaaaaaaaaaaaatgcttgaactaaccataataggttggattttatatcctttttttttttttgttttgttttaaatgatttttaaatagaaatgtatcattgtcattcattcaatacattttatgtattaaattctattttcattgttaaaaattataatgaacttttcccacataatcatccaaaagatttgcatgaactgtccaaaaaaaaaaaagcaaaatctttatattttttgtttttattaaaagaaagtacttaataatcgaatcaaaaaaagtatgtcaatcaataattttaaccgaatccaatttggtaagaaataagaaccacacaaggaaagcaaggagtcctcttgaaaaaaaaaatcgaaaaaaaaatatatatacattttaactaattacgatatatatttataataaaaagtaatatttataaacataatactaatttattctcgaaatggcacaatttttatttagcatttttcttgtaaatatattataggtacccgcttatataatttctcaagttgttggatcaaccctagcatgtggaaccctaaggttgatgtttagtgggaaaggagaagaccattttcttgggacaatgccggcaggctcctacatacaatcctttgttgctgagtatatcgtcactttttatctcttgtttgctatctcgggtatttgccttgatgatcgagcggtaatttctacacttctaaatatcttaatttttacatttaatcgaagatttatacttttttagattctgtgttttacattttttttttaatttcgtgttttaagaattttttttgaatattttgttttgtaaaattttttagtcaaatatgagtagtgtgaagaagtctttatgcttaaaaaaagaagtttgaggagtccaaacaagtaatggtacaaaaatctaaaaaataagtataagtcattcaatcaaatatatgtgttttgatgctattcttataaattcatcttgaatattttttcataaatcagtatacatttatttgggtgaaaaatctaacaaaattattttaggtagggttcaattcaagtgcaaatagatagtgttatttcaaatactaatttgaactttatgttttgtaaaactaattaattaaactatctattttgttaaatgataattttttttttcgaaatgtcttatggtaattaagattttatattttctaaaatagtataaaataatattttaaatttaatttttatcaaagtaaaatttaataataacttaatcgaaatgtgctgttacattttttttttaatactatatctgtttttcttagaaattaatttaagaataattatattaaaaataaattggtaaaaatgagttcaatatattatttttttagggaatttaccaaatatgcgttaatttattattattttttaaaatttatgttaatattttcctatttttatttctcttcaccaacattgtgagttatggcttattgtgatttgtggcttattgccgtaaaatatttgtttataaatatattaatataattaccccttatttttatacaattttagaaagaatagaatttaattgtcatatatgaaagaagatctgattggtaatttgtatagggtccaaaatagtattaccaaataatagggtcgacccacatagaggtgaggcggagcagtcaccccttgaaaaaaaattagaagaaaatgtatatgtaattagcaatttttcacacaaactttaacatgtactaaatcatggtccttgaacttttttggccgttannnnttctccctgaactattaagattgttaaatttaaggacttt

SEQ ID NO: 111358 - DNA, 11732 bp, Cannabis sativa
  modified_base (11680)..(11695): a, c, t, g, unknown or other
gtaaaggcataaaacccaacacaatcaagcaatgtgagaggaggggatgcatctgaagctgacgttagaagggacgacctaaaccggtgtcataaacaaatctaagaagaagatcctgacgccgaagaagaggaggatgatgatgatggatacgtcaaagacagatattataaagatggatattattatgaacaagactcatatttggttgagtatccaatgagatacatgagacctaggacaagttagcccatcaagagaagtttttgcagaagatggagaggaagaatgcctgcctccaagaaaagtttggaaacctagaagaggattctaaagaagatgcctcgatggaacttgtcaacagaaacaatagagaaaaccctactaatgttgaaatcttaaaacctacaaaggacaaggggaagccaaaagtaggtaatcctcaaaacccaatagctcttacctcctagaaaaatatgaacctagccaacaagcccttgcggatatagaaggccgccaatgcctttgggctcaaacgtccttctaatcccaatggtagagttgcacaaaaaggacctagtggaaaagtacccacgcccaggggaaggaaaaactgccccaatgattctattaatcagaatggcaagatagagggatagtactctgatgatagttggtcaactgtggtcatctgaaagcgtcttaacgctaaatacaaaaaaagttaaagaggaaaaggtgaggtcacatggtaatgatcttaggaaccatctaaatgataaagcttgcaaacatgaccttgtagacagtgacacaaaaaatttggaggaccaaatttttgccctaactaaacttgtctaaaagtagagtgggaccctctcagacttagaagatgaggaaccataactctatgccaagcagatcgcgaaagccctattcctatagaactttaagatgccacaaattgagttgtacaatggtcgtacagacctaagaacccacatgtccaagtacaacaagatgatacagttgtcaagagtgagcaatgatgctaagtgcttttgttttttgtcaacacttaccaagtctacggaggattggtggaaaaggctacctgctaaatgaattcatagctggaaagaatcacaattttataggtgcacgggactatgacatggaatttgggtcgatcaccaatgtcaaacaacaagcaagtgaaagcttaaaaaacttcattcaacgaatgatggaggcagtcgcaaagacaatggtgagcgatgacatgaaacttgtagcccttcaatctaaactcacagttggctccttattatggggagagatgtagagaaagagggctaagaatttgtctgagtttatgtccaaagcacaaggtatcagcaagcttttagagtccctccagctctagctccttccgcatccttatcaagcttcatcgcgcaagtcctaactcttggaactaagtattctccgactatctatggacattctacatccaggaaaacacctacccaaactcatttttttaggtatggagcggcacaaaccaaatgtagtaccgcttctggacaattgaagcaactagtagaagttccaaaatagaacataagcgattccaggagtatgaggggtggggaagtactagaatcaaagtgaaacttcaaaaaaaaaccaaggactgagtatgaatccaaattctctaagtacactagcttaattgatactcaagagaatgtgtaaaaagaaacctaaaacatggtccactatcggaagcccccaaagaagcctcggggaggcaaacacaacagggaccagaataaaaggtgtgtgtaccacaaagaggtaggacacactactaatgagtgtgactacttaagagatgagatcaaatctctagttagagctagacatttaggccaatggatacggatctcagttatctattccaagcaggggttattcacagacaattgatcattctgggacaacaagggactacaaattctctacaaagagtaggtcaccctcaagatcctagaacagaatttctagccctgcctgctccactagctcatgctgcaaatgcaatattggttccgagactagggaacccctatccactaggttcagctcccctaccggttgacggtcatgtggccactatctcttggggaacacacattgcatggagcacaaggaattcccaaaagacatatttgagggaattaggaaatgagggggagatgtgtgccttagtgaaatcaccagcgcaacatccacaaacattaatgaacctacccattccattcacaaaggatgatacccgccgtgttcattcccccacaatgaccctttggtcataaaagcccaaatttctagaaaagagtatctcgagtcctggtggacaatgggagctcagtcaacgtactattcaagttcccatttcaggtaattgggctaacagaggctgatttgtcatcttgtcccatccaactccaagggttcaatagagatgcactcatgccaatgggaaatatttagctcccatttagagaacaacatttctacatttaaacattgtaccttcgttgttgtacattatcccacagcttacaatgctatactagaatgcccggtcttagtcgattttgggatcataactacaattaggaacttgtgcatgaagttaccttgtggtaacagaagtgttggagtggtaagaggtgagcagagaagtgtaaggatttgttataatgtttctgtttggtctgtgtgcatggtctgggaggaaacgagttttgctcctagaataggtattcaggtggaaattgaagttgtctgagaggactatgaacatgtattagatcttggggttgggataaaaagaatgatagaaccgctagaggatgtggaaaagatcaaaatttttgacactgaccccactaaaaccatcaaagtgggaaaaaacttacatccagtgatgagagaaaagattgtgacaatggtcgagaagaatcgggatgtgctagcatggagccattctaacatgatggggatcaaccaaaacacaatttcccatgccctaacattgacaagaatacaacacccacccaccagaaaagaaggccactagatcctgtaagggcggaagcagtgaaggcaaaagtcgataagttgacttctaatgaatttctacaagaatcattatacttggtggggttggaaaacccaattatggtcccaaagccaaatggtacatggaggatgtgcgtagacttcacggacctcaataaagcctgcccaaaagattattttcctcttctatggatagatcaaatggtagatgccacatcaaggtatgaactattgagttttatggatgcctacttcggctacaaccagatcaagattcatgtcacggactaggaacacaccagcttccaaacagacaaaggtgtgtactattacgtggtgatgccattcaaattaaaaaatgtcagagccacctatcaacggttggtcaataagatgattaaggatcagcttaggaggaacatggaggtacatgtagattacatgctcatgaaatcaaaaacttccacagagcatggggatgatcttgaggaagctttcacagttatctagaggtatggtatgaaacttattccaaaaagtgcaatttagagcctcctctaggaatattttggctttcatagttagctcccagggaattgaagccaaccaagagaagattaaagccttgattgacatgccttctccaaggaatgataaggatgtgcagagtgtagctggaaggatcgcaatgcattctgtttttcaatgtgttgcacaaaagcaagaagtttgagtggattgaggaatgtgaagaagcctcctaaaaactaatggagcatctgaccaaggctcctatcttatccaagtcagtggaaggagaactatcgtgcctttattttgtagtgctcatgccgtgagtgttgccctagtgcaagaagaagtaagggtcatattaccggtgtattacataagtaaaagactgctgggtgtagaatccagatatcctataatagagaatttgtcctttttcttgctaatcacctcaaaaaaaaaattgagaccatactttcaagcccattccatcaaggtcttaactaatcatccccatcgccaagtgcttcagaaatcagagtcatccagtagactgttaaaatgggctacaaaacatagccaatttgatatctaatatcagccatgggtgtcaatcaagggttaggccctagctgactcatagtagagtgttctggaatgaatgacctaccagacaaaccagtcctaaaactaccagcctggaaggtctaccttgatggagtattgaatgaaaaaggagccaaagcaggaattatattaatttatccgcaaagacatcagccatagaacaccctctactttgaatttacggcctccaacaatgaagcaaaacacaaagctttgattgttggcctgcaattagctaacaaagtaggagcctaaagtatctaagtgtataactattcccagctattggtgaaccacaattttggggaatatcaagccaagggtgagaagatggcttcctgggtatcacggtccagggaaatgttgcacagatttaaaagctacaatatccaccatgtcccgagggaccaaaactcatttgtaaacatgtcggctaaactcgcaatagacttggagatcatgcaatacagagtagtgcctgtggaccgtctagaggctccgagtattgaagcactaggggtaaatatcgtcattgatcactcaagttcctggatatgcccaatctattagtttttaagtttaggggaccttcttactgacaaggctgctgctaggaaaattaagtatcaagctccccaatatgtgattctagatgggaaactttactgcaaggggttgtttgtttcgtatctaaggtgcgtagctgggactgaaataagcacagtgatccatgaggttcatgaaggtttttatggagatcatgcctttagaccaagcctatcaaaaaagattcttcgtcaagggttatttttggttgatgatgaagaaggattgtgttgagtacgtccacaagtgtgaatagtgtcagagatatgcgagggttcgacgtgcaccaccaactgagatcactctcatgcatagccctagccttttacagtatgaggaataaacctagtgggatcgctacttactagaaaaggaggagtaaaatatgcaatagttgttataaactacttcaccaaatgggtagaagtcgtacccatgaacacggtcaccttaaaaaaggccctgggctttgtcatcaagaatattgtgtgcttttttgggcgtccacaaaatattgtgtcttataatgtttgtgtttgaaacactaggattatcttctttagttgagaccgtactcgctattgctgtactcgtgctgggtttacttcctgagccagtttttaaaagcttcatcctgtttttagcttcatcccgtttttagcttcttctttgtgcacaaatacttatactctttcattaaattcaataatgttcctcactaggggtccctatagatcatcccacagtttgcctctagccgtggataggtcagttgtgatcctcgcttgaagtgcagtgagttgaatattgtcattcaagtttctgacctttgcagcggctatgccaaaacgactcaaataagccttaagtgactcacctagttgctactttatgttggttgaggacaatgcttcaggtcgcttgtctctagcgacttgaaatttcttttaaagtttttggatagctgttcctaggaagttatagaatgatgagtaaatttttcgaagtagttgctcgcagctcctgttaaagaaatcaggaataaaatgcagtgtagattatttgtgacattcctagcttgcattatagtattaaagttgttcaggtgagcgaatggttcgtagtccaatcatactgcgaaacatgtgggtttttgagtccttgaggaaactcagaatttatgatatcaggatgaaacggctcagtctcttcatctgagttgtaacgaagaaattttccatgttctccatcttgatactttctgaacttatcctctagtttcataatttgcaattagatggggtttacttgctgttgattttcattttgattgagttgatggcgcaaataaagtgcattttggtttagtcgctcgcaaagatctggctgtctttgattcaggtgctcgtgaagatcaggctgtcttcgctcataattactcacagaccttgtctatgaataactctcagatttgtagcttcgcgtattgctcatgctttcttggtcaacataatgttgaggtttacttccctctcgcatttgcctacccgatcaactatgtccttgagaccttaagcgtcctgaacttgagcttgcttcatcttgtattggccttctccttcaaaagagactagatacacgtcctctattcaagtatgtgtatacatcctctctctctgattgagaaggacgttgagggtatcttggacgcaacccacttgaccttagttgatttctagggtttctctcgttgccacgagggattccctggttccttgttcgaggctatcttctatcctcattcatgtgagatgcttctggtacatcatttcgttcgctcccttggtttgtaaattcttgggaaccttgaggaacatctcgccatttcttgtgattgtttgtttgattatccattggaacatcccttgtacccttaggttgtttttcttgggcgttttggggattcccctggtttgtttcttgtctcctcattttagagcctcaaggttgtcctcgtggtcttttcactgcaggatctggtcgattatgaggattttctccttatgctgccctggccactgcaacctctctttccaactcaacattttgtcggttagatttggctaagtgttgtccaagttgtctattctctaatttcatcaatggtacatatctagttgggtcgtaagcatcctcactcctaggcacgtacctggtagaactattggtatcttcattccttcttttaggaatttgatcacttcgatcatcgtttcttcttgaacgtggtgtttcgatggtatggggtctttgagatcccattggctcttttccagggtgacgtgctgtttcttcaaggcaatttccatcatttcgattgttatcagccattgaatatggatagatttttgtttgtaaggaggaatttttttgagttttatcactaaggctctcaatgaaagtaccaaattgttaatgcagattttcgttaaccaaaattaaatagcctttaagtaataattatctacagaaattaataagtaataaatgatagaataactcaagatatttttacgtggttttgtagttaaaatttatatactccacgagtccttattattaggaatattttttgagtacagaatacaatacctgattttaaataatagtcttttctctcaaattttgccgtccctttttccatagaatctgcctctatttataggaatataggttggtagttatccttttttgggatggattgaaatataacagttcatgaaacgtggagattcatgaaacgcatacaatctccacgtttcatttttaatcacatgtgagataatatctaataactacccaaccgctctttattattatcttttagacagttattgctgacttggaaggtcatatctcgcttgatatgagttgtcgtttctttccgtcttgataagaaaaatgctaagtgttgggaagtaatccatctcgttacattctcctagtggtatgaacaatgcgaggtgaccttttctctatgtgtgatgcgaggcagttacattgttatatttactctacttgagtggatgaacatctttcttctagtttatatcttctaaggcatgcatatgtctcgttaacctcagatcaatagtgattatccttgtctctcttttgactataaattcaacgagttttgaatgttatctattaatcctttatttaataataacgagttatttaatatgcatttattgatatatcactctgaattgtttcgtattccttctgttggacacgtgtcaacttctgaagtgtagtcaaattttgggtataacacaagtcatctaatcatcatttggcttgggccctatgcacattaaagagctgtcacttcataaccctctcactgaatgtgtttccctatagcaaacacgctcaccacaggtgcatatagcgcacgggttcctagaatacgtgacacgtgtgtatcggtaaatatttcatgaaggatctaaaaactttcaactcgcatatgtcaaaaatatgtttttgcatcctcagagttggaccatgtatcctagagcatgtcgtagcaatacgcatggagactgcaagcttccaccactcaagagtcctgaaaccttgtgcgtacatgttatccatgtttctgaataaaggacatatggcaaaaaaataaaagggtgtaatccgttgaagacttagagatttaccacaaggaaaataactatctaagatccaaaagccttatcatttctctgagattcggagaagaccaacttgtccataagattaggtagatgttggagagccgtgaaaagagtctaagacagatgccgactgtgcaaggagaaccagaagctacatgcgtggcaaaagcccaatggatttatgatggttattcttgtctgacataaaattagatcttgtcccctatgtcagaccatgatagtgtgtgcaccaccctctcaacactcaacttcatccaatgactcatatgagcattttgtttaccaagtgcaagcctttgctcgagacgtgcccatcaccaacaattgtccgcactatacagacagttcattacacgagaaagcaccatcttagtagcacaatagtcagatatttaatgcattttatcctaatagtgggtctttttacaaaaaccctggacatgtcatgggtaggcccatgaccatactttagcctataaaaacccttttatttccacacaaaggggaatcaaaaaagtaatagtcaaaactctgtcaaaatctctctatgttttcttatttcaagagaaactaagagaacataattaggttttctactgtaaacaccagtgtaacacattttacaagccttctacggccaatatactgacttgtggacaagggatcattaacgccctaaccacgtaaaaatcattatttattttatttcttgcttcttttatttcttaagctcttatttaatttattcctaaaaatctcagtaaacaagcataaaaacacaaaattttttaatgctacccattccaggttaatacccaataaaatttcacacataatattatagattctgaatgatctggctagggctaatcatggggtaataaattaatatgtataactttttgtgagtttgattgtatatagtattagtttttcataactgacatatgatacaaattgttgatgtcaggtagaattttacctgtagtaatcaaatttggtagccggatggtggcgccaaaatatttcacattttaataatattattgtaaaatccttagttggcatatttagtaaagatgactaaattaattatgtgttgtattttcgaaataaagttgatatcttattttggtatgaaaagggtattcaaaatcagattgtgttatattggttaaataaatataaaattttcttatttaaattatcatgattgactttttatgtttaaggaaaatttttatatttattgtttttcaaaaaaacttattttctagtcaagaaaccgtgtacaactgtgcctttagtgcacatttttttctcttatttatataaggaagctttgctaaaaatttatccaggtacaatgaatctatttaacaaattaacaatatatttgactagatttcgacttttctttttggaatatatttatttattaattgattatttctttacttgtaaagcacaacctgttgcgtattaattgagaatatatcgttacatagattatggttttatgtaataaatattatatctatatatggtatttctttgtaattgatttattttattacttttcagatatgatctacattaatccctccaactaggcagtatgatgtccaaggaaaattcgtgggatgaacttggctttgatggagtttagattcacaatgctaactagacagatcacgatttcgtctgcacacttttatatctgttaaaatagagttttgtcatttaatgaatttttgtaaggaaactaatgagtgttatatctttgtattcagaccttttgagctcagttttaggcttcatttatcactataaatatgacctaaaaggtaaaactctttcacttcttaatttcttatatttttagaagagagtgtttcttttataaaggatatttgttctatgttgtttagaaatctttgattaatttctctttcgaccatgtgaacggtaagtaggcaagtttcaatactgtttttttccatctcttctactcgcgcttgctgttatacatggtgaagccatacctgccttctttttactgacttcctcgcatttgtataattggatctatcatctttttattcagaactccgtgatctccaatggaatgccagaatttgaagtgcaaagtgtggaatgtattatcgccttgatttgttattgttggagccttagttgcaattttttaagttgcctctttgtggttgcgaccacttcccgagcttcttctctatgccagatttttgattgtctgattgtgccttattgtcgctattcttctctattgagtatattgtatatttttttgatctttattttaaataggatttttttgaggcgaggggctgatgaaattcttcaaatagttttacatacaatctcgatcaaagatttgtaattgcgttggttgatctttgagtgcaatatgagcggcaaaattggtcacaaattcttctctttttttgtgtttgattaaacatatgtgattttttgtagatacttggttcaccaccatgattctcctccaaaaatcatggggataatgttggaatatcgtccttctagcatcaaatgatatcagaagaatttagaaagtaccaaatatctacgagtattcaaaggtcatctgaatctccaataataaacatggagtacttacttagaatagcaagtactcaaagaatatagtgtaaaatatatacaagtacgtagtaatataataaaaaaaaacacaagaattatagtggttcagcataagctcacattcgacttgcctagtccactgttaaatgaatactcttgctctatgattttcttttgattagcatagtctcgtttgaatacttgtaggtagtaggaaaatgttacaaatcatagtcattataagactgttacaaataataataataataataatagacacttaattgtactaattacaatagttataacaatttcttgactgttatttgttggaatttattttaccnnnnnnnnnnnnnnnntcacaagtatgtttattaacaccttaaatatgaactt

SEQ ID NO: 111359 - DNA, 2606 bp, Cannabis sativa
attgattttattctctgggtgtggttccgtggactagtagtgtttgaaaaaacagtgacaccacgtataattctcttatgtcaagttttgaattctaaacaatttatttctatttttttctgttacagcaagtctgtgttctgcagtaataaattttcattatgttactacatgttgttaaattcacatttgaattgtaattttctaaagaaataaattggtatatgcaaaaacacggtctttcaaacaatatcaagcatctcaagactatcaagattcttaaaatatttcaagtcaatattttaatatttataaggctaagatcctcaagtgatcaattttactattaaattattattttacttaataattatttgtcgtttttgttcttctttttagttttgtaacttagttatgttatttttattttatttagtattattacttttgttattggtattttgtacaaggaagaaaatttttattccaacaaccacaaaaataatacaaagcaaactacaaagcagcacccaaacaaagttttttttatgaataaggtttaattgtattgctcaaacaaacttttacgtacaccaattacaatttatctatatgtcattatatacaactatatcccacatatcaaataacttcagagaaccaagacttgtcccctattgacattttgttaggtaatacttctattagtctagtcaatgaatcatgttgtatcttcctaatagtgtgtcttatttggcacactttctgattccataaagcatcatttctcacctaccaaagattatagaccatagcagctacgatagataataaaatgcttttctttatcttgcttattttaactttagaagcttttcctaaaatctcaagaacattctcggattgaacttttcgattccactacactttgattccttccaagcatttcttgctataagaacatgcaaaaaataagtgacagattccttcaccacatacacatgtagtaagggtccaagcttggctcaaaatttatcattttgtctttagtctgaagcctttgccacataacaagccacatgataagcctgtgtttagggataattagtctatctcaaacaaacttttgttgttcttttttatcctgcacttcaaatagtatagtgtgccccaactgaatgctatattttttaggcacacacccatcttgattgatcttttcctttaaattggttcttgacaaccaccaatttcttctagtaccagctacaatatgtgggacttgtacgtataatcccactaagtgcgatttcccaagtaaacagagttaatccacttgacaaacaggttatccttcttcttggtaattgtccacacatatttttctattgctgctacattctatttttgtatattcctaaatcccaagcctctattagatttcggcctacagattgcatcccatgctattaaccctgcatttgtgttcactgtattcccgttccataagaatgctctgcatatcgcttctacatctcgaagtagaatctttggtaagatcataatttgggcctaatatgagtgtattattaacaaaacaaagttaatcaaggttaccctggccatgtaagatatattcctagagctccaaactttgattctattagtcattctctttaaaatacatctacacattcaacatgagagacttttttttttttgaacacacagggatactgagatacctcaatgaaaggcagctacgagtaaatcttgaaactttcattatccgagttacctcatgatctgccatgcctttccaaaacacagaagtctttgtttcattcggaactagatgaggaagagaagagtttcaggcctctcaacattagctagatagatacataatcaccattacagaacaataataaatcattagcaaaacacatatgtattagtttcaattgagagcatctacaatggaatttaaagcctctccattctccaactttcctcataatcttagataaatatttcattcccagaataaaaattagaggacgcactgtgtcaccttgcctaagacctctcttggcattagaaaatccacacatggagccatttaaaagcaagaaaaatttgggagtttggatgtataccatgatgagatttatgaattgagagggaaattcatatgccttaagaatttcttcaatgaaatcccaatcaattgtatcatattttttccttaggttgatcttgatcatgcaactaggcttacagttcttccttccatagagtcatactaggtcttgacataccattatatcatgagctatataacggtcatgcacaaaacctccttggttttcagcaattaggtctacaaggattctccttaaccttgaacaaaccaccttagcagcagctttataaaggacattacaataggaaatcggcctaaagtcactcacatttctgggataacttgtttggggaataagttttattgtagtagtgtgatagtcaatagtctcgtgatccgtaaggagaaataccgagtaagctgtacaatcccacatcgtctggggaaggtcaagtgtgat

SEQ ID NO: 111360 - DNA, 3283 bp, Cannabis sativa
ggctttactcaaatccagtttcaatgccatatagccatctcgccccttgctttcttttcaaataatggaggacttcaaaagataccattatgttatcagtaataagacggcctggaacaaaagcactctgatgactagatataacatctcccagaaggcatttcaatctatttgcaacaactttagatattattttagcaatcacattgcataaagaaattggcctcaactcactcatattctcagggcacttctttttaggaataaggattagattagtgtcattcataccagtcgacatagagtccgtacgataaaactgtctaactaaatccaccacattcattcccacaatgtcccaatacttttgaaagaaggccgggttcatgccgtccggacctggtgacttatagggatgcatttggaacactcgtccttgacttcatccacaccaatcggttgcaacaacatagaattctgctcctctcatatttttggtgtaatactagccatcacctcactatattccactgaatgagaattaaaaatgtctttaaaataattcatcatgacatcccccaaaccatcttcccaagttactttagtcccattctcattcttcaaacaagtgtttgaattattacgacgtctagcactagctttggaatgaaaaaacttactattttgatcgcccgattgaagccaaagttgttttgaacgttggcgccaaaatatctccctttgattcaacacctcgaacagagcctttttggcttcaaaaaataactgtttcccttcaatgtcccgccggtgcttgtattgcttcaccagagatctacacttctttaagttctgagaaaaattctccgggtttctagcctcccaaagtaacagatcttctccacaggactcgatcttggactgcattgactgcccaaccgaattgtgccagacctcacggataatttgctcacattccatatttcccagccacatattctcaaaccaaaagactttttgatttcttgtaaaatctgcaacgttggtttctaagagtagtgggcaatggtcggacgaagagatctccacatttaacagctgagcattttgaaacaaatctaaccacgaagccgacactaacgcacggtcaagtcgagcttcaatccaatttggggaatccctactcttctcccacgtatacgggtagccaaagagctccaaatcacacagcccacaagccaaaacagtttcttgaaagccattaatcaaccattgagggtacgggttaccccctctcttttccgattgactcaacacattgttgaagtcgcccataaggcaccaaggttccctacgcctagcataaagattctttagcatcctccaaatttcttttctcaagcttcggtttggctccccatagatacccgtgaaacgaaactcactccctccattaacagtagcaaagcaatcaatgtgatttttagaaaaagactcaattctaatatcactttcatatctccataataggcccagcccaccacttctcccttgggcctccaccacataacaacattcaaaacctatacttctcttcaaatcctcaactttattttttgcgcacaaagtttcacaaagaaaaatcaccgtgggtcttttttgaacaattaagtccttaaggaactgaatagtccgaggggacccaagcccacggcagttccaagctaaaatactcacaatgattggcgaacccccccaccgaggcccgccacaatatcgttttttggactcacttcaccaatatgacccaccatacttatttcatcaatgatttgggccgtactatcaagcccaatactagaagaagtatcagttttcctttttttattgtctccaatcaactctttcctttcttgcccaactaatgactttttccccattatcttcaattcattatttgtcattattgcattcgtatcacccacattcccaccatgcaattgatgcatattgaccctttgattacgtgattgccaatctcccatattctgattagtatctccataattactgttcaccggatttccatttttctcttcctcctccatacgccgggaactactaccgctgccatctctccgtggtggaacccaacctttcgtacgtaaccatttcgccccgatgttgtgattatgcttttggaacttagcacgcatgaactctccatatggcttcccaatttgatcagcaggcatctccaatagcttatagcaaaagcgttctgaatgaccaataacaccacaaatgaaacagaaagtgggtgccctttcatacttaaaattcacccaaaaccagttgccatcatccttctgaagtctcatcctcctccgtaaaggtttgtcaatattcagagtcactctcatccgaagatactccctccaaacaccctggaagtttttcggatcagattccagaatctgtcccatagtattgccaacatttctcagcacactttcacccatacaacgaggatccatatcatggatttgcacccaaatatccagggtattaagcgataaactcaccggatcttcccattcctttagccgttctatgataagaggcatacgatcaaacatccacgggctaccatctatcacccttttgatatcaacttcatgataaaattgaaagataaataaattgggttgaagttttttaacaaacatacccatacccggttgccataacgatgaaagtgtgttttgcattgcatcataatcaaacgatcttgaagataagaacttcccaactaagcaccatcgcgaatcaatcccttcatcatcaccaatactgttgatcgccaaatcctcttcctcctcttcagcaatctgaatattcaacacctctctgtctatatcccccatattccatgtattagaagccatgacaaacagccactcactgaataatcaaactaacaagtcgacagaacactcttctcaccactatcaacagaacaccatgtcatacgacatgacttcgcaatttgatgatcactttaatttgtaacttattaattattattttattatcaattaataattatttttttattattaattattgttttattatgaattatgaattatgaattattgttttatttttattttttattaataattgttttattattaattattaactatgaattattattaattatagttttattaattgtttttttatttttttattgttttagtaataattattaatt

SEQ ID NO: 111361 - DNA, 1741 bp, Cannabis sativa
  modified_base (26)..(59): a, c, t, g, unknown or other
atctttctaagtcaatatcaatggtnnnnnnnnnnnnnnnnnnnnnnnnnnnnnnnnnngttaggttcaacttagttgtatttgtgaagaaatgaactttacactcagcaatattaggtggaactaccacacttggtggtcctgatttcttgtaacaaactttgttctttttgtaccgttagaatattctttattctgtgtaaaaggtattttgattgtgtaatgattgttaattgattctctgctataattattgggtaataaatacaattggccagccctattatttggtgagctgagcatttcaagttttctggttttgttatattttctaagttggtatcaaagcctttcgtacaccggtggtgttctttcttcttcgtctccatgatagacccttcaacccctactgctcaaggtgaacaagatggatcagctggaagaagtgcttccagtgtcgttgctcaaccctcagctcctactgcagcgatgccaggacctcatgttggtagcacgctgactcaaacattcacgctgaaactagataggaataactataccttgtggaagatgatggtttctgctatcgtgcgtggtcaccgattggatggtttctactcagttgttgtgaacccggagttcaaaacatggattgtccatgatcaactccttattggttgactgtatggatccatgaccgaaagcatagccacagaggtcatgggttgtgactcttcagcaagtttatggtaagctctcgagactctttttggtgctcattctcgtgtcaaaatggatgagtattgaaccaagattcaaacattcagaaaaggggctatgaccatggcagattatcttcgtcaaaaatgacagtgggtcgatgttctcactcttgctggggatccctaccctgaaaaacaactggtgtcaaatgtgctatctagtttggatatcgaatatctgcccatagtacttcaagttgaagcaaggatctccacatcttggcaggaactacaggaaattcttctaagcttcgacagtaaattggatcggctaattactctttctggtgcgatgaaaaatactggtttaactaacccttatgctaatcttgctgccaccagatcctctcactttgcaggaaatagaggtgctcacacaggttagtttggatctagaaatcgtggaaacacaactcaacagaaaggaggaagaggctctagacaattcagaggcagaggaggtggcaagaaccaaaacaactcgaaaccgacatgccaagtatgtgggagatatggtcatagtgctgcttactgctacaataggtatgataaatcatacatgggctcagatcgttctggttcaaactcaactggcaagaatcctcaactagtaacactagtggtggaggagcctcagcctttgttgctactccagaaatggtggaaaatactgcttggtatgtggattcgggggccagtaatcatgtcacagcagatgtcaacaacatgaatcgaaaggctgactataatggtgaggaaaccttaactgtaggaaatggtaataagcttgacattacacatgtggggtactagctgattgaatggtaaagatagacattctttgattcttagcaatgttttacatgttccaaaaatcactaagaatttattgagtatttcaaagttgacaaccgataataatgtgtttgtggaatttttttgctcaatcttgttttgtg

SEQ ID NO: 111362 - DNA, 7519 bp, Cannabis sativa
gtaaatctgattatattaaaattaattttatttagggtataaaacccaacacaaaggctatacggtaatcatgtcagggggcgaagctaattaagtgtagacaggatcaaactgtagcatcgacctagcctctagaaggctggccaaccatgacctcagcaggttgaccagccatagaatccataatctggcaaaccactacctccacatgctggccggccatagcctcattcatacagccatgcaatgctcccttaatgtggctggccacatggtcttaccctagccagcccgatccaccactagtttgctctcatacttctggtctacagtgacttagtggtaaacaacatcttgctagtaggatcccttgacaaaaaggaaagaagaagagatcaagccaactcaaaccagcatggctgcccacaaagagttaccaggcctttcaacaaacaaatcaaggaaaaaaattcttcatgagagatttactccctaaagaatattccttgataccgaagatcctgcaacaagcttcataccaaattaaaaaggtttgtaccatgttacaagataataataaaggtgcatacaagtcttgcgagtacaacgagaaattggagttggaacttctacccaaacactaaaataagggaacatctttgtaagtactctcactagccaacttgtcaattagttcctctaacgtttcaccatgtagagacccataaaagagatagtacccattgttttttagcttggcctcccatcactcttcagtgatggttgttaagcagtaagccgcgtcggggtagccactgcgtgattttaaaggcagacactaagttgtaagcttttgttacacatagaacaattgtgttttaaagttattctttgccagttcctcatgcgtacaccacgcaacaccccaagaaaattcccatgcaaggtctatgaaacttggtgaattgcaagtgaccaagagaccgtaagtctgtgcattcacttggggagcacctacactgtacaatgcatcgaactagcacgtagaacttatgtaaagaaattttaacgcttagaataagctactaaacctacctctaagtcaagtgcaggcatactctgacttgactagtaaatccagacacttacatgtcaaggccaaaagaagatatccaggacgatcataagtccatgataaaaggctttaaggctaaataatagtagtgttcaaaaaaaaaaatggcctataggccaaaagcaagaacatgaaagccataaggtcgaatatgaaatttgttcacatgcatgaggccaaggccctgtaagaatcgtatagccagaaaataaccggacagagttcctatcaggtcttgattcttgattcttgtcttgttgccttttgccaattgctctatgcatccgtcgatctaagagagctcataacataattcaaagtgagaatatctttgctgtacataataacggttctcatctccttgaattgatttggaaaaccattaagcagaatgacaacttgatcttctttcttaattttttcaccatgttagtaagaagtaaaataattttatgaaataatcaaaattttgttctaaagaaacaatggcattcatttttaatgcatagaacttctactttaagaaaatcttggttgcattcaattttatcatatacaatttatcgaatttattctagattcctagggtagtagttttctcactaattacttgcataaaaaaagattcatgataatgtttgatcgagcatgtttcatcacagttttagcattacttttcctggttgcatccgaatattttcttctagtgtttaatcgagtttctaatagattaacacaaccatcatcttctccttccatagattaaagtctccatatccatcaaatctctcaaaataaaatctggttaaggatgaggccattgaagctgtttccttgaattcttgataccttcaaacaaattctttaacatacaaaaccttgctctgataccactatagtaatcgtactacacaagtctaaaaaaattaaaaggttaatcgaacgtaagactaataaaaatataggatgtaaaatcagaacaatacaagagtagaaaagtaaaacaaagagaacaaaatatttattctagttcattccttaatttgaggcctactccagctctccccaaggagttttctccactataatcacgttgattaccatatccaatagatatagtgtacacttcttgaaacaactcaaagagaaaccctcaaggaattctcacaattgagcttcccaagccgagacaggtcattacaatttctctttctttctctcaatttctctcttacgcacactcatctaatctctatcttttgttctaactcttataatgaaatgagttagagccatttaattatagagtgtacaaatcaagttaacaagacaaggaaagaaaattgaggtataattatcaaatttgaggaaaaggtttttctctctcatcttgctcttccagcttctagcggagccatggcaaaaacaagattcaagatgaatgggaaacctaaatctacaatcaagaaatcaaagaaaaaaggatctaattctgtgtctgatgctactcaaaccaaatccattgatgctgcaattggaattgatccattggagcttttagaggaggaggaagatggcattgacgaattgcaggggagaaggagtttgaattcgaatcatcagcaggacttgttttagcatccactgtctcctcggtcgtctctacaggagcttcaaagaatggaagatgcatgtcaagatttcaagttgttcatccatgctaatgagcaatgtaacagtgcacttgctcaaggtatgaacacaaccccccctaatccttcattctgcttctgtagttcgtaatttggaaaagtttcttaagtctcttggtaatagcagtaaagttaaaatcgagctagaggatatagaagaggaagttaatttttggaagccttctatagtatgttatgttttgggtccgaacccaccattgcatattctagagggctttacgaagagaatctggaaagatagagtcgataaagtatgttttcttgcctatgggatctttattatcaggtttaattctattgaggatcgggacactgtgttgaatggtgggtacattttcttcaatataaggccagttatcatgaaaccattggatccaaacacaaattttaaggaagacgtgaagaacatcccaatatggatccaacatgaggacttggatctcaaatattggggatagtaacccctgttcaaaattgtaggccagttgggtaatcccatcatggcagatgatgtaacgaaaggcagggacagacttaattaccctcgagttctggttgaggttaaaataaaccagaagcttctaggtttactggaatttgaggataaatatggcatgaacactcatgtgggcgttaaatatagatggaagccaataacttgtacaaattgctctggtatgggtcatatggctgctgagtgtagaaagaactcaaaacccaagcaagaatgggtagttaaagatgataaaaggaagaacgttgacaagaacctaactgatgaggaaggcttccagaaagtgactaaaggatggaaggtgatagaataggaggaatcatctaaaacgaaaacaggaaatgctttcagtgtacttgctgaagctaattctactgatgctgatttaacagataaacatgccaaggagcttgacaaaagaacaatggtttctgagggcaataacaagttcaacacaagagaggggggaggtccatctcttgtaaatggataagttcctctgttgtaatgtttgaggatccaataaccagtaaaaacaaagggtaataaagcaatttattagctcacaaggggttagttttgttggtctcctcgagacaagggttaaggcgcctaaactaggagctttatagctaaatgtattttcaggctagtgtttttaaactaatattgcatggcatagaggtgggagaatagccattgcttggaatcctctaagatacaatgtagacattcttaagtgcacaagtcaacttatgcacttaaaagtctctactactaattcatattacagtagcttttttactgtggtatacacatacaatgatcgaatagggagattggagttatggaaggatttaagtggatttgtaactaaagaaagctggttactaatgggggattttagtgacatcttagcaaaggatgaaagaatcgggcacaaagttaaattccatgctacaactgatttcatggattgcatatcgtactgtcaattggaagatgtttaagcaatagggaatttcattacatggaccaaaaaatagcaaggggatgatcgtatcttctccaagattgacagggtaatggctaatcagtcttggttagataattaccctagtactggagctggttttctgagtgaaggcctttttgatcacactccacatgttctaactctttatcctcaatggcaaggagggaagaagccatttaaatacttcagaatgtggaaaaagcaccctgggtttgatacaaagctcagggaaatttggacacaaagatttcatggctccaaaatgtatcagttggtcagtaagcttaaagcactaaaactggtttttaaggacattaataagaagggattctctaatttacaagctgctacactgaaaactaggatataattggagagtattcagtagaaattacagcaggatcctttaaatcatgcactgttagctactgaacaggaagtgaggaattgttttgtgccagtgcagaaagattatgcttccttcttatagcagaaagctaaaatatcatggatacagaatggagattttaatactgctttattccatgcaagtatcaaacaaagaatcaggcagaaccaaattcactcgatagagcaacaagatgggacaagagcacatgaacctcaacaaatcacagatgcttttgtgtcttactaccagtctctgctggggactacattggaagggaggaggaaagtatcaaccagaataataaacagaggcaccactttatcccagaaccaagcagatctgcttacacaaaaatttactagggaggaggtgaaacaagctgtatttgaaattccttgaaataaagcccccagtcaagatggtttttcaagcttcttctttcaagataattgggagatggtgggagaggaggtatactaagttgtcacatcatttctagaaacaggtaaaatactcaaatagataaactccacaatgctaactatagtgcctaaaatgaaatgtccaaatactgttaaagattttagactaatagcttgttgtaatattgtgttcaaaattgcaacaaagcttttttgttttagaattaaagtaatccttccccgatttagtctttcaaaattagggaggcttcatcagaagaagatttattgggcataacatcatgatatgccaagatctagttaggccatatagtaggaaatcaaacaaagctagttgtcttatcaagcttgatcttcaaaaagcctatgacaacatcgagtgggatttcatagaagaaatgcttcttggatttaattttccaaagtccttcattactcctatgatgaattgtgtccgcactcctaaattctcacttatgttttaatgggactttgcatggattttttaaagcaaagagaggccttagacaaggcgatcccatgtcccctttattatttgtcttaggtatggagtacctctcaagaattatggggaaaattggagagaagcaagatttcaaattccatcatagatgtgctggaactaaaataaaccatcatgcttttgcagatgttgtactcctgttttgcaatggtgattttagaagtgtatactatatgctacaaggcctcaagctttgttcattaacctcaggtctgcagccgaatccaacaaagtctgccatttatagcagcaacatgtcaagaatagaactgaacaggattctaaatgcttctgatttcttagtccaacaactacctttcacctacctgggtatacctattttctccaaaagaatttcagggaaggagtgtgttattctagctgataaaatgatagctagaaacttgtcatttgctggcagagtaactttaattaactctgtattgctgactattcactcatactggagctagatcctcttactgcctaagaaagtgatccaaagtatagaagccatttgcaggaactatctttggaaaggtcatgctatgtatcaagggcctggtcttgtggcttgggaatccatttgtcaacctaaatcggctgggggcataggcttcaaaaatgttttagcttggaataaagctgcaatgaggaagtatatatgggcttcgactaacaaagaagacactttatggttgaaaaggattaatagtgtgtatctacacaatgaggaatggtgcagttacaaagtaccaagccaagctatagctagtattgcacttgattggtgagacttaaggagcagtttaagactgctatgaatggcactatggtgttgcaaggaaaatatacagtagccccagggttacaaacttttctgtccagatccaataaaagttcactggagtaaatagatatgggggagattaaacacaccaaaacacagttttgtgttctggctagctatttaacaaagactcaaaataaatgacatattggctaagatgggaattagtgtagatcaacactgtctactatgcaattcacagcctgagtcagcttcacacttattttttgaatgtccaattcaacccaaccgtgtttgcaaaacatcaaggattggctgcaatagaatgctcaatgcaaatccttgactagtctggttcgatggcttggaagagcgaagcttagcagctttaagaagctggtgctagctggtgctctagttagcttggtatatcacatctggaaaatgagaaatatatgttactgggataaagaagtgtgggatacctcgagactttgcaaagaattgaaggctggagtaatacaaagagttgaattgttttggctaaaaaaggtctccagggaagacaaaagagtggtttttaacattgtaatgcagccaattattttacttgtacagaacaaattgtatagatacataacttaggcctgataatctagggtgctattaggttgtaaaaaattttgtgaactaatattagcaaatctcttgatttatcaaaaaaaaaaaaaaaaattgtacagcctaaacaaactaactaaaaaaactagatttagttgataaaattttttctttaacttgaatttctttggattaaaatttccacaattaccctatatactattttcttaacttttttttaattttttaaaaaaaaaaaattatggtttg

SEQ ID NO: 111363 - DNA, 2902 bp, Cannabis sativa
tatatgtataaatatacatatatggtttgaggtttctttcacaagaaagtaatacaattctctctttccctaccatgaaattttctgggactttctttgtcttttttgttgcaccagcaataatttggtctcaaccaagttcaagctcatcatcacctgggtggccaagtttgagtaaaggaagttccttgaaaattgacaaattagaaacagaattcttggtttcagcaaagggtactttctcagctggcttttacaaggtgggcactaatgctttttgtttctcaatatggttcaccaaatctctagacaaaacagttgtgtggatggctaatagggataaaccagttaatgggaaacaatcaagaataacacttcacaaaaatgggaacctggtcttgactgatgcttctggttcaattgtttggtccacagatactttttctgattcatcagctgttgaagctcagcttttggagactggtaactttgtcttgattgatcaagtggagaagaagatcatctggggtagctttaatttccctactgacactctcctgccactgcagcctcttgttatcaacacaactttggtgtctaagaggagtaaaggtacatacttgacaggtgtttataacatgaaatttgatgacaataatgtgttgaatttagtctataatggtcctaaactttcaagtatttattggcctagacaacctggtggtaatgtatttgtaactggtagaacaccttacaatagttctagaatagccattcttgatgagtatggaaagtttttatcaagtgatcaattgcagtttaatgcatatgattatgggattggcccaaaacgaagattaacagtggattatgatgggattttgagattgtacagcctagatgaatcaactggtctttgggaaatatcatggttacctttcaatttagattcttgcttggttgatggtctttgtggtgagtatggtatatgcagctacaagaatccaaaaccagcttgctattgtcctaatggcttcataagaatcgatgtttcggattggtctaaaggctgcaggcctccattgaaactgtctaatgatgcagataaggttgactttattgagcttcttaacacagattactatggttatgatttggaaacatataaacttggagtctctttcaaagaatgtagaaactcatgcttaacagatgttagatgcaaagggtttggatattcgctagatgggcaaggacaatgttttccaaagagttttcttgtaaatggttatcatacaccagattcccatagtgtcatacacatgaaggttccaaaagagatcataccaagctctcaaatgaagttgacaagtgaaaagggagacgaattgagctgttcatctactgaagtacttttcaataatgatgctagaggtgagaagagtaacaaaaatgggtacctcaagtacctaatggcttttgtagctgcttttgccgtcattgaagtactctgttttgccttgtggtggtggttcatctatcgaaagcgcgtcaatgaggagatgatcaacatgggatacatggcaatagcattgggtttcaagagatttacatacttagaattgaaaagggcaactaaaaacttcaaagaagagattggaaaaggcggttttggatcggtttacaaaggggttttggatgatggaagagttgtagcagtgaagagacttgaaggcattttacaaggagatgcagagttttgggcagaagtaagtatcatagggaatataaaccatagaaatcttgtgaagctctggggattttgtgcacaaaagaaccacaaactacttgtatatgactatgtagaaaatggttcattagacaaagtcttgtactcatcaaaaaagctaggatttgatcaaagatacaacattgcagtagggactgcaaaaggcttgtcatatttgcatgaggagtgcttagaatgggtactccattgtgatgtcaagcctcagaacatactactagatgattgcttagaggctaaggtatcagattttgggatgtcaaagcttttcaaagaggcctatgatgttggattctctagagtaagaggcacaagaggttacttggcaccagagtggatgatgaacttgaaaatagattctaaggcagatgtgtacagttatggggttgttgttttagagcttgtaagtggaaaatgtgtgtctaatttcctctcaaactcatctactcatgatcattataatgctcagttcaatcacttggttcaatgggtgagtgagaatatgaaagaagaggggcttaaggaagtaattgatccaaggttgattgatgatgagtttgaccagaagaaggttgagagattggtcaaagttgctcttttgtgtgtgcaagaagatagaaacttaagacccgccatgagtaaagtagtggagcttttagtacaaattgatacacacgtgtaattactacaaattgattacatatggttttcttgttttgaaatatgttgtgctgtgtttgacttttacttttgttgtaatataataatctgaatgattcactttcattgtacatataatagatatatatgtatatttatatatatccaagaaaaaaaatttcaatggtaacgtaacatgattacattttgaataaaatttcgattaatgattgaagtgataaagaatttacattaaggacctaataagtgaaaagaatagaaataagtaattgctaaatcaaccctctaacattttgtttaatgaattattggtagttaaaattaaatttatttgttttcaaaataaaagtaatcttaattaatattatacaatgaaataaaatagggttttttttttcaatattatacataaaa

SEQ ID NO: 111364 - DNA, 3671 bp, Cannabis sativa
  modified_base (3615)..(3646): a, c, t, g, unknown or other
cgggttagttcaggttgattgggcaggttggtattatttttaacccacccaatataaagattgggcgagttatattttcgtcgggtttttcaatttgtaatttttttcggattatcttggtttggtttgggcggtttacaaaagtttatgtacaggcttacttgttattataaattaaaagggttagtcatttacaataacagagtaaataggtaaagggatattttccaaccaaaaacaagcctcgtccacccctaatgcgaacttagccaaaccgtgagcagccatattgattgtacgtttgacatgagaagtagttacattaggaaaaaatgataaaagacaagaaacatctacaatcaactcatataaaagaagagattgcattgaaggaagctctcaaagcattagaaaccatcagtgcgtctgtctctccatgtgaaatcggcaactgctgttataaaacccagtttaagctatggaatagcgctttggcctccatttcatgagatgagaagttgcctatgatcgacatggagagagcagcagtaacatatatgtttgtgtcccgaactatagctctaacaccaataatatttttctttacatctactgcagcatcaatgttcatcttaaatgcaccagcaagtggcggcttccatggtactggatcaggaacatgtgttgctggttgtgatggagcaatggtggcaacaacgtgatacttgagattggctgagcggtaattttgaaggtaggcagaggcaaaggaggcaagatccttagtcggttttatccttagtcggttttagcactttgaccatgaacaactttctttctcccagtccaaatcgaccatagtgtgcaaaagatttgttccatctcagattttgaatatatagaggttagatggaataagtaatcccccttttgcattgaggaacatgcttgccaatcgaacatcaagtttgaaaacctctaaactttttgagcatatttatagctaaagagggcatggccaattgtttcccaagcttgacggaaaacagagcatgttgagttcgtaatgtttttccttcgaactaaagaagtagcaataggtaaggcatcgtggatgactcgtcaggcaaaaattttcacttttagcggtacttggagagacttgaagaatttctaccatgaagaggttgagtttgagcttgaagtaatatcaatttcgtcgagagatgtggcaaggtggtaaccaatttgtatagtataaaaaccagagtgacaatgatgccaaatgagcgtgtcattagagttgaaataactaagtggcactgtcaaaattctgtccacatcaagaggggaaaaaattagtgtagtagagatatgttccattgcctttttgcagttattaagtttgctacaactccattcaaaggcttggtataccgaaaaggaagaaaagtattatgtccctgaattcatggatctgaaccgcacttaactgatcttctctctccaattttccaatacaaacccaccacaaggaggtttttaccccaatgtatgccctgccaagtcaagaaaaaaatatttaaataatgaagaaaaactaagatgatgttattaaaaaatttatgataagatgaagaaaaaaaactatgatgattgagaagctcataaaagtgctctaattcattgtaaattttgagaaaaattacaaaaaccttttataatgattagtgggcttcaaatgattactcaatttatttaaggggtttttacatcacatactaaaatttcctttttttttttttattatagagaagaatttttttcaaaaatattatatttttttcaaaaacactatgtacttttgataatgtgtactgtgttaagtttttcactgttgttctactgttgtttttttagttgttccactgttatttttaattattctgttttgttgtttacggttattttataaaaagataatatttttgtaaaaaaatctatgtaatagtaaaattataaatttttactcaaaatctaatatttttgtaaaaacctctttatttaatctataaacatttggaacatatcaaatgcttacattaaagaaaatgcaaactcactaaaatgaagtacaatgcagtttactaaatatacatctcaacagtaaaaagatacatctcaacaaaaatatcattttacatttaccacccatataaataccttttaaatttaattttatttttaatataagcaaaattattaaaatatactttaacatacattgaaaattgtgacaactacgtaactccgaaaattacaaaaactaagaatagtggaaaatgtataatttgtgaatatggtgaatttttctctctgtacagtaagaatttcgtacaaacttcgttcttaagtttttgaccctcttgtggtctagggttttcaggtctattccctgtatcatttgtatacactgttccattggagctgttgagtgcgatttttcgagtgtgactgccttggggagtgtgtattttcgggcccttttgggatcatggcaagtaaaggaaaagaggtgatggagaggaagcgatcattagcagcatcaacaacttatctatttctctggaagataatgatgagctgggcaaggatgttatagaaaggtcggtggtggttcggctgattactaagaaggctatttttctggggcttctccgtgcagttctggctcgtaaatggagattggcgaaggggtggaaacttgaggaagtagcggctaacaccttcatcatctgtttctccaagagacatgaggcagagttaaatgtgactaatgctccgtggagagtgtgtgatgggtttatgattgttaaacccattcctgaggatggacagtggcggtctgtggactttagtatctcccaggtgtgggtgaaggtttatgagttaccccctcgattttggactacaaaaaatgcgacggcgattgtggaacgtataggttcagaggcaagcatcgatcaaatgtggaaaaatagcttccccactcaataatatgttcggttcagggtcaatatgcaactacgtaaacccttattggttgggctctttcttcctatgctggagggagtgaatctatggtgttatttttaatatgaaaatctcccacaagtttgctataaatgcggaatcattggccatgaagagggtttgtaggaacaaaaaatgattactgatgattttggaaggactgtgcaaatgtatggcccatgggttcgggtggggtctacaatcaaggattgcttttcggactacgctccttatgaaagagaacggttggagcatgaagtggcagaggtgacaagccaggaagaattacgtcgccacatcatgcaagatggcaaagtgtttgagcctgccctcatgggcatggagattcacaaggaggccattgcagaggcggctacctcctcgatcgttgtggcttttggcgaggcttcatcgacggtgcagccagctgctatggcaggggcaacctcgtccatgcaaactaacgaggagcgcaaggaccatagtacagtttgttagaaatattttaccaagatctagatnnnnnnnnnnnnnnnnnnnnnnnnnnnnnnnntatgaatatctctaaaacaatgaaa

SEQ ID NO: 111365 - DNA, 5420 bp, Cannabis sativa
tatatatatatatgatattttgtatactaaatatatatatatctatatatgatattgcttttaagtaactttgaaatagtttttgcgttttgagaggaaagtagttatttttattacttaaatatccaaagcagaagaataccaagatatcacaccagaaattcacttgcaaataacatcaagttactctttctcacagctaggagggaaagcaaccattaggaatgttacggatgttaacataatgttgagtagtaaaaaagtttgttaaaaaaaattattaatgattaatgactttgttggagttataatcaaaagctgatgctactttagaaatgtggagtgttcactgctatgccgatggtttggtcacagaattgatatgatttttcaagatagctttccaaaacattgtgcaaaagtagagttttgggttgcaatttggcttaaaatgtgaaggagattagtattttctctaagtattatcttttgagtgaacaggtggttttttttgtctgcggttatatgtttcattattttgcttttatgtggattgttctgtattttaatttttaatgtgtattatgtctttttcttgaataatatattagtctcatttcatatctttattttcctatccaagtgatgataacttgaatattctcatctagtaatcctttggtgttcccctatattgtaggatttggtggggatcctagtttagaaaaaaaaaaaaaaatcaattaatcttgtggaatggcccaaatgcttgccttcatattttctgttatctaatatcttctaatatacagggacatttcaagcaactcccttagtggaaatattcctctttctcttgggaagttggacaaactcattagtctgtgagtaaccttagttgtccctttttatatttgttagaacaaaaggttcttcagtttatatttaaatttttgatgaatctaactttgaaaatctggttctttaaagcaatttgtcaaacaattttcttgttggacaaataccaactgatggtgtgcttaacaacttcatggaaagctcgtaagtactcacatttatttttgattgtaagataattgatcacgtcatatatgatgttttaagctatttcgttgaaagtaaaaatagaaatgaaaaaaaaagattttttctatttggttttcataatatacaaggaataatcctttcttctcttaacttttggaatttatttcttgtcacttaattgttttttggataaaaatatggaaatgtattgtcaagtattatggccaatctatgtgataagacttttcaaaatgtctgttgtcagtataattgaggtattgatttgataattttcttgcagcttcattggaaatcgtggtctatgtggtaagcaaattaatttgatttgcaaaaatgacagtggaggatctccatcaggctcccaatcctcggactcaggtgagactgcagattataagtgaaattagtgtgacatctgttagtgtaagcatttgtttgtactctttcatctgtatgggataattttaacattgggtggctatttgaatcttcaatattaagtcaagaattctctttttccatgctaccatgggattggcagctgtgtctgtactaggctttaggctttactcttgtattatgtgttagtcttgttttatatgttggtttagtgagcagtaccttttacagccattcttgtaacttaggtaatttcctacatctttttagttatacatctttcatttcttatccaaaataaattttgtatagtttctctagaccctaaaatctaacaattactgtgacatttttctaaaatttattctgttggcaacaattatagtatttctctcaatttatttacatgagatatttgatgtttgatgttctgttttgaatcatatggaaaatcttttgtattgtaggaccaaatcaagctggaaagaagaaatactctggtcggctactaattagtgcatcagcaactgttggggcgcttcttctagtggctcttatgtgcttctggggttgttttctatataagaaatttggaaggcatgacaataagaattttgtgatggacgttggtcgaggtgcttttctacatatatgcaatatttatttatatatatacacacttacaccttggtaagatcctgaattctgtttgttgacattctttttatttcaggtgcatcaattgtaatgttccatggggacttgccctactcttcaaaagacatcattaagaaattggagcatttgacagaggaagatgtgataggtattgggggatttgggcaagtgtacaagctggcgatggacgatggtaatgtttttgccttaaaacgaatcatgaagattaatgagggctttgatcggttttttgagagggaacttgaaattcttggaagtataaagcatcgataccttgtgaatttgaggggctattgcaattctccaacgtcaaagttgttaatctatgacttcctatctggtggtagccttgatgaagctcttcatggtgagatcttatttcctttttctctacaccttagagtcttgttttaaatgaagcaagtaaattgactttatgtcgatatctaattacactagaaggtattatatgtagggttagacatacagattgcagctcttttttgtaccaagttaagaaaacaattgcaaaaagatttagcattgaatttacccattgggtcctagtactggaagcatcaaaaatatcttttattatcatcattaatttatttattatctttaggaaatttcggtaatatgtagatttgtttcttagtagtaatcctctttgagtttgaaatgttaacatgttataatgccaatgaggagaaagatctgagcagtagtttgggatatacaatgaatattattgtggacttattatagagtttacccattgggtcctatcgtcctagtactggaagcatcaatatatcttttattatcattatttgatgacagttaggtaatatgcagatttgttagtggtaatcctgtttgagattgacatgttaacaagttatgatgccattcaggagaaagatctgagcagttagattgggatgtacggttgaatattatcgtgggagcagcaaaagggctggcttacttgcatcatgattgttctcctaggatcatacatcgagacattaagtcgagcaatattttgcttgatggcaaccttgaagctcgagtttctgattttggactagcaaaacttttagaagatgaagaatctcacattacaacaattgttgctggaacatttggttatctagctccgggtaaccattcttagatatttttttttccttacataggttcatgataggatcataaaaaaaaatgtttcttatcttgcctttgcagataataaccatttgaaaatatttttgtttttctaattgcattaaatttgattttatgtgttttaatgctttgtggaagaaatagatttgtaccattcactctgagattttttcatttgaaaaattccataatgaagacactcgactttattagagtgaaagtattgcacaaaatgttattgttgtacttgatatcattcatttgcatatcctcatagtggtattcatgaagttaagattattacaatcagctttctctgacaagtggataacactcatttccatatcaaaatgctccttgccaattcagctatttttcttgactatatatatatatatatgtataaaaaatcattgcagagtatatgcaaagtggcagagcaactgaaaaaagtgatgtatatagttttggggtcctggtgcttgaagtgttgagtgggaagcgaccaacggacgcatcttttattgaaaagggtcttaacattgttggctgggtacgtttattactattctctttctatctcacttgtgaatggtagcagtgtgggttagagaattcttattttggtacattactcatttattagtttcatagtggcggtgggagttgtgaaactacttatttgtttcttccgaagatgttaggtatagaaggctgagaaaatcaatgatctgcagcttcattaatttaaaatattgagttttagcttgagataggatggttattggttttcattgcatcaggatcacagtgcatactaataaagtggttcataattttagggttatgacaagcactttttgttggctatgttgaattatattaataatatgaagtgtgtttcatttttttttttcttttccagttaaattttctgttcacagagaacaggcagagagagattgttgatctacagtgtgaaggagtgcagtcggaaagccttgatgccttaatatcagttgcctatcaatgtgtttcttcaaatccagaagatcgtcccacaatgcacagggttgtccagcatcttgagtctgaagtcatgactccttgcccaagtgatttttatgattcaagttccgagtaagagctagcccagcctagcctgtcgtcaagtcgaatcgaatcagggatgttaaatactgaatcataattgaagctcctacttcaaatgagtagggcaagggcaaacattagaagagaggctctggatttgcaaaatgttcacatctccgttcaattcgttcattctttccgccgatttatgacattagaaggatgcccctcctgcattatctgtgccccttcaaccatttgcatttaataaagtatgttagtggttgcctttccttgtttttgttctcgttttgctagtgtccattcaacttatgttccccacgcgaatgaaaattccacatgattgagtcatgtattttttcttcttttccctccctttttggctccttagatttattaatttgtaatgccctgtagccttctcctaaattaagtgtatatgacatttgtacaaatcaaatgtggttcattttcacagattcttgttttatgccatttttgtaaaatatgttttgattacaattataagctatttgcccaaattagcaatgtgatgtgaacgtgaacgtgttattatcttcgtgttttgcttgcttatattgctttgccttttaatttaatgtcaggtctcgatttattgctcaaattctcgttggtattattattggtaagagtaattagtatttttgcttcttaaaacttgtgatactacaaataatgtcccaatctaatacaattatagaaatgtgttacttttttttactatatttagcagtttgatcggtgatgtaacattttagtcgaggatgaaaaaaagtaatttttttttttttgagaaatttcactgtcattataactggtaatcgtttacaataacagagaaaataggatttgggatttcacccatc

SEQ ID NO: 111366 - DNA, 4286 bp, Cannabis sativa
acccactaaaggggttcaagctgatggggggtgaatacaaggcttttgctaagtttttatatgatcaaggcattaattttcagcacccttttccacatacacatgaaaaaaaaatggttgtgctgaaagaaaacatcgccacatcaccgagactggtttgaccatacttcctcaatcttgtttggatatgatttatttgtggcatgcctttcaatgttatgtttactcaatcaaaaggcttcctacacctgtacttaatgatttaagtccttatgagtatctttctcaacaagaaccttgttacatatttctaaaaccttttggttgcaaatgctgccctcacttgaggccctataataattacaaattgagttttagctctaagccatgcctattttgggggtactctcctcaacataagtggtaatttttgaaagcaaaataggatgtattttcattgctcgtaatgtggtattcaatgaaacacatttttcaacattatccccatcagttgagaactaggtaaactcaccaatctctcaaaattatcctacatctcaatatttcaccaatacaatatgctataaatctagtcattcttttatgcttagaactgcaacatcatctcctgaattgaatgcttcaatctctgctactattgctgctccaaataatcttgatgagccataatctggtgttcttggtgcttctcttgtggttgacactcttgcaactactgtagtacaaacgagttctcatcctactattgcaacatcttcagtacctcctattactgtctctgaaaaacaagttgctgctacttcttcaactaatatatctgttgcaatcacaacttgttttcctatgtccaaaactagagtttaccctattgatatatctactactgctagtgaagctgcacatgttcaagtggctgataggacttttgatcttgctaaaagttcatctaatactattgctcgagttcataaaagggttactcgatctgaacatggaatctacaagttgaaagcctacttagccacaaatcaccctcttcgtgaggctcttttacccactgaactctccaacattcgagctactctcaatgatccgaagtagtttcattccatgaacactgagttcaatgccctcaagattcgcaagatttggacattggttccttaccatcaaagaatgcatctaataggtaataagtgggttcatcaagtaaaacttaatgcagatggtagtcttgatagatgtaaatctccacttgtttccaaagtcgatcttcaataacttggcattgactatgaagagacctttagccccatcgtcaaactaactacttttcacgcagtgttaactcttgttgtctcttcaaattggcatgttcaacaactcaatgttagtaatgcattcctaaatggaactcttaatgaagttatttatatgcagcaacctcctagatttgttgattcctccaaacctacctatttttgcaaactacaaaaagctttatatggttttaagcaagctcctcgggcttagaatgaaaaacataaaaccgcccttcctcacctaaggatttacattgtctaagtctgacaactctctttttgtgtatggctgaggcttaaaccttattcttctcttggtttatgttgatgatatcttggtgactagtccaaatacaaatcttattcaccaactcatttatgatcttaactcctcttttgcactcaaagacttaaggcctttgcattactttcttggagttgaagtgtttcaattcagcactggtatgtacctaacacaaacaaaatatgttactgaccttcttgttaaacttcatctagaaggggctaaagcttatccaagtcctactagctctgcacaaaagttgtctcgaagtgaaggtgctcctttctctgatcctactctctatcacagcacattaggagtgctatagtacttcactttaactcagcctgatgttgcttttattgttaacaagctcagtcaatttgttcaagcttacacagtcactcattgggaagcttgcaaacgactccttaagtcctctaaaggaaccatatctcaatgccttttactaaaaccaatagctgtaatggatcttcatggctactcagatgcggactgggctagttatcccaattataggcgctctactggtggatatgccatttttttggtgaaaacttgatctcttggtttactaagaagcaaaacgtcatcgctcggtctagcatggaaagtgagttttgtactctagcaaacgctgcggctgagatcaaatggatagtctcattacttagtgaactttaggtttctttgtcccaagctcctattttgcgggttgataatcaaggcacttttgcccttgctacgaatcctatttttcacactcaaagcaagcatatcgagatcgatttacactttgtcagtgactacattctagctcaacaactctcaaattgttatgtgtcatctggggatcaagttccagacattttgactaaagccttgtctactaaacgttttgattacttaaaattcaaacttcatgtggccaattccccatatcatttgaggggggtaataacatagttgataactaactctagtttaacaattaattttattaaaaaagttagttagcttttctgttaaaggtctaattgtgtaggtaaaactgtattaaacccttttgtttagttgagctataaataagatgaccacctaagcaattcctaaaatcttctctctttttcctctgtagcaaaatctcttttaggtttgactcatgtttttatggttcctttaattccttgtcatgataaatattttgagttaccttgcattgctggtaaaataaagaaggtctttcctagtctatcaacaataaaatatggataaactattttgttgaaagtttaatatcgtttcctaaggggcaagaggtgttgttgtattctattgtccaagcaattcccacttaaaaaatgattctattttagttgcttattggtacgctgaatgaaatttatatcatgtgtgcttggttttagtttggaacagggtagacaaaataaatgcattggaatacttggcctcatcattcctggcataaatcaaatggatgtatgtactttcatgacattttaacttcttaactaagctcttcttgctaaacaagcaactaaattttataattttcctatttttttggctgcaaagatgtgataaaaggattttagtatcctaatagtatgattgtggatgtgaagctttcgaaaagagcttcttttctttggaagagaattttctggggtcatgatatatggaaagttagggctagatggtttgaaagcaatgatgatactatttgtattacagaggatgtttgcattgctaaggatcatgttaggtgtgcttattcttatcgtggcgaatagattaaaactgggttcttaatctgtatgggcttatggaatattcctctcattggggatataaaggctatagtggtattgtctattctctcttcttcctttcagcacccaaattatcttattaggcactctacggagtctagtcattagattgttaaaattaggtatcagagtgaggttaacttattgagcttaggttatgattttacatcgtctagtcaaatctccttggtgaaaatttatgtgggttttgtctatccctactaaggcaaaatatatttttttggaaagcatctctaaaagttttagacctacttatgctaatttgtcgagacatgggttctcgctcccctcagtttgtcctatttgtttccaaaataatgaaacaatgcttcaagctctatagatgtataattctcttaaaaagattcgatgtgagattgatgattaaaaggttttgatcaattggatggtgccttttcattttttggtgtgcttattaggtgcatgtatactcttggaatgaaagaggtggaagagtttttggttctttgctggaggatttggtgtatacggaatcaatttgtgcatcacaataagctccttgaagatggcatggtgagtttctaggcgctgaattttctatggcagtattaagatgctcaacaacctttttggagtaattatattatcttagaatttagggataacatgaatgaggttctatctcaaaaccaattggcaatgggttgagtagcccattcatcttatatatcacaatttcttttccacacattaacaatgtga

SEQ ID NO: 111367 - DNA, 7858 bp, Cannabis sativa
cgttggaaaagattgatgtgtggttgttatagtgagattctctcacctagaaactcgagaccagactcctataaaaatgacacgtggactcactcttctcgaggaaagcagagatttcagtgagagacctcttgagtataaacctcgcctgaaccagactcagcgggatgatgtgaccatgacagagtctagtcgcatttgtatagctcgcataaaataggaccaaggagcggcttaagaccaacatataccgagatgtatgcgaggactatcgagatcctcctgcgaattgtaaagatcgattctttactgtgcgagctggtccaaatgacccaacaaccccaataacccaataaggatttgtatgccttagattgtcgacttattataagatgttcgtataagcaactcgaacagaacgcagacatcccagattcgactagtcttgtatgtaccttaagcatgcgagcttatgcaagaatatgaacagacaactcgcactatgcgagcttattcgactagtttgcagcaaaatgattattatgggaaaaaggaaatttcttttgcttagttttaggacaaatatagcaaggagtagaagtatgtaaagaactagtgttacattgtaattgattactgagtaaagaaagtcgtttcttagaagggtgtcccaatcttgagtgccacacatcagctgaaacggtgagaacagtttctggtgcaacactggaacccaatatgtaaagtccatccttgttcttacctttgccaatcaccttcctgtgaaagttgtcctgtatgtaaaaattgtcagtatataatttgactttaaagttatcatttttggttaggttgttgacagatatgatgttgaatttatagctagggacatataaaatatcagtgagaattaaatcattatttatgacaatagatccactttgatctacagaaagttgttcattgttaggaagaattaaatttgttttggatatgagataaatgatttgaaataacctgacattgttgcaaatatgccttgttgcttctgaatctataatccaagattcattttggggaacaaccgaattgaaagataagatgatacctgtggtgtctgttgatgtgctaggttctgaatttgtcataccaatatgttgaccagcaaggagattttaaagttgttggtattacacaacattaagttggggaaggagagtagtcccttcatcacaggctccctttggattgttgctggtttgaacctggtttgcaacagcttctttagggtgatttgatttgtatctaggaggatatccatgaattttgtagtatctctccacagtatgaccaagaatattacagtgagtgcagaatggtctgttgcgtttgggttgatgtgtcttagccccttgagaatcaagttttcttgtagcatttttgtcaccttagaatgcaaaagcaaagttttgattagtgttactatctttggcaagacttcctttctgatgctctacttgcgatattaggtgaaagactcgattgatttcaagtaatgggtccatcaaaaggatgatgcttcaaacttgtgtgaaatgatgagagagccccatgagaaaagacattatgtactccatgcgatggtgttcttggagcttcttgactcctccacaagaacaaccattgcaggtacatgatggcctgtagttggataattcttcccaaacagttttgagtcttgtgaagtacatactcactgtttggcttttttgcttcaagttcatcaggccttttcttaagctgtaaatgtgaggaccattcctctgatggaacctgacttttaagtcattccaaatttcttctacactgtagaatgctagaggaaatctctttaaatacagagttaagaatccaagagatgacaatgttattattcctaatccaagcattgtacaatatagattctgaaagagagggtttaggaattgaaccgtcaagaaacccgagtttgttcttcacggatatagccaattgcatcgccctgctccatgaaatatagttgtcctgtctcgtcataagatgagacacaaggttgttacctggattatcattatgatgcaggtaatatggattggaaggatcttcaacatgacttttaatatgtggactttaattttcttgaacagtggagactgtggatcgaacctcaaagtgggacgattaatcgttgttcgacattgttattctagaagaaagatgacagaaccaagaacactaggaacaccaggaaacgatgaagagtagaaagaaaacagagtggaacgccaccttcgccggagaagaaagcacggcaagaaaaagtgggagaagaactaaatctaagggaaagcttgtctttcctgctctgataccatgttgcaaaatgaaaagagaagagaaaaggattgtattaattcagattgaatgaatgaatggaaaatacagagtacaccagtatatataccaacataaattaagctaaccagagttagctaacacactagagttaagcctaaactctaactgtaagtacaggaaaataggaaccaactgtctaattaacaagatagaccaactaacttaaccgacaaaggtgagagacaattcttgatatataaaaatcaatatatcctccttctcagaaaattaaaatattattatttagctatgtgacaatttttgtataacatctttttgcttcttcatttttttgtcgtttagtttattattatgttctcatttgcaactttgaaaattggaaaaagaaatatttgaaaagaatttaaaaacaaacaaaaattggtgattacgtttcatgcagtgactatagtgtgttatgagcagggaaaaacaatatcaatctgttaatctattatctatcctgtttcaaaaaaaaaatattatctatcaaagaaaaaaaaataatttattatcatttaccaaaataaaagaaacacttcatctattacctattattattaaagaaacactttacatgtttaataaaattatttgtccagagcgaatctattacattttacatgtttttatttatggagtatatacaaactagatatttaaatattttattttttgaaaattcatttcaatataaaagaaagaaaaacaaatgtattaacttttttcaaataaaaacaaagcattgtaattaattataattatttttatttctttataatgttaaaaaaattaagttgtcacgtgcaatcactagtatatatatatataaaaaaaaggcagtagtcatcataaattcccaagaggatgtcttcattgattacagagtgtcaagtttaccatgaaaacataaaaaagcagcaattattcaagaaaagataaaaagaaatagaatttgttcctattatgatcctgccatggtaaatcaaaactcaaaagttgagcatattatcaatgtttgaaacacttttctaaacacaaaatcaaattggcaagactttcccggcttctctgtgtcgctcgcccccccatgtacataattttgcaaccataagcgaaaaattaagaaaaaaaactgcaagtcatcatcatcaacaagaacgagaagccattacaacaacgcctcctcaacacatgagacgattacacaaccaaaataggttctaaagttcaagacgaggctttacaaggttgtcactagttgaatgctggtcgtgccatttaagacggactactcgaattttcttccagcctgtatattgtgatctcctgttgcttgaagtaccgtctatcctcttcatcgactagaacgagattcagataatacttgacgctaaatttgttgttgatatttcgatgagttggtgtcagttcgtagggactgagaaacagtctgattggaattgattcacctaagaaaacaaatttaagcattaagcgagtaagaaaaatcattgaatcatcatccaagtttcatcaagtgttaaaatagcaaatgatcaatctctgctactctttttcacaaatctccactaataaataactttacctctgactggagcaccgtccatcaattcaaacttagctagtgtttcagtctcaacatgggtattggtccctgaaccagtagactctctgcgtcggatttctaaatccatatttttaatcttgattcttactagaagaaaatagatcttcccaataataacgtctttcagatgatatctgcaataattataccacaatgttaaatctgtaacagaagcacttacagaattatgttgtcgatatatatacccaattttttattactgaaaaagagcgacggccttggttgcaaaacaagatgtgaatgggtcagaaacatgaaaatccagttttagcttcagaaaagtataacatagatggtaaaaagtgtaatacttacttgcttttgttgtactcaaactcaatgtgcaggcaatcttcaattccaacttccatctgcaaagatgtggatttcaacaatcatccaggggactaacaatgggatatgtaattggacagcacaccgataaaaacagtaaaatacaactaacaaatggaacgtgcatggaagactatctcctattgaaaatatctaacaaagttctaataaaagagatgcagaatttacaattaataaaaaaaaatgtgggggccttaccttgatgctgttgttaattgatggaggtggggtgtagttacgaacctaaatagtaaagttgaaacattagaaactcgaaatgcaatccttgttcatacaaaacataaaatcacaataaagtaaaacgtaaacagaataagtatctcatggtgttacaaccaatcaaagtacacaagacgtaaagaactttcattcaggcatatggtaatttgtagtacatgttagttagacaggctagagacaatcatatacttggatatttgatattttaataggttgaggtatcgggaaaggaaataggaagaaatttagatactagatagcttggtattacattgacctccaataatatcggtccaatgttgaatttccccaacctttgaagggggcaccaaaaggtagagacttatgaaagtaagattgataataactgcaatcatgcactgccacttttggatatcaaagcaatggtttcttatccctcaatcaatcacaaaagaggtaaaaattatacttaaagagtgtctgaaactggagcaaagaatagtacccagcattctctaactaactattgtactgcttcctcgattaggagttaatttcaagcataagcaaataaataataatggagactgaaccctgttctaacttcctcggaattaataaagaaaacacttgagcaatataactgtcgaatttacattttagaaaatataatgagatagaaacatgtaaacagacccacactatatagtaaaaagaaatcaatcattaccataaagtcctggtattccactatgcttccagtgtaaccacggctaattgtaactttcaagacatacctagaaagagcaagccattacaatcccgaataagtacatctcctcaacatcacaaatcacataggagtcaataaaaatggtattcatttaagtgctccatggaggcagcaaatgaaaataataaattaacagtacaaaggtgcaaccagttcaccttagcctcacattcaccccattgtatgtctcataaggcatttcaactgtagaaaactcaaatggaaatgtcttcttttcatatatttctccaggaatgtccagttcacgaactacaatgaattcaacaaacttaaagatcatacaaagtaaaagtattactagaaatccaatcagcagatgtatttatatattcatcatatctagttattgaaatgaaaaagatattatcaactattgctacaatgaaaaataatacagcaagctcaaaataatctgaatctccattttctgaataagttttcatgagaaaatataataaaaataaataaatttcagcattgcagaagtaaaaattgtctcaagacaatagcaaaaagcaaaaagtatactgaccaagggaagtaaagtcatagaagttgcctctgtcaaagtacatctctgcaaagtaaaacacaattaataaagttatcttcatagttatataaggaaaacaaaaactaagaccaatctatctaacaagtatggaattaataattcaatgcagaaaatgggtagaacattagaaaagagcatgcaaaataccctcactacatgtaaaaaaattattccgagtttaaactaggcagattccattggtactaatattataggaaaggttaaatatcaattaaacaatcagtaattcatcttaaatgttcaaacattcattattgtcaggacttcatgaatatcatggaaacaattttttattttttttcacttttagagtcttcacagtatatctcctctttttttaacgacatatcacagagaaaggtcgcatcaaacacttacctatctgaccgagaagctcaacttttataccattgtgttcaaccttctttcctggaactggctcaacagagacctgaaattgtgccacaaaataaaaatatctttagaatataactaaagttaatgtttacaaagaatcagataaatcctatcagtaaacacaccttgccagcaatgttttcttgactttgaaatagcgggaccatcactgtttgaccattttccttcttgaatggaaccttaaatcagaaacaaaagcaaactccaaaatcaagttctatacccacctcttctaattttctaaatttccacttcctacaacagcatcaaatttcaaattacaatcttgcaataattatgttagtacctgcttgcggtttttcgcatcgttaaatgtgattgatatgttacaagatggtttgaaagctccgatcaagtaattctgagaatcaatcaaaaaacaaagttcaattcaatttacatttttttactatgacaagaaaacatagcaatcgcatactgctaatataatcttaccatttttctactgataaaaaccaactcccaaaagctcccttactcaacaaaacctgcaaaaaaattcaaacaaattcacaaaaggcaaatgcatgcatctaaaatcacacaccaaatcacccaagaactcaagcttaaaattttcaaaaaccctagaacttaaacaaaatctcccgcatccccgtacacacacaatcaaatgactcaaattcaacagctaattaagaagaacacgcgttccaatccggcagtacgcatgaattacaaaattcagatactaatcgagatcaaaacgtacagaaaaaatgtcacaacgaaaaagcttcacgtaaatacaatgatcaagtaaattaaattcgtatttgatgtaccttgagcttgaatcttgatcaggaagagattggtgagaaagtgtgttgtgaaaattgaaaagatggaggaaaccctagagtggaaattgaagaatttgggggaaaatcagatgtgagagtgtaaaattaacggatccgaagagcatttggcagttgggtttttggggacgaagactgcttgtgtttctcttctcttgcagtcccagctcagtgcacgtgccttctcacgtgccttcctcacttggctctctatttcttttagggtatttgcggcgaaaccctcctaacgtttcaattgttatacgagtaatttgcagcaaaactctcttaactattaatttacttgtaaaaaaccattcaacctcatattttggtggaaaaaccctccaaagtactgttccgttaacatttttaag

SEQ ID NO: 111368 - DNA, 12577 bp, Cannabis sativa
tatatatatatatttatctataaataaattaaaactaaatagtgaatttaatcaaaattatctcttccaatttatagttaacatccttacataaataaataaataaaaaataattaaagtgacatttcggtacacttcttattttttttcgatattaaaagaaaagtaacttattttattttttatgataatgtaagttgaagttatttaggaccaattgtaaatttttaagaaaattcgaataaggactcaaatgccgaatacaaatttcaaatattttgttacacgcatgacttttctttagtatatgtgtggtaagtaagtattttaattttttttctccgaaaaatttataatgtcaccttaggaggcgtttggttgagagaaataataaaaatataggaaaaagaataagaatagaatcaaatttaaaatttataaaaaaattgataaaaaaaatattaatttttttatcttgcattgaaatgatcattctttctattttattggtccaaaaacaaaaacattcatttcaccaaaataataaaaaagtcattctattagaatcacatacagtatactaatactttaaaatacaaccaaacaaaaaaaataaaataaaaatatcaaaagctaccttattcaaaagccacataagtgcccttgcattcatatcattttagttctaaaatttgaattggccaagttttttttttttttgaaatatcaatttcattaaatttagcattctgagtacaaaataacactaagttcatcaagaacattgtgctcgaaaatgctatgatcaaagagtagtatcgagaattcctaacaacaaaatatgtagttcaatttattgatcatctaacaaaatataaactaacattattcatgaaagaaagtaaaataagacaatcatgaataattaaaccaaaagcgaaactcatcacttaattgaattggccaagttaaagataaaggaaataatggcaacttgtgatatagactatagagaccattaaggtccgtttggtacactttctgtttgaatcgtattatgtcatacatttatttagtgctctaccaaaccttttgtttgaattgtattataacatttttttaatataatttaatataatacggcaacccaaagttcttatttacatttagcatgaaccattgtattaaccaaaggaaaattaatcaaaacatgggtagaaacataataatgtgtactagaaaatgcttcttttgagccaagaaactatgatatgattagcttctacctataccaataaggagactgtttttaaactaactatgatgatattcctacacttgatttcaaacattttttagcaattcatttagactaacttatactttctatctacctccctacattactagattagcactagaaatactattcaaaccagatatacaaaaagccaataatcctattcacaagacccttatatttgcaaatcattttgagacacttccagtggctcgtcttccacctatgcgagcctcgtgtctttgcttctttgtagttggcaattcgtctgaatctgacactgcattgccactgcttgaaggaggattggtacttttccgaatgatgtttcttttccgaatgatgttctcagttggcctacccctttcgtcgatatcattttctacatcgatacaagggatatagctgatatcataactattctcttcagaatctggtacaacacaagcttcgttttctatgcagatagtgggagtagaaccgatctcattactaccctcttcggaagaatttgcaacaataacagtaagttctttacttgaggatgaagaacactcttccttaactggttcagccaaatggtcaggtctctccatatcctgcagtgagattggaataactacatctaatcctatctcttgcaacgttggaaaaccactagatgttccacatattggatccccctcgttaacttccctacagtttatagggagttcattgttcccaaacgtctctaagtcttcgatatggaaccttgagaaaagatcagatgtagattccccgacttggtgatattcttccttatctaatggcgacctggtttcttgacctccagcttcttcagtttcctatttacaggcaaacacaaaggtcacaaatttcaatttcattttaaaggaatcataataatcaggaagtctttttctttttaacgagttcccctttctgtactaacactaaaaatattcgaggagcggaaaatgatatgcaaattccaagcaaagacataaactttaaataaatatcgagagcaaaccacatgcctgactgtttgaactacctctattgatttaattagaaaatcataaggaaggaataatgtacatgtttttatttctggaagagaggtaatgtgtatttagataactttataatcaaataagcatggacctttgcttgttgtcaaatagaaattaaccaaaagataaattacctcgatcggtgacaagatacttctatcataaggaacagatagctgtagatttgcatgagtcgacggccaggcaatatcatctgagtttctatagcactggtcacctcttaagagtgaagtttctgacaaagaaattccacaatcatcaggattggaaatggatgcaatgcctatcttttcaagaaagatcactccaacttcttggttatctgtttcattgggtactacggaggggcattctttaatgctatcggccagatgtgttttatgagaatgatcatggatctcataaattagcttcttcaatacatatcttttcagagaagcctcttcaggtaggaaccaatttctagttaactggaaaaatgttaaggtattcttagtatgctactttacaatgacagcaaatcgatatgattaagaaaacaataaaaaaccaatggttggtgagagatatctcttaaaagtattaataccataatgtactaactcttgttatgcttactctaccaatgcaatcatagcacatacagttaatgtataataggttaagcgggaatcagttccgacatttcaaaaccagaaaactagaagagcaaaatgcatggcaccattgaagttagaaagaatgggtaagcatgtggctgtttcttacttgatgcagtggtgcatcaaaaccaacaagacctcaaaacaaaaacaacaggagtcatcttatcttatatgtgcaaaaaagaagatggtgatggtaataatcaccacatataattcttaaaaagtttaaataaaatgagaatacttacaaatttggaatacttggagatgtcaaaggggctgaactcaagaggagcttcctccagaaaaagctccacataatgtagcaagaaaataccacagtcaaatagattttgctgttgtggcagctgaatcaaaattaaaataaaacaaataaagtcaataaatgatgctgtcttaaagaaatagattaaaaaaaaaactgaatatgactaaaagtacacttataactagccattgatatgcacatttcataacaactcttacatatcgctttaaataagaatttgcataaattaaaagaaaatatacagaaaagcttagtgagacatgatttcgtataatagtcttattaatataggatttccttgtctggctacaatggaaactacaatgcaaccagagaaagaacaaaccaattcaaaggaatgactacgattaaatgattacgataaacttgtagatgaaaacaaagtaggacttcctagatgtcccctcaaaagataatttcctaactgtattgagataccgtcttgtatgccaaacaagttcttttgaatccatgctaaatgtgttagctcaacaccacaggttctaaaatgcctaaggttcaagtgtggcctcttaagaggtcaagatttccattctaaaactaagggagggagttgttgcatatttcagaggtaatcagactgcaggataggtaatcagattgacacctcaggataatctccaaagaagaaagccttcttagttactttgactggggtaatgtgttaagcatataaatgaaaaatgaggcttccaatgacctaatattacattgtcatttcacagtttttggaccagattggagtgagaagctgtgaaatgttggcatctcaggacagcctacaattatgaattacttcaaaagaggaaacctttgaaatgatttctcaagggtggtgcattttgcaaaagggagaactaatctaatcaactaatcttgcattgtaattctcttcaaaattatgccgcagaattctcaaggagttaagtaatctttggtgtagaccccactattcccgtaaattgttagacctatgatattataggtaataaagctaagaagcttcatggaagaatgatttggaggcagcatggtcaatatggctggaaaagaataagagaattgactttgaagaaaggccttgggacaaaattacacactgggtaaccatttggcttttctaggtaaaagagcttcaagggattcaattctctaattaattttatgaaattgctttctctttctataattattttatgttttcagttggtatttttatccactattgcttgcattatctcactatattaagttgaggttttgtataataaaataatagggttaaaacaaagcttccataggagaatagaaaagattcaaagtttaattggctttttccctttgaaactacaattcttgcacagaaaaagcaaagggaatacctccaatggaacaaatctcaattttaagaattttgaagaaacatcttccgctacaccagcgtgcctctctttccattcttcacataggtaactacattttcgtgagatagacgtgaaaaaacaaaatttagtcaaaatcagtgtcagttgtgcaagagttatcagttatatctacgagcattagagaaaataaatctcattttttattctcaaactaatgatagaaaaaatctactaatgtcacaaggtgaagatctattagccacctacctttggatgagattcttcaggcctttgtgactttccttaatagaatccatgtgcaatatgcatggtaccttggatgtggcttcagattcttcacctacaaatcacaagacataaaaagtcccaaagaaaacctttatgaagacaaactagaaaaaaacaaccatatatattctcacctttgagattatgcacttcaccaggatgacagatgacaagcacactccaatgaagactacaatcagaatgcattaataactctcatcagagaacaatatcataacagctatcctctagagatgcaagcaacaaaattccagaataatttctgacctataatttaccggaatgaatatgaagtctttttcaaatagattgactttcctcgtccatttacgaacacgttgaaatgctgccttgccttcataagcactcgatggatctttgtctaaatcagcaagtttccgaaagaaaaagctattgaaaaaatggaaacggtgccttttatctgattgaatcttgttcgccatatatctgagagaaatttatagtcagcttgcttttctgaaactattgaatcataaaagaacaaagtcaaccacatatttatagcctcattcaaatggtccttatagcagagaaactccttagttcaagccttgcaagcataattgtctatcgcaattttccaggttcgcctttttaattgcctaacattaccagatctctaataaaattattcaatgaataaggatgttcaatccatgtcaacatatgagtatgcatgtgaagacaagcaaatttttaatttaaaataaaaatgggtaatctatgctcaaatatctgcaattgcaatttgcaactgcactttctaatttctccaaatttgaaagttgagcccgtctactatttccgatacttgtatcaaaaatacttgagcatcagtcttgttcagtcaagaatatcttaggccatgcctgtgaaatgaacttcaatttgtaaagtcaaaaaatgcacagcacttgcactctccaaattgttgaaaaaatatctcgctgcaattacttagcttaagaattcttttgcattaatcacatttaaaatagaaaaatagaaacataataattgttacagtttatttcatgtgtgtcgcatttaagctaaatcaaaatttccatcgacatggataaagagaaacttttactagatctttacaatcagcgtgaaaacatgtctatatgaaccaatgcatgaaataccaaacaagcaccctccctccgtacactttttattatttttactattttcaaacttgggtgcagtaaggttcaattgcattaaataagttcttatcaaatcagaaatgtgacttatttgctttaagatcgtgcatgaattgagctagcatttggaaaatccaagcaaacatataaatattaaaatattaacttattcaattagaatatgtagaaggaaagtagtaaaaaacagagacagctaaagggaaaaaatcatttatcaatcaaagaaagtttttcctataaattaatattgtttccggttaggggttaaaaatgaaaagtaggcacctgatatttgacataatgaagagcgttgaattgttcaaaacttacttaatataaaagtcgattatagtatcattgataaatgtctctggctctagaagctccatgtctctcttactaataataacagcatcaggatctccttcaggatagataacatcttcaaaacgctcatcataactggaaaacaaaaagcaccatggcggactaagtaacataatttatggcagttagtgatagacatcctatggtcaacataggcaatcttagtgggttgagtatttagggaaataaaagatgtttatgaaaagtctgaatcataattattatagaatcatcatagaatccgatttattaggaaattctatgtagataaattaggagtgcaagggtttgggcatgttcaatcttatttgtaccgagcataagctctaggagagaaacaacatctctccaattacctggatgtgtttgtgtttctttgctgcaataaaatgtcttattttcgtgactctggtataccaattagtaaacagaagagtaggttcaaccgaagtgttaaaggatggcacaatcagaagctatctttttcttgaggagagggacatgaaactaacaaatagtatcaaaggtttatagcactttcagaatctatgtcatagtcatagatatttgggtgaaccagtgaaccttcaacatcaaataataagagcttttatctcgtcttacctagatatggaactcgtaggagagagcatgctactgtgcccaaacaaatgttttccaccacttggtatgttatcactgcgaaagaaaaaatgataagtatacagcatgcttcacattcacatacgaaatctttttataaacaaaggggaaaaaagtgtttttgaaagtaaatgagaaaaggaaaagaaagtgtcccctgcaaatagtgaaaacataaaatttaagccctttttggtcaccaaaatagaaataaaaggtgaatttctaagaaattacaagaaaataatcagattgtcattgataatacagctccaaatgaattcatacatgatcagttctaccattaaaatgttaaaatagttatccatcaacacaaaagtaaatagagaaggggaaaaaattgataagtatttcatgagtcaatagaaaacgcactcaaaatcaatattccatttattgttgtatcccacacctaatgatttgattgcttcgagtgtctcggcccaatcagggtcataaactgaaaaccgcaatgactcaaaacctgcaagtgtatgacagatagttactgctacaacaaattgacaaaaacaaaattactacatgagagatcaatttgctaaaagacatttcctgacagcaaaataaagatggttctacttcttggaacattaacaaagacaacaaatataatttactctcgatgatttttcttttttgatccatcttcatttccacaagtaaatgatccacatatactcttggaatttggaatattaaataaatgaagaaacacttgactaaaaaacataaagttctaaccacacaatacacgggaaaagtttttatccatccaatacatagttttactttttaatatgcaatgctgatcatattccaatgtacttatacattcctctctgatatgttatactcaatcatcaacaaaagaaccaaagttaggaatgaaattttgaagaaaaatgttaaaaatacaataatctgaaaataacatagacacaatttaaactataagagctaaggaaaaatttccactactgcagctccacaatttcactaacctgaagttttactagcatttcctttgatttttgaagtatttaacttaacatgaaggacaacaagggcagtttcgacctgcatccagaaaacatttagatttctaaagtaaaagtaatgaataggaagagaaaatgtaacccaccgattcagaccaatctgattcaatattaataatatcgtcagtagcccactgaaaggagaatgttttgggagtcccagttaaaggggaaccttctagtttgatgcagtggcatgaaaatgttaagcaagatttcatatactgtatgtctcgatataaaaaaaattcagggaagattttaacagttttgtctttgtcatcctgcaagatataataaataaaatgtcggttaagaactaccatcatcagtataaagtaaagaaacacttagtatccaaccaactcctagaagctttttatgagctttaaacaaacaaaaaacaaatcgatgctaaatctcaaactcccagaaatcctaacatcgggtgactctttgtattttcaagagtaaggagttttgtactatatgttgctatggcttgcagtatttttactattttataccctttgtaggactttacacagatgacttagaacatcctttgtactatattattttgttcacttcttataacacctcctaaaactctacttgctcactagctttaaactccaacactcaactttaatttttattgataccgaaaagctaccaattacaacatcagcaagtctcactcaattttgtctcagtataaatatgaggatacatgagttgcataattgcattgaggcatgtatctgaaatcaagctcaaaatacaatgtaatggctaattgttgagtaaagccaatctcgtaataattcaaagatcaatgataatttatcataagaaaaaagtacaacaatcttaaaggtaactagatcatcaactttgccacttaagactacttcaagtagttgtgtagatgaatgtatatgtctgagtggttcaggtttaagtccacgtacatatattgtagtacaaaagaaaaacaagaacaaccactttgtttaaaaaaaaaaaaaagaaggccccagggatttattgttgtacttatcaatgacttagattcttttttcataaaaaaaaaacttcattaataactaaaaacattacaaaagaagatgaggtactcacatccaagaaaaaaaaatgagtcattaattcaacaaagaacaataaaaaaaaaaagaagcatatattactcaattcgttttcaattaactatgtttcacatgcttatcaatatgacttcgattttctcataaattaagtagtagaaaacataaacaactgaagagggcttacaagtttatgtccaccacaatctgcctgtacttgttgtttctccggggaaactgaaattatggagagtttttagtaaaaaaagaaataactgtatgccaaaactaaaattatacaatctcagacacattagttatatttagcatgagaagaatagacaaactttgattctcttcatagcaaaagggtgaagttgacaaagagctcatttcagtactgagggtttcaaatgatattctaccagatcgcttggtctgcaataaaaaatattgttactatatcacagatgactaaatgaggaatcgtgaacttcaattgaaacttattcaaaaattaaatgtctgaatcaagttaaaattcctccaaaatttatatgattataatttatactggaaagatatataaaattaaaacaagaaacaaggttacacgatttacttcatgggatgaagagctagatatcaaataggcatccaccccagagttctccactttgacagtactatctccgagtcgagtattgttcggagatacagcagaatatgtgtactggaaaccaccattaggatcgcgatttactttatgagatgaagagctagatatcaaataggcatccaccccagagttctccactttgacaggactatctccaagtcgagtattgtttggagatacagcagaatatgagtagtggaaacctacacaataaggatgagcgtcttaacattccgttgctacctgcctcaggaatcttgtccctggagtaattatataaacaggaatattggaaagctaactgaaaagtgaggtttgagcaataagaaactctaccttcaccatcaacatcaatagcttcagcatcctggtgtacattctcagtgccacgtgcaactgcagatgaaacttgcagaaacttagaaatattcaacaatcacatataaatttttaaacgagaagtaactcaacaaggcaatctgatattaagcaaaatgataaattttactaactcacactgctattataagaatatatgatttaacaacaaaagtgttaggtttggttccatgacatatttcttacacagaataaataaatataagagtaggcttccactcaggataagttgaccagggatggtaataaacatttctgcatgcattttcaaaataagaaccctatcccaagcagattattcaataaataaaatcccaaaccacaaatccaatacatcacatttcatgaaaaagaatatacatactaaattcctacagatgcaatcaagtttaagctaatcgtcccatctctaaaccatcatggcaggaaatgaagcttatggtgcacacagccaactcaatagagatcatcccaaattgttatagaagctaaatataaacatctctttacttaaaagtttccaaacccaatgaaaaaaaaaagtatttaagcaagctggaattgagaatttgcaacatttaaataaaaattggctctccacttgtttaatactctttaaaaaaaaacaaaacaccagtggaaacttattccccattcaatctcatccatttcaaccaatctggtttgtctcatcaatcttgttaacttatgtaacattcaaatgataaatacgtatatgaataaacagaaataaagtttcttccaaattcaaatgaaatgataaacaacaacaatctaaagaatattttctcatcaaaatgagaaagtgaaaaagaaatcagcaacaactaccattaatactaataatatacatcatgaaaacttgatatgaagccatccacccttttgatattttaacacaaccaaacataacatgtcaaaaaaaagacatcagacagattaagaaataacctgatgagcaactaatcaatcatagattcatagcaagataaataaatggaaagagcaaccttccagtccgattaaccttccttatttctaaattaagtcacccagtaagcccctttctctaccatgattccagttcttcgatatataacatgaagcagtaaactttcaaatatttataattttttaaaaccagtaatgctttgaagtttaaaatcccatcacatgcacagaaatatcaaatagctttacattaaaataagaagagaataaaagcccattaccaatttaccaccaaccaacaatgaaagagagagaatctctctcgtacccaaaaacaaacacttttttttttaaaaaaaaaaaatgatctaaaaaaagggattgaattaaggacttacagatttcgagaacgtggtatttgtttatgggggactgatcaggaatattattagccttgttcttgtttccatggattccgagtttccgaggagggaactttttgggaacctgctcgatgttcatatcgttgtcgtcaaactcgaacacgccgaactttttctccgctgccgtcttcgtcgtcgtgttcttcttcttcttcttcctctcattcatggtcgtggattgagtgagtgaagagagtttggaatccgagtcagagtcggtccttagtccttaccctacccaagaaaaaaagccattaatggaaacacaattcaaattaaatctaaatttatatgatttttttttggtaataatataatattggaaaggagagaaaggaacgggtctactctttggatccggtcacattgaccatattcattttggtggtcttcttttcttttttttttttttttttttggctaattaaaatttt

SEQ ID NO: 111369 - DNA, 2162 bp, Cannabis sativa
cactaaaaacttataccgttggttttttaaattaataacacacaagttgttgaaatattttttcttacctattgcgtccgttataaaatgaaacataaatataggtaaagacaaatcacagattttcatgtaattttttctacctaaatttaaaaattttaaaataattttatataacaaaaataacttttataataaaataaataaatttaaaaagtaatcgtttaaacttttctcaactacataatatcttaaactttttatattaacaccagcagaatatgttgacactaactaatccaaacacacttttcattacaattattcttatcatattatcattaaactttgaataatcaaacttacaattttactaatgtaaagattttgattatgatttttttttaatcgaactaataatcttatatatggggagtttatatatacacttttaataaaatacaatacgaaaattttaaattttaatatttttgtgaaacttatataaataaagaaattcataaatagagcatcttcaaatctaaatataagatctttaattaatcaaagagaatgtagataatgacaataattttcatgacaaaaagaaaacaaacaaaactaaagaattaaattaaggagcatctccaaatctaaatataagatcttgctctttacaataataactacacattttgataataggattacaatgaaaaatatttgacaacaacaaccatatgagccaaattatcatcctatagttatatagtttcttaatattaactagagtcgatagtgtttaaataggaaaatccactcaattaataagacacacaagcataaagtaagaacaccagacctacaaaacatgaagttttaaaaagagaagttccaagcacaaaatcagagagaaggtaagccgaaagatcaataataaaatgaaaagcagaaatcaacaaaaataaaatctaaagaagaaaaattgaatcaaaaccatcaagaaaaaataatgtttctaaacaatattcaatataacagtaatgtaaatacaagtaataacgaattaaacaaatgtacatgcagaatagagattttactcaaaggttatacttctcaatattactactaaaagctcaactacgtacttgagcatccaagagtcctaattttttggtttttatttttttaaacactaatttaatttgtaataataatttttttttataacaagtgataataataagtttaaaaaaaactaaaaattaaaccccttttttttccaataaaaaattaaacctatctttgtatttaagaaagaaacaaaaggtttgtgatgccaattatttggttatttattgaagtagttttgttacatatatatataaattgtggtctaatttttaaaaccaatttccagtataaactataattacattacatatatgttatttttttttttatggtagataaattttagagttgtcaattactaaaataatttttatagaaaaatatactaaattttatatggaaaaaatgatattttaaaatgacatatacttttataaatattggtacatatttttgcaatctattcttctaactgattggcaataacaaaagcacttttattataaaaaaaaagtcaaaaggagtgtcaggtgggatacaggaagcaaatgatcgtgcacactgtaaactttcaatcattcatgatgactgatgatatatagtgtcaatttcttgtgttgtgagtcgaagaaaattgactctaaacccactaataggaaaggttttgaagttggtgggtcccattaaaaatatgctgattcaagtgtgatgtggcattcatcacacaacgtctactcatatctgactaggaaaacttttggagctacctttgtaaagcacaaagaaagaagtggagtgacctcctttttgtaaagagaggtataaaattattagattatacctataatcacatacatatgtttttctaaagttagtgaagacttgatttttatgtacaaaatcaaatttattatttataataattaatgaatagaaaataataagggcattttacataaatgtatacatttttttaaataattacaaaaaatgtgtaaaaaaacacaattttaaaaatacacatattt

SEQ ID NO: 111370 - DNA, 4502 bp, Cannabis sativa
  modified_base (35)..(40): a, c, t, g, unknown or other
tagggtgtttaaacaacatacttatgagtagatcnnnnnncctggtaaaatatattccatcattatgttatgttagattgtgttgtactgtattatattgtatatagtaatgtgttgggtggtattgtattatattattttaatatagtattattaactattgtattaataggttgtgcaaaattatttatcttttaccataaacctgaccttgactccaaaccttgccccggccggccacgaactttggactcgaatcctggacccagaaacaaacttcaatcctagactgggacaccaagccccaactccggaccccgacctagatcctgagcacctgcccccgaccctgaccccaacctcgaacctagcttcagacttcaaccccgaccccagactctggcccaacctctgaacccaaccccaaacccaagcctcagaccatttctaaatattataatacaagctaatgaggactacttcttatgtattaaataatacgattcatattctattaaaatttgtgatcgtaataattaacacaatacataataatatccaaaaatagtgttcttcttattttaataaaatacaactccttataggacttgccaaatagaccgttaatgtttttaaatatgatatgtttacgttttattttgtaacatttcaaaatattttatgttttgaagaacattatattgttgtactttttttttgtaaaagtatttaataaatgtttttaaagtattgtattttatttttatttttattttgctttaaatataattaatattttcaaaagcctaattttttaaaattttacatgtaataaattttaagatacataatgaaaattaaaaaattagatacaaaagtgtaatattttaaaaatattaagtatactcaccacccaaggtagataaaatattaaggttatgttgatcatgaacattgtatgttttttttttagagttctggttctagagccttcatgatgcatgctctctggtttccctccagtacccaaactgggtttttggtccacccaaattggttttgtggtggtatttggtacctcttttggggttttaatcatcatcatttcattttctccttcattaattgcaacattaatagtcctgacgaatattatctccaaaatctttcttcagaccaaaatttatactgcatttattgtcttccagtttctcgtttaggccttaatttgtatctgcatttattatcttcttctcttttcttctaccaagtatctaactatcaaatcaccagatatcttttaaacccaatttccttcattaaggtggcggcgaggagaatcgaaggagttgatgatgcttgggagaatggagtaatcatgatatctattaagattagaggccaagctatgatcagaggcaagccaagaggtactcttcatagtctattttattccttatataaagatagatttaggttaatttgtttttcaccatctctcttctgtatcttctctctctctgtaattgttctgggtaatagttctaagatggatacacttaatccttttccttctcagtctttagcccttacccctgatgaaaacactgtgtatactcttgctgatgtccctgatgaatccactgataatatcaaccttctcttaaaattgttcactgtcaagcattatagtcgaccttccttgatcaaaactttatctccagtttggacctctcagtgtaggtttcctgtagtcatctctgaacactctgatgggctatttctggtcacttttggttgcgaaggtgataagaggagaattcttgatggacagccatggcattttgcccagagtctcactatttttgctgctcctgatgcttcttttcccattactcctgatcagcttcactatgttcctttctggattcaggcgtatggtattcctttccgttgtaagtcttttgatttagccaaaatcattgcttcgggtgtgggtgatctaattcaagtagatcataccactgtgaaggagggaactgggccctatcttcgcatcagattgcttattgatgttaacaagcctatcagacgaggcattcatgttcgtttttttaagatgggtagggaattcatcaaatggctagatttcaaatatgaaaggctgcctgattattgtctttactgtggcatgcttgatcacatcaaaaagtattgccatgcataccttcagaagtgtgatgagtctatttccccacctccttgtccttatgatctccctcttagaggtaaagaaaagcctactgaaaggcaatctccttttcaatatcctcaccctccagctataactatcactgatatggatcttactggctttcctcatggaagtcaattccctaatccttttctgaactacccatttagttttactcctctgctgaactctaatgttgcctcggttgctggtctgactggctcttgtcaatcttataatgtcatgatccctactcctgtgaatcctaaccattctttgggattttctctgtcgggttcgtctttgtctgccccgttgcatactgactctgttattgtcaatgattccccgggtttcaccaatcctgaattgacttctgctgctcgctctcttgctgaagctttgccttctttgattctcaactcaagtcaggcctctgccgtctctgtggtggaaacctccttgcctgattctcaagttcgaggtaaaggtttggcgtgtgcttctggggtcaaaaggcccacttttcaagcatgtcaagctaattttgggggttcactgcgctctatgctcaaacgagcaagagctggtgatgttgatgtaagtggtttttcttcaattcctgatgctgaacaggcgggtgatgcggagcacacccgcccagaaaaatgagctttataagttggaatgctcgaggtttggggaactctcgagcattcaatcgactttcccacatgatcaagtctcacaaacctgttcttatttttttgatggaaactaggcttaaaccgaattcggtagataggtttaaagctttgttaggttttgattttggtcttgaaatccctaggcagtattttggagggggtttacttttgttgtggaaggctgatatttctgtaaatattttaaactattcctctaatcatatagattgtactgtctgttttaatactaatgaactatggcatttcacttgtttttatggttctcctgttcattctcagaagtattttacttggaaacttttgcatgatatttattataatgcttctcatttgccttggttaataatgggggattttaatagttatctttttagtattgataagcttgggggtcaggcctctgatcaggttgttatgtcccttttctcagattttatcaataaattttctatgtttcctcttccttatgtgggttgcaaatatacatggactaataacactataagtgaacgtttagattgggtagtaggttctgagtcttggtgtgatctttttcctgaaaatagtttacatcatttaggttattatgggtctgatcatcgtgctttaaaacttctttttgtcaatgatactagtaggcctcttaattttgttaataagcgattccgttttgaaaatagttggttagaggaccctgatttttatcaccttatgcagaataaatggcatgattttctaactcataattcaccttccaatcactttaattatttcttagataaacaagctcattgtgttagccttttaaaagattggaataagactcataatcatctttttaaatgtagaatccggaaattgactcaggaaatagaaaattttcaaaatcaagatgttcttactcaggcagatagacttcatctgaataaattgaattcaatgctggatgctcttctctataaggaagaagtctattggaaacaaagggctagggtgaggtggcttaaagctggtgataaaaacaccaaattttttcataaacaggccactcttaggagaaaaactaatactattaagtatctcaaagataatgagggtaatgtggttaatactcaagaggggatagctaacttagttatttctcatttttctgacctttttaatacccaaggttgtaatgttgatgctgctgctgtaatttttgatgctttgggtcctgggttggaaacttctgatgttgaatttcttgatcaggattttactgctgaagaggttaaaaaggctgtttttcaattgtctggggataaggcagtgggattagatggttttaatgcttatttttaccaaaagaattgggttgttctaggtagagattttactagtgctattttagattgtcttaacaaagatattaatttttctaaaataaattctactcttattgtcctaatacctaaaaaacaacatgctaataagttaggtgattttagacctattagtctttgtaccactttttataa

SEQ ID NO: 111371 - DNA, 1458 bp, Cannabis sativa
tttgcatttttacggaattttatataaaaactcctattgcaactagtgctgcaacttactttgtaacaaaaaattgtatagaaatccctattacaactagcgttgcaattactttaaaaattcaaatcgtaaatttaaaagaaaaaaaagttaaaaaagtaatatacgaggtaattgaaaaaaaaataagaaaataaagggaagaaattgacatacaatgttagtattcttctattacattactacatacaatgttgccggcttttaggtttggctttataattttctatagtcaatagtccactatataaatatttatatagacaccaaaaagaaattttccaaaataaggtatcaattcatcaatcaaagtcaataataaatcttcttgtaaataataaaaagttgaagaaaataaagaaattaattgtatcaagactatttattacttgtatattaatcactaatgaatgaaaatgaaatccctttatgaatatttctcagactcaacaatggtcaatggcctctgcttaattgatttcatttactatgaatgtggtcatacccagctactactctattctccaaatctgtaacagaaaaaaaaaaaatatttactttgattttttctattaaatttataatattttatgtattttttccaaagagaaggtgttgggaatatgtatttttcatctaatcaattttttttaatgaatatttcatatttcgattcaatctaattatttaataatttattaaaatgtaaattgtcatttattttattatcattaaagttaaataaatattgatataaaatatcttttttaaataaatttgcttatgaattttcttattagttggtgatatacctactccaatctattttgttgttgtaatgaattctattcatcaatgataaaaggttttctcattaaaaaaaacagcaacaaaaattaaacaaatgtaatttatgtatccaaattacaacaacacaccaaaatacaaaaaataaaaaataacaatttccaaatccaaataaaaaagttccatgttcaacaacacctaaacaacaattaatatatagtatactatatttaattaatcatatattagcttttgaagctatattatatcccatttctttgaattttataacatttataattttgaataagcgtaaattaaattatatcgattattattttgaaatattgaaacggcacaatatttaaattaaattgaatctataattagtggtaaactggacaaagtcacaaacaactctttttgtttacattccttcataattataaattaaaatttagttttcagcagctggacaaagaaaaaagagagctgttggtggcgttgagttggtcgatttggaacgcgagaaatgataaggtgtggcaaaataaaagagtcggtgtggataacattgttacgtcagcaaaa

SEQ ID NO: 111372 - DNA, 5056 bp, Cannabis sativa
  modified_base (5022)..(5030): a, c, t, g, unknown or other
cccccccagccaatcctcccaacttgcagccgtgagcgcatttgtacgcacttgccacatgcaaccaaaccatatggctcttgtgaactcacagctccagagcaagtgaagagaattttcttcatccatgttgcaaagagggcagagggcgttatccaaggcaaacaccatactaagcctagctttggtgagaaggctattggacagtattttccaccatatcatcttaagacggttgtgaatcctcactccccaaacggttttccatttagtatactcaggccggtttgtatcaatgttcaaggacaaacggtaggcagattttatagagaactcaccactcggttctggcaggcagattgtatcaaccaatactcaggctggaagtgatatattcagaatccgtctagtgtcatcgaaattaaaccactgtctaattaatgcaagatcccactcattatttctgatgaaattacttaccaagctaattccacctgtggcgtcaactcggggtattggttggaggcgcccacctggcacccaaggatcgaaccagatggaagtggttctaccatctccaatcctcctacagagaccttccatgagaagaggacgccccctaagaatggccttccacattaatgagtctgagttctttatttccaagtccaagaaactttggtttggaaagtatttgttcttcattagctgcccccataggctattctcatccatcagaattttccaggcccatttcaacaggaacgccttattagtagcaagtgtcgatcgaaatccgaggcccccagccaccttgggggtgcatagttttccccatgacacagtgtgaagtgttcgtttgtcatccacgtctccacactagaagtctctaagaactctgtcaatttgattggccgttgtgaccgggataacatctgaagaagttacataatttgagagtgttgatcccacggatttgactaagcatgtctttccggcgctagaaaggagtctagccttccaaccttgaacacccttaagcactctctcaactaggtgattcgtatcctcagttcttttgagcgatcggaataggggcagtccgagatatgtagctttgctattcattttcttcattcccagcagctgagaaatagcttgagcttttcttgatgagacacccttcgaaaagaaaattgaagacttagcctcattaacttcctgacccgaccagttgcaatacgtgtttaggcagtcaaggaatgatcttgcttctttgatggtagcttgcccgaatagaataatgtcatccgcgaacatgagatgagtaattgccgagcctcttctagatagtttaaatcccttcaggaggccagccttttctttggagaatagcaatcttgataaagtttcatccgcaagaataaatagggaaggggagagtggatcaccttgtctcaaaccttgatcaggtgtgaattttcccgcaatggacccattgagcagcactttaactgctgaaaccgaaatgcaggttttaatccactccgtgaaagtatttgggaacccagcagaccgagaaccttaatgacaaactcccaacccattctatcataggcattctctaagtcgattttgatgagcatgtaacccccttttccttttctcttcttcatagagtgaacaatttcctactcgatcattgtgttctcagcaatgtatcgacctttgacaaagtccgcttggttgggagaaataatcttttgaagaaaaggtcacaatagagtggcaataatcttcgaaattactttgtaagtagtgttgcacagcgcaatcgggcgataatcagtcacaagagagggggagtccttcttcgggattagaacaatggaggtatctttgatatagcgcggcagatcattatgattgaaaaaatgggagatcacttggaagagatcagagtgtaccgtgttccagtggtgattatagaagcttggagggaatccgtctggccccggggccttgtcttttcccatttcagataacgcctcttccatctcactctcggacggaattgaacatagaatattcccttcctctgtactgattacattttggaataggtctgaaggaattgaggcagagccatccctttgatttcgaaagccatcgctgaacttcttgaggaagcaattggcaatttgttgctggtctctaatccattccccgtcaagtgtgtctttaatgcattggatatagtttctccggtgacgaactatggtagaggccataaagaatttagagcacttgtccccctcttgcagccattgcactctagacttttgtttccagtgtatttcttccctgagaagggcttcattaagctgaaatttcgcttgttcaatcgtcgatccattaaacgggtcttccatttcaaccttttgcaaaagatcatttgcagcatggacttgctttttgacttcctggaattgaattttgttccaggatttgagcttgtctcgagtagcttttaattttctattgaagctaaccattgggttgtggtgccgctgactagcccaagcttccttaaccacccaaacacatctaggatccctcatccacatattttcatatttgaaggaacgtcttttgcaatttacaccagctgtagtatccaagagaagcggtctgtggtcagaaccggtagctgaaaggtgcgtgatgacggcgttagggaagagaatgcgccaatctggcgaagccagcccatgatcaagtcttgctcttttagtagttcttcccaggtagctgcaattaccatctttgatccaagtaaagccagggcccagatggccaagatcaaccaatccaactctctgaaccattcgcctaaaatcgaatgcgtatctagatgaattgcttcttctaacataattgaagcattcagagtccttcagagtcccgttcatgtcgccacaaagtaatattggtgtacccgcacccagagctagctcccctgtatgagtccagaattcttccttatcgctgctatgcggtggcccataagtaccaaaaaacttccagtggcatccagggggatcagaagaaatttcaccaattattaagaaacggcttgcgaattggattttacaattaactcctttcattcagcataatccaagtccccccgcactaccaaatggaggaacataatgtgaattctcgaacttcaacttgttgcaaattctagaaaatttggtgcttagtaaccgaacttcagataggattaccacttcgggattatgttgacggacaagcgccgccagttgtcgaactgtcgtggaattcccgagcccacgacaattctaggataagattttcatggcgactttggagacttttccgggcaagtctccgtagccccaaatcgaaaatcctcatgtctgttaacttggttgtcttgactagtcgacacatcagggatttcagtgatgatgcagttattgctaggtcgttcattcttctcaattacgacaaagtgattatctaaattcacagttaagtcgaaagaactaccttcgcttgaattcaacttcctcttctcgaaatggctaggttccaagccatggttctcttcatcaccatctgccccctccaaaataggatgttcagcttctgtctctatcgacctctcttgtgcctccagtgctggcctgcctcccaaagtaccgttgagagttgcctctggtaaagcatcagtacagcgggcaagttgcagttccagaattaaaacagcttttgtattatccaaagggggcaacttctccgatacctgggagataaaccatggggagctgggtaataaccattccgtctttctccgcctcgtcgtcggagacaattcgtttcttggagggaagttgtcttcgacattctctcagttcatccgaatcgccatttttaagtgccttctgcacttttatctggttccgtagagttgggtcattgattagcctcttctggagtgtccaatcctggaaccatttggcaagggaagtggagaatgttgatttttcatttgcgtccttctttagccacaccccatacattgggtataaattcccctgttcatccttgattacagtgggtggtttgaagcaaaggctttgatcgtgagttaagacaccgcatttgaagcacattttggggagtttttcatacttatactgcaaccacaggtccttgagacgttgtctacggaggaagaatccagagaataggggcttgttgaggtcgattgtggctctaaatcgtagagaactcataccaacgacatcctcaatacccgaaggaagctcatacacaggagaggctttggatgcgagttccttcaggttggataggttccagtagaatggagggatgctattgatgttcccccaaatgggtgttttatcaaatcttacctcagaaggagatagccatgatggccatggcatgattacaatgagagccccacaaacgaaccatgggtgacgggctaggacattcaaagcatcattacgattagcaaatgtgaactgtataatgttatcatcgagttccttccatttccatccctttatcgcattccatgaaagtttgagagagccctgaatcgcaaccttacctagtttataccggctgattattttccccagtaggacttggttggcctcctctggctcgtccacttcactagggttaagggcaaatgctatgtcatcgtgcgaaatctgaacagcatcctggaacatgttagtaacagctgcaggatccattgagtgtgataaccaactggggattatagtagtcgtttgagatgagaagagcaaaactctataaacttctatgaagtaggctcctcaaagagcattttttacacattttaaatcccgctaatgaaaaaaaaaagaaaaatgtattttttaaatacattggattttcgaattttgcaatatatttatagaaaattaaatnnnnnnnnnaaattaatttttaattaatttttgga

SEQ ID NO: 111373 - DNA, 5326 bp, Cannabis sativa
cacacaaataaacaaaaaaaaaaaaaaaaatactgttgcacggaattttaaatatttttacagtttttaaaattttatttatagtacatacggtattttgaagtttttatattgtactattagagtgttgttattttattgttagttttttgttatttgtatattatttttatataaattatattattttttttttgagaatataaattatattatctgaaagttatttttctgttgtttgatatgattttttaaacaaaaaaaataaacttaaagtataaattttttaccaaatataatattttgtgtaaatttttttttgaaaaaaaaaaacatttttgtaaataacacaaaagctcaaggtgattctgtaagaaaagtaatgtttcttcgctctcatcggcttcaaaatttgatgttttcttttaattaattttttaatcaacagtagtattatattttaattaattaattattattaataggcattttaaataaagtgaaacgctctcgaaaaagctcataatacaaaaacttgttgtattgaacccagaaaagaaaagcagacgagaaagaatcgccaaaccccacaaacaaccaatcgttagccctaattttttcccgagaaaataataatcccacttgaacaaaacaactacaacactttcttcttccactttttcaatttccttatgtgatgcatcagaagaaatcagaagctcagatcggaaaagaaagcagcggcgtctcttccgatttcaacccaacccctccacttctattccattctcatcatcatcattattctcacaatccatcttcttctctgtctcattcatcaatctcaattcaatcccttacaaacgacgatatcaacgctcaatttcatcccaaaattcatttgccgccttacccatctcaagctcttcctcctaatgatctaacgatccctcctacgacgccgtataagcgtccccttctcacccacaacgcttcttctctctctaaatctccgaccctttacaagttccctactgccaagcaaaacccatctctcaattccatttctttatccgccaagactgctgcttttcgcctcattcgacgcctcaaccgtctccgccgcctggtgattcttctctctctgccattcttttacttcctcgtctcacatcccagccactctttcttgattgattttctctccgctttcgctttctctgctgctctcctcttctccctcaatctcgcccttcctcgcctcccctcgattcgattgttcctctcgaggtctctcccgctaaaactcaagtccagaccgcctttgccggtgttttggtcaattgggtctcggcccaaatcggagaagagagtgaattccggttgctcggttcaggtataccgaaacggcgacatttacgagggagaattccataagggaaagtgctccgggagtggagtgtattattataacatgagcgggagatacgaaggtgattgggttgacgggaagtatgatggttatggggttgagacttgggctcgagggagccgttaccgaggccagtataggcagggactgagacacggtttcggggtttatagattttataccggtgacgtttatgccggggaatggtctaatggacagagtcatgggtgtggtgttcatacatgtgaggatgggagccgttatgttggtgaattcaagtggggcgttaagcatgggcttggtcactaccatttcaggtaattctccccattaaagtctgtaggattcaatgtttaactggacatttttggatatgtgatttgtgttttatttatattttttacgtgtttaattgaatttttctggtgctgctaatccagaggaattagcataaactttcgcaaaaagaaagaaacatctttcttgtggtgtttggtggtgacttcatgcaagtctggtggttctatcggttgcctaataagtagatgtacatgttatttgataaagacttaacaatcatgaagatggtttttaaattttaaagattttctgttattacctattctgataagtaaacagtaaaatctcgcttagaaaggaatgtgcataaattcttgagccatcttacaattatgggactcctctttttggccgttttatacattttgcctcttgcttactttattacaatagtaacatttgttccttgaattttgaaattaattttgtgattttcttgttgctgttattagatttgcatttctaatatgtttctattttaaccacaaaattatttgttggattcgttaagtatatggtgctgctgtacaacaccagaaattttatgtgttagtatgtattagattgttttgtatcttttataccgaggctgctgtttcttttattcagaaatggggatacatatgctggagaatattttgctgacaagatgcatggctttggagtttatcgattcgccaatggtcaccgttatgagggggcctggcacgagggtagaaggcaaggcctagggatgtatacattcagaaatggcgaaacacaatctggtcactggcaaaatggagttcttgatattccaagcacacaaagtacaactcaccctgtttctcccgtggctgtttatcattccaaagtactcaatgccgtccaggtattgaaagtgcagtcaaggaacccctttttgtgattgaaaatgataaaagattgtttaacgaaatatgttttcgttcttttttcactatcaggaagcaagaagagcagctgagaaagcttatgatgtggccaaggttgatgaaagggtgagccgagctgtagcggctgcaaacagggcagccaatgcagctagaggagcagcagttaaagctgtccagaaacaaatgattcaaaatagtaacgacagcactccaattcccgtcatgtgagaaccccaacagaataacagcaactattgatcagtgaaaaaaaaaatatccatctcatggcaacattaagaaatgccggcttctgcggttttttctttccaagtagcttcagcttcatgttctgtcttctacatctcgctttgagaggatataatttgagtgcctctccaactcgattgcagggagcgcggaagtagtaatctgaagaggtgtaaacaatgtccatctatattgcctttagaaaaatcttatgtatacagtccaagtccaaatatatagagcgaaagcgaatatggcgtcctccaccagttcatagagagaaagatggcgataatgccatccttttccttcgtcgttcttcttcttctttttcaagtgttactaattttgctttttaaatattttggttcatttttgtaaagatgagttagatgtaatgtaagggaggtgctggcgcctaggtaaaattggagtcagccactgctatatgtgaaattgtcgccatttttaaccaagtactgtgttatattagctaagagagttatgaaataataacaatggtatataaccaataacaatttggttaactcagaatcttttaccaagctagtttgttgtacttgatgatcgtactgatatatgtatatataatgaccactggcattgccatgaaactttttatgttgaaaagtagaattgcccataataatataaactaccccaacaaaaatggccaagcacgagcatctcactctagatattttcatcatgacagtaatgcttaatgctatgtttggtagaggtgaaaaaagagagggtaatagtagaggtgacaagagctagatgtgagggaaaaccctaaagactcgcaaatttctacagtatttttactataaaaatgtagaaataatttcatgtaaaagagtggtttatgatgtgtttggtgagagggatggagagaaagatgatgcattacttgaagaaggatgaagaggacagtgagaatattttgtattgtttggtaagttaaagaaggagaaaatttattcatttgcttgatattagaatggagtcctataaaaatggtgcattgatatatgctagttatggttggtaaattttaaaatgactcgacttgaaattgatataaataagttagtttggttgacaaatttaataatcgtgttgtgtttgtgtttttgtttgaaatttcgacatgtttaataattgttttgtgtttgtatttaccttaattatgtcaagcagtaattttataacacgaatagcagaagataaaatgagttgataatcttgtattaattaacttgtagaatatataattaagttttttgatattgtgttagattaaaactatgtattctatgtgtttgtgtgataggtttcatattctatgtgtttatgtgataggtttcataattttttttattgtagttaatagttatgtttaattatgttaattttgtgctctgacagtctcaagtttgtcacatgacatgtttattaaatctattaatgtcatgtttgtgcttatatttattttagagcatctccaacagagaagaaaattagtgatgcaaagctaaaatatagctcacttaccaaaaatatattctagtggtgtgtcaaaaagtgatgcaaattttattatataacaaaacataacactacaaaatttacattaccataaatgcactactttttcatttactttatgtcatttatattatttttttagtatatttagttatagcattaaatgatagactatttatattttttttattactttacataataaaattaatgaaaaagttattattttaatattttattaaaaatattaataaaatattaaattttgcatcaaattttgtaattaaacattgaagcacaatgctaaaattaatgcagatatatcataatatcattttttgtgtcaaatatggcacaacttttacatttcttattagagatggtcttaattgtgtcgacacaataacataaattgtcaaccctaattttggcaccccttaacaaattgttactcatttaaaaatatgtaataaatttgatacaaaattgaacataagtcaaattggcacctaataaattttacattttttatttagtattttccccctaaaaagtgaaactatttaacattttcttattatttaacatgcatatttattaaataacttaattgacaaattaatttgtaaaccactaaatttagcacatgatttacactattttagtcttttctattgtataagtttttggaataattacataagacaccatttttttgtaaaatatttacatttttatgttcaaagaatgtttcttttacattttttcggttttccaa

SEQ ID NO: 111374 - DNA, 4248 bp, Cannabis sativa
ttactatgaataattggagattttcttagaagtgggagcccaaaaggtcatataatcacattaaattaaaaatatattttataattaaaaatatattttattattaaaatatattttattattattataattttttttttttttttgaaagggaatgagaaaaataatatatattctagagcgattaacattggacttccttgaaattaaaggaatctgtcaaaaaaaaaaaataataatggacttccttcttttagaatcatgtgaggttttgttaatataacatttatgaatatgtgaaaactattaaaaagttattgataaaaaaaaacttctttcttttgaaaggaattgatcaacaacttgtttgatctcatatttattttaagtgttgttattgcttaaaaaaaaggtgttgttagtcttattaagatcaggaagaggacgcctttaatagtttcatttaattgaagagaaaatacatgtcgttaccttgccatatacattattatacacacacttattcatctggtacgttggataaacatacctctacataccaaatatacccatttattagtacaatctggtggtggacgagcctatattaattgtccatagatatggccgtgtacaacagataactcattaaaattaaaagactgggagaatagtactttattttcccattaaaaaaagaagcatctcactttttcaagccattctagaaaagaaaagacaagttgatcagacttggaatccacttcagtcatcaacgataatattttgatgttgatatattatttcatatgctaaaaattggctttattaattgagcaggaaatacgatatttcattagtacaatgagcatatatatatatatataaatgtatagtgtataaatataaaagtatatattataaatcaaaatgttaagcacccaggcgcatgaagatgcaaaacaaaattaaattgccaaaataaataagggttccagtttatataaacttgggattattaatattttgtgttgttcttctcgatcgggaaacgtaattacttagaacggtggtggttctcaatcttcttctttaactcatctttcctagctcccaccaccctatcaacttggctccctttcttcatcagcaaaaacgtaggcattgcctggaccccatattcagcagctacatcctgtttttcattcacattaattactaatatacatatatttatctatttttacgtgtatatatgtgtattgtgaaattgggaagacaagtagtaatactactttggtctattttacttcaagtatacctgaagttcatccacgtcaattttgacaaactcaacgtcggtaaataatttacagagctctgcgagagctggctccatagatcgacaaggtccgcaccatgtagccgtgaaatcgatcaccaccttaaaaatcagaaattaaaaataaaaagtaaacattaataataataataataataaaatgaacatactaaataagcttaatattacacatggaaaaattagagttttgacttgactattaaatttatatataccagcttgtcttgatccttgtgattgttgtaataggccttccaatcatccttgttacggacttctttgatgcgtgattctgaccctttactagttgggtttgctgtttcttggggaattgaattcgtaattcccattttctcctaaatttcttcttataaagtacaataatacagaaatgaaattgatatttgttcttgcaagtaataaggaagtattgcagatgaatttggcttgaatgtttcggttgctacgaagggctttatatagaatagccttaaggtaggttggtggaggaaaatattcaactaatatttttaactaagaaaataattaaaaaagaaagaaaaagaatctgattcttattgtagttgctagtatgacctctacaaattatatgcatgtacggtgtggagattgttgagattcccattcaaaaagatcgatgcacaacatttatctacgaatatgatcacaactcattcttttttataaatattctttgaaatggaactcgaatatacgatgaagtagaaaattggccaacacccgcttgctagattgaggagatgagatatgaattaagaaactaaataaggttgtaaacaccactactgaaaataaaagaggaacgatattacagaatacaaattttgggttgagtcgtgaattaggtcgctctatttaagacgtttgtggcactgcccaaggatgtgcaagcagtcgaattttatctattgtccctaggataaaacagtccagtcgttgtacactgtgttggaacactattgtactgtagcgaatcgtcgaaacaccctctgtcatcccaatttttgcaatgtatgatgtgacacttggcaacgtaacatgtgttgaatatgtacacagttggacgagatatactcactcaagactccgttcaaaggagttcaaaatcaagctgagcaaggtccatgccttgtacttttccaagtaaatttagcatgccaagctgagttccctgctccgaatgaaagactcgaaaatcttcatttccaggtgagccagaaatgagaaatgcaaagctgtaaatttgacttctttaacttcatggatctttgttattgttaaaagctagatgaattgtcgaaatggcatcagatttggaaaaatagaacccagcgcactaggccatatttttcaacttgggcactaggtattactcctgagctcctgagattttctttttcataccccattttcttttacttgaatcttcattatatctgttgatggaaaaaatgccgagaagactttttttgaacttgatctaaaatagcccaagttgacaatatgtcaacctaggtgcttggcctagccctaagtgtcaacatgggtgttgtgtcccccttttggtccattaaaaactttgtttggttctcaaaaattgttgaatcccaatattttctgataacagacaaatgctcgaaagaatttctaaaaaactccatttggaatggcataggttcacaaaatataaacctgggcactgagccctattttttgtacctaagaattgttgtttttcctccgaaaggacatatttccccatttttgatgaaaatgaagaagatccaaaagttagatctctgatatgacacttggaaggcgtccaaattgatagattatcaacttgggcactaggtgcttggggattcgagtgctgaaaaatcaagttgcttcgaatctgattctgatgcctcaaatatgtccatggtatgtcgacttgatgttccaatacaatttgtacccttttgaattaagacgttcccaaaacgtgaaaccctagttgaggatgtcaacctaatcctagttattaaagtttgaacttccattctagagttcccaatgtcaacatgggcatagggctaaggacccctcccaagtcgacttgctatgactcgatactactcaaccccaagatgttatctttcttgccacatgttaaatattgatgtccacatcatcatggctactcttggtgtaaacattttccctccaagtaaactttaaacttgtgtgaggctaaattaatgacgtgacctaagctcgtttctatcaaaactatcaggtgggcatcaagtttgacaatcttagacaattctctctattcttcaagaattcccacttagggtaggattttgaattccccttccttgttgaataatggattttaaaattttaagtttatgaattcttgagtgatttccttcgatttgagatacttccaaaatgtgtcaacattagactatcaacacttactctgctctttggctattgtcttagcattgaatctcttgtcacactatcttttaatgtgaatattgatgtagcctttatcttctcttaggctgtagtcctgttaacctccttagttttatagtggaagaggccttcgtcaactccttagcttgaaagcataggaggccttcaacatcccctcgactttacagtggaggaggcctttaacatccccttagctttggagcagagaaggtcttcatcatctccttggtagcctttgaactgacttaacaagtctttgattttgctcaagtaggccaccattttatcacctcgagttgtgtattcacccaggacttgattcatatgttggaattatattttaccag

SEQ ID NO: 111375 - DNA, 2241 bp, Cannabis sativa
  modified_base (54)..(56): a, c, t, g, unknown or other
  modified_base (2193)..(2193): a, c, t, g, unknown or other
atccaatagggcaatcccttatcacaagttgtactcacccatgataggagaacnnncaagtaaacccatacaagtagccaaaaaacatattctgctagtgctatgctcacacaagcaaccaaaaacctatcctataagtgttattctcacacaaacagtcaaaatcctttatcactatcacatactaacaatactaacataataacaatttataatataaaatctcataagcgcatgaacatcaaacccacaataaagtcgtatatttcaacataagtcatgtgcacagatgtccactcttcttacctcagttgctaagtatatcattttctctccctcgaacctctcgtcgagtttctttattgaggacaagatcttaatcaaatacacttaaaaaaatattcaagcatagcctaagattaaacaatgaaatatttcgtcaaactacacagcacgtagaccaatttcacttgcatgacacacaaaacacaatcatttatcactttgattcacacaaacacattgcatgtactcagatgaactcatacaaatactttttacattaaatttttaaaaatactattttagtacaaaatagcaaataaatccaataactacatgctaaatatttaatctcgctagaaacaaccccctaataaacttagaatgaaatttattaccttgccattaatatttattttgaattatcaatttacttacacctaatagaccaaataaataattgtgtatttaattatcaaaattagctgctatcatatttcctaatcatttatacagattataaaatatatttaacttacttagaaacacgtacaatttattatccatatttatgtactaaatttattttaaattgtatataaaataccacttaattaaccaatcataacaaaatatctcaaccttgtcttgaattaatttcatacaccaaaattatattgtaacatcatattgatagtttccaaaaagtaaatacaatttttttactatttattctaatttaagcctaattaattatttaatgaatcacacataattaaaataaatacctacattgatcaataaattttaaacattattccatatcataacatatacagaaaaaagtattaaaaaaataagttttcctattttaacatcacctaacaattttttataattaatctatgcattaacccatggaaagtacaaaagcggtcaaaaatacaatataacaattttataataatttataacctataagacatcatagaaacttaatttagaattttctaagtaaaataggtctttttcataattattttaagcattagttatataaattcatggaaaatacaaaaataatccaatacctaatctaatcactctgtaacgatttataatccatattaagccatataaaattattctagaattttttggaaagcctagatatttttaataattaatttataaaataaatcaattaattcaaattaaataattgcaagaaaattctaaaacttcgtagtagacctagaaatacctaagtaagataaaaaaaaatccaagaaaatccagaaaagaaacctcagaaggtgttgatcggagcttcgccggagttacgacagcgaacccttcttctccggcgacagcgagcctccaactccttatacaatttcttttcacgtattattttgattggcaaagcttcttccagtgcttagaacctcaagccgaccataaatcaccaaataatacggtccaacgtcgttgtcttctttgttgtcggtgtaccattaaaaatggagtccaacaatggcgatttttgttcagggccttaaagctttgattctccacgtaaaaacagatccttggagtcctatacttaaacacaatgttctttaaaccaagaaacgactaaaacacgttcaaatttgatattgctcaagaacatgcttgaatgcgcatgaaaatagtggattttgaaacatgtgctcttagagcatttggtgagaccattagcttccttagatcgtaaaaatgctattcaaagtgatcaaacaaacccagtaactctctcagtatttcagaatcaaaatctctctttctctctctctaagtttcacgtgaaagaatatttctatttaaggaaataaaataaatagttgattttgtgataaatgaatattntatattcattgaatctggacaaaatcaattacgtaatattctatatgt

SEQ ID NO: 111376 - DNA, 8082 bp, Cannabis sativa
ggggggggaagattgaataaaatatacatcagttattcatgtacttcgttgccgtgaatttttttcttgaaggaagtcttttcctgttttaaagagggaggacccaacaaatatcctcaaggttattctcacattacatcatagattaaaatattttttttccattatcttttgtaatcatctgttgaaattgtcgagcctgcttgattttttcttcagaacttttatattttatcttcatccttttgtagggaaatcctggaagttctggaaaaataaacgaaagtgagtgtcttgattataaaccaatatgcattgtgctttggaagattctcacaagtgtattgcttaggatagacctttccatgatgaaatttggaatttattgttggtttcagttaaggtcaaagttggtgggaaagtagtgccccgagtaagcaatggaaggacccatcattggaagaatcgagtgagtgacaactttgtaataatgtaagtattaatgactttttcatctaaaagattatttggttgccgcttaatgcagcaaagttttgtgctgagtaatttttaacaatgtatactagagatctatctcgttgtagcaaattcttgaatggattattaaggaagtctgtaaaaggccatctatttattatatcaaatttatcaactctaaaatgtattatcaggaaccatgcaatcatgaatgttatatctaaatagtgtgattattatttatgatcacaggggtcaaagtactgtggattctcgtacattgtcaagaaaatctattagggtatgggttctttttacagtttatatatcttttcttctcaattaccatctatccttttgtgttccagtttgtgtagattttgcagtttttaaattggacgacaaactaactccaatcaatgtgttttttagtcactttgtctacattgtttcgtttgacttgtggagctgctttctcaaatgtttgcagatccccaattattgttaaaagagaacaatattagtatctagttatagaataagttgttcatttcacaaatggataagtttcttttcttattttgatacttgcagcatatcttgatattattattattataaattcatggcttaacgtgtttattgtgtaaatggatgggctacttcaaattgcaacagaatgctcattgctgttgctacataaactccccattgctatgctcatagggactaggctgctttccctttccagttagctgtcttgtagactgtatattagttgatttgagcatgcttctaataaataaatcaatttaaatttgggtcctgtattatcttaaacttttttctgtgttgcggctcttaagtgtcaagttagagtatcattttgggaaagagtgattcgttacaagtatgtttaaccatatcaattgcttcactgttatgatccagccaagtgtgaagggtgctctaaagacttctgatgacaaaaggaatacaagacccaacatcacaaggaatctagaaaaagttgtaactatcgctacagctgcatcaaagaacatggagagtgtagcttcttctccttcaaaaaatataacacaagaacccacccatgtacagcttccatctgatgtcgatagcaaaccaagtacatcagatgttactattacaaagaaagttccacgtcgaagaaaatcctacacatcttcgttaatggaaggatcaaaggttgagattattgctttatattggctttttttatttattttcttttcattcatttcaaataacatgtttaagtttgaactgcaatcagctaatagaagagcaacatgatgttcttaagcaagaaaggctaccagacctggatgatgagagaaatcagctagaagttgcagactatgttgatgacatatatcagtattattgggttattgaggtgatggattttatctcacttttctggaacccttttttcctattctttttcttttttgtgtatgtgcttatgtattatctacaatgtcgttgtaacctaaatttttctaccatttcgtttcctttagctgtagatgagagtttaactcttccttttttgaaagaaatgagcatttctatgtttagctacattattgacggtgaaatttattatcattattttgagagttcacaagatctaggtatccaaccacttgtcaatcactgtaaatgtacctttaaggctattttttttagcattttcacaagaacagaaatccttaaaaaaaagtaaccaaagcaataatgaatatgctacttagctgtgaatcttgacttctggattagaaatattgcattgcaagtggatttatatgattaattgacatagcctcctattaaatctcaagttatttttgctttagtatatcatgtttcttctgaagcttttcttctcactctctcaccatttgtgataggcaaccagaagcaatgttgtattgtttataatctgttgcaagttgctgttggtatttatttgagtacgtgggctatattttagctgaataattagttagttccatttgtttatatttgatttattcactgactaaaaatatttttttgcaggcgcaaaatccacccccagcaaattacatgtcaattcaaatagaaattacacctcatatgcgggctgtattgatcaattggttaattgaagtaatcattttaactttatggatgtttctcttttcccctggtctttgttatctggttcagttactcagtacttttcaaaattgtttttatgataacaggtacaccttaaatttgatttaatgcaagaaacactttatctcacgattacgttgttagatcgttatctttctcaagtggcaataaagaagaatgaaatgcagttggttggccttacagcacttctacttgcatcaaagtatgaggactcatggcaatggattccaagggtacatatttttatctagttctcacactaatcttcacatttatcttttctagaaatccatttttctgatttttctatttttcatttcattaaggtaaaagacttgcttagcatatcagctgaatcatacacaagggagcagatgcttggaatggtatgcattatcatgttgattgaaattcttgttgaaaatctatgttttgaactatttattatgcacgttttttgtaattttgtactgttcatcttttagctgcttatagaatgaaactagacatttgttgattgaaaaagctaatgaaaccgaaaatcctcttgttgctagatgtcaagtagagaattccttttcatatgatgcttttgggtttttgacgagatagttcattattagattgtgtactaatcatagattatttatcaaatgaaatgaaatgtagtaacttcctagtaatttgtttcccctgttctcaggagaagcttattcttaagaaattaaagtttcgcttaaatacaccaactccgtatgtcttcatgctaaggtttctcaaggctgcacagtctgatgcgaaggtatgtaatagcttctgacataaactagaaagtacattatataacaaacttttcttctcatatttttattatacttaattgttaaatgttaggtatgttacatgttatggctatagtcattgtgacagagtttcttgtaaattgaccaggctataatactgatgatgactaataatcatcttctatttatgtaactctttccatataataaaaataggaatggatcagatacttcaaatactaacatcgtgttttgtggttgtctaccagcttgaacacttggctttctacctcattgaattgtgtttggttgaatatgaagctttaatgttcaagccctcactgctgtgtgcatcggctatctatgttgcacgatgtaccttaaaaatggctcctcattggactccattactttgccaacatgcacactacgaagtgtcacaattaaggtatttgtcttatcaatttatttggttctgcaagtgccaacttcatttcaaaattgactcgaggcattttaataattgcagagagtgttcggagatgttgttacaatttcaaaaagctgctagacttggacagttacaggtcatttacgagaagtacacaagacccgaacggagtggtgttgcagctcttaaaccattggataagcttcctctctgatttcgctcacggtaaagtttgctcttaatttgtcattgaaacatgttatgatgttagaaaactgtgggctcggagcgtttgtgaatctgacattcgacgtaatcactcttcggctctgtcttgcagctacttctattcttgtttgagtttgtgtgtgactttatagatgtgtgagtacattgcatcttgcaaaccactcttgttgtttgtgtgtgaatttagtgctctgcatatgtatatatatacattatatatgattgattttacctgtactagggagctaacaaatttctgattcattgcttggtcattttgtatgccacttctgaatttctggcttgttttattgccattattcaatatgcaatgaaagatcattacatcaatgcgttgggatttagttaatgtgaatttattacaatctcttgttaatgaatggtatatgaagatgtaaaatgcttaactagctttaatgacgtgctaattattttaaattaatttattttataaattttgaaatgattttaaaattattttaaaaattaaaattagtttgaccaatgaaaacatgtgtacaacatatttctttatcattttcattcatatataaagataattgatttaaaagtgttttattttgttatcttaattattgtgcaagattttcaaaaaagaaaaatgctttttttgcttatttccacgttgaaatcaagattgttcgatgtttttttttttcttaagatgataaaatattcaaattttggactacacgtgaaaagaaaattaaggtgcactttattattattttttttattttacataaggcttattttggtaaataggaaggggtataaaataacttgttgcactttcgagaaagatgtgtaaccatctagtgagcctattagacgaagaaatatacgggtcaagttaataaactagattcctgtgcctaagagttatggatccttgtgcctctttggacggaaaggtcccgagccttcttttggggtacaaaggacaagaatatttacagattggtgtatcttttccatactcaagaagtcacgtaatgtcagtgtttgttcgataattggccttggtaatgtggacataatttataacacgtggcaagaaggaaaatacttagggagtctcacgttcctaatcatagtagtcaacctcaggaacggattcctagcccaacgcccaggttgacatggggaactcccgagtgggtatttagatcctgtcaaattgtttccaagtcacctgaaccgacatgacaagaagaattcgagtcatggatctagaacctgagaatgtcaagttgacatcccaaatgccaacctagcacctagtgtttcactcaattcgcaagttaacattttggacaagggtttcagtttcagacctcatcttcgtgcatactactcaacaattgcacttagacacgtgaaagacttgccacaagcatgccaaatgccccataatcaactttggaacactttcaacatggagcaccaaggcacacaacacctaggttgacattttcaatcaacttggggttaaccttggcaacacgacaacttgggtttaactttttcaagagtctttgcctctcgacacctcacatccacaaggaacgactctaggacttgagtttttgcaacttgtgcacatgaggggaaggggacaaaccttggacctagcgcccatgttgacatattgccaacctagggcgcttctaaccacttttcttgaagatgttttttaggtattttttttgtcttcatccaaaatggagatacaagagctttcgagaaacaaacagagccatctggtagctagaacactaatccaacccccaagttgacattggggcttggcaccggcgcccaaattgacatcttgtcaacctgggccacttctaatgacttttcttgagttgtctccctgggcatattcttcgtttttatcagtaacgaagatacaagcaattttgcaaagcaaacaagattatttagatgccagaagccctagccagcgcccaggttgacattcaacctggtgtatatggtttcattactcaaacaccaattttgttccaagcattcttcatattttggtcccaaacgggggaggagatctcgtgtcctgactaaaatatcatcaaagtaccaaaaaatgactcccgaagagtcataaagtaagcactcagcacccaggttgatgtttaacctgacgcgggtggtttcgatcctccaaattcagtccttttgacgaatatatgctagttcttcattgcaaacaaggtgtagcacttgtggcaagtcaaattcatactttaatatttcaccttttcagcaaagtggaatatcgataaactagtcacaaattgggtagttttgagtctcacaatttcgcgtaatagcaaaaccttcgaaaattggtgaacgactttaccagacccaaaaaattagctaagcgatgttttcatatcacttagactttgaaaaatatttcaacacgaatttctaagtacccaacacctaggttcacgttgggcaacttctcaatcgtaggattgtcaatcaaggcgccgactagtgaggattccgtagtaaaatagtcataactcgctcaatactactctgattgatgtgattccaagtgtattggaaagctcttttgaagatctttgtatgcatgcctcacactcatatctcaattctaaattttgtaagtcaaaaaattgctcccaagttgaagtgcgattttagccgcaaataacctgaaaattatccaacagacacgattcaatctcaaaaattgacgatcatcattcgaagtaaaatttgagcatcttaaccattggatcacaatcaatggttaaaattactctagatggaatattcccgaaatattttcattttgtattattttattattttaatagaccttcttgtccataaaaggagagctccactaggtcattttttacattcataaaagtctccataaggtcagggcatcttctgtagaactcgagatctcttcctttcttgtcattctcgtgagaaataaaaacttgaagtagacatagtgtttggattttatgccttaaataaaactcattttaatataaccttatttactataaatagaagattagaaatcatttaggcttacatgtaattttcatgattatggttttaatatacaaattctattaaatcttgaacatatagttactcacaattacactgatgtcatcacaatggaaagtaattgtgattatatttttcaaactatttagtcccatgatttatcagtgcactgaatttacacggacgtgataatcaacgataaagtttacttacacaatgatatgtggaatgtcctttccagggaattaacaaagtatactagtattggatgtgttggctatacatcgaacgagaccgatattgacagtgaaaaaagatatcataaacttacagttatgtcttttctaagtcaatgtcacttagttgatcttagatcaaaagatctgaattctgagatgattaggttctggcttaaaagtattacatatgttctttgacttgttcgttaaagttgatcacttggatcgacccaatacttacatattgggaacattgtagtgcaattgaatgagagcgcaaatcatagatatggaatctatagcttctataactatttagaagtgaaacgatgattttcttagagtttggcttaacaaacataaattgaagaactcttatttcagtaattatattaatttattgaaatatcatttataagaagctaagtattttaaggataaaatatattagagggtagaacagtaaatttattcc

SEQ ID NO: 111377 - DNA, 4705 bp, Cannabis sativa
atggtttgatatttttaaaattaatatttatagttaaatttgcttagtaatcatttatgggtaatacccattaagaagtattccatatatatataaaacccacctatcttttatttaagctcatagaaattgaaatttccctttgaatttgggattgactgatgaggcttacttactattctagctcatgtccaaccaccagtctttaacattttgactattagttacttaaccctaaactgggtggacctaaattcgtatattattaaaagaatatttaattaaaacaatttagaaacccaaagtttaatttgatccatacattactttttagggttttttttttgttcttctcataatatatggctgaaatcattaaagactgagtcaatatttgtgttaattaacacctatgatattatcattgtccaaatcctactacttgtccacctattttcagtaggttttgtactcgtgttattttttacagttttctttcagtattgctgggttgcttgatggtttacactttaattgattatgttgaaattagtaattaggtatcttaattaatttaatttcttcaaatttcttaaaatgacaaatttatttgcttactaataataaataatggttaaaatagatagagtaggtagctaagctaagcatgtgattttgtatttgattaagtggatcaagtaggtaattagtagtaaagtattatttaaattcataaaacaatttacttttagcttaacagttacaccatcaccatcaccacccaaagtcaagtctgtacattaaagttgaatcatttaagaatggtagtaaccactcactctactctgtattctgactgagaaagttagaaccaagaaaagaaaacagagtagtccaactccgtttacttagtatatatatatatatatatatattagtacgtagtagatatagatcaaagcaattgaattaaagcacagaaaaatggctggaggtggagttctagccgttgacggacccgtcagtggctttcacagcaggataacaacgtcggtggtgattacgtgcatcgttgctgcctctagtggcctcatttttggctatgacatcggaatttcaggttccttataactaattaatttcttttttctccaaaaactttttaatatagatataaattaaccttctttgtctgtctgtcttctctttcatttagtagttaatccagaccttttacagaagcaaaagtttgattattgaatttgataacactagcgtgcacttcatgctcgtgctaattacatggaaaaagtatgtttatttagagagaaagaagagagagcgagaggagccagtgattttattttagatttttttttaagaagaaaatgactttatttagcgatgtaaactgggcggggttggggcggggattgctcccccacccctattatacccactgtttaaattcatcctacacctgttccaatacctatttaaattaaagcgaggacggaatagaaattatccagtaggagaaggattcctatcgggtacccatagaaacatacacgggacatgcatggtgtggccggggatcgctcacccacccccatacccgaatcctaaattcaccctataccgtttaaataaaattaggagacagagcaaggattactcggtgggagagaatatccattcagtacccatgaaaatatttttgaaaaaaaaagacctcaaaaggaataaaagaaaaaccatcgtacaaagtcattcaaataataactataaaaatttcattacatgaaacataaaaattcaccaatagccttaaaaaaactaacatagtctattgttgaaataaataaagtccataaataaaaaataaatatatcttttatggcacctttatcatcggtcatcataatttttatcaagttataaagtttacataacttggtctctataataatatataagaaaaatatattaaaacttataactattaatgtaagtagctaaactaaataatatttgaataattcaaacaataattacatcttcatcatcatcttttatattttcatttactgttgaatatgttggtatttttgtaaatgaatctaagaaacaaacataaaactattagaaataactaaaataagaagaaaaaaagagagcaagatatagcatacctaatctttcagcccataaccaatcttgtgcacacaccaaaacttccaaagtgttaggatgtagcctattacaatgatgagagacatgtctcccgctagtgctaaaagccgactccaaaggaacgatagtcactggtatagccaaaatatctttagcaaccctttgtaaagtaggatctttcaacacattgctcttccaccatgctaaaatgtcaaatttagaagtccttggcaaaacaacctcttctaagtagtactctatctcagacttaaaagtatcattggttgtgctagtaacgaacaaatcataaccagccaaatcatcaacaaattcatcaacatccttatcatgctcagagcaactcaatgaatgatcaatagtacttccctaattttgattaatattgtattcttccactaaatcaagacacaattttcgaactctctcaatttctattgaggacttctcaccataaattcgagggaagtagtattcaatcaatttcatcttaaatcttggatctagaattgttgttatggccaatattccatgtattatagaccaatacttctcaaatttttcaatcattttttgagccataaattttatctcacgacattctgactcaagacattcattaaacaataatctaatcttacatatcttaagcaagtgtctatattttttctcactgattgttaggcgactgaaaacatccttatgtatgagagcactagaaatcatcaagtaagtagaattccacttagtcttacaatcaagaactaattttctagtgcatgaaattttgatttgtcttgccgcttcctcaaacttttcaactcttttcggagttgcagtccaaatccaataaactacactctcacgtatgtttttaataacatctttaatttcatccaatccctctttaactatcaagttcaaaatgtgagcacaacactgcatatgaataaattttccacccaacatcaaatgggagcaagacaatttctcgaacatgaaatttaccatggcatcattagtagtacaattatctagagttaaagtagataacatacgatcaatattccatgaaaccaaacattgcattaatacttttgaatgcttcagcagtacgaggagaaggcacatatagaaacctacaatcaaaatgtattgaaagaaaagtattattacatatttcaataataaaatagaactcaaattatatgaaactataaattacctgataatgcgattatgtaaagtccatgagttgtcaatgtaatgggcagtcaccatcatatagtctcttttttgattatttgatgtccatatatctgatgtaataacgattctgccactattgccattcaaataattcattttttttttcttttctacctcatatatcttcatgatatctttcttgatggagtttcaagacacatgattaaataatggttgaatggagctcacaaaacttctaaatcctttacgaccaaccatactaagaggatattcatgcaaaataatctcttgatcgaatgaatatgttctaagtgaagtgcctccatatttttttttttgctaggattcgaaattgattgctttatgtctctatgctttcagagaggacatatcttaaaatgctcgtgcaaatgcttagttccatttctgcttgaccctgctaattttttttcacaacaattgcacagtgccttatcttgtccattgactttttgctttttaaaatgctgccaaacaacagaagttagtttttttttttccaatatccacatcaattgttggtggagttgatttatcagtcttagaaatggaagtgagaaattagtaaatgggacagattcttcaacttatccttcgttagatggaattacttcaggaacactctctttgaaactattatcttctgccaatagatgtgaatatattccctaaaaattgaataatataattgttaataaataaataataaacaaaatcatcatttaagtaatacaaataatctaataccaataattttatatatattatatctacagtaattaaatacatattaaataattatcatttaaaattaattatggtaatattatgcctacattaatatatattacgaatagtatatataaatgatgatcatttaagactaactgtagtaatatttaattaaatacaaattatcatctatattatacctacaatgtcaataatatacttagatatggtcaaataatattatatactttaatttatatatatatatatatattttaagaatttaaaattaattttctataaataaagatattgttactatttgaaaataaaagcaatcaaataaatttaaagtataaaaatagagttctactacaaacatgatatgagctcctttgggattgtttccaaaaaaacaaaattactcatagtatacatttatatctttatatattaaaagtgtctatctaacggcatttcttggtttaac

SEQ ID NO: 111378 - DNA, 2733 bp, Cannabis sativa
  modified_base (1118)..(1119): a, c, t, g, unknown or other
tcccttttctaattttaataatgcaagtaaacaaatgtaagagaataattaccttactattgattatcattacttattagtaaacatgctataaatgactcccaagaattcaccaagaataattaattaaagacttgtgtgtaacgaaacgatatataataataattaataataataactaataagtacaaacaatgagcataaatcaagtaaatatatatatacgacttataatgcattgaataacttattatactggaaatgatctgttataattataattaccataaataaatcataatatataatcttatatcatcttatgatcatcatgaaaactattgtgatttgtgatacagtaaaaatgtgataccagctaataagtcaagatatttatttatttattattattatataaatatattattagccttgattaattagaacttagacttccatactcaaaaatcaataaataagtaaataaaaattagacttttgttaaaggttggtgaaaaaaaaatacagatcaagaaagtttctttcatttaatgacatgatcatatttggtatacagtatcattgatatatattattgtagaataatgattcattttggcatattatgtcaccatttattatatttgatataataaccacttaaaatttgataaaacaagaaattctgtgattatatttaataatatatataatcaaaaaagaattcttgcctctaacattagtcaattttatatgtataataataataaatatgaatgaggaaaatgaaaaatatgtagtttttttcttctttctctatattatttttatttaaataataataatatatgggtggcaatttttttctccataaatggtcacactaaacaactttttatatgttaggttaggtattagtttcaaatttaattattatgattaataataatcaagaataactatttctcactcattaattttaaatatttctaattcaatttatttttcaaagacgatataaaaagagatggaaacatgtaggagtgttcattggacaacatcgaatgttttaaatcaggtctatcgagatttgattcaattatatatatatatatatnnatatatatatatttttaacaatgaacaaacatttcattaaaaaatcataagatggaaaatccatccaaactagtttaatatccactcggagtgcatactctgctaattcatgaatacgaacatgaattaggggcgcctcaaaaaaattggtaaataagctagtaaaaatcgctaacaaatatcttaattaattcaaaacaaataaagaatctcgtagagaatacaaagaactaaatccaatagtcaatcttttagtttttttgacataaactgtcaatctggaaaataaaatagaggaaaactaagtgtgaaagaccaatccaacacatcatcatagcaagctagcttgaataactgcgagcctcccaataaaataaataaaagtgaatttacatattaaaatagtaatatatattgaagtaatatccacaataataatatttaaaatttaaaagaaaaaacttatcgcatattgaagcttctgatccaattatatattggatgttagattttactattcgatccaatccaattcatttcaagcatctaattggatgttggattgtatcggttctatccattagatgtatttcatgtatatctattgcagtaattcaagtttatcaaatattttagatctagtattttttttgcatcagatcggattcatctaatattttagatccagtatttaagattgcagtaagtctaggttaccctaagattagtcttgtaacaccacgatattttgccttattttataaaatactatttctaacgtattaattgaaaagactcaaaactatttagaaatatacagcgggttttacaataaatatgcaaaaagtgaatgatcattcatatttaaaaaaataagtagttgtgtgcattataaatttacaacataccgctgagcttagattactttactatctgaaaacaaaatcaaggctccaccggcgttctaagtcgtttgttcgtccatagcccctcgcagtatacatattagaactgacccagctcatcacgcttatattcaatgttccctgtctattgtctataggagaaagtaaaagagtgggctaaaagcccaataagaaaaatacttaataactaattctagctatttaataattataaataattatcaaataaaattactatttaaatatatttattaagtagaccctccaaggcctctcaattaataaataaacttttaattctattttcttctcaattaagccattccttggtgaaaattcacaaacaaggtatagtcttatttagaattttaatagattaattaaaaccaattaactgagactataaaacattaatattattccagttagtgtggagactatgaccctatgtaattaagcttccaacaagtagatcttaaatttaccaagtaaatttcttaacttattaattcctactgactccactatagatttggaattgcaatcttaattacatagagtgctctattaccaaaaataaatgcgatttgaattacccatgtttcaatcgaaatagtcaaatatcctctatagatgatttacatcgagtgggaataaatttaccgttctacttttcaatgtattttat

SEQ ID NO: 111379 - DNA, 6664 bp, Cannabis sativa
tttcgccaaaccatcgacaaaagataattcactacgattaacataaaataaactacacgaaacaaagcctttaattaagtctaaaatagatagagacaaattcaaaaaacgccaatccggaatgcatctcccttgatttagagcctgtgtaaccaccaaagaatccgataacacatgaatctcctgccacccttcagaagacgcccattgaagagcccaaaaaactgctttagtttccgcctccagggtagagtaggcagtggtgaattctgatctcatagcccatctacccgtatcaccattaattaccaccgcagcaagaccagctgctccttccttccaagaggcatcagtcatcaagacaatcgaggcgttgctgactctccgacaaggattaaggacagtcgaaccaggaggatctgcagcagaggccgaaatacagaagtccttccattgagcagcaacctgttggaggagcaaagggaggaatactgaacttcctttgtataacaacttgttcctttcagcccaaactgcactaaaaagatagcccatgtagttgatgacagagcttcggtcaggagtgggaaagatggatactaaattctccacatactcctgcattgtctcaccaggaacattagtgcaatagattggatactctccaattatccagagatttttgatcacattacaatctctaaataagtgaatacagctctccatttcatcaccacagaagagacactccttatcaagaatgaaccccaacttatctcttgtggggattgctccgttaagcacttgccacatgaaaatagcaactctcggatgtattcctggtttccaaatcatcttccataagtctctcactggtttaaatctgtacttctggtttgcaaaataggcgcacttgactgaaaaccttccattctgagtatccctccaaacaatctgacccgaatgattagtagaaatcctaggaatgtccaggattcgcccccctaaatcatcaccaaaaatttgaagaactatttccctatgacaaacaccatcaatggaaatatctgcaatagttcttgctgtaatgtgtcttctatttaaaccattcatcaagagagtgaactccatataactcatccaaggaatccaaggttgagtccacaaatcaatggaatgtccactagctgcaatggccatcgaactaggaaggataacgcttcgaacctccaataaattcttccacaagagcgaatccgagctttttgaaggcactgtccaaaagttttgaaggtgacaatacttacttaaaaggcattgaacccaaggctttttttccttctgccccaaggcccaagcctatttagcaagtaacgctttgttcatgtcttcgaaacgcctcaagcctaaacccccagagctcttaggctgacaaatcgcatcccatgatttcaaagccaaaaactgagacttctccgagttaccaatccaccaaaatcttctaacaagggcatctaagtccctacaaacagaaatgggaatcttggtggtagacatattgtaaattggcatagaagccgccacagatttaatcaacaccaatctccctgcataagacaaaattttcatcctccaaccttctaatcttttcttcatatttgactttagttgctgataatcttccttcttccttcttttgaaaacaaaaggatttcccaagtgtttctcatcacccttgagcttggaaatttcaagagcatctaacgtttctttcattttctcagggagcatattcttagaaaaaagaacactcgatttggctttactacaagactgacctgaccaagcttcatattttgagagacaccgaatgatagtcttcgcttcctccacattcgcacgggtgaatagaatcgtatcgtcagcgaacatcaaatgagagattgtaggagcctcttgagaaattttaataccatgaattctcccagcttgttgttcccgaatgatgagtttagacagcacctcttggcacaaaaggaaaataaagggagataatggatcgccctgacgaagaccccattgagaataaaacttttttaacggactaccattcaagagtaccgaataagaaacactggttatacactccatgatcaacttccgaaatctcatatcaaaaccattttgcttaaggacttcatcaatgaacccccattccattttatcatatgctttatgcatatccaacttgatggccataagacctcctcttccacgcttcttcttgatacagtgaaccaattcttgagttagaattgatgactccgctatccatcggtccggaataaaggccgattgaagaggagacaccaactcatccatcaaggggcggagccgattagccaatatctttgcaattaccttatagtggaaattacagagactaataggacggaactgctccatcttcaccagtttgtcaatcttcggaatcaagcagaggaaggtgtgattaaatctaggatccattgtacccttctcaaagaaatccttaaccatctcgactaaatttggaccaacaatatcccaatacctcctataaaagcaccccgagaaaccatccggacctggagctttcaacggatggagactaaaaacaacttgtttaatctcttcaatagagggaatgtcaactagcatatcattactctctctagtaactccattctcaactaatccctccaaattgtcaaaaaaaataccaccagtagatgagaataaattcatgaaataagtgtttgcaatctcatttaccttccttttttgatcccaaagttccccctgattgtcctgaatcgcccaaatctaatttcttcttcttctaatagtggccgcagcatggaaaaacttcgagttcctgtctccaagctttaaccaaacctctcttgatttttgtctccaaacctcctcttttttcttccaagcttcctctagtctaagttgaatctctctttcctccatacacaaatcaacaaaagaggattgacattgaatccattgtagccgtttttccagagatgtaataatagattcaagatcattgaaatgcttcttcttccaggattgaaggcttcttctagtgttgtcaagattctgtaagaggtttttagttgaatctgaacccactgagcaccaggcatcctcaattgtttccttacacgaatcaatctttgaccacgcctcatagaatctgaagggaataaagcctttggatctgaacattgaagagtccaataagatgggagcatggtccgaaaccgaaataggaaagttaagaacccctgcattaggataactattaacccaatcagtggctgcaattgctctatccaatctttcacgaattaggcccccattgaatctcttgttgtgccatgtaaatttacaacccgtacatcgcaagtccacacctcctgagttatccaaaaaatcatttagccatctaagatcaccttgagtaactcggcgccctccctgcttttcctctccattagcaatacagtttaaatccccaatgacaacccaaggttccacacaattgtccaccaaggaattcaacttattccaaaaactccctctttcatgttcataaggtggaccataaacagaaaaaagattccaccatttactctcctggtcatcccaaactaaagcttcaaacataccattaaagacattaacaacatttaaacgaacatcccacttccacatcaaacaaaaagccccagcaagattaattgctgggatactttccacacgaataaaacccagtgaattagctattttcaccatcctttccctacccaacttcgtttccatcaagaaaatacaatcggggttgtattttcgaacccaagcccttaagacttggactgccgagtccctcgagagaccacggcagttccaagatataattttcattgggacgaggggggcttgataagggccgcctcctcgcccattggaaaattttccacagtttctactctaacatccacaagattcatctcaccttccaaatttctgatagtaccctgcgaattcacccctgtcaaagcccttgtctgtcgtctgctgccattttggttggtagatttcctcctccttttatcctttttcgtagaggaagatgaagcctctcctttacccattttgaaagtagaagttgatggattaggagagaagggatccatctttggtagttcttgagaaaattccttagagagaatggaattctttggaaaataaggaattaaagtcaaacttgccttcctttttcgtggctgggggcaagggtgcacttcattagtaacatcaagaggatcatgaaaaagggttgggctgggctcaaacttatccacttgaattgggcctatcaattcctctgcaagaccaatctcctctgcataatcgggccaagggaagtgagtaacttcaggatgacaatgaggttgtcttgatttacaaactttctcatgtgggccttcaatcatttgtttgtaggttggcccattattagacatgatagtggtaatgacatttctgtccctctcattaggaaggggccttgaagagtatttctttattatttcttcatctatcaacttcaaattgataccctgaataggtcttctccagaaatttggggatatggaacgtgcacgcctatcccattttggagttgcagatttcaaaatcaaattttctgatggagcatccctattatcccctggttttgaggtctgattgactactttcaaattctttctagaattggcacctgagttgtcttcctggatcctgaccactttcctcatcggtttgctacgccggagctgtgattcctctcgctgatgtgtcgactgggacgggattggaatcttcccttttcccttatcctgcttcccccactccgtcgacttcaagtggccattattcagggggcctgaagcattcctaagaacatttagttgattaatcgtattgaaacaactaatgaccgccgattctactttgatccagggtccaaatgctctaacagctttgccttcaggagggaaaacgtagactgtatctctagcacaactctttgcttcatggccgattctcccacagttataacagaaacggggaagtttgtagtatttaaactgaatccattcctttcttcctctcatgatgtccaagtagaaaccataagaaagctggttatacacatcaatctccacctgaaacttgagaaaacctctccttataaccagcttttgatcgattgtatcactgcctttgaacgtcccagctttggcaccaatagtccgaacattagccaagttcagataaggggtgggaagacctatggcttggacccagaagacagtcgtactcatattagcattataccaatctccgtccttcggccactctttgataatcaagagcttaccattgattaaccaaggtcgactgtcaagtatttcaacacaatcctcctctaaatcaaagaatatcccccagaggcctttcttgagggtcttgaacttccataaccccttgagtttaggcttccagatttggcttaggatgtccttcagcctattgcgcgaaacaccagtcccttcaaagaaactcaccataacacctgttctagtaacttcctcatttagttcgaagtccggttcaagttctaaggtcatggagttgaaaaaatcctgacgcattaattccatatcatcttcttctcccacgtttcctgctggctcaccctgtttctgagaagcatttacactaccatcatgcattggttcagactcccgtgcattaactccctttggtatatctgagtcgttaggcattgactcattcataccgtcagaaatattctcattaatgtcaccaccaacttccattgctttccctcccagggtactattcacaactgcattgtcaacaccttcgcccatattttccacgttttccatgagaagcccaggaaacaaaacaaaggaacacttttaaacaatcgcacaaagagaaaaggttgaaaagaaggttaaggaatgtagaaggttttggacaagaaaagtcaagttggaataaccaacactctcatactgagagagaaaagtcatgtggtcccagcagtcctgttttgcagtctagttgatgaaatattctatagaagtatataatttaattcttttaaacaaacattaagtttgtataaatattcaaaattactttttataggaacttacttcgccaatttatctaaaatgtcacgaaaaagttatcaataaaaaaatagatctaaggcaacaaaaaattaaaagaattagaaaaaataaaaaacgtaaaatataaatatttcactattctcttaggcgacaaaaaattaaaagaatcatctgtatctaccatcagtaataaaagaacatcaactataatgtttttttttttgataaatcaggaattcattgcacaaacaattatttttacatcctaagagcatcaccaaggagacttcatatttggtgatgccgtggaattgtccctccaacatagctgcaaacattacactaaattgccgtgtgtgctacagtgcacg

SEQ ID NO: 111380 - DNA, 3026 bp, Cannabis sativa
  modified_base (2991)..(2996): a, c, t, g, unknown or other
tacatattgtctcatcacaattgtatacttttaataatcatatagaaattaaaactgcttttgatttaaagatctagggaggaagacttaattgatagtattgcactatcaaattgttgtaattgctatagatcaatcaggtacgtaaacctaattattatatatattatagtgttctatattgtatacaattttgtatcttggaattattaatttttctaacatgtggtatcaaagcaccaattgtatatgatttaggacatataatttgtgtaacaattaatatatatatatatgttaattttttctaattacatattaatttcgttattattttatgtttaactttggattttgttcctcattaaattctctttctgatgatatattatatgtgtgaaatcattaagtattggttgagaattttatgattaaacttttaggatttatgtgtttcaataatgaaatcaaatttgagttttttcattatattaattattgactaaaattaattgttcaaacttcattattgagtaatccacaatatttttacataatttattttttgaattagatgaaatacacataggaaaattgggttcttgtttgttcttatatttttggattatacaccataagatctgctctttttttagtcattttcaaaccaaattgaaccgattttaagattagaaattgattcccgatcaccataaaaaaatctcgtcatttcattcagttttacgttgaaatttcacttagacctgactagcctgaaactgggtcgcatgacccacctctaacccggctagaggttgaagaagcttccagtccgcgtagcccgatctcggcctccgggcatggggtgcatgtggaacctctcgaagtcattttttgacgattttgatacctaaccttttggcatccaaatatcattatctaataagacaaccttattgtcattgcctaataagacaacttcttcatcattgacaaataagacaatattttcatcattttataataagataatttttttcatcattgcttaataagacaacttttttatcatttcctaataagacaaccttttaatcgttgcctaataagatactatttttatcacataacattaataatagtattttaataaaatgacatgatatgaaatacaaatgtatttttcttacctttaatctaaattcatgcataccaaccactctaattgtagaaacgcccaatgatcccagccctatttcacaacagcagtaaattagtaaacaacttgacctaacccattttagatcttaaattcataactaaaagttttcctatcgatcgaaagcatggaaatactttaaatatcaagaaaacacgaaaaatggaggtcacgaacatcacccaaaatgacagatcattttacaaatgacaaactgtgttctaggtgttcctacctagaaaacggtcggttagttttccaaaactggtctgtcacttttctacagaaatggaacctcgagtttttcttgcttccaattccctccaaacctatccaaatggtcccaaacttcataaaacagtcacaaaacatcattataacataacctaaatcacaaaaaaaaatagaatgaatcataattcaaaactttccataagtgatcaagctttgagttcttaaactcaaacttgatctctcaaccacatcagctgtaaactaagccccaaaaccttaaaaaaaatcactaacaactcaaaacaaaacttagaaatagaactcgtcacttgttaggttgaacaataactaaaacatcaaacatcaaagttaaagttaccttgttccatgagttaagagaagaagaagagcaaggactaaaccctatccttcaaaaccgatttgaatcaactcctagctaaaaatcaaaagaagaaaaggaagagtttaggtttgaatttaatgttgaggtttggttcacttggtgtttggttttggccgagcttgggggagaaagagaaggagtttagtttttgagtttatcttgctttttgagggaattcagcttattcattaggtttggtacagataggacaactccttctaactaaattaaattaataaaacatagggaaaagaccaaaatacccctatcttactaattaagaaacttttagccctcggggtaatttagtcataaccaaataccccaaaagaccctagtaaatcaaaatcaatttaacttcccgatatcactaataccacaaattaaaatcgttgtgatatttctagcgaccaatcgagtctctatggttatcgaacttaagaaaatttattttataaatcgtgtgtatgttactgacatattctaataaaatttttgtaataaataaattacgcttatttaatcatttacgatagaattctctaattcccacagaattagattagtaagatcatagtcttactcattataccatttttaatccatattttataaaatatgccttaattaattataattagatttatagaataatataaatgagctcatctatgctgataccaagatcatttgtgaaccctgtaaggcaaatggcttcctttatagcctttgttgttgccatatactcaacgttagtggatgatagagaaacaaccttttagagatagagaaacaaccttttagaggttagatttcaagctcacacggcctctaaacacatcaaacacatattgagttaaggattttctagtgtctatgttattagcataatctaagtcaacataattagtcatattttcattgaaattacctagttttcccagtactaaaccagtgttgagagtcctttttatgtacctcaacatccatttgagtgacgtctagtgttcttctccaggatttgcaatgaatcagctccttaaactcatgttatatgtcaggttaggtttggtgctgactattccatacatgagactgttgggttttatgcccnnnnnnaaactctatttcaatgtaatccattttatt

SEQ ID NO: 111381 - DNA, 1043 bp, Cannabis sativa
cagcttttttccacagttctgctacagctgctttttcccacagcacagctacagctgcttttccccacagcacagttgtgccaaactggcccttagagttatttactataatttcccacttatatatattgaagagtagtctatagatcaaaattacaatttaaaaatcataaaatttgttgtgtttttttttttttaatgttgaatttgatctaatatttaattaacgtacttataattatgcttaaatattacacacaataacattagaattttttcaaactaactatatttatttaaattagaaccaactattttataaaatagtgtcacataatttttttttttaggcacatattattactcatatattaaatgtcatattttgcaagtaagtttttccttataattaacaagcaccggttttagtttgaggttatagaaaatgaaaggagggtgtttggatttagattgatggaatagtctaaatttttttatttttaattatatgtttggtaagaagaaaatatggaagggtggaaaaggtaggaaggaaaggggtggaaggaatgccaaaattatttgtttggcaagaaagaaaatgggagggaaaggaaagattgagggaggtgctacccctctaaattttccaaaataaatccttccaaaagtgaaggattctataataagggtgtgtttggtaagagggagggagaaaaggaaggatgaatagtttacgaaggatagagagagtagaggatggaaaggagaatgtagaggaatagaaaggagaatcgtattctcttgtgttgtttggtatttttgaaaggagagaagatgatattttatcatcatgttaggtatctaaaggatcactggttgaattgaaagaattttaattatgaaattaccatatcacccaatatccactatataaagtgtttatatctttactagagaactaatccgcgcttcgcgcggtgttggacaacatttgttatttttttttttttgaaattgctatttttttttttaccaaatta

SEQ ID NO: 111382 - DNA, 1956 bp, Cannabis sativa
caattaatttttgtgatgttaattttttttttcttaaataataaatattggataattttgataggtttttttttttcaagaagaaaaagaagtgaatttaatattaattgcttaaattaaaatacgaaaattatactaaaatagcaatgctcttttctaaacaagcttaccacgtatatactacttagttggtattttttttaaaccaatgaaaattaaaatgatgtttgcgaacactttgatatcatgaatattgataattaattagtttcatatttttcagggatgtttcgttcaataacttttcaagcgcgagccctgaagtatatgtatatggcaaaaagagcaatatgtaaggaatttacgaatggagaaccactatttatatatatgttctcttaattaatctaacctctatatattacgatctttaatctgtcgcagcaacttgttttcctgttgcccgatctgcagcacttgtccagacaaaatgtacgtgcatggaattcttttacaatatatactctgtttgtatgactattttcatttctgaatatataatatttgcaggagaggtgtggtacaattaacgaataacgcatgtggccgatataattcaaattgtacgtaacttatagtcaaagtttcatctctccattttgaggtctatatgccttctccccaactgagtaatatattttttttactgtggtgtgtacatgcatgcatgcgtgtataattaaacagacaagagtacgatgtacgtaaattgcggtggtgaggaaataaatgtttctgagagaaatgaaattcgttatgaccaagatatcgaaacaacactatatggtgtgaattcatcaaacaactgggctttcagtatttcggggagctttttgtcagatgatacaaattccagtgattatataagaaaggccgaatgtagaatttcaaatgatgaaacaagtctgtatgagacagctcgactggctcccgtgtctctaaagtactttgggtattgcttacaaaatggtaattatactgtcacacttcatttcgctgagattatatacagacatagatatcaaggtgacgatgaagataatgattttaatgacaatgacaatgacgatgacaatgattattatataagcccaaagaaacgtgtattcgacatatatattcaggtatgtaatatgtatatatagttctttaattacgtactttcgtacgtatacttatacaatactgaaattactaaaaacatacaattaatattacagagtaagatggtacgggccaattttgagggatcaaaatcattaacttttaacactaccgtcagtactcatcaattggagattcacttgtactgggctggtaaagggactagttcattcgacccacctagttttaatgggcctcttctatcagccatttctgttgcaaaaggtaaatttattattcttaataacttagtgtatctctaacacttgttgttgacaaaattgtattgaaaatgataatcacattgcatatgtgtcaaagaaaatttcatagacaactcttattggagatgctcttagactatgtgaaaattgtgttatatatttaacacaaaaagtaaatttcaaatatatttttattaatttctagcattgtataactgtaaaacttgatataacatttaatgcttaatttatattttattaaaaatgtaggatggtaatatcttcatcattaattttattatttaaaacaaaaaaaaaatgtaaaagttttataattaaatttaataataaatattaaaaatatcataaaagtatatataaaaatattgtatttattacgatttaaaattgggctttttcataaatgtacaacaaaaacaacataattacaaaaaatgtgcaaaaaaaaaattattttaaaaaccttatacattttgaaaacttatta

SEQ ID NO: 111383 - DNA, 9067 bp, Cannabis sativa
ttgcctccaaaaataaacattaggtatttaagtgtataaaatcagaaacattaggtatttatgccgcaatttacccaaacataaatcatagctcaaaaatcataattgtaataatatcacaaagccccagagttgagcaagcttttagttttaaaactcaatcttgctcaactcagaccacaactgctaaaactatcccaattcaactcagtactgatcccgcacctgcgactctaactcccaactctcttcctcaaccttgccattcctccatagtactttcactaatggaatcgtctggttctacaatactttttctttcctatcaatgatccttaaatgttgttcttcatataaaaaattcttttggagctcaatatcatcataatttaaaatatgtgttgagtaagacatgtacttcctaagcatggagatattaaacacattacgaactccagacaaggcaggaggtaatgctagccgataggctacttaacctaccttttccaggatctcgaagggactaataaatctagggcttaacttctctttctttcctaatctctgaatccctttcataggtgaaactaagaggaatagaaaatcaccaacctggaactccacatccctaagctttggattagcatagattttttgtctactttatgaagagagcatatgagccttgatcctttctatatcttcactagttttttgaattgcttcgggtccaaagaaacttctctcacttgcttaatcccaatgaatgagtgattgacacttctccagtacaatatttcatatgttgccacaccaatagtactctaatagctattttagtatgaaaactcaattagagagagatacttattctaggacccttcaacgtctaacaaacatgatcacagcatgtcttctaatatcttaatagttatttcagactgtccatcagtttgaggattaaaattagtgctaaactttaacttagtgcccatggacctttgtagatattcccaaaattttgatgtaaactttggatcacgatttgagaaaattgactttggagcaacttgaagtcgaactatttccttaacgtacaattttacatactgatccactacatatgtaacgtcctaatatataggaacaccacgtgtgattttataaactagtttagtaaaaatagataaattattattaaaatctgtgatattattgacaacgtacttcactaaattaaaaccttagtaacagacatcataacaacactaaaactttgtttcgggaattcctgttataaaatttttacaaaagaactataaacgataacaagtcaaaatacacagctgatacaacccaaaagaactcttggcaattcagtacacaagccagtaggattaatatgtacattgttagaaaagaccgtcacatcatggctgttctaactttttcttgccttttaccgctgccatagagcacttgtgaatcacaaggagtcaacaggaagagtaatgaaggtggatacgtgtaataattaactatccatttaactattataatttaattaaacaataacattcctaagagtatataatataaccaactatatacatggaaataagaagaaactatcaattgcatttcctaatcaggcaaggtcgtctcaaaattaaaacttgtatatcacatcactacatcacctaatcaggtgagtccgtgccaaaacctgacaccgatatatcgtatcacctaatcagatgagcctgtgccctatcatagaaataatatattgcataacctaattaggtgagcctgtgccaaaacctgacacccatttatcgcatcgtctaattagataagctcgtgccctatcctggcaccaatatatcgcatcacctaatcaggtgaacccgtgccatagtctggcacctatatctcactaccactacctaaacagggtcgccaacaagtaagaaacctaacaacaatttcagtttataattatgacttatcacggttgtctcatatgaacaacccaaatacggctccccggtatccatatatcacattgcctaattaggcaagctcatatcctagcctagctttcatatattgcatcacctaataaggtgagcccatatatcacattgcctaattaggcaagcctatgctatagcctggcatccatatatcacatcagctaatcaggtgagcctgtatattacatttcctaatcaagcaagcccatgccatagcctagcatctatatatcacattgcctaatcaagcaagcctaggccataacaaggcatccatatatcccattgcctaattagtcaagcatatgccatagcctggcatccatatactgcattgcctaattaggcaaacccacatttctcaatcattttctaataagacaatcataacttcaacccactttaatggtaatcaccattacctcaataataattgagtcgtaacaatgagaatcataccttaacatgctatgtgatacatatatacttttcttaccttaagtttcggtttcaggtatgttggtcaacttgcttggagaacgatcgatgatcccgggcccttaagctttccctcttcgatagtttattatccagctactaccggggcttgaatcacttagtttcgggttaataatcgaagaaattggataggaatggaagatggtttcgttgcacgaagaataagggagggtttcgtttcgttcgtactattttcttataagtttttttttaaaaaaagaaaacttgagatatatataataataatctaataagtataaagtttttaattaaaataataataataacaatattaataataatcagaataataataataattatattatttttactatttcttagcccataatatataataaatctttaataattcaccattaggcttatcgggatattacaaccatcccctcctgataggaatttcatccttaaaatttacctgagcaactcgagatactgctcctgcatttacgactctaactctcaagttgcttcttccaccttgttgtttctctacaacacttttaactagtggaattgtcttactctaaagttctttctctttccagtccaaaacctggataggttgtttcctcatataataaatctatatgagtttaaaatcatctcagcttagaatataggtcgagtcttatatatattttctcaacatggaaatgtgaaacacattatacactccgaataacacaggggttaaggctaactgataggctacctggcctacttactttagtattataaggtctaatgaatctagggtttaactcttctttctttgtatccctttttataggcgatactcgaagaaatataaaatctcgcacttgaaactcgatattcctatgctttgaattagtgtagcttttctttgtagtcaataaggtgactatacgactcaaattaaccctacacccttataagtctcttggatcctttccatccatctcattatcttcttacctgtgctactccactgaataggtatccaatatttccctcgtacacacttattgaagtgtctaatcaatggtacatttaattattactttagtcaaacactccatcaggacagagattatttcaagatactctaacctttatcatatatgcccatgacatatgttctagagtcttattaattcatttagattatcaatctgtttgagaataaaggttgtactatgactgctttaatatctatggttcttaataaccttctttaatccttaatattataatcacgagtatcaactttaaaactttacaagattaactattctttcaatgtataactcaatatccttacttattgtacaaattatctacactagtagactgtatgatgactcagtatattcaaccattattacttaattcaattcataagatctcatagtacaaaattcataattacatcttcttattcttcctatggtattccccaagccaatgtgattttaccagttgctgatgtactactttaacttaataacaagctgaacatccacttttaatagatatccaatgtccaattatagcatcccttacttattattacattccttcctcttgataatttttggaacgactactgatcgtgttttctaatatgaatctttctagcgtactttgttcttatttgtacaccttctaagatgatttctcgatagatttcccatattgagataactctaggttaagtatgcttaactctaaggtatgcttatggtgggttattagacagaaaatgcgtccttcatcgttcctacttgtatttcctacttttatcccttccttaattaaatccaattttaatcatttccttcatttgcctttttcaattctttgtttgtgttgtttacttaaccatgaagatttcctacattgatgtcaatttgaacctccttcatctcaatttattccaacttgtatcaactcctcatgaactgatataacttttaatttcccattcatttatatgtaaccaccgttacaatgttatttgatgcaatatatacaatagaggaaacattactcataccgagtactcatagctaaactaggagtacctgtctcccgaattctcaactaataatatttaatcaaagatcattcttgatcttaaagtttctttcctgcgtttggtagatatcttgataatcgttccaaacacatttagaaatatacagaccttaagtacattctttattttactgaaaatcccttggtatgaactaccataccaatttatagtaagtctcccattcatggtgctgattcatcaacatttaagactcttgtattcttcttccatcattattactaagatttcactccgtggttcgtacactaccattgcttccttgcaaacaatactatcacatactgggttaaccactctaaaacttatattacattcaattaatagttcgttgtttaataaaacaacctattctgttatctaataatttaaccgacatttaataatcacttgaacacatgtctattaaattgcatctcagtttataagctttttccacattttgggtgagcatacattttcattactgcctaataagacaatcttttctcagaatttgaatggtcaccttgtatgccaaattgatctgatcaaatattaaggtgttttctaccatcaccatattaccatgagtaatttgaataatattctttaccttagaaacaccattgctctccttgatgttatgttatacactactagcctaatcatattccaaaaactagggtttgcctcatgcccctttcgatcttattttcccctggtagtgagtagatcaatccacataattgttgccttcaattctcttaggattccagacaatactcataagttatcccacctttactaacactagatcacctctaggaaaaaagattatgttctccaaatcaattagatggatgcctccattagctactcatgttatattattccacttgcgaatatcaaaaaaatttaactcatattatcatttctctaatttgtctgccttgttagatgatttattgcaaaataacatacatacacagtccattcaaattcttaatatccctatttgaatgtacaatgtttaacatcaacataaatcgaaatagcaaacataatattacccataaaaattttgaccggagttagtcaaaggactgatacttgtgttcatttgagtcataataaacatatgggcaggaaccataaagtcttcttctttaacatcagttttccttacttgcaggcatgttcttttcagatagcccactactccacaataaaaataagatatggatctacattggcttaaatggaatcttttaaatctttgacactcaggatagggtcgccatttcttatcctttccacaatcgatatcctagtcaccttggaaccttttgttctatccaataactagtggtttatttagtttttgcttcttgatctgctcataagttggctccatatgttttaccacatctagtggcacaacaagaaatctgggtggtacaagaataggtgtaagacgagcctattattctttcaagtctcaaatatgttcccttattgtgtaattatatcttgcacagaagtaatcacttgttcccaatattgaggcgatagaggattcttttccattgatgtgatagaggattctcttccttaacatctacaccgagcccagacagctcgctagtcagactgtttaattgccctggttgcataacttaacacacctgtaatctacatcttccagccatttagaactcaactagatattaatgctaataagaatatccaacacaatcatcacatcataattatcactatacaacttttctagcatactctataatagtctaggcaggtaatccaatagcaaataatataaacacttactaaccataagtcaacctgtcttcgcaacaaatgtacatattcgaccagtctttaggacctttaaaacaatagctggtctgataccaagttgtaacaccctaatctatatggacgccacatgtgattttataaactagtttagtactaataaataaattaattattaaaatctatgataatattaaaaacttcaccaaagtaaaactcaagtaacggacatcataaagacactagaactttgttccagggatccctattataaaatttttataaagggactacatgtataataagttaaaatacaaagtcaaaaaatacacagcagatacagtttaaaacaattcataggaactcggcacacaggccaataggatcaataagtacattgttggagaagactgtcacctcatggctactctaacttttccttgcctttacctgcgccatagagaacttgtgagttacaaggactcactaagaaaagtaataaaagaaaatacatataataactaattatccatttcactaatataatttaattaaacaataacattccaaagactatataatataaccaatcgtatatccgaaaataataaggaactatatattggattgcctaaacaggcaaggttgtgtcaaaatttgagactcatatatcacatcaccatatcacctaatcaggtgagcccgtgctaaaacctgacccccatatatcgcatcgcctaattagatcatccagtgccctatcctggcaccaatatattgcatcacctaatcaggtgagcccgtgcgtaaacttggcacccatgtatcatattgcctaattagacaagcccgtgccctatcctagcaccaatatatctcatcacctaatcaggtgagtccatatcattgtctggcatccatatgtcactgtgctacctaaataggattttcgatagtgagaaacctaacaatgttttcagtttagagtcatgacttatcacaattgtctcacaggaataacccaaatactgctccccaacatctatatataacattgcctaatcaggcaagctcatgccatagcctagcatccatatattggattacctaattaggtgagcccgtatatcacatttcctaattaggaaatcccatgccatagcctggcatccatatatcgtatcacctaatcaggtgagcccgcatatcacattgcctaattagacaagcctataccatagcctgatatccatatattgcattgcctaattaggcaagcttatgccataaccttgcatccatatatcgcattgtttaatcatgcaagcatatgtcatatcctggcatccatatactgcatttcctaatcaggcaagcccacatttctttgtcattgtctaataagacaatcatatatttaagccactttaatggtaataaccatcacctcaatcattattgagtcgtaacgacaataatcgtaccttaacatcctatgtaatacatatataattttcttaccttatgtttttgttcaagtatgttggccggcttgcttggagaacgaccctcgatcttgagccattaagctttccgtcttctatagtttactatctagctactactgaggcttgaatcactaggttttgggttaaaaatgaaagaaaatggacaaatgggagagggtttcgttgcacgaagaacaaaggagggtttcggtttattcatactattttcttaatttttttaaaaaaacttaatatatatatataataatataataagtataatcacttgaatgtcctgatcaatagtagctccatgagtctcagcttcctagaaataactagccatcaggagtaggtgatcacacacaaactgatgaggtttcatccatgcattgataaagttcttggtcgcttcaaaacaagctagatccgatgctatccaaaacagttcagttaacttgttcttgatttttgtagtcgtgagagtgttggcaaacctggtcttcaaggtatcaaccatgctagacaacataaagtatcgagctttgttgttagcattctgccaatgatcaaacttttccttgactaccttgattgcattcttacctagtttctcagagcttcttcaattaacacaaacattgagttttcacctatgagagcaatattaatgttctctttccatttagcaaagttagctccagagaacttgttgtcagtaaacaatgacacaattcggtggttcattacgggaaactacaaatatcaacaaatatgaatcaaataaggttcaataaaaaaattatacacaattcgaaaattaataaacatttagcaagtaggaaagacatgtgaaaatacaaaaaaaaaatatatcctaaataatttctaaggttttttaactaaatgacataaagtgtcctgataggggaaagtcaaagacatcattagctgaatagaaatgtcaactcatctaaaatggataccattttagcaaccttttattcgatcaaaataagaattcaatgttgtcgcggtaggcgagagtcaaggttatt

SEQ ID NO: 111384 - DNA, 5313 bp, Cannabis sativa
tttttttttttttttctagtttacagtataactttgattctaaattataaaagttatttgtgtttagtgaggcaatcatcgatcctgctgcaatctttgctatgctttttggaagtgagctatttgaggagtacataggtcagcttgccatggcgtccatggcttcaatggacatgtttacggaaggggaacaatttgattctaagaagttacaagataaaatgagggtatactttacttcacttcaccccattcctgctctgatgccattcccgttatcattacccattacatctttgttcctttaacacactctttttcttcttcttacaggctgtccaaagagaacgagaagaaaaacttgcagaaactctcaagaaccgactcaaccaatatgtgcgaggaaacaaccaagaatttttgagtcatgctcgagatgaagcggaaaggctatccaaagcaggtaaggcctcttatattatctgattgaatcatacggttctctgttctgacaaagaaagttcattctgcagcttatggtgttgatatgttgaacacaattggctatatttatgtaagacaagccgctaaagaactagggaagaaggcaatctacttgggtgtgccatttattgccgagtggtttagaaacaaagggcatttcatcaaatcccaagtaacagctgcaacaggttatcaatcagatatccttcatatgattatttaggtctgtacaaataattacaagtgtaaattacaatgtttgtttttcggttggccataggtgcaattgctttgattcagctacaagaagacatgaaaaagcaactcagtgcagagggaaattacacagaggaagagcttgaagaatacatgcaagctaacaaaaagttgatgatcgattctctttggaagctcaatgtggcagatatcgaggctactctttcccgtgtttgtcaaatggtgcttttgctattctgtcccccccttccctatattgatttgattctgttgttttggcttagacttaaataggatgcttattatattagtcagtatgtgatgatctggacaatgtttgttttaggttcttcaagataacaatgccaagaaagaggagctccgtgcacgagcaaaggggttgaagactcttggtaaaatatttcaggtattccttcctggaccatttcttttttcgtcttttttattggaagttttcaattgtctcataatacacttcttggaaactattggatggacatagactgttaaatcaaacaatgggaatgagagagaagcagaggtacatcaactgaatggaagtgaatcgagctcatgttcccctagctctaacggtgttaccaccccagcatcttcaaatgttgaagcacagccttattccacactcgcatcacagccttctcaggtacacgctatgctgctgcttatgtcaagtctcattgggtcaaaagggaaacctttatgttacgtgcaactgtttggtgatcttgtgttattgaattcttatagagcccttacgtggaggccccacagtttacatttaacttcccaacaccaacagcaccgcctggtgccctgagaaatgcttcgacaggcagcgattagaggagaaagttaaagttgttgatccatttgtgtgctgtgtagtatatggagatggaggcgttgtctttcctgtatgtaatcaaaatcaaagttgtggttgttttgtcttgtcttgtgccttttatttggagatggaattgattatacatatttttacatgtagacaaagaaagatgaaggttggtagatgctactatgatagacatataatagaccttatattcttatttcaaagtcaccaccagttggctgccttgttgtgtaacatgctgctggagtggctgcattttgtgtttccatttgcctcttttttcttcggtacgtgtaacgtgtgtgtatatttgatcgatcaatggtcacttggacattcattcatgtacagatcagatacaacaatcgatcagtctgtcctcatatttggctgataatattcagatatgatatgagaatgtgccgcctcaccatgttcacttacacatttttatcacttcatcacaaaaacatcaaagttttttattaggcgagaaatttatttattgatctattattttgaataattctaatttgtgagttgtgttaagaagatcaaattatttttgagtttgtttatttttaagtttctttatttgaagtgtcaatttaatcaacatagctaacaagtgaaaaagtaaaggggtaaaaaaaaattcacatgcatcatatcattagatttggggaagaaagaatctaattctatacgaagccagaaaaaggagaaaatgaaaccaagcaaaatggaccagagaatgatgattgtaggagttctattctgcctacccagaagagtaaacccttgaggaaaggatatagatgaagaatgacccagaaagcaaaaaacagtatatggaggactttgtccagacgatcagaaagattgatgggaggagagcctttgagtgcagaccttgctgggatacagtacggatctccacccatggcagtgcattagaaagcctgtcaatatgtcctctgttaccgaaccatatatatatatatatatatatagatgcatatcacatacatacataggttaagatgttagataggacttgttagttacatcatacatgtctgttagttagttgagcttaatgctttcgtaatataaaattcatataactaacttaaccaactcaactaacatgtaaacacgtcctaatatctaattcatacttgttttccccattctgtttttctctcacagtcacaactaatcacatggatggcttctttgagaagagatgcagagagcatagcacttgtaattcccaccattctgttcctcttgcagagtagatgcaatgcaacaaagaaaggcaactgcccatatttcttttccaacttctgctcagatgtcacatttgaactctcacctaaaattaactctgtgcaaaggtaagtgtaagtgccatatgccattccacccttttaatatgaaaacgaaatcatcaagcaaatctccttgctcatatcaatctctggcttcatggcattatattctttttttctctttccaaagcaattgcatgtcatagtttatggatgatttttatttgtccacaaaatagtggtgcacaaacaaaaactatcgataaagtatgataaatcaacgataatcacgttttggctggaaaaccatatccaccaccatctagggtctcaaataaacataaattcaaaaaaactcacggaaacccaagaaaagcaaatatcaaaatacatacaatgatcaatttaaactaaatttactaaataaattcttaacttaaattttttttttttcaaaaaataacaaaaatctaacttttcgtcaaggggtgggttgacagtgggagaatggcggttgtcaggggttctgggtcgtcgaatggtagagtgggtcgggactgggtggaaggtgtgggagagagagagagaggggagaatttgaaacggcagaagtattttgagtcgattaagaaaattttaacatattatagtacaaattagttaggagtttaaaatttgataataaataagagtaaatttttaagcagtgaaatttcctttctgacaacacaaccagtcccaacataaaaaggtccttgaataccatccaaacctttcatgttaatgtggatgaaatgtatcaaatagaaaaaggagaaaaagaaaaacaacacaaaagcaatagttgggaaggaacttatattacatggaagaatacagtgttttggttggcacatttatcatgtctgtcaatacaatcaaaaacacattgcctcttgaaaaaagccttactattattgatgtagtgatcacaatataagttcaacatgtatggtgcatttgtgagcatggcagaaactctcacctatttcacagtcacagataaacatgcatatctaattaaatagaataattggtgaaaataatatgttactttgtaaaatggttaaaacgaaaatacaatattgcaagatgaaatagtcatgtcccccacgttggccatgaacaacctatcaaagttcatggtaattaaatgaatcaacaatagtgtatatatataatagtaattgtatatatatacatattaattagagtaataaacctgaatcatcatcatcatcaccctctcctctcctatggcagttattaggctaaccttgttgtaattactaatatgaaaaattcataaaccaaaattttgaaaaaaaaaattacaaaattacattacgaaaaaaatttcatttttacattttgaattttttttttatttacaaaaatatcccttcaataaaaataataaatcattttttggttgttttatagtttacttatagttgtattatatttatcatgatggtaatattttagctattttttttttgttgtcgtgaggttgatttctcgttattttttagttatatttttattttttgctgaacaaagtgcatttttataattttaaaactttgctagtgtatttttataattaaaaattttaaattgtaaaattgtaaataaaacataaaataaagtatttttgaaaattcccgttttattattatatattctccacatatatagcatattttataagaatgagttgaggaatatatcttttttgtatttattaattaaaaatattttgacattatattttattaaaatgtatctatttttgtgagtgggttgctcaatatactctcaccttccacttaagtatagcacgtaatttacattaatctaagaagtataatagggacatcatttatgaaagtgagtatatcttaaaaatataaaaataaaggtaaaatttgatccttggatcaattttggagatttcaatgctatgtttaacttccaagaccgagttgggtaaaagtaaatttcaactaaagaaattgaagaactggctttcttgtggtcaactgaatgagcttaaatgttcgggggctcattatacttggcctaataaacatgaggttagtgacaaaaaaatttctaagcttgatcgagttttcactaataacagttgccttatttcatttcccaaaacagaggcatgctttaaatgagagtgcattttgttagactttttatttgggcttacattaaattttattggttttattaaaacttgggttgattggatagttctttgct

SEQ ID NO: 111385 - DNA, 6179 bp, Cannabis sativa
ttttttttttttttttgtcaaagaaagacccaggttaatccagagatggtcttaactgtagaacttaaaaattaaatttccaaaccagataatatgttagaagcatccgttgaagcgcttattcaattgtcttcttctgcatttgccaaccccgtgtccaactccaaacaacaaacggaggataaagttgaattgtaacacaagtcatttactccaagtactataaataagggtatggatagaagataatgaacttgggaagtgattgaataatgtatatatctaacaaacaactgtgggcctcgataacatatttacactaaacttaaaggaatatttgatagtgcggacagaagatcacccaaaaaggaaagaaaaaaataggatgtaaagatgacactctttacaatacctcctcacatttgattagctcaaaacatcccacacctgtatcagcttcatcaccagggttgtgtttcgtacatgaaattttctgtttaacaagttaaggggatactctatatcagctaagagaaaaaaggcttcagttataaacccaactactaaaccagtcctccttgtgtgatttaagaaaataatgcagcactgccgcaaagttttaaaattaactaattcccacattaattgtctgttagctaatttgcagtatcatttcaagagcatataatgctctgatacaccaaccatatctgataatcagaatgccgatcgaatctcttaagctttaacagcattaaatatatacatatatatacacataaaaagaatagaaaatagttagtgaaacagactgaattgtttgtgacagaagcttgaccgccagatacccacaataattacaaagctgtctagaaataggatttgaccactgcaactatagatatccactgtattatttgttgtcaaccagagtgacaacaaatgagaaccaacaaaatagtgtactgtaacattagcagagtaggtaaataaaataaaagcattgtaaacaacatagtatgacattcaaaaaaaagtaaatctcagctaaaggaagatttcagtttcttcaaagtaataacaatgactataagaacataagacagtctaagaagctataattaggattagcgcattaattgatgatccatcaagccagaattacaagttgagcatgcaagtctaataggagatgagagccaaccagaagaagtaaagggtttaaagtaagaaatgagagatagcattgcagcaattccttttttgttttaatggtgtagcaattcttgtcacattcattacacattatgctttttaaaattttgaattttagacttttaatacgtactagtcaaatttggagaaattggaccaaaaataagttaaaaagaaacctacaagatgttctcctttcatgtagatataaatgggatctttctttacctttggaatttatcaaacatcaagagcaaggtaaactaaggaaatcagggaaaacaacgctcttgattcaatttttcacaattaaacatcatataattaatcatcacttatccaaaacatgtaaatgctgattatataaaacgaaggatacctccagaggatctgcagctacaggaactaattcaggtgccttctctgcagaattggatgccttctcaggatggtcgatggaagattgatggttataccttctcttttcaatagcaccaaacccattattatgagtctcaccaaaaatttgtgaagttgtttcccgagcaaatttggtcacaagagagaatttttccaatacatgaatagagagatctcgagcaggatcctggggtttcagccttgttcttccattgtactgtaatgtacttaatcttccatcacggacatttctgctggaactctcctgactttcatctaagggagactcgccaacatcaatggatacagattgatcactaacaacggaaacagccctaggaagctccaaagatgacaaagttctctgtagaaccaacacatcagtaaacctcagtatgttatgaagattgcatttcagttcaatatatcatttttttatgttaaaagtaaataaacaaatagtaagccagattttttccatacaaaagccaaaaagtgttccattctcatatgccaaaaaaatcgcataggaaatgcatcaattaagtagtgaaagttgtcaagataaaatatcagaagtggaaatgcatagtaaatggcatgttatccagcaccacatgtaaactatatctacacagttttcatcaattttgaaggccttctctctttcctatctatttataaggataaaggtgagaatcatttgtgagaaaaatatttccaaaaaaaagacatttatgatcctttcactgtttcacatggtttcacttgcataagccacggaacaggttaattctgataacaagcttccatcaagcatattaataaagcatacctggagaggattttgaaaatcattaataaggaacacatttgcatcttctgctgacctggagacatcatacaacaaaaacttaaaataaatggcatgtaaatcaacgtttgtgcataacaaagctcaataaagctgtttctcaaagatataaatatatatggtgcattccacagtcagaggtctttgttccttcttcaatagtaagcattttaattgattaaatattatattcggaattgtttttactggtaatccatatttcattttgtttttactggtaaacacaagaatatcattaactttttttgttgtcttcatgggactgcacagtatagttttgtccttctgtttttgtattgttttttcaatttatcgatccactcatattattattctatttacaatcactactcaatttctatcagcatccacaagtcctttttccctcttttctgtttataccactaggaaaagtagaggctaatagtaaaggaggcttcagttgttaaagatggaatcatttgacaatagctctctggctactcttaaaagcatgctagaagtttaaagtgccaacttattgaagcaggccaccaaccctgaaaagtgttgaaatgggtagaaaactgaaaaaggttcttctgcttcaatatgcctctgaaacaggtgttacttagaaaaaccaccaaggaccataaatgccatgcgtaggggtttaaggacccctcagtattccaccattttccccttgttggtgcaacaacatgctcctaactaaaactttacttcattttcagcacaggttatacagactcttagtcgaggtttaatgctttcgtggaagaattgtggatcagtcttatcattttgaataaaatcaaacatacaaacacttccattttagcctttatcattcatttgatggtgcccctgaacaacataaccgaagacacaaccattattaagtttaaacttatctaccaaagatgtgatggtggagcacttcgtgtagatatttctaaatatttgcaacttagctccaaatggaatttaatggtgatagacacctgggtaaaataaaaaaaaaaacaaggaacatactgtaacggagagattggattgggtgatgatcaatccaagttggggggcagccatattccattaagattgccatatgggtgcaggcttatatttgagtccatctggttgggtgagaaaacttaagaatactgaagagttcattaaacaatattggactcataatgtgtatactttctaaaaggttaaaacttgcagaagttcctcgactttttctgtggcagacctcaaatttgaggttgtaagatatattatgttgcctacttcaaagtctccataactaacacaatacttcactagacaatacagttcttctaatggaaaaaataaagagactgagggacatagcaagtgaaatctttcagagttattaaaagaaagacgacttatattgataaaaactatcagatatcaaataattggtaaacaaaatgttagagctaggatttcatgacaaatgggtggaatgaaaatgattatgatgtcacttcagttcaatctctttcctgatcaaaggtcaagcacagggcttgtttctcaacatggtattagacattgatcattcatctttatctttattagtgctttgttgtgctgatggactgttgttttgccattaatcaaagttgttgagaaggatggattcttagttgtggcaaaatagataagagtaataataatatcttactatttttaatgtaagataacatatctccatcccatgctttattaatggtcttcatttttctttttatttttctgtatgagcatctagctagaaaaataattttttgaaatgacgatttctttttcactcagcacaagcaagaatttgaagattaaaattaaacaaatacttttgatgaacccatgtccttgccttcatgccatgccatgccatgaaagatatttttgtctactctcaagaacctttttgtttctataaaaatttaaaaaataaaaataaaattggagaaagatctctttttggaaagaaatactatttttagaaattgataagaggtcttgaggacaaaaccaaatagaagcatgaaggtacgatttcttggcatggaatgtgttagtgtaagatgcaattccactaattcgtttattttaaccaagattagttggcaatacaaatacagttttcagtttatagacaagtaatggaaaaagataacaaaatccaatgaagaacaaccaacctcacaataaaaacatgttgctttatcgttgcaaggaactccttgactccaccattgtagaagtaaagaggaggaaacgcaagtcctgcaaaatattcaagtacatactaaataaagaaacagaaccacaggacatctagttatataaacgatactcaataggacatgcatatctgctaaggcttcaaaaatgcatactaatcaacatataacccacaactaggtgatttcaaagatacctgaggacaaaaccacaataatgtactgccatccaaaagcaggagtgtgccgacgaacagaccgcacctctgttaagggaactgcccttattgtatagagattcttatctgcacaaagaaaacaaaaaacacatttagcaataaaaacaacaaatacaccattcgattcacaaaattactatatcaaacctttctcagaaagcctggcgttcgaaccctgtcctttgtaaggaatccatgtctacattcacacaaaaatcacataggattctcaataagagagctaagagaaagatatgaagcgaaagccaaataagagataatcaagaacacttcaaatcataccataaacagtgcagaaccttgcttaatcaacttcaatctaccgctaattctctcggaagctaactgactaggatgaatcgtgacattatccttcgagtaaacaacttcagcaccatcaggctcgctagacgagctctgtctaccactatcgcttcgcataatactcgccgatccctaaaagaaaaaaaaaaaaggaaatcaatttcaaaatcgatcgacaatcatccaatttccatgacaaacaatcaaaaggataaattatcaaacaatcgaactcacctgctgctgagaggcggcgtaatcggcgtcgtcggagagatcgtgaatatcagtttcgtgcatctcgaatgaattttcttgagaaaaggataatagtaagaaaatgaccgattttgaatttatatatgaattttatttttcttaggagctaagcgaaggagaagaaagatactctggaaaatggcgggtcagcgtaaggaaggaggagcttcagaatttggggaaatggtatttattattctcttttcttttctttgattctagaaaaccccgtttaatcttgaccgttagatttagcatgtacgctgagggttcaacggtcagtatttaaagtaagtttggttaggactgtagactagtgtagtgatactattatgcatggtattggttgatatttcagttttctgatgccacgtcgactggtattcgtctacaatcaaatgaaacggtttagctttattttcagtaggcctgcacatgggttgggttgggcggtttttgggcggtttggcggtttttttatttggcggttttttaaaa

SEQ ID NO: 111386 - DNA, 2375 bp, Cannabis sativa
cgaaggggaaacacttgggatagaggaactattactattcttctggtgtgatttcaaagggtctactaagacctctgccattagagagcattattgagagagtgatcgagttctttgtgactaagaacgcgaaggggaaacacttgggatagaagaactgttactattcttctggtgtgattacagagggtctactaagacctctgccattagtgattgtactgtttcaaacttgttcatattggattaatgatggtggcttttggctggagtatggccataaatagatttgattcctaggactggaacaaggataaatcttgtctcccttttctattttattttctgttcatgattgattaatttcaattctgctttggtgtttgatttctttgaatgtttttatcaatctgtgtgtgttttagatgagttttgatgttgttgttgagatagaatttctaaaaatatatatgtttatatattagtaggggaatgaaaatttgttaaattttttgtaccacctcatacatatttaagcagaacattattagggtacgcttgattgggagaaataaaaatacataaataagaatgttatgagaataagaattacaatgtagtgaaataaaatttaaaacattaaaaaaattgattaaaaatttttaaattattttttatcttacattggagtaagttggtatttcttttcatttaaaatggagtagtcatttcactaaaatggtagaatagtcattcttttgaaataacattctaaatattttaaaatactaccgaacaaagaactagaataaaaattgattctcttccattccacattacattttattttattacttccaaccgaaaacaacgttcatgttttacttgttgttgtatattaatacaaattttgaaggatgagagaagttgtggtagttaatttcaaacattaatttgagttaagttgtaatgtgtggtataattaaattttactcactttttgtactcttttggagcttgttgaccatgcataaaatgaaagcatcatcatttctgcaatacaataaaaaataatttctaacaaaaatagtgatggatatggaaaatattttcaagagttttcatgtccagaattattgtacatgaaaaaaatattcatcatgtccaacaatgctagacaggggcctcaattaaaaacccaccaaatccaacccatcgtcatttcctcgtcttctccttttgactttgaacccagcagagcatgaaaactaggaccaaaaatgcaaaaacaggttcagcgggaggtttgatttaagtatttataggcaggttttcttcaaattatttatggggtttcatttacaactataaatataagctattttgtgttttattttgataaataagctaagttttggtagaaatttgatgagtgctattattttttaggatttgaagttagattttgatggagaaatcaaacatttgaggatttgttgttatttttgaaggtaagataaaattctttacgaagtttgtagtttttatttatttatttatattttatctgaatttatatacatttatatacatgataatttgttaatgatttattataataattctttttttatatatatttttatacttttttgttttatagttatttttattattaaattttttatttacaatatgttaaggttaaaaataaatatgaaattatataaagtattttgtaatagtgatttcaatatttttttattttaatttttgtagtgattatttgtataattatagtacataattaaaaattttgatttatgagcttacttattattctatatatcaaaatacatatactaagtaaagttccttaagacattttttttatggaaacataacaaattttctaacataataaaatttaaatatcaattactttagtaaagttttcaattatggactaaattaagtaatttataaattagctaattatatcatttatagttttctataattattattgaattgattgttattttagtttaactttgattgtcaaattaatataacaaacatgtaaattatttatatatatatatatatatgatattgtttacattcttcacttaggtagagcattgtttgttaaagtaaggattgtattgagcacttatttgaaattagaagaggtatgtcatttattatttactttacttttgtttattaattattatctgttgactcaaaaatttggacttgacttctaagctacacccgcttcctagattgacgagaatgaataaaagtagttaagtaattaagagagacacaatgttaccgattggaccctgtgttttgttaaatgacaa

SEQ ID NO: 111387 - DNA, 2287 bp, Cannabis sativa
aactttgtaagtaaaaatgtagtcataggcgtgtgtgagtaattttgtaataaattgtgtaaaatggatttttcatgtaaaaatttcatttttattacaacagattatatattatatatatacatataaattagtataagaacttaattaattatatataatggaatcataatagtatatatataataattaatatatgaagtgtatatattatatacgcaactgcatatcatatcttccacgcgtgctttttattatgtaaaagtggtgatgatataaatatatattggggtgagtaaatgtttttgtttgtctccatcactagctaattatgatcatcattgtatatatagatatgtaatgtgtggtggatggatgagatgatataccgatcatcactatatagttataacacatgtatatataataatataataataatataataaagtggtacgtaggtatagtggaagatatatagagcactataattaatttgtttcatattttgatgagatgacctctctcaacttgttgctgctcctccaccatatataactcacattcacatataccaaacactacccaactaactataataacactatatattatatttatatataggcaccctctaatatttaatattattattattagtgttaaagtatcgggtcttatatatatgatttaatattgtaatttttataaagtaatatatatcgctaataacaaatcgttatttataagttgtgttagacactattgataattaataacaatgcttaatgctagtataacaggacgtttacgtacgtgtaagagttttacttggtgggttttttaattgaaaatagttgagattaagaataacttctaacttaagtgtttaaagaacttgagattacataccctgaaaagaatcttaaaatgttatcctagcaatcacaagtctttcacttaaagagtgcacatcaggtaaattttgccgcaaattttgggtttttgaggttcgggttttgggctttgagtgtgtagagttttgtaccaaacctgcccgagtacaggttttttggttgccggtgttgggacaggttcggtggggttggggtgggatttttgggttcgggttggtctccggtttcttgggtgggtaaattttttggttacaaatgttccaccttacatccactaaaattataccaaacataggtctgattttacattctccttcctaagaatcctgactctcaaaacaaactggcactttattataggtaatgaccagtttcttatattatttgttaaattaaaatatgtatgatcgaccagatattatataatttgatgttcaatctaatccaattaaacttgttcaactatttaattcatccaataaattatttaattgaatcgattctatctatttgatgcatccctataacatctgttggattggattagaccatcgatccaatatatttataaaaaattactttgtaataaaatgtttttaattattatttattggtactttgaatagatttggtacactactataaaacaagtttcaattttattttacatgatattgtgtataatatacttaattattagttatacaaagcctctcatataaatgcttaattagtctctatctcagttgcatgcttaattaattaattattattttaattctttatattatacttttgaaattattaaaaaaaaaagaagatataacagaaaggaaaggaaaaatttataataagaatatagacattaatcgaaaagaaacatcattagagtagttaagataattagtagttaataattatagaaataataattaaggtctttctggattatctattttgccaataattaatataatgtgatcctactctgaatatatacttattttaatttataattgaacgaatgacacgacatgacatgaattcattatatattattattattacataattattttaattaatttaaactttataaaaattattacaagtacttaagttagtgtggctccatccatatatataatgcaattattatcatcatcactatataaatcatgtgtattgctttgttaagttataattggattaataatggaatagctaagctatatatatatataagtcaagagtggacaatgatgatatatgtttatatatatttatatatagtttaaataatgaaatttttacaccaaaaatctgttttgcacattttattactgttttactcctacacgcctacatca

SEQ ID NO: 111388 - DNA, 5877 bp, Cannabis sativa
  modified_base (682)..(682): a, c, t, g, unknown or other
  modified_base (766)..(768): a, c, t, g, unknown or other
ataaatattttattttattaattattttaagattttaaattttgactagtagccataatataattatatcatgaattagttattttcgataattaatgtaaataatataaaatacaagatgttttaagtaaaatatatttatttggtggaatatttagtgtaatgtttggtgtgaattattagagttattgtaccaaaaataaaagattcaacactaaattaatataaccattgaagatagtctaatgaagattttgattacaacaccaaaatattgaataggtgacatttataaatgttactattgtttacttttatcacatttattgaattagtaacatttaggacaaatgtgggatataacagtgtacaaatcaacggaacaaaaaataaatcgacaaaacacattgtaccaccggatataaatggagtagtaaaaaagtaataagtgtgaacagtaaaattgtaaaaaaattaaaaaaaaaatagtacctagtgtaaattttctaaatatttaggaaaatttacatgatatactaatttttgttatttttttataaaagtactgtcaggcagtattttttacttttttactgtatttttttataactttcatattgcagtatattgtgttaagttttcactgttgttttacttgtattttttagttgttctactgttnttttgagttgttctattttgtgttctagtggtgttttataaaaacacagttttttgaaaaaatttccgtatgacagtatttttnnnaaaattaacccaaatttcagtatttttgtaagttttcatatttgggaatcacggcaaaatgttgatgggcctcaataaggttggaccttgatgggaattatttgggccttctaattctacggcgattagcccgtgaggggtataaaagtcatttatgtcaagactcctgatccttcgctgctatatatacccagagctacaaaagctagggtataaaaagccccaaattttctccgctccaaaaaataataaacatcatatttcgaagcgaacgttaagaagattttgtgagtcttttcctcaaaacgtagctacctaatttctaactacaattctttacctcaatttcatttgtgagtcttttgttttcttcctcttgcaattctgttttttttttcttttcgttctaatttcgacaaattcgtggaaaattttgataggattggaacgttattgagttcatcaacttcttttgtgtgtttcatggcagatcgtgtgctttaacgaagaataatggcgacattcgagctttataggaggtccacgatcgggatgtgtctcactgagactttggatgagatggttcaaaatggtacactaagtcccgagcttgctattcaggttctagtccagttcgacaaggtttgacccatctcaagttttcgaagtcttggtttctttagtagtttgtatatactccagttcgagtttctagttttgcgaaatgtgaccccctttttttttcttctcttacttttttgttttatcctttccaatttctagtctatgacagaagctctagaaacccaagtgaagagtaaggtcaccattaaggtaagcatatctttctgctttattgttgttcgactttctgctacatatatattattctgattgtgatcttctaatactgtgtgggttagagtgcatgtattctagaacaacgactatttttggctggttatgattcaacatatagatcatatagtcatcaataggatagagtgcatgtattatcagatgtttcttgctattgtccttcaagtgtaggcttttgtttttccaaaatatatagcagtttaatgttacatcctaagataactccgtttctgaagtcaaggctctaattataaagtggtgccttctctaacatttaatatattaattgccaaatatgccttgttgaaacccgaattaaaacagctgtagagcagggtgacataagtgtcagtttctcttcacaactgttgagaagttctttgtataagaagggtgtaaacttaaatgaaattataattggttcttacctttacaaataggaaagagagctacacaattgtaagcctggattttttgggaggattagctgcaaatgaaatatgtgaacctacttgtaatgtactttatatgtgaatttaatctctgtaggcgtatatggtgtgtttgacacacaatataggtagatgcatatgcaatttaccatcttcttttaacattccctttagattctgctattagtttatgttaattgttaaggaccaaataacatgtgaaataataaaattaagatctgatgtcatttttgtagataaaacatagatgttccgactgttattgtgcttgtttttcaaatacttcttatatatcttttcagacttattatctcattaacattttatctgaaaatgtcagttaattatccaatttatgttatccctttgtatcatatttatgtttcgttcaatgttttgcagttgccgtttatgggggcctactaagtacttagtagtcaacatttattgatgagaagtgtattataaatgtaaagaatgtgctgtagcaaaatgtaaactttttgtaacaaaatatgatgagggctttttatcatcaattctgtttagtttggaaagaagaaaaaaaaaaatgtatttttgcacatccattggtagtactctatatacaagagtagtatagcttgttatttttcccgagttctagttgtatgtaattgcaactgacaactaaaatgatgtagcacaacctagattgattttgtggatcttagcaaaatatgttgataagtttagtcttagttttggtagtagcttttttgcttttccttgttaaacaaactaaaagacgtaggatatggactcgctatatcaaccttaataattaaatttgttctgggaagtctgcatattcacacacaaagtttcttattgattagcacccactgtagtattgtcctgtgttttcttatctctattcaatttaagtatactcgtgaatatcgtttgttttacattattgtttatactacttgcatgttctttgaatttctgtgttaatattcatctgtgtttaaaaaagagttgtagaggatcacgctgaatgattctcactttttcttttcctttgacttctgtgattgacgcttgtgttcagctgaaaggttgtactgcaacccaagttgactgtttttatttatttatttatctcttattttggagcatttgagtgcaaaatatgtgagaattttgacatgcttatgttttggtcctccgcagggacatctgcacacctacagattctgtgacaacgtttggaccttcatcttacaggatgcagtgtttaagaatgaggaatgccaggaaaatgttggacaggtgaagatcgtagcgtgtgattcaaaacttctcacacaatgaaatgttttaaccgttggagaacatcctaaataagttcgtaaagctctgttggtattagtgagagagggagggtaaattatggcgaggaagaacatccgaacaagtcccactgattcgtaggatttggcaacttttaggagccttaaattccgaagcttcttcttaccttgacaattatgtctatgtgatgttgatgtttgttgtgtgattgttaagaatatttctaggtttcagtttgcctttcagaaaatcaaacaatttacagatcaaacagtaattaggtatatgggaatctatctgcttgttctgtgaaaagctatggaaggacccccttttttattttttgctaatgtggattggaggagggggttgatagtggtttgaattaacaattctcacatattattcacttgaaaaatatttcaatgttctttggaatttaaatgtggggaaaaaaacagttgaacaactagtttctgtttttctgaagggaaatacagttggactattgaacaccaatttcctggtttattaaataaaaaacaaacagaaaaagaaacaattttcttaaaatacatgtacacatatgagtttaaaaaaatgatacacactcattgcttttgtaatgacgatatgcagtttggatgatcgacgactaatcatgtaactcgggctttggaaatggcacatgatgtctcattatcatcgtcattgtcattgataaggcttcctccgatcactgttgaagactaatccattttcatttttatgttttgatgattcaaaatcaaatctaaaaaaaaaccctcaagaatattcacttagaattagaagactatattaaagattttgaacaaaatgataattttgtgatgtataacaatgcttttgcgatagtagcttgaaaacttgttgcgatatttaacaatattttcgtgatggtagcataaaatcttatttttagttaaaattgatgtttaacgatgatattatggacaaaattatttttggccaaaacgatgctttacgatgttttaccatggtttttggcaaacaacattgtaccattatttttgttaagcatactttttttaacttaaaaattaggctttcgtgccacttatacgaaagtaatattattgtaaaagtatcgcaaaatcatcgttttgtttaaaatttagtttttggagtttcatatttaaaaataaagtgctagcaaaactaataaattatccatagatctgtacaaaaaatttaaattagagttttaaactaatattattggagggtttattaagtttttaatttaattacattaacacatcaaaggaaaaaataatgatgatacttttttttttttgcgtaagggtatattaagtttttaatttaattacattaacacatcaaaggaaaaaataagtttttttgacgtgacatccatatccattataacaaatatggatgtcacatcaaaaaaaaatatggatgtaatgaaatttaataaagcaaaattattagaagataattgactaaagaaataagtaaaaatatattaagtcaatagaaatggaaaggtgtactctaagaaaaatactaatagttcttaatattaatataattaaatttaaataatataaataaatatatatatatatggtaagaataattaagaaatcaaatttaaagcataattgagataacaactaataaaatatatagtaattattgaataataataaagtaacaacaaaggaaattaaatatagaacaggctctttacttgtttttcttttatacgttttcagttttgttttatttaattttcaatcatttgaaaataatcgaacaagcttgttttttttaaaaaaaaaaaaaaaatcaaattttatttaaggcgtctctagctagttaggaacacttttggtatatatttttttaagatcatatttagtatataaattaagatatcttaagggttttactatttcatttttaatttaagataagatctctactattttttagatttagtgttcatatttttggttagtttgtgccatttggtttggcttttgtactatattatttggctaatttacagtatattgttgactcgtttgctcatgaatacaacctcaaagagtgctattatcgatttttacagataagttttaaatcttacttttaattatattttaataattttagaggaattttttttctattattttatatcataatttttatcatttatttgtttgctaattgaattttgttattttttggtaaaatagttaattttagttgggatatgatttgttaagtttgattaagggattatttcacaaatacacaaaaaaaacaaaaaaaaaaatgactatttacaaaaatatgggaa

SEQ ID NO: 111389 - DNA, 1733 bp, Cannabis sativa
ttttttttttttatttattatagatttacaaccctaagatcttcggaatttagtatcattttactacatttatgtatcattaaaatatatatatatataattatgcgggggttgataatgaataaagaaataactatggacaagtcaaggtgatgaaattcatgttattggtttaaaataattcagagagagataagcaagcaatgttatgcataaagggttacctaaattaagcaataagtgtgctagtcatttttgaagatgacgaattgtcgggagattaaaagaatcattctatattagaattaagtagtggtgtttatcaaactgcttaaactgtttgaaccgttcatactgtaaaaaaatgcagtttgaaattttttacggtacagtcgcggtttgaatttttcctaaaccgtgcggtgcagtttgcaattttgaattgttcatatgcggttcaaaccgcaccgcatattataaaaatactaatttttatatttattgaggtccaatatgtaaatgttcaacctaaaatccactaattattgcattgttgaaacttattttttttttcatatttatttttcaagctttatggtatttttgacaagtgttgttcaagcttatatttgtgataatttaattatttggtgatagtccaaactgcaaaaactgcactattttttacggtgtagtttctgcggttttttagtttcgcggtgcgcgtgcggtttggaaaattgaaaaaatcgcatgtgcgggttagtttgaaaaatggtcaaaaactgcaccacttgcaccacgaacacccctaaaattaagttgtgatccaatcaaaataataaaatcaacaaatacatttctatgcaaaataatacaagaataatataaccagaatttaaataatgttataacactaaataaaagttacacataaaatagagaaaagtagatgaagagaatattacgacaaagctatatagaacatgcaaaacacaatttttaaatagtatattgttatctgtgtttctggacaaatgacacgtggcataaaatagaaaatacaatctcaaggtctcgctaattaaatccccttaattaaaccaagtcatagagaagcttcacagatttgggaataggtcaagaccgagagatatatggagatccatactgtattgttatttcaattttttccacctgatgtgacagatctacgtggtcaacatcagtgccacgtggcagtacaactcgccaacaagaaggtcaagtcatctactcaacacttcaaccaatgagaagtctgaatactcaagcgagacaacaaagtgatgaaccagccatccttggctggacctatggccaacatagggtggttctggatatctcatggccggccagcatgcatcctacaaatgcatggccgactagcttttggcctggcatgattttgatgcacaacttcccacgtggacaacaagccaaactacggatggggcgttaacaacctacgaaaatagagagaaaatatctattttcaagggacattttggttatttgtattttactaatttaatatgtaaataatagcttattttacctatttctaagggatttgaagggtgtaagctctactatataaagagccttaatcaaacccgaaaatcttaagctctaagttctaagtgattaaaactctagctctaagtctgataacttatctctctctctctctc

SEQ ID NO: 111390 - DNA, 7757 bp, Cannabis sativa
  modified_base (7084)..(7097): a, c, t, g, unknown or other
atccataacaatcaaagcatattcaaatctcacttttcagaattttaatttaaatttatgaataacaattatagatgatgccagtcaaaaattgcaaaattaaatcatagaaattacatatttttataagtttttatacaagctttctataaaaaaaaaatgtaattttattagaaagttattttatataaaaaaaaaattaaggagaattttatttgtacctcaaaaatttataagtgtaccatatttcaataatttttattttacataaaatatatatctttaattatatattagtttcttttttttaatttttttcttctagcttatattcttaaaaaagatacttatcaaacaaaaataaattatattatagatataataacaaaaaaattacacaaaattttatcaaaaaaataaaataaaaaaagtcatacattatttttaaaaaaaattatgaaaataaaattaaaataagtattgcaattaacacaaaattatgcttgaatttttttttaaaaaaaatattaagagtgattttaaaaattattttaagcttattttttttaaaaaatattatggtgcacttatcattctgtggagtgcaaatagaactccacaaaatatgggaataatagtttaaggtaacgagttacctcctcaaagtaagtaaccaatcagttatcttattctatttttccaaattttataacatttatttttgttctattttttcccacaaaataacttatttttatttttttattgaatgaaaaatcaaactttattagataaccatcttagttaccaaattaggtaacaaagcagttagaatagaatccaaactgaaattaaaatcagggaatgatacagaggcaagagcaaattcatgagccaccatatttgctgatcgtcgaacaaaataaataggaacatttcttaaaacattaagcaaggccttacattcatttaccacttgaccaaacgtagaaatcataacaatttaacttctcaaggcttgaacaaccgacatccaatccgtttcaagtaccacatgatgccaacggtttgacttgatccaacttaaggcttcccaaattcccacgacttcagctaattcaggagaagaatgggcatgaaaaactatatgtgtcctttgataagtagtccccgagcatctcagccaccaaactaattccaaattgttgagtttcaccaaaaattgctgcgtcaacattaaccttaacattattttccgttggaacaacccaatgctcagcttcgtccccttgtatcaaaccagcagacaggagctccaaaccagtcaaatgagcactcttccattgattaaggtatccttttgctgatgatatgatgctgtcaacaccaatgattttattttgcaaaactcgatcgtttctcgcattccacacaaacaaagcgactgccactagtagttcttttttctcccagtcgaggcactggaaattagctatacaccaggccaaaaatcaattatcctgctacatatcagagggtatatccactcgttcccagcagcatttaacaattgggcaagacactaaggcatgggagatttattcatcttcaagtgaacaaactgggcaaagagaattagtcatggcatgcttagtcctgagttgcaccattgtaggaagacagttggtacacgccctccacaccggattttcatctttgggggcatcttgaggttctaaaatttcttccaaaattaattcacttgagactcatccacattcaccattccttttagctcctgaatacgtttataggcacttttgacagtatacaaaccagacaactcacaaaaccaaatcaaatggtcttgagtagaaacaattttgattggaatttggagagtaagctccctgtctcgcggctcaaataaatcatttaacacctccctatcccactccaaaccatctatagtcattagattgactactttagcattttcaaggctcagatgtgaggaaataacccaagaattatctttatccggcaaccacagatctcttaacacattgatgttcttgccgtctccaacatcccacctaacaccactagccaccagattttgagcctcaagtatactcctccacacaaagctaggattagagcctatagaagttgttattagaagcgtaccagtagagtaataacgagctttaaaaatgcgagccattaaggaatctggtttgatgagtagcctccatccttgtttcctcaacattgccaaataaaatctcatagattccaaaagcccatacctccttcagttttatgattacaaagtcgttcccacgacatccaatgaataccagagttactgcttgcagaagactgccaccaataattggacatgagactctccatgtctcttatgacctcaagaggtaataagaagacattcattgcataacttggaagcgattgagagacaaactttattagcacttccttccctgctctagagatgaacttagatccccacccttgtaatctttttcgaaccttctctttcaaaaaaactcaaagcagttgttttattgcgacccatcgaacttggcagccccaaataaaggctgccatccaaagcaggccccatccccaagacacaacaaagccgattcctcaaagtctcaatagtattagtgctgaaaaaaatgaagacttagagaaattaaccttctgtcccgaagccaattcaaacttgtgtagagcttctttgacacgagcagcctcagataatgtagccttacagtataagtaactatcatcggcaaaaagcatgtgagatatccttggcaccccattagctactttacaaccatgaagccaccctctttgttcatatcttcaaagcaaagtagagaggccctccgcacagagaataaatagatatagggagagagggtctctttgacgaatccccctggaaggaataattggaccaactgcatagtttccatgaataatcttataccgcgccgatgttacacatttaaaaatcaattgaacccagttctcaacaaagcccagtttacgtaacattacttcaaggaaggaccactcaattctatcataagccttgctcttatcaagcttgagagccatataaccatcttttcatttgcgtttcctttttagatagtgcagtacttcaaaagaaaccaaaacgttatgaaaaattaaataaagacccgggatgaatgcactttggttttcagacacaatgaagtcaatgaaaggcttcatcctattgaccataacctttgtgatgatcttatacatgacattacaaagagtaatagacctaagatccgacatagattctgggtttttcttctttggaataagcacaacattagcttcaccgcaaccttgctcaagagagcaatgagaaaagaaagagcgaacacactgcacaacatcattacgcacaatagaccagcaccattgataaaaagcaggggtcattccatctggccctgggcttttaactggatgcatttgaaataaagcttccttaacttcctcttcttcaatgggctggcataagtccatgttgacattggccggtacgactggagcaacacaatcaaccacctctaaacaacttgtattggccgaagcaaataaaccatggaaatactcattcatcacttccattagacccgagtcccaagtaacccagttaccatgaacatctttcagttgatcaatttgattattcttcttccaactgcttgctgctttgtggaaataactactgttttgatcgccatcacgcaaccaaaattgctttgctctctgctttcaatagctttccctttgatcgtgagccttaaaaatcttcttcttcacctcactgtaactttgtacctaagctacattccttttactatgaagtctcttcaaatcttttttatattctttaatacgatgattaagcgtcccagttatctccttaccccattccttgagtttttcagcacacaaactcaacttaccactcaaactattagcttgaccattctcccaacaatctttcacaattttagcacaaagaggttccttcaaccaagtgttttcaaagcgaaaacgctgatgtggagcaaaagtggttgaagtcgtgggttcaaggaaaataggtgcatggtcagaagttgagaaatctaaatttgaaagagtagcttgtgggaatagctgaagccaagccgaagtggccaaagctctatccaaccgaatcttgatccaatgattggatcctcttcctttctcccacgtaaacggatgaccttgtagttcaatatcaaccaaaccacactgatgtaaaacatcattgaaacccgacagaagcctttgaggatatggtcgacccccctcttgtcctcttatttgacaatattattcatatcaccaataatacaccatagtagctctgatcgagtggacaagatatgcatcaggttccaagtatgttgtcttctactactgttgggttctccataaagtccagtaagcctccaattgccaaattgaacagaatgaataacaaggtcaatacggtgattagagtaacccaacaaactcccatcttctttgtttctccacagaatagcaagcccaccagctaaaccaacagtatcaacagtaaacgtcccatcaaagcccaaaagtctaacaagcccatccactttagctttttgacattttatttcacataaaaagacaatattgggtcttttttgagatacagtctctcgaaggaattgaatactccgttggttcccaagcccccgacaattccaacttaacacattcatgactcttggtgggtcttgaaatcagagcccacacctatcaagtttttttgtaaccccctcgtgatccattatgtcttcaccattatccaaattatcttcattaaccacttggtcatttaccactgagttagtgaggcccacgtctacatctatgactacacttggcccactagcttggccctcaatcactctccttcttttagaataaataaaaatcaacccatcatttgaattatccaccgactctcccacgttttcctccctcattagcgcctcccctgacattgaggatttatttttattgataatccctatattcatggccatttgattatgtctcatcgaaggcaaccccagattactctcctccattaaatgatccctgtcaccaccacctgtcactgacgttaccactagaccccttctctggttgagtgaggaaccgtccttaaccaccatgaaccgtccttaaccactgacgttgcccgataggtagtcttggtagccagtcttgaccttaaccaccatgaaccgtccacataattacgccttctcggagccgccttcaactccaacccatagttcttggtgatttgattctttggggtatcgaataatctcacattattaatgaagttcttttgaactttttgagtgtacatattaagtttatcaatcacctatattaaaaacaaataatgttaattttgagacaagataaagtgaatgaaaaaatagagatatattcacttaaaaagaatacaattaattagaggaaatttatcaattacctacataaaaaaataaataatgctaattttgagacaagttaaagtggaagaagatagatctacatataacctaagtataaatttaccatgatttttaaactatgtgagacatttttaaaaagaataaaagtataaaaattattgaaaagaagaaaataaaatgaaaaaattaaaaaaatttacaaattaaaaaacattaattattagaaggagaaatgccatatagccattctcctttatatatttatatagaagattagctagggccataaattgaagtcttagcaatgctagctccaaaacaaaaaggttgagtagattattcttaattactcttaaacatcgtccttatataatcattaggtttaaaacatacgtgtaatcttagactgaaactgctactttaagtttttaagcaataataattatctctcttttataaatgactctttattaagaatgtgattatttacgtctattcttgtagttgattagaagtttgattaaaattaaaaaaaaaaaaaattagtttaaaaacatttctaatataaatttagacaagtgttatcaaaagcacaaatttttactggtaccttttaatattagtttttacatattttaatttaataaataatataaataattgtttatactttagtatttagtatttagtagtgtgagtagtgagtaccataatatgtcaaacaacaatgctcctaaatttatgacgaaataaaggactattgtataagaagaaaggatcaccctatgaagaagaaatactttgctttacaaggacgaaaaggctagttaggttattcagttctatcagtaaagtacatgcttcaaaactgtatagcttttagtttgcttaaatacaaaccaaactcttcgatcaagcataatattattaatatatataacaaattaagtagctacaactttcaatgtacttgtttacgtatatatattatttgagaaaaaataatgatgattggaaaatgtacacaatgatgaagatggaagccttggcctctaagccatggggacaaaaagttaccaatggctcttgctttgacttcaaaaagggcatagagagaaagagagaacatgtggaagtgaaacacaatgttaagggcactcaaagaaaactgataattaagtatatccaaatcaatatatattgaaccccaataataataataattaacatgtaggacacttaagacagagatcacacaagcttgtttgctaggtctctcttttgttttgacaatttcacatatacattactcattactatattagtattgtcttccctttttcatcacgggccagctgtgatattttcttgcccttaactttatttgataccctcacatttttgggtatcatgtgagaaatctctctctctctctctcnnnnnnnnnnnnnntctctctctctctctctcatatgagaaattcttagttgttttctttacatatatgagattctttcacgggcatttcttcatgtatataaatgtacttatatataatattatagggtaaatagaggtataaatatttaaaattttatgtttataagcggcatatgtttatatatatttagtggcataaatactcaatgatactacatatttttatttagacctaatgattaagaatttaagccttatatgtgtcttgtttaagacaatatcagaatctgtactgacaaaattagagaaaaattacagttttacaaacattagatacatatgccgctaaaaataaacattgatttataccgcttacaaaaataaaactttcagtacttgctatttatccaatattatataatctattatatatgaatggacagcttaatggttaatttgtagcactagtatctcatcaactgccaattaaaatgcctcagtctcacattctttgctgtacatatatatgagaaaacacatcatcatatataagtcataatcgtcatataaatatatatatatataaatatatatatctattctatataaagtgtgtctatataactgaaatttttagtttatgagaatttcatgggtgactttttattttta

SEQ ID NO: 111391 - DNA, 1901 bp, Cannabis sativa
  modified_base (40)..(41): a, c, t, g, unknown or other
  modified_base (1866)..(1874): a, c, t, g, unknown or other
gtgtttatttcattcttttagaaattcatattaggatgtnnatgaaacatacttgttagtaaatttagatcctggtaaaatatttctaacagtgagttgtgtagggatactagtttaattttcctgaaggtattttttactgtgaaaataattacatatgtattaatctgcaactagaagacaaacttaaatatttacgccacataaatcttttagaaacctattaattgagggaatgagacacatgactttacattatatgttcccctaggctcctcccttgaacacaagtataacagggttagccattatagatctttatcaatattaaattgttagtatctccaaaagtactatttatcttttagttaaattctaattaaaataattaaaatgttaaaacaaagatctatttatcattactccaattgccccaattatgctttttctttagttaagattgattattttaataaaaattatataatttaaatttattaaatctaaattaatctaaaaaataataaaaaagtacatagaagtgtttttttaattattaaaatactattaaaaagtttggtaataaaaaagttgagagttcgctatctattctcccttataagaagtcattttttgtatgattaattagagctcattttataaagtttactctctattttaggtacataatgtgtttaaaaaatagaaaaatttatatttgtagcctcatgtttgatctaatttccctttttgtcgtgatcttttattttggttaaatttatcgttttttcatatcgtaattaatttaattgtttttttttagccacgcgttttgcaggtgacgtcattctttgtcttatcacgcattgtccatttgccaacgtcttgtacctcacatgcgtcaagttttcacgttttttgatacttttgataattgcaccctattttgtagacttattagtatattgtatagttagagggagcgagcggtttatagtgattttagtgggtttcatttttttaagtttagaagtttctagtgtgagaattttttagagagagttttgaaattcaaattttctctctatttagagtgatagtttcatagagggtttttcatttcaaaatttctcaagaaaaaacttattgtaaatggttaaaactcgttcttcgctttctccctctgatttctcgaagcttcttcttgacaagaagaaaatgaagaaaacaatttctgaagatgacaacgaagatctttctggtggttctgatgattctggtgatgttctgttaattaaggaagttaagaggaagcaatataatcgtggaaacaagaaggttactgacgatcagcctttgaaaaagttgaaacaagctgttgaatatgatgaagatttgtacgacagtgatgatctagaagttgagaataatgaatcgatgaaggcatgtgttctttttttgtttatatttcattttcatttttcagttttttttttctgtgattttctgaattaggtattctttttaatttttcaatttatattttatcaatttagttttgtttgttatttttattttttttttatatatttttgtttttcattttgttagtttttctttatttttttactcgtcggagatctacattttgtttacattagggtttgtttctcttacatttacatttatgttaacattagggtttgtttctttaagatctagtttttttcgtttttctttttgtatatttagtttttttttatttgaattcttttaggtgtttcatatgtttaaatattttttgtatatgatttagtttatttttttgttatttttttattatatacttgtaaagcccgcttagtnnnnnnnnnaattagcagttaatcatgattatttat

SEQ ID NO: 111392 - DNA, 10938 bp, Cannabis sativa
  modified_base (44)..(56): a, c, t, g, unknown or other
  modified_base (10857)..(10875): a, c, t, g, unknown or other
agtttgtaagtgacataatcccaatgtttatttttagcggcatnnnnnnnnnnnnnttgtaaaactgtaatttttctctaatttcatcagtacacgctctattattttcttaaacagacatataaggtctagattcttgatcattgggtctagacagaaacatgtaatatcagttacttccaaatattcctttaataaattcaaaatggaatctgtacggtcaaaactggaggaaaattagaattttataaacattaagtacttgtgccgctaaaaataaacatttgattcataccgcttataaacttaaaactttgggtatgtcgctatttaccctatatatgatagtgtaatagtgcttacaccaaactaaccttataattaccgtttaatattttctatattgtcctaataagaaaatggataaataataattatgacatcatagtcggcgacaaagaggctctcctgctcttgccatctgtgccagcttttagcttcttctattcaaactctttcttcttctttagtatccaattctctctctctcttactcactgttcaacactctcaatcatcaattcccaataacaaaaagaactctccacgaagcttgaatctcaaggaaaccttcctttttctctctcgctttatcttatcatcctttgtttatatgtgcatattacatatactttgtgtataagcctgtgaagtgaaggagctaagctagggcttccttgcttgcttgtgtgactttgggatttgattgaagatggcggaagattcctgcgtcacgcaactcatcgacggaaatggcgaattcaacgtggcagggcttgatgaattcaccaagaaagtgaagctcgctgagtgtggtctctcctatgctgttgtcgccattatgggtcctcagagcagtggtaattgaactgaattgagttttatttttattttcttcattgagtgtagtgatgaatatatttataaatatatagaatttggttgcttattatttgacatgggaagggaattgctgcacttgaatgatgttgcattttgtttcttttcttcttttaatcttgttgggttacatattctgggtgcagggaagagtaccttattgaatcatcttttccacacaaacttcagagagatggatgcttacaggggaaggttagttttttcatgacttttagcttttttaattttcttgtatgcggttatacttgtatttttctcaatgcattgttggactaccaatttccatactgctgcaggagtcaaacaacgaagggcatttggatagcgcactgtgttggaatcgagccttgcacgatagccatggatttggagggcactgatgggagggaaagaggcgaggtgattagttaactattgcttataagagtattgcaatgaaaatactacatcaaattgtgattattggttcgagcttatgtttgtactttgtcctgcttctgctttatgtacatgtatgaatgcgtgtgtatatatatatctaaattatgagtaataaatgttgcaatatgcttaaatctagactctctctctctctctctctctctctctctcacatgcgcgcacacacacacatcaatagttttccttgtcaaaccaatattgaaagacatacgatgcataacattgaataagtaactcaacagtagggtcaattcaattataatcgaggctgaataacaaatgagtcctgcacttgaactatttctctatcattattttgtaagataaaggagtttattgaatgaagaaaataatttctagtattaagtatattgaccaatgacctcttatgtagtacgcttgtgtcctaccattggagatgtgaaaagaacatttgcatcgcataaatctagtgctagacttagaattagtctgataatcgttgaactcttatgacagaattaaaaatggttcacatacaataggcttcatgcagagaattaaggtaaaaataagtgtactagtgatttaaagaagaaatagcaacaactgtgggttcttaaacttttatctttctttatgacttttatctcataatatttacatctgtctgtaattgttcttgtttgtaactatttgatgtcgtagccactcttctgtacgtatattcttgataccacatatgcacatttgatgctttttcatttgagaatgcatgaatgctgtaacaatagcctaatgttctgggagttgttttttctgaagtcttaacgggtgaactttcatttggcctcatcttgtgaacaaatctgccaatgctgatactcttttcttatattatctcactttctcacaggatgatacaacctttgagaagcaaagtgccctttttgccttagcagtttcagatattgtactgataaacatgtaagtttgaatgcgggttacattttggtacttatattgcatatttcactagttggtatacatgttgtcagttgggtttgcttttgagtctttggtcaagccacgctcagctagaattaataataggaattatcctagccctttagtggtatcttaggtcatgttaggattgtgctgactattttgttaacataacttttctggcctagacagaaattcaactgtatcttatatgcgtttcataattatcagagctttgttgttagattagataggtgtagtcacccgctttttctttagaaaaatcttgatttgctttgccttctgtgctcgggctaagcccttgccttgcttttctccttttagctcggcttagctatctgcctttccgactaactcatatggtagtggggactgctgaccaccacttacccaggctggcttaggcgaagacttccattgttatgggaagccttcagcctctgtaaaaaaaaaaaacgcaccttttgatggtcaatagatattatcataatttttgtttgtatggtggaaaattaaattttataagatggtttagcattatattgcttcttgagaccttatagttatagttgacctaactatttcttttgctcatgtattatttagctgggatgtacttgctataagaccttcttgaaatttggatggttgcttaaaggatttgatcatcactttgattgtgattattgttgcaaatttgttgctttagtaatgtcaaccagtttttctgttttttttccttcctattaaatttgatcaatgatgtttatactctaatttagattgtgttcatgtttgtaactaggtccatttttttttttgttattttcatacaaagctggaaggaattaaaatcttctcattttttgtgcattttctaaaaagttctaatcaacttttttatatcctttagtgggattggcctttcttaaataaagtagcatatttatagcctttagtttagcgtctgagacttccagtgttctaaaatatgtatgaaacttcattagtcagttccaatgcttttttagaactggttgtatgaggatttgaatgaacatgcccttaaggtactcaataaattagtcattgtttaaatattaatctgagttctgagattaaaattcacatccaggtggtgccatgatatcggtcgggagcatgctgcaaacaaacctttacttaaaacagttttccaggtatttgacattgtgctttcgctgcatgtttttttacggagcaaagatgtattaacaaaatatgatatagatcatctgagttaacataaaatactggcattacatactgtatcttgcctcatataaacaaaactaacaaatacattgcacaaccatgacatcttacagccacagctgctaatcgcacagaagcatagaaaaggataagttatttaatcttccccatatgaaacccacattctcattgtagtgctttcgctgtatgttactagttaccacacaattacgccgacaatttgttgtactattatagttttaatctgtgataggtcatgatgcgattatttagcccccgcaaaacgacactgctatttgttatacgtgacaaaacaaaggtgtgtttttcttttgttttatatatcttatataatatctactgtgaaattgagggtatattttggtccaatattagttaacctctttctggtttaatattttttgggtatagactccacttgaacgattggagcctgttttaagggaagatatccaaaaggtaattttatcttttgtttgcgatgactattctctcctgtcttccaattctctggtctctttcttctgcatttctcatggaccaatttgtgtagatatgggactctgttcgcaagcctcaggcccataaagatacgcctcttagcgagttttttaatgtaagttctcactctgattggtgatattggtttccctgacacgtgataagcttgatgcacatctcctacgaatattcttttccatttacttgcaggtagaagtagttgctttgtctagctatgaagagaaggaggagaaatttaaagaggaggtaattccaagaattataagtgctttattaggtcgtggaacttgtatagattagttatctgattacatgtttgtgacagtcttggaggctgaataaacttttgttcatttttttttatctaaggctgtttgggctattctttttgcacaatgggtatatttggcagttatcatctttgtgaatttgttatgtcaaggaatctttgtttctttggttttcttgtctaagggtgttcttttgaactcttgcataatcagactttgttctttgttcttcgttcttctagttctttctattctttgatcaataactgtaattcacattttttccctatctaatttaatttagaaagctattgtctattaaagataatgtaatgtattttcttacctttatttttcctcttggaaagctcaatacgtgtaatgtttgtctgacaaaggccttattgattttcctagttgtatgttgtgggaattatgatggtgagaatgtaaaatcacttcttttttggtactattgaatgagacctggataatattctggattttttcttttttagtgtggaaagagtagaaaagtgttgttgggcttgtgctatgttttttttttctcttccttggcaatttttcaataggttacgctggaggagttaattttatagggtttttttttagtaaatttcttataggagattaaaagtacttgccaagagattaatattgatgtcagtttcaatctctaaagtacacttttgaatgcttaatttatttgggccaaagtaataggtggtagggttcatcactaccaccatgcattattcttattattaataaacttctgtcatctaaaattcttaagctcacttatagaatatgttgtatgaagctgagtatgtcccactgaagaatttatgtatgttgatgtttatgaagaaagttggcttcaacagaaatgtttcattattttatattaacttccacctttttatggtgatattgaccactattcattgtatacaggttgctcaactgaggcagcgcttttttaattctgtctcaccaggagggctagctggtgatagacgtggtgttgtccctgccacaggcttctcttttagtgcacagcatatatggaaaattattaaagaaaataaggacctcgatcttccagctcacaaggttcttttatctctattcgtactcaatttcaaataaactagaactttaatatgcatgccatattccattcagagataatatttatatattttataggttatggttgccactgttcgttgtgaagagatcgccaatgaaaagttcaggcaattgacctcggatgaggtattcatttatgaatattcactctcttaaacacttgccatatgattgagataattgttcaataattcagtggacatttttgtagggttggttggcattggaagaagcagtacaaacaggtactgtaccaggttttgggaagaagctatcctcaatattggaaacctatctctctgcgtaagtcctttccactctcttcatattgttttatgtattttccacattctgaacacggaaagaacttagtgtgcctacacatgctaaatgcattgccttttcctttcccacagatatgacatcgaggtaaactactttgatgaaggtgtcagaaatgctaaacgccaacaattagagtccaaagcattggaggtaggaatgtatatttgttgcagtgatcactaatttttttagtcattcaaaatctctagaggttaattgttctggaaaattatgttaacatgccctccaaaaagaaattgaatggggaaaataaaaaaggaggaaagagatctttacatgggcaggaaataaaaagttcctattagcattgattattctcaaaagtttatttaatttaaacaagaatggtgatatgtttaagaagttcatgaattccgttctcaaaagtttatataatttaaataagaatggtgatatgtttaagttcatgaatcccatttaaagatgaaattggcataaaaagattgacagtggatatacttgtttcattaaatgcttaaagatgagattggcataaatagattgacagtggatatacttgtttcattaaatgctcctatttgtcctaactacaattctctcatggtattttcagttcctataccctgcatatgcaaccatgttaggaaacctacgctccaaagcacttgaagattttaaaactaagctggggcatttattgaccaaaggagaagcatttgcgtcttctgttcatgcatgtgctgagtcttgcttgattgagtttgaccaagggtgtgcaggtaatgtcagaaaagatattgattttggcaatcatgtcattgtcatcagaggaactgcacatgtactttgactttcttgcgatcacgctttttgcgcctttccactgttcagtagtttcggaccattggtatatttgtgcagataaaccatgttagaaactcatatattgtcttaatggtatctactataatttatcatcaatgcacttagtagttataggtatttgacatgatgtttttcatagaattttctttgagtagaaatattctatcagcagtcaagatacaaataatgaaatccttcaaagaaatgtttattaatttgctgaaacagtacaaaatcaagcattcgagaggcttgtctctcctattccaatctttcaagaggaccggtctctccgcaagaatctactcttatctaattccattcccagctgcccttacaaaaagaccccttccctatttatagacaatagttagaattttttaatgccaactaggatccactaagaagaagacaaggcagccccgaacttaaccaaaactgccagcaagataaaaagaataaaataacaaaaagactacaaaaacacaaagtactatatttacttgggcagtctcctattatatataaaatgtataggaggcttatcagttttgtgatatgttgttgttattattattattattatttttgtaagtgtatggatataatttcttcataatttatattatactggattgattcttgatgtttacaatctatttttgctactgtattagctcattgtaaatttatatatcacatttttgccttaatttattagcctatcctccttgcagaggctgccatacaacaagctgattgggatgcttcaaaaattagggaaaaacttatacgggatattgatgctcatgcatcatctgtttgcagtgaaaaattgtcagaattaattgccaactatgaggtattactctcctcggcgtacaaaatactaagattatggcttactgatatattgtttgtaaatgcctaattgccgatacaacttttcatgcagaaaaaactttcagctgccttaagtgaacctatagactccctatttgaagcaggtgggaagaatacctgggcatcaatacgaagactgcttaaacaagagactgaagttgcagtatcagagttctcttctgacatcactggttttgagctggacgaggaaacaattagaaccatgttgcaaaatttgagagattatgcaagaaatttggttgagaaaaaagcaagggaagaagcaggaaaagttttgattcggatgaaagacaggtaaaaaatctttcaaatgtttatactttttcttttcttgcaaaattttggttatctatttgctggaaaacattttttcaggttctcaacggtcttcaatcatgacaatgattcaatgccaagggtctggactggtaatgaagatattaaagctatcaccaaggaagcacgttctgcggtaaatttacttatatttgaataaagtttcatcatatacatgctgctttgtctaaaacgatttgattgtcttttgttcataatttctttcagtctctgaagcttttatcagttatggctgctattcgcttagatgagaagccagataagattgaaaatatactctttttatcactcatggatggagctgttactgtttctacatcaagaagtagggagataggaaatccgacagattctcttgcctcaagcacttgggaggaggtatgttcggcggccatttttggattttctatatggactttaatttgttcttatttgttgtaaattattattcaaattaggttcctcccaaggacacacttattacaccagtacagtgcaagtcattgtggagacagttcatgagtgagactgagtactctgtgacgcaagctatgtcggcacaggtgaagctttgaaatattcccatcttaaaatatcattaaagtgtaattcactttagtaatttatggtagagatatattgttgtgataatgggatccttgtgcttgattaatagaaatgtttgaactgaaacgaagagtttctaattgagttcgcaaaagtcatgtaattctgttttgacttgcatagggttttgacacatttgtgccaaccttcaaatcactaccgccaaaagggaaattgtgcataataggtttttcgtttttttcccctctggttgaaaacaaataaaatattttagattctcaatataggaatttttcaattagtatctaattcaaagtgattgacccacatcaatgggacatctgtttaatatgctgtgtgacaatttgttttttagacaaaattctcagtgccagattgtatctgatgttcaaattctgatatcttttgtgttggacagattttaattttcagccttcacgtcatttatttcagtttccttggcatttgtttgttagagaaggtcactcataatttttctgtcatatgaccgtgttcttcttttattacaggaagcgcacaaacggagcaacaactggttgcctcctccgtgggcaattgcggcaatggttattcttggatttaatgagtttatgcttcttttaaagtaactatggccactcagacttagctactgatcctatttccgaaatttacattttcaccattgttattttttttttgttgttgactttaatttgttgaatgatacaggaatcctctatacctcatgattttgtttgttgcatatttactttcgaaagccttgtgggtacagatggacatttctggacagtttcgtcatggcgctgtgagtgttaatacaattctttgcttacttttctgtctcccaatgtgatttttataggggagtcaaatgttatatttgtgcctgctagattgaatgtgcaatagtgttgcaaaagaacttatacatctctatatatcaagcatctaattgacatttcggattcacttcactgtactgcctcctggcatagatttaacaacaaaaataagttggggaaagttaataacgtttataccatgttgtcttgctttctggcattttatcacggaaggaaaaaatgctcaatatcacaagtgtgattaccttaataataactatggctgcctcatccatgattgaatcaaacacatactaaatttgtttcttcttggcagctggctggattactatcaatttcatcaaggtttcttcccactattatgaaccttctaagacgactagcagaagaagcacagggcggtccaacaccccaagcatcaggacagtctggacctataatatcccagggattcagacagcaaacacatggatcgaatccattatcgagctccattcccgaatcctctatatcatctaatatttcatcgtctgatagtagtgttgaatactcgagccctaacttgagccacaggagacccacaaaaattgaagaaccagaactttcttaatgcaagctttctacagtagttttgtctatcagttttagtgccttctgttgtccttattcttggtcgatggaaaaagggagagggagatagttgcaatacacagtgaaaactgtcgtctgcttatatttcaggtgaaagttcgttggagcaaaatttgacaatgaaaaattctgtatactaacatcattatatataaagaattgttcaaataaaaaaaaatgaaaatattatgtattatcttatggtaaagttgtattatattattttatgaattttagttgtattatggtaaagttaggattcagtggctcgaggactaagtccaggattggaaactcggttggggtgggggtccaaagtttgggttccaagttcaggcttggggtagagtccaggtggattaggtctaggtttgattctctggttaggttggggctaggtcctgggtctacgctatgagtcaggtttagggttggaaatatttattttaccaggatcttannnnnnnnnnnnnnnnnnntgtttaaacaccctaaatatgaaatttctaaaacgataaattacacatataaagttaagaaaa

SEQ ID NO: 111393 - DNA, 5065 bp, Cannabis sativa
tcaaatattacaccaaatataacaaataataaaaatattttgtttaaaattttttacattttttattatttatattaatagccaataataatttatttatgatataattattatattattaacaatttatgattatttttaaaacaaatcaaaagaatgattagaatgaaaagaataaattatgcaccgtataaattcaaaatctaacactattagtattataaaatttaatgtacactaatttgtgtcttgttacaaacttatagtgaaatgttgtgaaaacttttaatggtgtgctcttataggtctatttgattaattggtggttaggtgccacgtattgaataggatgaatagggctgccgacagaaaaccaagaaaggaacccataaactcagccaggaaaaaagataaaacaactatagtgacatatttagcttcaatctaaatcaaaactcgaagctaacaatagcaattcaaagttcaatcatccctacaattttgttttattttgttttctctctttataaatgtatttccaattttattccacttatttaatgtattatttatttgaattttcaaaaggaaatctccctttgggcagtgccatcctctcattcactattttattagtatcttgcctgagaaatgaattgatctttaaaagaaacgtcaaactcaatgtaggaagcaagaacgtcttgctccagtgtaccacttatttaaatacagaattttaaaatcatcaaataaaaccttattgcagaattttcaaagatagaatagaactgcaaaaattgtaaaagcaatgcttttgggagaattagaaacaagatggtcataacagtctgataaggttgaatggttcgacattttgatttggaaaatactaaagaattctttttttttttttgaaagaaaatactaaagaattctagtagtaaatattatattacaccaatacactgtattaaattacatattatattttcctacatatattaattgtataggtcgttacggatgagttctaaataattgattgttgaaattcggaagtattttattttagataaaccgattctctataatcagacttgttatgtcaccgaaatgttcctatttattattgttttttttaaaaaaatacttttatgtaatgaataatagtacaattatctgggcttcaaagatgggcccatttaatacgaaaagaaacgtgttggcccattagtgaaatgcagaaaatgctccttttctttttcttggctcccatcatttcagtcctttttatttggggagatggtgggaagtggaaccaatgcttgtcttcttgagaaagtttacagtgagatgtagggaacatttttcaaaatatctgaacaacaaagcaatagaattcggcaacttcaaaaatatcaacatctccggtcacatctttgattgtgccaataataaacagtttttcatgacagaattatcttttgaaaaaactttctattcgtttaaatcacgaaaaaaggttataaaatggaaggggatataatatatcatttctgtatggcgatgaaacgtaccaaaaaggatccgcttttcaatagaaccggatctgaagagagtccaactcacttgatgacccgactatgcatagaaaaaatgtgaaatctgtaaaatgaaaatggagaaagtatcaatgaattgacttttgaatcattatgtgttcatgtctgtgttaggtctctttgccattgttgaagtttaatgaaaagaaagagaacagtaaagagagaggaaagaaatggaaagagattatatacacagaaggaattaaagaaagctaactaattaccaaccgaagtgagtcacaaaaaaagctaaacagattctaatgaccactgataaccacacttaacagacactggtacagcttaactaacagctgacctagctaattatactagatgccttgatagtctgcaacatggtaggaactacctatcttataataaaaacttctctatcctatgaaatctctcgacatattagcatggacaatataagcatacattatatccaaattccctttcctaattttgtttatgttacctttctttttacatggttttgtttttttttttttttgctaaaatttcaaatgtgcacataataattctaacttgctaaacaaacgacattaaattcaaatattgaaataatcattttaataaggtttgaggagtaggacaacttttcaagttctgtagtattctgtctagaaggaaatatgaagtctttattttaccatcaatttataagtatcgtattacagctctgtctctttcgcctccttgctttccttagaatcctttttgtttcttcctccacttcgtcaatcaaacagttacctaaatcttttttcaaaataaacaaatcaaaaactcttctaagacaatagttctatgaagctcatatttcttgtcttcatatctgaatactagctagcaatggcaactgaaaattcttctttcaccaaatacctgattcattttctttaaacaggcaggaaaaacctctatcaatctcctcatctgattcaatgataattctgcattgcctttcctgcatcattgccgttcccaatgcagcattggaatagacttaaatttagtttagttcaacaagcagaaaagaggagataaagaagaaaaaaaaaaaccaaacttaaaacttcaccttatgaagaggagaagctcctatttgtttgtgcatcttgttggctgtggtatttgttaaggtatttttttccgattttactgatttccatcctcctgcttctgtcttgggaactgctacaatcgcttgtgcagaaaccttaggagatgcagctgatccaaaatcagtacaattatttcttatctcttgaaacctgaaaggaagagagagcacgaacataggtgagaggtacgtcaggtctaagttaaagaagatgtgcaaattagctagaaaatatcttgttttggtcataaaaaacatttagctatttatccaacaagaaaaatatgactataacaaattttccaaatcggtaattagctgtccctcaaatcaattgagagattaatgtaaatcttagatgttaacatgacactatagtgtcatgatcatacgtaagccaaaaggagcaaacataatattgcctggaaagattaaaatgtaaagctcttagtgcacaggatggtcacatttctacgttacaggctgtcttgcattactttttcattcgtatcttcccaatgtaaaaatcttacttcataatctgctgcaatttttcttgtctggcggcactcctggtagtaatctgctaatttccaggtggaggaaaaaaaagccttctaagaacaaacttatcacaagtgaatgactggaatgaagtgattcgacaaaagaagaaattgttataacaccttattagggggaggaatcggtgccacttggtctttccggtcaggtaacgccgttgcctgcagcacaaattaaggtaaaaacaaattcaacaagctgagagagacgtagaagtagtatgggaaagtccaagggatcaatcggaaaattgcaaaggactcatgtcagatagaacagagagggacaatatactatatatcaatacggtaaacgtaaccaaaaataggaaagatttaatgttcctggaccatcacgtgagatgttatgctacctgcatttccttggggagagaattacaaaactcattttgtgatttctggataaaagcttctatcttctctggtaacgttgaaagcaccgagaaaatatcttgaaacttgtcttgatatgcatgcttgttgacttgatcggatgtagatttaaagcccgcttctaggctagctttgatatcttcttgtcccttgttctaatttaccaaacctccttaatgtaagaagtctagacacattcacgaatgcttgaaacaacaaaacttaaaacttagaaatgaagtatggacactattttgtggggttaccattaactgcagtaagttatcctgaaccatcaatttctgccgaattccttccgctgaatttgaatgaacaaataaaagtaaaatatttacagcgacaaattattaaaagtactagaaaatgaaaaagtttattaaatcacagtcaagccatatccaatgtaacatatatgtgtaataaaaattgtttgaaaacgaaattcaagctagtttccaagttatttgccttcaaatttcgtggttttcagatagcaaggttgcaaatgtctaatgcagattgcacactattgcaaacacaattttcccagatagccctctaccggttttaacagttcaggaataatatactcactctctagtaaaacttcctttgtccctttgttagcttgcataacgtcgctctgaacagaatccagtatcattccgaaccgatttagtgaagtttccatcattccaatccggtgttcaagctcttcgctgatctgccctgctcataaaataaaacatcaatatgtcgttgatggtcatactcatgcatgaaggacaaggatttaattgacacagcttattcttttggataaacttgttacacaactgtcaatttcacatttagaagtaagcttacatttatggtcagaaagagaagaagaagtccatttacgcggtaggctggtcgaagatcttgatactggcacctgactctcttcacgagtatgactggtcggtggcaggcaaactgtcctctttacatcccgttcttcagaactgaatctgtgtgccgaaaactaagtccaatagaagagtgcaaagataaatacagcatcgcaatttattcacgcattagtaaacattataagctatttaaaaaatactttttgaagattagtggtagccatattgataccagaaaatatgtaagaactattgaaaattaaacattaattttgctgagcattcttagaaagcttatcccagggaaaactttccccttaagcacaaagggaaatggattttctgccctctgaa

SEQ ID NO: 111394 - DNA, 1393 bp, Cannabis sativa
  modified_base (564)..(564): a, c, t, g, unknown or other
tctatatcccataatagctatacaattacatatttatagtgattcacacccttagcaaattactaataaactcctacactatttcatagtgtaacaaattctaatttctaacactctcctcaaaatgaaatgtatatgtctccaattacatcttgcctttgagaagcttgaactgatttgaaaatagaagctttgttagaatatctgtaacttgttcattgctttatacattgttggtttatttgatctttttttgcacgttctctcttactaagtggcagtgtatttcaatatgcttagtcatctacatttgtttttatgcgttgagcagctttgttaacacaatgcaaaattgcaggatcttcatgtttgactttgaattcttcaagccactacaaaaaatagttatttttagtgataatattttagtctcaacgtaatttttctgtgactaaatgtgacttttgaccacaaaaaagattatttatggctaaaatattgtatttagatacaatttgtcagtaatttagttttagtcccaacaagtattgtgactaaaaatanatttagtcataacaaattgtaatatttgcgactagtgcctttttccacagactttttatccacaatatataaatgatgatttataattagttacaacttttttacatttagccacaaaatttgttttgactaaaagtaaaaaattttgtagtgagaacagagtgaatccaaaccatgtggaccatagctgtgaattctaccttaacagaagatctagaaacaatatgttatttcttatttttctaggagatagattgattacccaagtaagatgataaaccatgttgaagatcttctactatcaggtcaaactacacagttagaatcagtataggcatctaatctaatcttggacttaggtgacatgaaaattccttgtcctggaaaagcttcgacacactgtaagattctcagtgctagtttcatgcgttaactaaaaattgactgaataggatagatctatcctggttatagtcaaatattggtgtttacaaaatattcttctttacaaggttgggtttggaagttgtcttcgccatcttgatcgagtgatttgtttccataggggtattcattagtttacacccaagataccctaaatcttcaatagtttgaatttcatatggtctttgagataaaacgatccctttgtcacatctagaaacttttaatccagaagaatactttagtttgcccaagccttgcagttttaacttgttattcaatattatctgttatattatttataataatataatatataggataaatatgtgtaataaactaataatatgtaatatatgacaatgtatattagttgtcatctttt

SEQ ID NO: 111395 - DNA, 7903 bp, Cannabis sativa
aattcttgttcataattcatatcttgaaatcaatcaatctaaagatagacaacttggtaatttgaatcattaaaatctacaagttgcactttcaaaaccttttgttccaagagcgagaagcttgtttgagtccataaacggacttcttgagcaggctgatggcacacgggtgaatgattcaagtaagataattgatgccctcctttcttattacattcagctattggggtctaaaatgtagaataggagacaggctatggcaaatgtcacggatatggggcctacattgacttcacaacatatggatgtcttattagcaaaattcacaaaggatgaggtgaagcaggaaatgtttgatatactaggcattaaagccccaggagctgatgggtattctagttatttctttcaggacaactgggatattgtggaaaatgcagtgcgtgaggctgtgattttatttttggaaatagggaaaattctgaaagagataaactctatgatgataactctagtccctgaggtaaaatgccctaatacagtgaaggacttcaagcctattgcatgctacaaagtaatctataaggtagcaacaaagcttatctgcacaagacttaagcatatccttcctgatttgattgcacagaattaagggggatttgttaaaggcaaatacattggccataatattatgatctttcaagatctgattaggcattttgagaggaaatccaataaagctagatgcatgatcaaattagatctgcataaagcttatgatacaattgaatgggagttcattggggaaatttttattgcatataagtttcctaatcagtttattcatcttgtaatgaactgtattaaaactctcaaattctccctcatgtttaatggttcaatgcatggtttttttgcttcaaaaaggggattgaagcaaggggatcccatgtcccccttactatttgtcttgagaatggagtatttgacaagaattatgaagaaagtgggtatgaaatctgatttcttctaccatggcaggtgtgaacacctacaactaaaccatctcagcttcgttgatgatgtgttattgttctgcaatggggattacaagagtgtgatatcttcaaggcctgaaactattttctcacacttcagggctcttccctaatgcatctaatctgcaatatattgtagtaacatgccaaagcaagatgtaactcgagttctagcagcctctggtttcactcagcatgagctaccattcacatatttaggggtgccaatctgtgcaaagaggatctcgagcaaagagtgtgcaatattagcagaaaatatgactgcaagaattagaacctggagatctagacatttatcatttgctggcagagttgtcttgattaactctgttttattaactattcatgcctattggattcaggtgatgctgcttcccaagaaagtaatcaaagaaattgaagcaatttgtagggcattttgtggaaaggcaacatttgttccaaggggcaggtgttattgcttggaaaactgtttgccaaacaaaaatagcatgatgtattggattcaagagagttaaagaatggaatcaagctgcaatgatcaaatatgtgtgggcaattacaaaaaaagaagaaaacatgttggtcaagtggatacacagtgtttacatcaaagaggagaactggtagaacttctctatcccttgccaaggaagctggtattggagacaactagtagctctgaaaaaccagatctggcctctcattgatactcaacagtttttggcagagtgatatcaaatttcagcaggttacaacctgctctgttctgttcaagacaaaaagaggtggagtgagtaggtatggggaaggttcaatactcctaaacatagttttatcctatggattgctatacaggagagacggagaaccaaagcaagactatacagatatggcattgttggagatccttaatgtgttctgtgcagcaatgatgaggaaacaaatgatcatttgttttttggatgtagcaaatctatagcttatttttatgaaattgcagcatggatgcaatagagaatcactgatacaacactacctcgactaaccaggtggattcaaagaactaaagcaagcaaattcaaaaagaaagtaattgctacatgtcttggtagcctagtatgcaatctctgaaaaacaagaaatgatgcattatggcaaggaaaagagacaaacatggctcaattggtgagtaaaattaagaaaaatgtgaagcaaagaattgtattagtgtggcctagaaaaaatagccaaaaagatgaggaagggtttcattctttgtaaatcttgtatagaaaattacaggccataacaagtttgttatggtgcttatagtttgtacaaattatagataatttgtaataaatttcttaattcatcaaaaaaaaaaaaatagcacattatttatctttatttactttttaataaatattatttaatctttatattaaaaattccctttttaattattagttctaatttttgaataataaattgataaatcattgtgagtccgactagtaatattgataaaaaaaaattattaaatttgttacggtaaaaaacaagtatgaaagtgctatataagtgtcctcaaaagtaagcctatttcaaagattctaccctttgatatgtataattatatatagagagagaacataaatgaaaaaaatacatatactaattagggattaaagaaggttaagataaaaaaattaaaacacaaatccattatttctaagaatcaaatatttgatggccttacaatgtgaagacccttccaatatcaactctgctgtcttactcaatagacatcgtttttggtagatgcattaaaaataatagctcaaatttaaatccaccagaccaagcagaagcatcatgtaaaaagttgtccatgtctgcaaaatggagagccaggaggtgcagccagaccaagactttgcatcactttaattcttcgggcactcaattcttgagacttggcaagtggtgtatcctgagcagaaaacattgtcctctcatgagttgaaatttcaagaaaaaaaggcacttggtgtgtaaaaggaaataaaaagtgaaatatactcacagggcttgatctagctagcttccttttcttgctaagcgtctcatcgggcttaggtatactcttacttgttttctctaggcttttctcagaatttttccttgtactgttttgcttttcacggttcctctttttagattctgtagagcttttggaatttcgcgtgaggtttttccttgaattatctccatcacagtgtttggttcttgatttatctgcacgccatcattgccaacaaagatttatctctcaggagacagtaacacaaattgattgacaaacaaaaatgtcaatcctacatgatgaaaacaaaagaatcaaccttcggatttggctttgcgcttctttgattcaccagcttttaagccagcaacctcctgtatacacataaaatatatacaaaaccgttcaatggaaagcataatgcaactgtgccgtcctacatgagtgacatggacaaatgaaacataatattttaccagttccaaagctttcaaaaatatttttccatgagaattgttgttctgcttaagtacctgagaagtcaaggattcaacatgtaacaaggcaatagatttgatgtcaagacaaatagtcaattgtgaacaagtccaaattagcgtaaagaaacagtatgccgcaacaaaaacttactgcgtcgaactcagaaaaatatttggttggatcaacatacaaactgcaagtgacacaagaaaatattgatttatagagtaaacaagaaaacacccatcagagaaagtggaaaaggtactcactaagtataagttccataaagcctaacaagaacttcccctgctgatctgctgcctggtttactagtttcacttatgagattttcatcaacaacctaccatggttaaaatatacaaatcattggataagcacataatacaacatttttcaatggcgactcaaattaagaataacatatgaactaactagtgcgccaaacaaacctgtccaggccaccacgagcctctacgattcttgacccaaattatatctaaaggattaattctaaccattatcccacattgattaactgctacgcccttcgtactttccttgctaacatgatctttcccatttgcaagatctttactcttcattgttcgcctttgtttaatgagaatatattccaataagaacccagcaagaaaaccacaaatagatctgaaattccactataaagtagaaagaaatgttaatcttgagaacgacacagtttaaggggtagtagttgattcaagagcctcccctcgaattttccttccaattttttgcccaaaaactctactgccctggcctcacctatttatacaatcagcaaatttaactaacgtcattttaatcatcaacaaaaacagcctcttatgcacaggctcatatcagattctaacttgaataaagaaatttacagagtaatgagaaggaaccaaaaattgaacaattcctctccagttccactaagggctaataatgtgtaagaatttcaaatattcagatcctaaactgataagtcaacaaagaaaagggtagacaagaaacgctgttcttatttccattaagatcgattacagttaagtaaacataatccacttctagtggtatacaaagcaggaacaaaacaaacttttatttcagaggtttgatttcaaacttatttttctaagaattgcacgattaagaatttgagatatttttacattctttgttcactttcgagatttttcctctgaatttagttttgtagttcaaataaaaagcactaaactttagagacctaaatctcatcaaaaggaaaaaaaaaaaaaaacagaaaaaaaaacttcatagacctaaaacgtatagcatgataggggaagtacacagtgaccacttgctattgtccttttcgtcaacaccatttctaacccaaaaattcagagaaaaaattaacgatgaaagacaaatgttgaaaaatccaagaggaacccagttggtacttaagcaaacactcttcattcaagctaaacccttttactattcactagttacaaactttactagaaaaaaaaaaaaaaagcaaacaaaatatatatatatatatatatatatgttttttgaaaaatatatattagagctatatcaaccataactgaaacaagttattaaaaaaaaaaagtgaaacgaagaaatagggtactcacaaatctggaaagcagaggcaaaaataatgggatctgcgttgagacttcacaatttatttttttcttgatgatctagagtcgggaaccaaagcaagaacttgaaccagaaatggtgtggtgtggtactgttttttttagtttagatagtagcgacgggcgaggcagctttatggggcctctgtctctgtctgtcagctggtttcgatgacacacttaattttgcttgacgcttcatgtacttaattgtatattaactttttattttttattattattattaggaatattatttggtataaaatttttttattttttttttttaaatttgtgatttgagtttcttaagtatttttttaggtagtgtttttgtaagttgtcatacgattttttgttacgatttaagttgttccgctagttacaataagaatttttatatagaatttcgtaaaaatacaataaaaatcattttaaaatctaaatatgaaaaagctcaaaaattacttcatatattttttagcattgcacttctcgaatactggtctttacgtttcaactttcaacacattggatatccaatgtttttttttaagggtaaatgaatacccatgtttatcaattaattcttaaaaataatacaacattgctattaggtattagtagtgcatagcaccttcttgatatatcgcattgtaattgactagtaatatcccataaaagctattatattaaattatatagacccgatacttagttggaccaataacaatattaacacataggaaggtattaggcaccactggtaccctttaccatttttcaaaacaatatatgtccttgggcaagtattaggtattttagttttaccatttgtaattttttttatttttgtaaggatcgtttataaatttttaaaaaatatttattaatgcaatatgcatttaaaaaaactattaatgcaagcaagaaaatatttggaactctatatgtttttttaaattattctgaatttttaaaaaatttaccaataattttaaatgactaaaacatatataatttttttatgaactacaacatacataattaagaaaaaaaaaactaaaaatttcccttgataccatagcaactttttttttaaagatgtagtgtagatttgttctatgttgctgggactttctccttcttattagaagagtgctaattaaaatctccttttacaatctctttcttaatctctatgttcaaaaactcttcttggaatatttatttttttataatttttttttatagtattgttcattatagttacaatatcgtaatttaagtgaaattataatttttatcattgatataataagattcttattttgatggctcctcacgacgcgttgattttgtcctcctacgaatggaatttatgaaaataagttaaacatcgtcatatctcacaagatagatatttctaaaattaaattctagtcgattcactcctacgattactattagggctatttttttaagaaaataattatcattttttccttttaaattttttacactaccaagttgttccccttataatatacgactcgttaataatattccttaaaatataacttttatcgtaatgttgtccttccatcaaattatatttaattttatcgtgaaatgagtgacatggtggatggtaattgataaattgatgcaaattaaataccattcacccttttttacattaatgaataatagaataaaagattttttctctaataatttatatttttattttaacttttttaataattaaagtaaacaagataaaatgtatttaatttgtatgcatttatcaactaccatcccactacgtcattcatttcacgataaaattgaatagaatattatggaaggaatacattattgtaaaagttatatttcgagtggtattattaacgagccatatattataagggcacaacttggtagtgtaaaaagtttaggggccaaaatattaattattcatccttaaatatcgaaacgataaggtgaagcttataaaataagaaaatttgtttttcgttattttgatcaaataaaaaaaatctagtgatgtgcattagatgagtttactactctatttaactgataatatctttgactctcgtcgtctaggacactatatcatttagttagaaaaccttagaaattagagacatttttgtttgtttttggtattttttcctatatctgtcataattgatatatgtttacagatttcataagatatgtgattagaatttattttcaaaaaacaatgattttatctattttattgaattgtagctttaaaatggacaatattatgattcatccatctataacatgttcatcagagaaattaaagattcttatatgttgcttgggaacataatttgttaggaatactgtaaaacttaatatagccctaattaattcatgagaattaaacaataagattaaagaatagcggaagcgtaccggagtccatagaa

SEQ ID NO: 111396 - DNA, 6948 bp, Cannabis sativa
  modified_base (6528)..(6528): a, c, t, g, unknown or other
gaggagtagcccgagactgcgaaatatttcggaagattctacaaaatcaatggctagtccgagactgcgacatatctcagaagattctgcaaaatcaatggctagcccgaggagtagccccagactgcaaactattccagaagatagaaggccgtactatggcagtcacaccaggaaaaggacgcctcccaatgcagatgatactacacctatctccaaaatgcctaaattgaacaaatgcaagtctgtcaaagccaaaaactcacattatgattctgatcattccaatcaaaatggtgtcattttggatgacggtcaatcgctggttcagccggctacttctctgaaagatgagactaatgatgcacactttgctgcaagagtcaaagagtcattgagacttttcaatttgttgcacctccaatttgttcaggttacaaatcttctcctttatcgatcatgaaatgtatgtaaatatacctccaagtagctaatattatttgattgataatgtatgtttattgctcacctgcaggaagaggagactagatgcaagaaggaacaggtttttttttttgacccctcatcaaccaacttttttttaacatgatactgtgtttagttattctttagtctgatgccttccttattatagacttatagttgtgcacttatatctctaaattagatggtttgattctatgtttggctgttatgaagaaaagtaaacagatgggagagattgagttataccttgaatgatgtaagtgtggctttcttagatagacatgtaaattttgttcaaaaagatgggaggggatttctggagattgacaatttggattagagaattggctacttaagaaaatgatttacgttaaattttgaatgttgggtaacttatattcttaaagagtcggatctttcagctttgaaccctcatctagtttgttatttgtctgtactttattttgattgataagaaaaaagccttttgaagctataatgcattttgcaacgaggtttatacggcaggtgcttttaaattcatctttcaaattggaaattagatgataacaatttcttcattttgatgttcattgtcatctgggaacattggttgaccttcaccatattattataaatgttaatccatgcaaatatttgcagaatgacggggaacctcaaggcaatgttaggaggcgacctgatttgaaggtgatctccgaggtaagttatcagtacaaaagctatacttctaagacaacattttcattgtagaggttctatgtcttttttcccaatcacttgtctacatgaagcatttgatgttctgcctggtcgaaatcattgctctgcagtcacatctcatttttgtttttagctatatttttttgaaaaggcatctatgctccccttcataataattagctcagtggaattttgttcttctttggagttgtatgtaggaaattgattatgcatgagtattgtagtataactttttctgaatgcctcctatagttctctgtctctctctctgaaattgctttggagttctgcgctgttaatttattgttttggtttaactagaatttggtcttttctgcctttgagtattagacataatttacctttttcatgttcatatgctagatgttcaaaaagagaactttgaaacctgaaagaacatttggtcatataccaggttggtcaaatacatttttgttgcttggattatgttatctagattataatctgtttgtgggcgatttgcatgctcattcttcctattagtaataatagtgcaattcaaaatcacttctctagccatcttaatttcttaagttataattatgcaggtattgaggtggggcgtcaatttttctctcggtctgagatggttgttgttggacttcatgggcactggttaaggggaattgattatatgggggattctaatggccaggtactgctgctgtatctaaacattatcagtagaaacgattaatattcttgtcttattcattatgatgatatttttccttgcaattactttattgtaagtaagaaagtacctatttttactttttaacttttattttctaagataattttgttactcagaaaagagttttagacttatatttccattcatcattgatgtcataacttgcaagaagtcctatttagtactttcttccctataatgcagatgctcttagaaggaataaaaaaaagcttaaaaagtgagtctattttggatgggacccgccaatttaagtgcgagattagtgatatcacatcttttattggtataacttgtctcacgtaaatgagactacttttggggaattgactattttacacaatctccaaacatgggacttaggataaataatatgatttcaatcctaatgtcatgcaacttcaattagattgattgtttccgatgtaatcatgtaaacaactttgtgtatagattgtgccatctgtggcccgggagaagctgaaaatgtgattattttgttgtgtatcgatatgttttatgtgactatttaactatttactgtagtcttcttttttttttttccgactggacctgacatgtgtcctgaatggttggacgctccaaacttctctgtcaaactcaatatctacctttaaataacttctgaaatttacagttcccaactttttgcttaatgccagtgttttgttgagactaacaacattattgttcttttcagcattcaacattttgaaaataaattcttgcgttgttggttttattttcttgttagcatacaacattctgaagctaaattcttaatagtggtcatgctcttccattggattgaaaaatgatgatagcaacatctatattgagtcaatcagttagtcccaatgacaagtcagggtgggattgtttgataatttgattattatttttttagtctgtgttaaggtgtcttttctttttttggacgagatgttaaggtgtctttttgtgttgacttctaaaaaaaataatcagactgaaaatctgtatgctaatcttaacacttcaggacaagtttaaaaactatatctttccacttgcattagcaatcgtgctgtctggccaatacgaagatgatgttgatgaatctgaagaagttgtatatacaggtgaaggtggaaatgatttacttggtaagaagcgccaaattaaagatcaggaactaaagcatggtaatctggctcttaaggtgtgacctggaaaattctgtctccatttatttgaattgttttttgttgcctttaatgtttatgctttcctaaatttctgttgagaaacatcacagcatctgctatatatcaacgagttcataacatatctttttctgttgcagtgaattactaactggttactttcgctgtgtcttttttaatcattgtgcagaataatatggagcaatccatacccgtcagagttgttcgtggacataaatgtcaggctagttacagtaacaaggtttatacatatgatggtttgtacaaggtccgctgctctattatgataatatatatatatattttggtttggctttcttcagtttccttcacctagttgaatagttgaatagttcgagctgcattgttattctctgtagcgatgcattgattcagcatagtgtggtttagagaacatgtctgtaatctgtcttagtgccagaataaaggggttgaaaacaaaggaaaagttggtaaaacaaaatagtatcttttctcttcttctatgtataaaaataggaaatgggaagatataaaaggagaaattgtaaccgatttcataaacaagcaatgtagatacactgcacggttaagtgcctttgttataacaattttatatgctgaattttgagctttttcataattatggtgctactacaatggatgaaataaattattccatgaacttaccatgaattgaaagttcgagtttgtttattattttatgttctgctaggttgttcaattctgggctgagaaaggcactgctggctttactgtttataaatacaggttgaaacgattttcaaatcaacctgaattgatcacaaatcaggttattagatctttttatttccaaaatatttacttttttttgcgtttactgtcaaataaattgaaccataagctctcatttactttgtttgcaagttttctccataaacatatgatgcggtttacttttgacaaaggtagatgaagacaaaatatttgaagggttgatataattttcaggtccattttataggcgggagagatcataaagctcagtctgtaatacctgggtatgaaatcagttgtcatgatcacaaataagctttggtttttgtatgtgcccattcataaatgttaatgccaatgtgttattttctcaggttggtctgcaaggacattagtaatggtcaagaaagtaaacctatccctgttaccaatgtaattgatgatccaccttcagcaccagaaggtgagagccaaatcgttcgcggattttttgtacatgagtttgttactttgtttcatttttttgaagtgttactttgttttagtgagtgtgaagaatattgtgggttcaaaactttatttatttcttggtgtggtgggtggcatcatgtaggctttacatatattaaatctattcaagtagcggataacattaaagtcccatcaaatggtcctggatgcaattgcaaagagaaatgtactaatccaaagacttgttcttgtgctcgactaaataacaacgactttccttatgtcagtcaagatggtggcaggttaagatttaatcatcaattttgcagcaaataaataataagctgtattgtgaacactattatgtagtctttgaatacaaacaatgtctagttgcattgacaaacagacatcacgagttaaattattcatttattgcattacttttcagttcctcctttttggcctcataaatttagtttgttctgttttatttatttgtttccctattcaattgcatttttcttcttgatgcaaaattcaccaattgatttgttctcccattttagattggtcgaacctatggatgttgtttttgagtgcggaccacaatgtcaatgtggacctaaatgtgtaaatcgaacatccatgcgggaattaaagcatcgacttgaggtgttcgtcaccctttttgaacctttgaattcccatttgacatattatgtaatttaactgctttttttttttacaggtctatcgaactccaaaaaaaggttgggctgttaggtcatgggattatattcttccaggttcgccagtatgtgaatacgttggagttattaggaggagtgatgaattagacaatgtctctgagaatgactacatatttgaaattgatggctggcaaaccatcaatgagatggaggggcgagaggtatagttaccatcaaatgaagtttatgggatcttgctctattgttgaccaacttataatctcatctcaactttactctttttgggattgacatggtttgcaaataaacttcagattatttggaaaagtttatggtttgtttgttttatgtatattattattggcagaggcgattgcgtgatgtatctctcccacaaaatcacactgtcagaagaaaagggaagatatcagaatgtgcacccgaattttccatcgatgcaggttcctttggaaatgttgctagatttatcaatcatagctgtgagcctaacctctttgttcagtgtgttttgaactctcaccatgaccttagacttgctcgagtcgtgttatttgctgcagatagcatcccccctatgcaggtgagggactcttgtgttttcattagtttcctcttagcagcagcaaatgtatccaacacattttttactaaactaattactgatttttttctcttgaactattatgttatgccattagcattcttagctaaccaaatgtgattaattttgtgataacaggaacttacatatgactatggttatatacttgatagcgttgttggtcctaatgggaagataaagaagtcgccttgctactgcggtgaacctgattgtcgaaagcggttgtactagacaacaagaattatctgcattttggttaggtttgcatgcaattttttttttgtctatatcgttaagtgggagccatatttattctaatagaaatcaattttaaattcttgattatgattttgccacatattttgccacatactttcaactagtgttgatcttaagttagcattttatacatgaaaactgtaattggctgggtggtagctgatgctattcatcttagaattatgcctatggttacgatttggtctctaaaattttcatttgttctttgtgtatcctcataatacggaggaagtttcaatagttacatcaaatatgtaaccaatatgattacatttatttttagtcattgaattacgacggaatgattgtgattaatttaaaaantaaaataagtaaataaataaataatttgtagtctaatagtaatttaatattttttttttttataaaattttaattaaaattaaataactaataattatttaattttttgtaatttgtaactaagatggatcttttagcaattagttttcacttaaattattaaaaaaatttgtaataaattaaaattattacacacaaaaccttaattaataaaaaatagtaaaaattatctctaattaaatatatttgtacagtcaattttattatcaatacttaaaagtgttaaataagtctgtcaatcctgttcaagtgatttaggtttatttttaggggctttttcatttttacacttcaaactagtttttttttgcatttttacgaaattttacataaaaatctctattgcaactagcgctgcaa

SEQ ID NO: 111397 - DNA, 7402 bp, Cannabis sativa
  modified_base (7353)..(7353): a, c, t, g, unknown or other
cgcacgtaacaatatactagtaatatatctataaatttataagtcaaaaaattttattattattattttaagtcattaaatcaaatttatatatttatatatttataatgagttagcattctattataagttatttttttatttagattataacacttgttataaatatatttatatataaagattataaaaatttggtaaccagcttagttcactagttataaataataaaaaaaatataaggcatgtggttccatcaagtttaccttgatttactaggattcaattaaaatatctttgaaaaaaacaaagataattccacaaatacaagactaattttttagtatcggtgtttccgcttgtcttgcattgtacggacatattgaattacttattaccgataaaaccgataattatttaatagtaattaaaaaaatagtacaaaaacgataaaaattaattaaaagaaaaagaaggttcctctaatacgacaccgttttagcattgtatttcagtaaattatgtggtctggctcttcaacaacgtttgtcgttgcagtagaactagatagatccactccaccgtcttatattatattacattatttatttatttattaatttatttaaaatgctttaatattttactactttcgtcttgtccaataatgaagttttgggtttcactgtgaaagaacaagacctctgctttctttatagatatatatatatagagagagagaagattaggatgctgcagagagagaaaacccagctgggtgttgctgaaatctagtggatgagctctagaatccatggatttgcagagggtttggagctttgttattctatcagctgtgattttattggtctatagtacctgttctgtgacagcaggggatattgtgcacgacgacgaaaatgctcccaagaagcctggttgtgagaacaactttgttttggtatgttaaatgctgttttttctgcttgcccatttcttgcttgggtgtattcggagctgggtcgtgattaaatttcatccttttgatcaatttaagtgatgggtttttatggaagaaactgatgatgatgacgacggtggtgttggttatacgatagtgtattaaaggattccatgatcgttgtggtagttggaacaattgatatacatagaagttgggcagaaaaagttacttttttcgttttcttagttttcttttggagtaggattttggcttggtgatttttgtttcctttagttatttagggtttaaaatttcagactaataaggcctactcttggtacagtagtgtgttttagtagattcctaattccttatcctccatgtaaattttaattagtttttttaatctcctaaacccccttttacttttcaatggaataaatatccatttgaattagtaacgaaaagagtttctgctttgattacttgataggtgtagtaaatccataatcatagtcatagtttgaagaaaatggtctgctgttctatgcattgtgctactaagagattttgataccagaagtaattgtattccactgctttttagtacatatgttctgctttcgaaccagaatttatttagattagaaggagtttggaatatggtttttcagttcagtaggaataatgttgaactggttgtgttatcttattttagaaatatttgaagtaggttaatgctcacggaagttatttaaattttgtaatttcttttatctgattgtttgccatttttgttttctaaggtaaaagtgcaaacttgggttaatggtgtagaggctagtgaatttgttggtgttggtgctagatttggcaggactattgtgtcaaaagagaagaatgcaaatcaaactcgccttactcttgcagatccgcgtgattgttgtagtgcaccaaagaataaggtttttcaactaacctacgggctgaacatttgttgaggatcacactgcattaaccaaatatattatttgtttttaaattttaatcctgcgtaatttggacttactagcttgccggagatgtcatcatggtggatcgaggtaaatgcagattcacaactaaggcaaaccatgcagaagctgctggtgcatcagctgtcctcattataaacaatcagaaaggtatttagaatctatcgtgtgtattagagattttttcttagggttcagctatattttgctttatttttatgccaaaatttcctgtgtgtttgaacagaactttacaagatggtttgtgagccagatgaaactgatctaaatatacacatacctgctgtcatgctaccacaggatgctggcttgagcttggaaagaatgctacttaacagttcatcaggtaatacatcttgttataattagagattgtaaagcaataaaacttgtttttggacatgtatcttaggtttttagttttagtttgtaaatatatgtaggtaaggacctttttctttgtctgttatcaattggatttcacacaaatcactttaatttgttgtggtgtgtaatatgtaggcaggggtttttccttattcttaggccattgggtgctgtctgcatatatattctactatattgaatttaatcaattagattttatattgactttgaacttgattgaagaagattgaactgaaatttaagttgacaaactttgtttagggaattcaagtttttctatgtggttatgccatttactgatttttcctaattgttgggcccaagcagtgtttgtgcaactgtactccccgttgcgcccagtagtagatattgccgaagtatttctatggttaatggcagttggtaccatcttatgtgcatcttattggtctgcatggagtgccagagaagaagctattgagcatgacaagcttttaaaggtcactctctcccagatctaaattaaaaaggcctagcttcatgcactcaaacttatatacttatatatgtagttgtttaaaatacagacacacctactttcatcataagcatgtttactttttctttttccaggccatttgctgtcactatcactgatttgtaaatttatcatgttcatataggatgccattgatgaaattccaagtgagaaagccatgggcttaggtggtgtagtagacatcagcacaacgtcagccgttctgtttgtttttattgcatcatgctttctagttattctctacaagctaatgtcagccttgctcattgaccttttggttgtcttattctgcattgggggtgcagaggtataaatttccctttttatagctcacgaattgttccaacaatggttttattttggaatctatacgaaatagatattaatagattggacttactatttttctatgtgtttatatgtacccgtctttacttctcgtatcaattctaacctgttctagtctttttatgcagggtttgcaaacttgcttggttgctttgttatctaggtacaacattttctgactaagatatggcttttcagagtgtgattaatactttccacttcattatatgatattcaactacatctataatcttaacttagctgataaaaaaacaagccatctaagtacttgctagacatggcttgcatgttacattattctacatcaagaaaatgtgtggcttctcattcctagcatataattgtaaatggtactgtattttatcactgagcaaaaaggtggctgtcattgaattgccttcaatattggagacttcgttttacatttcaagctcctggctaaatctagttatctatgtatgcttcttcaggtggttcagacatactgcagaatcatacattaaagtgcctatcttgggagctgtttcatatctgactttagctgtatctccattctgcatagtattttctgttctttggggagtttatcgcgaagtttcctttgcttggataggtcaagatatccttgtaagagagattttctaattaagaacttttccctcattatttaagtgggttacttggcatgactaacacttttgtcctattgtttttcatttttcaatcagggaatcgcactgataatcacagttcttcaaattgtccatatacctaatctcaaggtaaagagtcattgctattaagtttgctggtcaataactatcattattgggtacttcttttaaagttatctaaatttactttatttttaatgatgtccatgatcaagggctttaagtatcctctttaatatcattggaatttacgattgtatacactccatgtgtccatgctgatatgtcttcagtgatgcttcattatattatgctctgataactgatgtgaagctgttcgccaaacaggtcggtacagttcttctaagttgtgccttcttatacgacatattttgggtttttctttccaaaaaagtgttccacgaaagtgtgatgattgtggttagtattccttccagctcttactctacagtgattagtttccatgacaagtattctcttgaaattttgagtttgaaatgctgaggattctctattttaggtggctcgtggcgacaaaagtggggaggatggtatcccaatgctcctaaaaattccacgaatgttcgatccatggggtggttacagtatcattggatttggggatatcttactaccaggactacttgtagcattttcactcaggtttaagctctgcattcatttatttcttactcgaaactaattgataacatagctgtgctgcttatctgctggtacaatgatgatatactcaacccattgttcaaatatgagggactggtggaaatttgacaattttcctcttcttatcatcttcttttcgtccaggctaatctgcaaattggtttccttacttttgaattttgtcatattttgtccttgattcttcagtttttgcttatgaagctccttgactaaagttatgagcacatcctaatcaatgacaaaattaatgacttggaatttcctttcgatacggaacaacttaaaagtcaatagaattgtgccaaacttgaaaaaccaggggccaaattcttactacttaaatattcaagagaccaaatgtgcaagttacctttcttctatgatggctttatgactacatttaaatgcctttgcaaatgacattctagctctagataggggcttcttggctgggattttgaagctggttgggtttccaatttattttggtttttagctctaaaaagccttttagaagaaggtagcctcaataacttcttaagaaagaactctcaggaagctaaaagttaaagtaaaagctctgtcaaacaggcttataatccgaaatccaaaaatctcttcccttgcttacatatagagacagggaaactctagagagctaagctcaaatgattgagcatgtggtttgcttccccaagttctgaggttgagtcttttctgggtatttacataacaattgttattaattcctggtctctagatattgtgagattagacaggagccttgttaatattatatgtatatatatattgtagagagaaggagagagagaacaccaaaatcttctatgtttttattgtctagtctttacaatggatatgcttttgtggaatctcttatattagaattttgtcaattacaattatataattgcaggtatgattggctgtcaaataggactctcagagccggttacttcttgtgggccatgctcgcttatggattaggtaagaaacaaataaatttcactgtttttgtcaaatttcaatagaacttgatgcacttctcttactcatcacctttggttctcagctacttgttcatatttctatttccacattaccttgttgccccttttcctagctttctcaagacacccgagaaatacttaccatttcaaacctgtaacaggtcttctcataacttatgtggcactaaacttaatggacggtcacggccaaccagcacttctttacattgtcccttttacactcggtaatatttctctcatctttttctgttttattgccatggctgcaaagttccaaataacttgcttttgcttagatataaacggtgctggaattcacacattaatgcaggaacctttctaacattggggaagaagagaggtgagcttaggaatttgtggagcagaggtgatccagacagaccctgcccacatatacaacttcaacaaagtcatgaattagacgaagataagtagcagacaacttcttattcacttgctgtataatataacatagggttggttgttatcctatatatataatattgcttagctttaggaaatatggtgaagaacttactccgaagaagcacactctgtactgttgcaaattagggattatggaaagcagtaagcactttggtgtttaagctgtacagagcctgtgtgatttaatcaagtttggtttttggttcccagcttaaagctttcagctgaacaaggtaaaggaagagtgaactttcagtgtaatgagataattgaagctttcttttaaatgatcgaaagctttatatgaagattattacaaaagttatacctagtaaatatacttcaaattgatatttatgcttcaactgctgttctacatatcaaattacattattttgaatagtatgtgaatgtgattgcaagtgatacatttatacatacacacgatgtgtttcttagggtaatgaggacataacgctcttgtataaataacctcatatgtataagataggtaataatatgtataataataattagtattattatttatttttttttaattgagtaatttgcggtgtaaatacttaagtgaaagttataaataaatacttaagtgtcatgttattatttaagtattatttttttattagtatatttaaattaaggctatttaagattttgctcataaactatgacataatgttttatgggatttttacattagatactaaatttggtattttttttgaaagttttatttaatgtttggttttttaaatttttttgtaaaatttatttttcaaatttatttttaaaaaaattatttaattataaaaatacttttattgtttatgttatcttcgtctcccttttttcttagtctctattatatgttaactttctctctcttcaaattataaaaataaacggattatttcacaaatatacaaaaataataaaaaaaattacaaaactacggttttatgaaattttaaacatttttactattttttttttaattttatttataaaaatacgttttttttctgttgtattcttattaatttattgttgatttttttgttatttgtatgttatnttttgttgttattttgatgttattcagatattattttcatgttactttt

SEQ ID NO: 111398 - DNA, 2118 bp, Cannabis sativa
acatttctcattcacaatatatatgcacacaatacatttctcattcacaatatatatgcacacaatacatttcagtacaacataatacatatttaataatatagaaaaaccccaaaaaatttataaaataaaaaataaagcaatgtacattactaaaattagtagaaattagattacaccttaatagacgttgagatacaatattttctccactaaaaacggtggccggaagtagagactaaaaagattttttgctctctcttggagaagagccttccctgtaggaatgcctcaaacgcctgatctgactatggaagatcttcttgatcgaacggggaacttaagaatcaaagacgaagatggatgggaagttaatgaagcaagggaatcagaggtggggaaatcgtgcctcatgggcaggtttgctctaacaagaacatgaacagatccctcattcgaagtatcctgggaagagtctggggtttagcggaagtggattggggtgtgaagatcaaaagggtcacaactgaagctatgtttatgattttctctttcaagaatgaaaatgatttgaaaagaattgtgaagaagtcaccatggctgttgaacaatggagtattgattcttcaacgactctcaaagattccgacgaagtgggaggacgaattgactcgctttcctttggcggggagggtgttaaatcttcctacgaaaatcaataactcggaacaatatgctacggttagcaacaatggcgggcgaggtcattgaagttcagaaagaagaagtaactaagattactttaaatggttttttctgttcaaagtatggatttcgattgataaacctatttgttcagggtttccttttccttgttctgggggccgggtttggttgccgttcaggtatgaatgataaacctatgtgcttcagctgcggccaagtgggtcacgacttcagcacatgtgcaaataaacttgagaaaatttctggtggcgagggtaaaagttcagcgacttatggtgcatggttgaaagttgaagagagacctctggggaatagggagaaaaagccacatgaagaggcaaggggcgctggaatgattcgtagtcgatctttgagggacgaaattgggagtggcgagttgaggaagagtattcaggaactagtaggtgacttcttgatcttggattctgtgcgcacaatcggtgaagaacaggggattgatcttgttccaagaatcgcaaaccaaaattccctgagagtagaggtaccggcttctaaccctcctttgccttttgattttgtgaatctaatggataagattgatgtccaacgggtagagagggattttgagaatgaaggaggttcaggtattaagagaagggcggattattgggactttctgaataggggtaatgggttggagcatgaatctgggaaaagagttcataggaaagtttttggcgttcaggcgagttcgaaatcgggtatttcaaatgaagggggtgagtggtttgacatcccaatcacttttgaaaatgaatttgggggtgataactcaagcctgaaaggaggaaggaaggaaaaacaaggtggtggctaagaagaataaaaagattcacactaagctcaaacctccatctttgactaccaagaaagaagcagctgagcccatagagaaaacggtgaaagataaggtaccaaaagacatttctagcatttcgaatttggtctctggggtgatcttagaagcggtgcacccggtggaactaggtcgtcgagagcaatgaatatcatgttttgcaatgttcaggggcttgggagcccctggacattgaagaccctttgttcccacatgaaagatcatcatcttgggatgattttcttgtccgaaactagacttaatgaagctgcgatggagagaattagagttgtgctgggttttgatagttgttttgtggtggctgccaaaggcaaaagtggaggtttagccctcttgtggaaagagccttatgaagtgagtattaagtcctatactgtttctcacatagacgctattgtagaaaatggcctgggatttatttggagatttactgggttttatggtagtcctga

SEQ ID NO: 111399 - DNA, 3177 bp, Cannabis sativa
  modified_base (1086)..(1086): a, c, t, g, unknown or other
ccaagagagtctctcatatattttttccatttggataaattaattatgagaaatactaaaagataccagtggtacttagcattaatatcgctattagtccaactaatatcgggtctcatataatttaatataatagcttttaagaaatatcgctaaccaatcacaatgtgacatgtcgagaaggtgctaagcaccactggtacctaatagccatgctcattaattatctaccaaaattaaaattgattggtggaaattaaacagatttttccaattaaaattcatcattatgattagatagaatatacataaatggctctatatactaacatagatgcatcacgaatatgttgatttatcttagcattggtatcatatataacaaatatttaaaacaatattttttttgattgaatatttaaaaaaaaaaattaaaatattaatatgcattaaaatttatttaatttaaattaaaaacattgctattatatataggtactagtaagtagtattttgtgaatagttaataattttctataataattattaaatcaaatatataaaatataatatttaattacacttataataataaaaatatattgtggtagtgttaaatattactattactagtccttacacatttttttattttatttttacttcttctctgtatatatatctcattgttttaatgtgtcatcataattattaatggaacgtgacgcatgcgctatagggacagatatgtgagatcaatgcatgcatacgtttaattagaattgaccaattcaaaaggttaaaattaaaggaagattactaaagactcttgtttaacgaaagttcaaacaaaaacaagggggaagacagtttccaggtgggtgcagtgcagaccagtactaattaaggtcaattagtattatatatacatagtatatttaatatactatatatcttactcctttttcagttggatcaaaagctaaaatcaatcctctctaacatgattttggttaaaattattgttttctttaacaaaaaatcaagtatatattatattgtattattaatatatatatataaaanaaaaaacaaaaaaaaaaaagaagagaaaagttaacacacacttgaaggggttaaacaagtgcattttaatataaggtgacacgacacgtgcatatatatatatatatttatatttgtagctaggtctggtatcacatatagatattttgagatattggcaacaaaattacttaaactataccctttgtaacactgtacagagcatattctatattggtacaccatttaactaaattggtatagaatcttcaaactatttcactcttatcacacacctaattatgcactaaattttatactattaatggtgttgaattttgagtttatatactaatttggtgtacaacttttcctactacaaaatacattttagtgtcagtgttaaattgacacttatacctatagtgtcagttttatagaactgacacttattccatactaatagaaggtatagtgtttggtgacggttctaaaccgagacttttcgacattagtgtgacttatggatatgcaatttatttttgcactatatgtctcgatttagaactgagaccacaaaaaaaaaattaattctggacgagtttcagctatgttctacttcttcaaagatttaccacaattatattgaaatcaggattccccacaatgaaactcggaactagatacaaaacatcatcgtcgtcgtccgccttaagatcaacaataataagcttatcaagtcgttaacaataaaataaaaagagaaaaaactctaacaacaaccttaactaataaggtccaacataccaccggttaagcataaaagaattttgaaatttactagatttccaaaccaaatgaacatttgacagagtctacctatcaatgactatcagtctatgatcttccaataaaaattgaaaaatatcaacctcattatttaaataataaataagcgaaataacacgaacttttgacactctatcactaaggatattggagcacaaaacacactgctattaatatatagtagatatgagcgacaaagagaaaagttatgacactcttgcaagttttgcttgactcatacgacaaaataccaactacccaaaagagaacaaatgatcctcgctagtcttcaaatcaataacaactcctactaatctagtgcaagaagactattattaaaataataaaataaatcaaaataatgaaaactattgcaaacgaaattaaaaatacctaacaaataaaggacatgacaaaattgtgtaccagactattaccagacacccccttttgacaatgattgatccctctcttctcaaacaaagcaacctgatcaccaaagcattgccctaaaccgtgtgaaccccaatcaatagataacacctgaacttccatcgaagactcaacggagcacaaatcactactacaaaaatgatcttttgcttcagtttttaagtgacatataaaaaatttgcattaattgatataaccgatggtataatcgtagatgcaaataatcttattttttgcttcacgtagtaaccgacgctaaaagactttaacttcggttcataaccgaagcaaatagtaatagactgatgcaaattagttttttgcttcagtaatgaaccgaagtaagagttaaaaaaaatcagaaccaccaccaccacaccccattgaaccaccacaaattttaaaaaaaaaaatatgaaaccaaaaccatattcaggttacaatcccaagccaacagatttgagaagaaaattaaaataaaaacaatattcatgaacataataacaaaaatacaattaaacctaaaaaaattatacaaaatacaacctaattttttttttttttgctactgccatgaaaaagctccatcaacctaaaaaattaaaagaaaaatatgagaatgattaagagaaagagggagagagaataatttcagtaagagattaggagagagagagagaaagagaaaaaaaatgagatgcttacctatacgtgacgatggagggaggaggaggatggtttcatagtcatagagtgggcagagcaagtgcgcggagtcgacgatgagggcggagctcgaacacatagaga

SEQ ID NO: 111400 - DNA, 3574 bp, Cannabis sativa
gagatgtattttaaggctctagatctaaatttcctaaaattatttgaattattcataatattaaaatataaaacttttgttaaattttatctaacttaaaaaatattaatgtggttgatgtgtcaatgtgtcagatccaacatgtgcaatttaaaattattatttttatgaagatttatcttttgacatgttgtcaccaaatcattgccaaaaataatatatattattactaatttttttaattaattttaacttttataaagatgaaaaaataaataatatattatatataatcaacaccaaattacggccaccgcccccataaaaattaaataaaaaataactaaaatataaaagaaacacttgtaaaacaaaaatccaaaatctaaaattacaaatataaaaatcaattcaaatttaacttataaaaaattcaatcatttaaaaacaaaaaattaataatcatatcattaaagaaaaaagacgaaggatttaaaatttaattaaattgtgattttatttaattttaaatttcaattgtatttgatcgtgttatttataaattattactatacctatcatttacaaacttatttaaataatgattacgatagttttattaaagtcatttacattaattgtctttataaatattctaattaaataatcatatcaaataaacaaataaatatctcattgttttttaatagagcaaaattttataaccacgtgtgcataattttatcttttttttttttaaaaaaaaaaagaactaataataacaaagttgaaaagattagataacgtcaaaataaagtaatattatgattctttctttttaattatttttttaaaaaatatatatattatctttttatatttcctcatacgatttaaaatttaaaatccaaaaaaaatcaaataaaaatacaaaatcatatcacccctctctatatatagagtacatatgaaactcacttctcatactaaaataaatatattcctctctagttcgatttttattttctaattaaaatatttctctttacatatggctatgcctatggtacttaaacttaattcttatactaatcaacttcaacacatggttgcaagtttcatatgtgtagccaagaaaatggacaagaaaattaatcaattgattagcgagttgatcaccattcgaaaccaatcgaactttcatgatcgcgatgaaattgagaaattagggtttgaactcaatagtctaagggacaatcatgaaaatatcaagaaaggtttcactaggaccataatgatcttttctcaattacttgatcgcgatgattctgaagactttacctacttacaacgccttcaagaccaagttttcaatctcctacctttaaaaggggtgaaaaccgaaaatgaaatcttacttgtgatgcaagaaatcaaacaatggaatgaaaaggtggttatgattcatgagaagaggaaagagttggccaatttaatatttggtagagattttcagtgtgtgagagaatacactattgatctaaatgaaatgccgtcaaatactactattgatctcaatgagataccattggaacttatagtagaggttgaacatgatgatcaagtggagtggaattcgattagggttctgactgagatgtatcgattcgaacctaacaagataaacgaggaagagggagttatgagacagttgaaaggaaatttgtcttatgtatatgacaacatggaattagacaagaacaacatgatcgatgatgaagttctagggcaaaatagaaacaaactagatgacatattacacacgattaatatgatacaaaattcgagtgaactcatcatgaagattgaggagggcaataagttattgttaaagtggttatgcaaaattgagaagactatttttattttggttaatgatgcagcgaatctattattaaaaacttgtcgcaatcaagtgattgtaaatgagtttagagcaaaactacaagggcttaaacgaaaagaacgagggcgagtaccattattagtttatcgaatactcactttactagaaggagaactagtagtcgaagaagcaatgattcgagaaggtgacaacagaatcttattcaataaaattgagtgtggttattttttgcttcaatattacaagatgattttgttgctcacacatgttttgaacaacatttatttaagcactactagtctagatatttataccaagaagaaggcattgcttgaatctaatgaacttgttagaaaatgtgatggattccttttgaacttggttagaagttgaagtgaagtagttgaagaggagcaagaggaagaatttcaaacaattatttttgtctatttttaatttgatttttaagaattaaatttattagatatttaatttatcagttataggatttaattatatttgtcatgtattaaaaaataataatgaaattgaaataattaaagttttaattaatacgataatcatgaattagaatattgatttgatttttacttaaactagtttgactaaaattaagacaaaagttgccacaaaaattaaaacaagagttattattaatgatttaatttgacaattgcatggttaggtatgaaaattttaaaaaccattaatttcatcataccaatataatttactcatgtgaagaacacatacttattaaaaatttcaatttttgaaaagagatcaattttattatatctttgttattaggtactaataatgttatgatcaatctatgtaagccatcttcataaaaacaaaaatagtgttttctctgtttataaatttttttttagtgttactatcgtgtctcatgcctaatcctttccattgtatgctcaattatgagactttttttttgcttaatattctttgttcggtgcccaagaacaaatctacgagaatttaggtcaaaataaataatatcataccaatataaaaatatataatattcaacatcgccgtaacaatttctttacagtatcaatttgagaagcaaataatggcaattcaccaaaacttgcaacgttaaattttaaattaaaaagtcatcgctaaacaataaacatcttatacaaaattctaaaaataataataatataaaaagatatattgattttttttttaaattatcttttttcttttttaatatggaaactaatctattccacagttgaaattttaatcaaattaatttaaactattttttatattttgataaaaaaaaacgtttatacatgaatttgggttctccattcaaaaaatcagatgatttcattcaaaatctctcttttataatctatggctacaatagataatataatctcaacttttataatgattttaattcaaagcatggtttctaattttttacatgatgtaaaaatagccgataagaagataaaaatattgaagcttaagatgatcaagaagaagaaacaaaataataataataagggatattgacggctaaaccacctgaactttacggtttgtagcacttaaccacaaaaaccgaatttttgg

SEQ ID NO: 111401 - DNA, 3368 bp, Cannabis sativa
ataaacctcgttgattagcatcgagctgcacagtacgtttaaaaatcacgtaatacgcctcaattagttagggtgttacacgttttgaccccgacctgtggacacgaagctcaattaacagcacccggccagacataagatgtaggcccccaacctccatggaccatggccccaaacaccaaacctaaatccaagacttagacccgaccgcggaccccagaccccaaaccttgtaccctagactcagacaccatacccaaacttagacccctataatattccaaaaacctaactatatatgaataattaggattatttatataaatatagatcaattaagatataatgagtgggattatgatcctactaatataatttagtgtaaattaggaaattttactataagtggataaataagcgtagtttattaattacggagattttataaaaatatgtgggtatgatgtatgttattcctcgagtaaatatagtttcaagtttggtgaccttggagacccaatcgaaagctaaaaatatcacaattattttaattaaaaattttggtgagattgttcagataagtcgatcttcaaacaaccgagttattttaaagtattcggtgttgaccaaatcgccctagagttagagttttcttaaggactaagaaagagtaaaataatcattttcttaattagataaattctttttttttctttttttagttttagaagttgctggtataagtagaaataccttaagaaaagtcaaaacaaaacaacaccagaaaactcatccccgaccttcttcttcctttctctcggcaaaagaaacaaccaagcaagaaatcgatttggatcaccacgctcgcttccttagcctctttctttgtttttagggttctcttcctctgtattttgcctctaaaaaacaaaacccttatatagaaagtaatacagatatcttcgaatggcgaaattacaaaactgcccaaaaatcccgtctttagccaatagttccgactacttaaagtatagtcgcgaccataggctaatctcgaaatataagctttttgcccaaactccatagtcgcgaccacataatttgtcgcgaccatgaaagacctagctgcgactagcttaatttcctgtttcgacatctctcagtaaaatatacatatactttcacatacaaattccaaatgagataattcaagaggcgttgaaaagaagaaaaatagatctaatatttttatgctttaactttttccaaaatgtgagtaaaatatagtcaaattcaggtttgaagttttagctttattttcgtacaatttttttttgaaaattttattgatcgttgtttttcaaaatttgatcaatttatacattccaagtgtgaaatctgaaacaaaaaaaaaaaaaaacaagcgtaattttattctaaaaataaatacaaaaaagaaaaataactataaaaagtgacccaaaatttaggctaaaaatagcctaacaccaagtgcatgtttctcccatgcatcctacgtaaagactgcatctttacaagcatctggtatgaattaccaatatgcgtgacaactcatcctgaacctgcaagttctatgttgtcagtacatgaacgcctaatacgcgaccagaatagtcgcatatgttctatcttataaataaccccgagaagattgcatgtcagctaagaacccaagaggtcttaagtggtccaaagaccttataagcgagtaacatccgagagctcgcgagttcacgtgttactcaagaaggtgaacgaccaatatgcgacttctaaagtcgcatacatttattaattaagcacggtcaaaactgttctttcatttattttttaaactttttctatcttaattaaatgtaattaatattgtgacggtactgtctgacctgttatgtaatctaaaaggtcacttgctttctatataaaggagtgatccaacctggaataaactaatcgcaaatttcttttaatagtgaattaagcagactaagttctaattgaaccactacaactatcttattttttttacatattcattgtttacagttgactacttgttattttagtttgaatattcatcattctaggtgaatattcgcatatatacttgtgggtatttaagcttttctagaatattggtaacttttgatgttatctaatttcctccaacaacaattaccaaatgcattttaattttttttttcttcaaagagtgcagttatttgtttccattggaaaaatagctactcatttatattgttattgttattcatatttatgaataattgtgctatcattaaaataataataatacttgtgctaatataatattatgaatagatttaaaaggttttaactgtatcagtcgatgttttctatccactataacacatgcagatcttaacataagtgattttcttttatatttttttattgacacgagttaggtttaaaagtagtatagtgctatcatttaggtaacatttgcatactagaaaaataccaacggtggggaagtcatattcatatcaaaagcaaaatcgtacttcaaattaaattttaatttaaagttggcataaaataaataataattaggtaatcaattttttcaaatttgtaataaaaaaccgtaccaaatacaaattatacaatggtaacatgagaatttttacaaagatttattgcaagagctctctcacattctagagaaaaaaatctaatcaaggacaaggatgatcggctctcatctcgcataagacaagacacacctttcatttagatgataagggttcttgttttgagggaaagaaaggttctttagaagaaaagctttcctgctaacccaactcgcgaggagcaggacccatcttcctagggcatttctcgagctagttgtatttagtccctaaaggcactcacgggcctcacgtacctatcgactgtctcccatgaggtgtttcgctttgtgtactcacctcatttggcgcatcacatgtgagccacacataccctgtatcttttggtgagtcttggaaaccacaagtacttgtatgagacacaaacataggatcaacttgcctcgctgatgactagggctgaatatcgggcgggtttatcgggttttggatttgcaggtttcgggttcacgtgtttcaggttcaaaaaattgaaatcgaacccggacccggatagggcacaggttggcaggtcacgggttggcgggttgacctggtcaactcgatcggtcaactttaaaaaaaattaattttttattcaaataattatttcttttatttttttatttattaaattaaacatatattata

SEQ ID NO: 111402 - DNA, 3550 bp, Cannabis sativa
agagagagagagagagagtgagctgcttgagagagtgggtcaatgtgtgtgtgttgtgttttcggtggtgtgtgtgttttgggttcatttttatactatttttttattaatgaaggatgaaaggggaagtttatggaatgaaaggaattaaaatgtataggggacattattttgatatgggtttttttttattaagaagatagtgaaattttcctatatggtggtggttgttttgtgtttattctaagaatgtcgtgaagttatagtgacacatgacctgttctgcagttagtaaagatatttttttcttcataatataatatttcagaatatttttgtttaaataaaattattattttaatattaccattaagtagtgtgctaattaaattttacatattttatataggtatatttttattttactcacttggtcaagatgcaaggatctcaaaagataagttttattacaattctctttctttaaaattttactatattattaatttatatgacataattttaaatttttattttaacgtctatttatgaagttactaaatttatttatttgatatttttggtctaggtattaacttttctagcaatagttcttgctttcttggttggattaagatggactcaaggaaatctcacaattattcaggcggaagttgtagctctaataataattgcattggattggttactagaattaaacttcctctcaattcttttgagcctgattgtttagacttaatctctacattttttgagaaattttttctccataatgatttaaactctctttttgatgtttttttagtttactgtccaattttcctaaggcgtcccttattcatacaaattattcggccaatataagtatgtatgaattagttgcgaacgcacttagggtggatggtgaactaatttagatggaggatctttaatattttctttatgatgtactccacgttaatttttttcccggtcaaattttgttcattgtctccttaatgcatataacctgccagctaggtttatttcttgggtgatgacttgtatgagagctacttcctactctataatgatgaatgacagagtgcaaggaagtttcaaaggcaagaaaggtctgagacaaggtgacccccttcccctctcttatttgtcttgatcatgaagtaccttactaggaggctacagttggctgtctaccaatctacttacaggttccatcccatgtgtaagagcctaaagattgtaaattgatgctttgttgatgatctgatgttgtttaacaagggaaacatacagtcaatataggttctcaaggaaatcctggatgaattcactgctaccacatggcttgtaatcaataccaataaatctcaattttattttagagggattggagaagtggaaagacagttaatcttgacagagatggtcctcttataaggcaattttcctcttaaatatctgggagttcctttgaggcccaccaaatggagagctgaagactatggagtgattgtaaagaaaataaaacaaaggcttcacaaataggctagcagacacctttcttttgcaagaagagctcaacttattcattcagtgtttacttggtctgcgtaattactggatgagaatattcattcttagtgttactaaggaaataaaaaaactttgtagaggatttctctggggctggaatgggaacaaaagcaagttacatgtggcagcctgggagaagttttgcctctaaaaaacctatggaggattagggttcaaagatgggatcaaatggaatcaagctattctcgctaaatatctttgggccatatcatccgaaagtgacttactttgggtgaaatggatcaataatatttacttaaagaataactccatttggtcttatgatctcaagaatgattcgagctggtattgaagaaacttatgccacttgagagacaaatgtgctagcactgaaatccataaggcaagggttgtgggaagattcaagacaaactggctatataacagccggctgcctcaagttcagtttgagttcaacaagagtatatggagctccttaaacatgtcgaagcaccattttattctttggcaagctgtcaatgcccaactcttaactcttgataaattcatgcaatttcatattgcattggtttgcattttatgccctgtttgtggagttgtagcaaaatcaaaccagcatcttttcttcgaatgttgctcctctcaaagggttgctaatctgattttcaattggttaggctcaagagcttggtcaactgaatacgagggttggaggaactagttagtgttgaacaaggtgaacaggaagcaaatagtgcacacatcagtcatggcagccgtgatttacagcttgtggatcaacaattgcatttttaacaattacttgagcacaaatttgactattgttcatggaatacagaaaatagtttattattaattacaaatagttaaaaatagaagccttaatagccatgagaggatttatgtagagaaattatgttgtaattagtgaggagccttgactgtgtaagttgttttgctaatgttgtaattgtttgtgattaatgaagccaattcgtaaaaaaaaaaaaaattattcattgttttttttttttgacaaacctgaagttttcattacacaaagaaggaagaacaaagtcaacaggtgaaattggaaggcaaacaaccattccaaacgcaatcgctaagaagcctgagaccgactttagcatgatcatgagccaacatgttatggctcctatgaacatacctaacaactagtccagggctttgagctagcaaggctttaatacaattaattacatcacttaaaatagaattattacaaaagacattattaattttgtccactactaatttacagtctgaaagaagaatagaaaccgacagtttagtagcttgtaaccattgaaccgcagccaaaatagcttttgcctcagcaacatccggaggaagcactccttgaattggaatcataaatcctgctttaatgatcccacattaatctgtgacaattgaagctaagcttgtcatttgagagaccacatcaatagttgcatcagtgttaacttgccaggtacctacaaccggggcagggattggatcttgacactctggacttgatgtaccctgattgaagttattggcacgagctaactgaaattcatcccaaaaattacaagcagactgaaaaatatcttgaggccgaggccttttatgattatgaaacactttattcctataattccaaagtgcccaaacaaaacaaaaaaggtatagcaatctgttgtgaatcaaagatctcaaaagcagcaacaaaaaaactatccatggagttattcaaattactattataaaagctaataaaattcgaatatttccaggcttttctagcatacttacagtccaagatggcatgtttcactgtctccgtggtttgatgacagatcgggcaggcaggggaaggaat

SEQ ID NO: 111403 - DNA, 1591 bp, Cannabis sativa
agaaaaggaagagagaaaagctttaggtgtaataggacttaccagaccatagctgcagagggcagggaaagtttcaagtttgtgaggatgtaggagaaagattcagttgaaaatccttgccatgttagattaaactgcctggccaacaggacatatgcagccagcataaaaaaagaaatccagagtgtgattgaggttgctattggagctcctttgaagccaagaggtgttaaatggaccaaacaatatgtaataccaatgtggaacaccagtggtattgctgataacaaaaccgcaggcctaacaactgattgtgtctgaagaaacctcaaaatattttgaatataaccaaaagcaaatatgctaggaatcagaaacttggtgtaaatgcctgccgtctcagcaatctcaagatcttgaccaaggaaaactaatattggttcagtgttgaaccatacaaacgaaatgaggatggagaagagaaatgatgtgatacaagaggcttgtagatgaatgcccatcattttgtataagtttgcaccaaatccttgtccacaaagggtctcaagagcaccacttagcccaatctagatatgtaaaacatcaatgatttagtgtgcactactactactctgcgtttatatatatataaatacaaaaatgtgggaattaggaagaaattagagaaaaaaaactaatacgtaccaagaaagcatagcctgtgacagtggcccatgaattggcgagagtagcacctgcgagctggagagggccaaggtggctggcgaacatgaccgaaatgagaggtatcaaataatagaaaccattggtgagaatcaatggcagtgaaaacaaaacctgttgtttggcttcctccacttctaacacttttttccaccatttttctccactactagtactagtaatgtttactattattacatttcctctttcttctccaccatcactactactacctgcagtaccacttagatctcttggtagtgctgcaactatattcctatttgatattgatgaactaattccctccatttctcaagctagatctatttaatccatttcactctttctctctttctcatttcatatataaattttaacacctacgtacgtaagagaaataaaacttgtttacgtttctcacgaaacaaacaatactacaagccgcctccactttggtttggtcagtttagtgtcagtctcagccttagtacattgacccaatttcaagaccacagtcattaattaataatgctaatcgagattaataagaatcggaattatattctacatttattatttctgctatggtattatactaaactttaaatttgttaacatttaatattcacaaaaattaaaattttgacggcaaaatttacggaacccctatttcgttttactctttacatttcggtctaaaaatttcagttaagtgccacagtacgtgtacacttagcaaatttttagtagtgcacctaatattaattattaaaatataattttaaatatttaaaaaaaaaataaataaataaaaaatagaaaataattatataattttttttttctt

SEQ ID NO: 111404 - DNA, 2760 bp, Cannabis sativa
aaaaaaaaaaaaaaaagagatcatggccggaggaatgatatttggattgtgtttatgggtattttgtacaatattggcaaaggctgaagatccttatttgtacttcacatggaatgttagctatggcactctttctccattgggtgttcctcaacaagtcattctcatcaatgaccaattccctggcccaaacatcaactccacctccaacaacaacattgtcatcaatgtctttaataatctagaccaacctttgttattcacatggtatgtatatatatataactatctaattacatagaaatgagattttcgagtcacgtggtacttttaaattggttgacaagcctatcaagtgtcacgtggcttgataactaggtctttatttgtttgtttgcttgtgtttatatgcattaattatgcatggtattgcagggtgggaatccaacaaaggaagaactcatggcaagatggggtgttgggaaccaattgccctattcttcccggaaccaactacacttatagattccaagttaaggatcaaataggcagctactattactacccttccaccgccatgcaaagagctgctggaggatttggcggtcttcgcattaacagccgtctccttatccccgtcccttaccctgatccagaagacgactacaccgtcctcattggcgattggtacaccaaatcccaccacatcctcagaaagtacttagatgtgggtcgatccctaggccgccctgatggagtcctaatcaacggtaaaaatgccaagggagatggatctgatgagcccctcttcaccatgaagcccggtaaggtttacaagtacagaatctgcaatgtcgggatgaaaaattcactcaattttagaatccaaggacaccctttgaagctcgtcgagatggaaggatctcataccgttcaaaacacttacgattctcttgatgtccatgtcggacaatgcttctctctccttatcacagccaaccaagaccccaacaaagattatttcatggttgcctccacacgtttcaccaagtctgttctcgttggtaaaggtgagagtattccacattttaatcaacttatttgatttaatcacttgttgctaatcaattaattattaaaattaacaaatggaataattatttcaggtgtcattcgttacgctaccgctaaaaatcctgccccaccatcacctgagcttcccgaggctccagtggggtgggcctggtctttgaaccaattcagatcctttaggtggaacctgaccgcgagtgcggccaggccaaaccctcaaggatcttaccactacggaaaaatcaacatcactaggaccataaagctggcgaactcggctgggagggttcagggtaaactacggtacgctatcaacggggtttcacatgtggacccttacaccccactgaagttggctgagtattacatggtggccgataaggttttcagttatgatgttattaaggatgagcctccagctgagttggagaaatcgataacagtgcaaactaacgtcattaaccaaactttccgtaactttgttgagattatctttgagaatagagaaaagagtcttcaatcttggcatttggatggctattccttctttgctgtagcgtaagtttattatatttattttattttattttatcccattaaataaatataaaaaatttaaatcctaattaagtttgccactaaactaaatgtatgaatagggttgagccgggtcgatggacacccgagaagagaaaagggtacaatcttttggatggagtgagcaggcacacaatccaagtgttcccaaaatcatgggcggcgatcatgttgacatttgacaacgctggaatgtggaatcttcgatcagagttgacagagcgccgctacttagggcaacagatgtacattagtgttctttctccagcgaggtctcttagggatgagtataatttgcctgacaatgccttgctttgtggcattgttaaggacatgccatggcctcctccttacagcatcaacgccgcataatcatcgtgatcatatgatgatcatgagcgccatgcatggcttcttcttatgagtacttctgctatttctactacgtactaagatctactgatgatgatgatcttaactataattaccatcatcaatcaatacttaattgatccaattttaatgtcttttttttttgttttgatttttgttttgatgtaatttcttttttcatttatttagaaggaatattgatatccatcattcattatgatattctttgatttcaattatatattgggaattgagtaaagtaataagaaggtttctatatatatctaatttctttctttgttatataattatatataataattagtgaattaagtaattattgattactaagaacaatatgtagaaagattctaatgaatttatgatacaactttgactcatatacataatggtaatattgtaagaataataaaatgtttttaatgaataattttatagcacaagagcccaaaattatgaaattagaatgtaaatttcccaaaaataaattaacattgttagatatttaatagtgatatttcgttatatcaatatttgtctaatgcatagatttgttatataaatctgataaattttttaatattttttattattcgtatttatttatatatataattgtttgatttattttttgggcaattaccccatatactattt

SEQ ID NO: 111405 - DNA, 6858 bp, Cannabis sativa
tcagccttcaaatgctactactaccctctactcaagcacagactgaaactaattctatgcagaatctcccatttccttaaatttcatttaaatttaacaacccaccagataccacataatacaagacagtagcattatggctctatatgccttatccgtatcccacagccgatagggtacttgctttcgatagcctttgtaccataaacaactaatttccaacagaaatggctggctttataagccttatccctatcccatccaggttttgattgcacgtgaccgaatcatttatcggaatattccacctttgggcatccgaagggttaaagagagccgtggctggctgggtgacctagaaagagagggagtgagcagaggtttcgtggttgatgagagatagaagagtattgaggggttagggtttaaaattaggtcatttaggtatttatatattttcagaaatattactaataaataaattgttttaaaaatacatataactataactttcggccgtctcagttattttgcaaaaaccactctaaaaccctcgaaacctctgcgtctagatttcttctttctaatccaatggctccaagcttcgtattcgaacccccaagcgatgaagaaaacgagctttcggaggctgaagacgaaatagatgaggaagaagaagaaggagaagtagaagaagttgagaaacaaaaaccctcaaaaaaatctcaatctccgtgggacttcgctgcattttctgagtcagtcgccgaagaacacgcccgtagaagcacgacttcggtcgatttcaagatctcaaaagtcctagagagacagtctaacccagccgccgctaccgctacagccgaagaagacgaagatagcgatagctccgaatcggaggagccagacagacaagaagattacagaccggaagctgatgaagacgatgattccaacgctgttgttaacagtaagtcatttttttcctcttccgatggaacatcgttccatgctaattcattcttggagctcaatttgtcacgccctttgcttcgtgcttgcgaggctttgggttacgccaaacctacgcccattcaggcggcgtgtataccgttggcgttgtctggtcgtgatatttgtgggagtgcaataactggttcgggaaagactgctgcttttgctttgcccactttggagaggttactgtatcgcccaaaacgaatgccagcaattagggttcttatcctcaccccaaccagagagttggccctccaggtaaccagcatgattgagaaacttgcccaatttaccgatatcagatgttgtcggattattggaggagtttcagtaagggaacaagaggcatccttgagatcaatgccagatattgttgtggctactccaggtcgtatgatagatcatttacgtaattctatgtcagtggatttggaagatcttgctgttcttattcttgatgaagctgatcgtcttttggagcttggatttagtgctgaaattcatgagctggttcggctttgttccaagaagagacagaccatgcttttttcggcaacaatgaccgaacaagttgatgaacttgttaagctttctctgaataaaccattgcgactctctgctgatccatccagcaaacgaccagcaaagcttacagaggaggtggttcggctacgacgaatgcgcgaagtaaaccaagaagctgttcttctttcattatgctcgagaacatttacttctaaagtgatcattttcagtggaacaaaacaggctgcacataggctaaagattttgtttggtttagctggcttgaaagctgctgagcttcatggtaatcttactcaagtccagcgtcttgatgctttggaactcttcaggaagcagggagtggattttctaatcgcaactgatgtagcagctcgtggacttgacatcattggtgttgaaacagtcataaattatgcgtgccctcgtgatctcacaagctatgttcatcgagtgggtcgaacggccagagctggtagagaaggatatgctgttacattggtcacggataatgatcgatctcttctgaaagctattgcaaagagggctggttcaaagttgaaaagccgcactgttccggagcaaactatagctaagtggtccaggttaatcgagaagatggaagatcaagtggctgcagttattcaagatgagattgaagagagagcacttagaaaagctgaaatggaggccacaaaggcagaaaatttgattgctcacagagatgaaatcttttctcgccctaaaaggacgtggtttgtaacggaaaaggagaagcagcttactgcgaatgcagctaagtcattttctgacaaaggaaagatctctggaaatgaaataaccagtgcccaacaagctgaagatctaaagatgaaggaaaagaggaaacgggagcgagagaagaacttaccaaggaagaagcgccgaaaacttgaagcagctagagaaatgttggagatggaaagtgaaaatttagaagatagtggtgataaaaaagaaatgtcactagttgacctggcgtatcggcgtgctaaagctgtgaaggcaaagaaaaaggccgtggatgctggcaagattgtgatgaaggttgtcaagaaatctaagaattcttcgaaaagaactccatcgaggacagaagagatgaaagagctatttgaaagcgacatgactgacagaaaacagaaaagaaacttcagtggggaaggaatgaaaaaatccaagagttcctttaaaagcaagtcaaggtataagcgcaaatagcaacttcaagtgcgccttgttacagcagctgtgaagtgagttggcaacaaaacaattttacttgtttttgctcttgttatgagtatttgcaaagcaattttggcagagggaaaagagtagggttgatacttatggaatggagttgtattttttatttatttaaattctaaagtaacctagttaatgatctgtttttgaatttgaactcttcatctatgttatagggagagaactttccttgcccctatttctcttgtaactgcggttaagaaatttttattcttctttatcataaccaacaacaaaaaattataagcaggaaataattaacatgaagcatgaaatgaaaatgaaaaaaaaaaagagagagacaatatatactatttaatttcacaagacatacacataaggagtagtgaaagtggtaaagcttctaacttggttctggaccacttgagaagctgctctatagcgttcgcgaatcagtttccctggttctcctgaagtaaaacattttaaattgctgcggaattcagatgtgtactttcagaagaaaaagaatcagacatacttcagtacaaaaatatataaatgaaacatccttgcagtaatactattcatagaaaacataaaacaaaaagttcccacatgtatttttatagaacaccaaacagaaaagaataatagctgtaaaaatatgatcaggcatgtgatcttagtcatgatagagaatcatcttaccagctctttctgactctagttctccagctgacataattacaggttcaactcccatggcctggaatataagttcagtctgaaatgattttccttgcccttttcctccccaaatacctgtaagagtaaattttaaaattcagcatgttatgtaaagctctaaattctaatcattatcaaccattcacaactcagtacaagaggttgacaataaaatagcttcaaagcacaaaagtttattgagaagaaattcagaaaaagaaaaaatcacatataaaaatcaatgtgaagatttcctgtaatattgataaattcatctgttcttacaaataaacgaggtatcacattacagtttgccatgctttgttcttctttagtgtaaatgtgatataataaaggagggtgtcacaattccagtttccgattattctttgttctttatagaggcaaaggattgctattggtgcaatatcttagtaaaatttgaaagttttttgtttggctatggtatttgaattaataagcaaagtgtgcttttaggcatcaatgctcaagaagatttcaatatgaaactagctgattcagtgaggtacaaagatggtagttggccattcatttatctgggttcgcctatgagagttaatcctggaatgctgtattctggcagtgtgatagctttgtgaaaatatcaagtggaaaatggaagaagattcagattttgggaggaaccttggtgcattgatagaactgtagcaatctcttctccagatttttattaagttcctaggtttcgacaaaggtttgatagatatagaactgtatgtagttttccttgttcagactccatttcataagaaacttgaccaataaatttccttgttgggactttcattttctacaaactgaaatgctgtaatcgtaaacgaacatatttgcaacagaattcaaatagaagggtctggttgccagatccctcagccagagcaacaggactatttacgccaatgtagtgtcgctccagaaccattccacgctggagtaatgtacaacatcatctatgtaatttatttctacattgcttcagtaatactatagattactccagtttggaatggcactggtgtcggagcagcactacatccaaagtctatacttcaattacacaaaacaaacttaaaagaacaatcaaacagatcttcaccttttcttatactatctataagaaacaagactctaattgactgccctcaacaaccgttacacatcaaaattttaagtatattcatctaaacataacaaaacaaaagagtattgggctagtagctaaaatctcttaaaactaatcagccttaccgctgcaccaacaacagctcagcaaaaataacaacagaaactcttattctctcaagcataacaattacaaaattcagttccctgacattttattaaaagagactaacccataatatatggaattaaggaaaatgtgctggaacttaaactaatataatgaagtaagaataacatttaaaaaaataaatgtgacataaatacctaggatcagaggaacttttgtcttgaggatatgagctaggtagtttttggtaatgtggcacactgcataaacaaacaagcattagagtgagacagaacaagaaaaataagtaagaggcatgagtgcgagaaaatgttgcaccaatgcattaacatataagaagaggcagagaagcttcactcttcaataaagaataatatgattggctttatggtttttatatatggaaatcttatgtaaaataaaagacgacatatggaacctcatttaactcccactcccatgacttacactcaaaccaagacctagggaaattttaccatatctcaccgcatatggtttgttgcatattttccagaagagaaaacaagaaaataagagcaactaaacaattgttaccaatgaaattaaacaaaaagtattatccttacagtaattctcaacataaatatgaagaaaactagaatatttctaccacatttccgatatagcttccttgtgaagtctccaaagaactttactgttttcaaattacactgaacttaccaactttatcctgtcaattcaaacagaagccacaagcaattagtaaaatggttgaacatatcattaaacattaattcgtaagatgaaattcaacaaaacaacatactaaagagagaaagaacaaacaatcagtaaggtaaatgaaatcattaagagagaaagagagagattagaaatcgctataaaatttgatttataattaggccagcaatagcatgaaatgaaataaattatagatgcatcgtaacaacatattagaaagaaaactattggcaaaactaacatcgaccaggaatgatgaatatgatccaatgcagcagtggaaatggagataagtgtaacaacgataacagctaggaaaattgaagtttgtgtaaaggtgaagtgatgaagatgaaactaccatgaagagaggagcgatgtagtaatctccttgaaggtactcaaatgacttcgtcaccttttggcgataatcaaacacaatatccgctgccaaattcatatgaaaacttctcaatcaaaaccctaagactttcgtatgcgaaacaaaattgagaattaaaaatttgcttacagtctcggccgagaaaattcccggcgaagagatcatcgatgacgccagacctagctccgacggcgatattcatgttatctgcttctttacccaatctgtagaggtaatcctggccttgggagtctttggactcccaggacgactgctttgacagcctcttcttcttcggggcatcatcctcggcagcgggaggcgaattcggtgcacaggaaagggaaaatgaagacaatttgttagtgttggggagagtagaagagtttgggaagaaggaaaatgtaggagatgaactgcagagcgccattgacgccattgctgaggatgagtgagttttgagttgttatgtggatagggaaattctgtttggcgccacaagttaagttaacggaaacacatgatctattctttaggatttggaggtaaaatgtcacactaggccactaaattaaattaggatgctcataaatcgatccaattcaataataatagaaggatacaatcatataattataacctactgcaaaatattagatatctaataatatttttattaattaattgatcaaatttacctctaattttatatttaattgaaacatacctatgtattgtacccaaaatactctaa

SEQ ID NO: 111406 - DNA, 2927 bp, Cannabis sativa
  modified_base (2626)..(2627): a, c, t, g, unknown or other
ctctaccatttattccatgtgggacattgtccacaataattaaccatacatgttttcactttcttggattgatagcaaaccaaccttgaatagcagctaaagaaagcactatcacagcagccataagacctatgatagcccatggggtactaaaatatttgtgatagacttgagtcatccaaattgcacactttctctcgcaatgtgtttgtatctcaatcttcacatgcccataaaagtcaaatcttggctcactgaatttagagcctaatttgttaaagagattggccacatctgcatcactgctgagtctgttttgaagtactcgcgatgctcttaactgcttaacatcttgttctatatcgatgagaatatccataaattttatataagaaataagcttgttttctttaatgaacatctcatagcgaagaagattattgagcttttcctcagtccattcatccacaattaatggagggagtttaagatggcctttgaggttaaaacatttgccactgaatgatatggttgccaggccagaactggtaggctctaactctatccctgttgatgtaagttcctcaacattgcgaaaaaactctttggggtcgttgaaattcggtctttgcctgggaaaacaagagcagagcatagtattacacccaagagtactgtcttcatttcttttgttgttgttggtagagacaatattggcatcagtagatgtgatacacaagtagagaaggtgaagtaggtgaacatgtttatgacatttggtaccttcaataatggcataccactgttctaggaggatgttgttggagcttggaattggcaaatcctttgtgatattattgatgtgaatgaatttcacaatatctttctttagttgatctgggtccttggtcatgtccaccaacaacttaaccactgtaaaaggaatttggttctcaaaattaaacaaatattcttggatctttcttgcttcaccatgactaattccaaataatacttctaatgaattaccagcatagcatcttatgaacattaaaatagtgcacccactcaaaaaaagatacttgatcacatcttggtccccatattcattgtgcctatcctcgagatatcttaagtttagtaggtgattgcttgtgctagttaagactcccaataaactcttccctgtctcgtccgtgctcaagtcttttatgaaccatgcagtcattttttctggcaggtcaggatgaccttcaatttccaagcgacacctataaaagtaatgacctacttgtgatgggttagtgccattgttttggctaataagatttctcaaccatataatattagattcagaaggatagagtactccaactccatcatcacttgagctttcttcataatcatcatcaacaacctgttggatctcataattcatattcacatccaactcgatcgatctacaccaattatatataaaaaaaagtctcacctgcctagctcggtgtactctggtggtttgagcttaggctcgggtcgacgacgaacgatgaagctgagactttgagactttgagttttaggatttgtgttggttgaccttagtgatctctctggttcttaaggttttttttttttttttttttgaaaatgatcccatcttgttgacattgttgttaagttttagttttcaggaattttttattttttatttttttttgacgtacatggttttttattttttaatgtatgtattttttgtaagcttgtctctttcactgtcttttttttttttaattagagtggtaccttctcattaacaagtaaatttttttaaaataagtaacaatctttcaattgaagcacacaacttgataagaaacaacagttcctaacaagactatgaactactttatttgtagatcgtttaataaaacataaaacaatatgattgcaagataataaaaagtcacaaacatcgtggactaacagaccaaattgagatgacaaagagatgctacttttaatacctcgaacacacaccaaattattagtttccaaaataacatgttgccaagaatgtcttgcaatccaactcaaagcctcctcaatattgattatttctgcaatttcaggttggactcgtcctaatttacccaaagtgtaagccttggctatcccgagccacacaactaacagcaaaacgaccctcttgctcaaacaaagctccatctacattaatcttgatgtgatttgtcataagggtaatttaatgctcagtccgtttttcaccatccaaaagatgagaaagagaaaaacctcttctttcttcagcatatttaaattgatcaaggcatgatcttagcaacaatatttgcagcattacaggttttattttgccagacgatatcgttcctggcttttcaaattgcccatgctaccatggctaactcttctagttcccttatttttctctgtgcgacagcaccagaagtcagctataaaaattactgttgtgaaaattaatatatgcaagtatacgcagttacacaagtaataaagtgataagtaagattgtctccaagaattgcaaacaaaatacgatgtaaaaccaactaattacaacnntaaagcaaaaagaaaaatatgagaatggttgagcaatgattcaaaattaaaatgactgtaattaaacttgctaaaattaatgctactattgctagaaaattgttcgcaagaaatgtaatatattaaaaagtggcttgaataactaattcccctagtcagggttttcccagttgctataacattaccttagcattttcacacagagacaacataattttttatgcgtttatgagaattttctaaaactcacaatttaagttctaccatctagattcacatattcctatatcaaactagatt

SEQ ID NO: 111407 - DNA, 8260 bp, Cannabis sativa
  modified_base (3911)..(3914): a, c, t, g, unknown or other
aaccgtatttttgttgttttttttgttgtttttgtgcatttatgaaattaacccataaatttgttgatacactcacccaatttttattctcatccacttgggaaaaacactttgaacttataatatcaatctaataagatttcaaaataattaactttgaacttaatatttaataaccaaggaaaattgcttactttacatataattaacatttttatttttggtaataagaatataattagaaaattaaacacatgttaagaaagcaaaactatacttttgtatgaatgttgccaacaacccattagctccctctaatggcaaggccccaaaagtaaagaattggatgttgcttgccctcatacacaaaatagttttatatatgtgtaaattttcaagtgggagccaaaataaaattatgtggggtcattttttatttagtgcatttagagaaataataatttaaaacttaatattggtatatgatgatgtatattgtagttataatatgtattatatttattttaaaaaattttaaataatctacagtacaaaaaataagattcaaaacaattagttactcacatcttcctctcttttataacgtgcaattaattattttgaattctgtttttaacactctatgttaatttaggatttcccaacataggttaggttcgataattgttataactataatacacgccaccatatgaacaattgagttataatttaggataattctacaatgcaccctcttaaaaggggtgcatcggtgcacgcatatttgtttcggcatccgcaagaattttttagtccatttttttttatggttgtgtactttgtagttatttaagacactctgcaaaattttgagaaatttgaaaaaaaatttaacatgtcaaaaacatggttcaaacagtctgttacacgtgtgactcttttattttatatgcatgtaaaataatatgtttaaacactattttttatatagtaaatttttctaatttttttttttaaaaattttacacgattataaaaaaattaaactaatttttttttcttaaataccaaaacaaataagtgatacatcagtataccaactctttttgaaaggtttgttataaaatcgcccaataatttatttaagtaccataaatataaaacaaccctaccccatttgaaaactttaaatagagagaaataagtgtgtgaaattgggagatatgtgtaagcaatgacaaagaataagattatatataaagagagaatctcataacaaaaagattgaaagaagtgaggtgggatgcttttttgtgttctttgaagcatttctacaaacatatggaccccaaaacctccatcaatgttgtctattcacaaaacactataatgattttttgactaatcatatgactaattaaaattaacaatattattaggtttagtgtccttaaatttttctctccacgagtgtcaaaaagattaatttacaataattatatgtaacactctcataagtttttatttctttaaaacttagttcaaagaatcagcctccattatatggagccttataacatattataatcttttcttattatattaaaactttagttaaagtgtctaaagggttacaaataattttattaccttggtcgacaagtactctatttcatcattttactaaacaatgcaaaatgaaatttgatcataataatcaactttaatacttctaattttttagtagatacatgtattcatatttttaaatattatatgtttatacaatacccaattttttttatacaatttacgtacttctcaaaatgttacaattatatatttagtttttttctttagaatatatcttaaaattaaatgcaatgttttatcactatactaccgtctaacatgttaaaaatataacattattgtgtaggaatttacagccttatccctacaccaacaaaaatctcattattatagtgtattaccaaggtcattattgacctttccttgttctaagtcaagtttagacacaaaacgaccacataacttgtgtcgtatccacattcacagaaaatattcttgtcaagtagaacttgctcgaaactatacaaatacacacacaatcaagcatacatgaaagagcaaagcacaaattcaaaaaacaaagtaagaaattaagacaaaacacctaaaataatttcgaagttcaccctaaatccagaactacatcttcatcaaactgtctcaaagattaaacttgagtttccactaatcaacaatcgcgattacacaaagttgactctctttcctctatttctttcaaaataaatgttttacatttttctttctcacaatctaactctttgtttctctcttttacatgtactctctcctcaccatgagagctttattttctcactatctctcttggatcttggagctaaaagtgatttttctagggtgatagcttttgaaactttctggtaggagtgtttattgaactacatccaatatttttatgactattcatatctgatttcattatatataggacgttacattttactatccgatctgatccaattaatttcagtcatccaattgatcaaacatccaatggatattggattggatcagctctatctattgaatgtatttcatgtatatctattagtttaattcaagtttatccagtattttagacctaatatatattgaattggatcagattcatttaatattttaaattcaatatctattagattgaattagatccatccaatccaaaaaataaaataaaattttattgttaattttcatatatacatatttttttttttcgtataacaacataaaatctaattactcattcaaactaaataaaaatattaattatttcgattagatattaaatgtattggatttttaaacactctatccaacatctaatccggtccaattgaatactcaaaaataacatccaatttgatccaatcaaaattgaatatttaatatttggcggtcagctgtaattggatcgactggttatcattagatttgatcgattagatattaaatgtattggatttttaaacactctatccaacatctaattctgtccaattgaatactcaaaaataacatccaatttgatccgatcataattgaatatttaatatttggcggtcagttgtaattggatcgactgattatcattagattggatcaatttatgcacactcctactttttcatcttaatttataaagttgtattgagttgtaatcccaaactgaggttagtgtaactaacttctaattttgattatgtttttattccgctgtaagagagttgtattatttttgtttaagtgctattgttgtacagtaattagaactggttttaagtggaatttaaccaacatattgaaatattgagaatatttattgtcaaaatgaaacattagtatatgcacaatattttaaaaataatgacaatatttagaggaaggaaaaaaaacaaagataaagtacaaaaatacattattttcataatattgaacattttaaccaccatttactcacagtaatgatttttattcattcaacaaattaataaaaaggacttcacatgattgtgaattctcgtgatgactttctatatattattatatagtagagtaatttacggcataagtatctaagtttaactcccagtcgtaaataaatacataaatttaatttttgacagtaataatacttaagttataattctagaacttttataggtacctgacaattactaataagattatgacacgtggataatgacataatattttaacggttagatacctacaaagtttcaaaaatataatttaagtattattaccgccaaaannnnaacttaggtatttatttacaacttggagttaaacttaagtatttatgtcgcaaattactcttacatggtataattaaaagacacgattatgccacgatgaatatattgttaccattcattttaaattaacctaacaaataacaaaattttcgtatcgagcaccgagcgggactaaatttgtgccctaagtctttatggataacaaagaaagaaagaaccaacttgatacaagaacaaactctattctaggtggccctaactaggtagacaaggccacaatattgctttgctttgcttgtagggttaggtaatgcgtttacttaaaaagacttaataggtttagtcaactatttcaataaaatttgtacttttgttgcaactagggttttttttttatttgctagataatgaccttgagatctttgtcttgtaattttacttaaattattattattttgattaagacattaaaaaatagtggaggtcccactatacctacgagcactatatcaaatataatatatttatatatttataaatcattctagtcattttttaacaaccaaataaaacttggcatatacgtaataatttcatccctataactgcaaaataaaaaaagtcagtgactaattttatatactaagctctttatttattaacaaaaatatatgtatatttgtttaaatggaatggttttaagggctaaaacaaattctatttaagctcattattataatagaaacctaatcaaaacatgggcttatttagtgttattatatattcattcaattgcaaaggaacaaaacaaaaatattagttggaataattaatttagccttagtccacctttgagtaatcttctttgacatcaccaaaaccacatatgtatataaataaagatatttaattttgttaaaaaaacaataaaatagtattattgttattagaaatcaaagtgttcaatattgcaagagatgatgttttaagagtagttagccatttttattattaattattaaattcaataaataaaacttaatattgaattgcatgaataataatatgtcacttataattatggtgttggataagttaaaatgtcttaggtatgaaaaaaaaaagttataactttaggaggtaaatcaaataccaatcaataacaagtattattgtcaggtagtattaatacttaacactataaaaagataccatcttgcaaatgcaaatggttattaatttttttataataattattaaattaaataaatatgcaacccgatacttctttgttttgaaagtaaatataaaattttattattttattaaatcaaccaaaagataacattgtacttcaacaggaataataacacttaatttgaaaaaaaacaagatatcctatcaagagtatgagcaaccaaatttagtagatttttctctttttttattttcattttaaaaagatcttttccattggcccatgataaagtaacacctatctaatcacattaagccatttgtccacaaagtaatacatatatagtagttattattattattaagagcattcatattggataccattagtgtctattaccactaaaatatgtcgccttacaattaattaacgatattacttaaaaattattttagtagactatgtagaactcgatacttaattagaccaataataataataacacatacaaaaatactaaacaccacttgtcttataacatttctttattaacaaacattataaaacaagaccaaagttttaagtaaaagtgtttatataaaccgacttctctttcatattcgcacgcgtgtggaatttcttgtcaaaccttttttgtttaattttttttttatgtatataatgcttctctacacatagttgttgtagcttcttctttcttcttcttcttcatattcataaactcttttctctctttctttctcttagacatgggaaattactcatgtaccctttacaaaagattggtttacaaagacaaagttataagagttatgaagatagatgggaaagtgttaagtttcacaaagccaattctagtacaagatgttcttgtgagaattaattatggtgtaactaataatattggtttatctaaagagattttatcatcaaagaagcttccacttgattatgagcttaaattaggtaaagtttattatgttattcctttttcttcttctaaatctaataatgaaaaaaacccttgtgggatttcttcttctatagaaggtaataataatttaggtggtgttaagagaattaagattgttataactaaacaacaattgaaagagttgttaaataagaagatatcaatggatgatgtggtaatttctagtttggagaatgacaagtctaatttcaatggtaattggaaaccaaagcttgaatcaatccctgaagagtgaagagctttttataattattgtaacatgtgtttttgttttagatgaacaaactcataacttttgatgtatatgtaatttgtctattaacaaaataatgatatataacatagtttttttttcatggtttattattgttgatgatgattatacttgaaaatatgttgaaacagaggaaaaaaaacaggggaaaaataactgaaaatacagtttgtttttatattacttttatacccacttgcttttaattaatagaatctattttcattagagtttaaaatttttaattcaatgtaatttcttttcaaggtaaattttatggataaaatgtgaaaaaaattgtgatcctatgcatgctcacattgctcaggactgaaaattatgaaaaaaaaaaaatatgactacatagataaaatattaaataataaaaaaatattatttagtatagtgataaagagttacttttaaacaaaaatgttaaagatcaattcttaatttttatttttatttttttgaaaaaaaaaaatatttaatgtatagttatagatgattgaactttaaatttaagttttaaattcttttaatcctatactaaaatattagaattattattttgataataataaaaatatttgtctacggagccaaaatttaagtcctatatattttaggattaactcttatgataaattattttaatcatgtgacatccgacactattttgactaagttgctatgtgaatttttgtaaaaaaataaaaaaaagggccaaaaaaacagaggaaacaaagtaaaaacaaaactacttattcatatttcttcactgaatttgaacatcaataaccttacgttcaaccttagttttaggaatagaaatgtaaagaacaccattctttaactcacccttaaccttatctttctcacaattatcaggtagttgaattcgagtgttgtaacaactaaagctttgatgtccttgttgtgaactttcttcttctttatgttctcctttaattaccaaaaaatcatcctcaatacacactttcacatcttgtttgtcgagcccgggcatgtcgaatcgaaacttgatttgattgtcttcgtctttgatgtcccacggtgttctcaccgcccccgtggggcggtttccggtgggtgataacatcattgtgtcttcgaaaagtttgtccattgtgtcaagcatttgcctcattgttctcattggtgacattgggtctaataaccctgcaaaaaaatatttcaaaaattttatttaaaaaatagtgacaaatttattgagttttttacacaaaatgacaaaaaaaatatattttttacatttatattaccacacggcaattttatcttttttaatgtttatacttttcatttatactgcttcaagttttcttaattacaaatttactgattcggtcttccactagtgtataaagtccctttcccaacgacttgacttcactcacacagctcaactccatatgcattgtgtagaaccatgattaacccttaatctcatgatctagctactatgagaaaagaaatgctagtatagtgtaagtaatatcatgtataaatactttatatattaatggtattttttttattttgttgaagttgttttcatgcttatataatttacatattgaaatggagttgttatgtaatttttttttatttagttttttaaccaagagaaataaatatatatacatgtttttttttcaaattcgtatattgtttttattttattttttaagttaacgtaaatgttaatgtccaatcaattttcagattaaaatggaataattattatgttatattcattgctattaggttgtttaactaaaagaaaaatgagtatatatatatatatttttttt

SEQ ID NO: 111408 - DNA, 4599 bp, Cannabis sativa
tttcaaatgtgtacatttttaaaattgtgtttttttgcacattttttgtaatataattgtttttgttgtacactaatgaaaaaaccccaattattaatgttttgaatgtaaacaaatataaataataaatatatccaaaacattggagattagaagattttgccgcaaaatttattggatttgctaatgaaatgaaatttgagaggttttgccactcaaaaattgagaaattaaaaaaaaatatatgaaacaaaaaaacattgatctatacgacaataacctaaagaaacgacatgaatactaaaacatgtcttacactaaacgacagtttgaatatattacgacgtgtcgtttctttacagaagtagagaaagaaagaaagggtttctttctcaattccctaatttgacattgttgaatgtttggtatcagtatgaggtgtccgtactgctcggccggacaaggccggtgcgccaccacaagctccggcaagtccataacggagtgctcttcctgcggccgtgtggtcgaggagcgccaatctcagccccatcatctcttccaccaacgggcacaagacaaccctctttgcctagtcacctccgaccttccaactctccagccccgcgaagacgaagacgacccattcgaacccaccggcttcatcaccgcattctccacctggtctctagagcccactccgctctttcttcgctcctgcctctctttctccggtcacctagccgagctcgagcgcacactcgaatctacttcttcgtcaacgtcatcctcctctcaatcgaattcttcttcttcgacagttgtggttgataatcttagggcttatatgcagattgtggatgtggcttcgattttgggattggattacgatatttctgatcacgcctttcagctattcagggattgctgctctgctacttgtttgaggaatcggagtgttgaagctcttgcgactgccgctcttgttcaggcgattagggaagcacaggagcctagaaccctacaagtacatatttttaccattcatttttattgattttattactaatttgaaagtttgtgcagtcttaaaggttcttgaaatgaattgttttaggttagtttctgaatttcattttctatattcagttagattttgtgtttataaccattactgctatgattcagaactcagttaagatacatgtttatatgtatgaatacagtactgcttttctactttcaatgagaataatcagagagatactcgacccacttaatatggcgaagccaatcttctctaacaagctgatttttttagggtgggttacgcttagtcatttttctaatacggtatcaaaaagggtccatttttacaatattgggtaccccaaacattgatttgttcactgttgtttcgcatagtctatgctgtgtgtgaggggtcatattaaagtctcacattggttggtgataaatattcgatcctctaaataaggtgagggcaatccttccctaacaggctagttttgtcaggttgagttaggcccaataactttcatcatagttgtttcctactttcaatcagattggtcagagagattattcgattttagaagtgttacacaggagagtaccacttctctaataatgctgacactcccaatatttatattttgttttttgggcttcctcggttaacttgaactgtagttattgtagtttattttcttccatgatgattctattgcaatgataactgatgtgtttgtgtaagcatattggttgtagtgagtgaagcctagttttacattagtatgttttatctctgattggctgtggtacattttgatttttcactgtttagagcttctctgaattgacaaatgattttaatctatcataggaaatttcaattgcagccaatgtaccccagaaggaaattggaaagtacatcaagattcttggagaagctctacaactaagtcagccccttaacagcaattccatatcggttcatatgccaaggttttgcacgcttcttcaacttaataaatctgctcaggtacttcaatcactgtttaaggtttaccacttgaacataactgttcaaattaaattaccaaatatacttttgggttcataactgtgacgatgcatagttatctgatgtaagagacatgtcatggcaatattcagtttagaatacatggtatgttcaatgtgaacttaggagacggcacattgaaagaggcttgaagggaagagattcgagacactaattttaaatttagctttggtaactttgtagtctgatccattaatttccattcctcttgaaaccttgaagctacattattcaaatttattataggttgtcacagtctttatattttagtatgctcataaagttactcaattgtttcacaaacaagtttaaggacatactccggtttgtaaggagatgtttttagatagtcttgcgaggtttctttcattagaaatcactccatttgatgactcagatttttgtgatttgtaaggtggttggtattgaactttgatgtgatgataaaacttctacttcctcttttccaaaatctaacattgacttggcttgatcttgatcttgttcttgtttttcttttaggaactggcaactcacatcggagaggttgtcatcaataaatgcttctgcacacgtagaaatcctattagcatatctgctgcagccatatatttagcctgccaacttgaagacaaacgcaaaacacaggcagagatttgtaaggtgactggccttaccgaagtcactctccgaaaagtctacaaggagctcttggagaattgggatgatctgcttccatctaactatactccagctgtacctccagaaagagcatttccaactacagtaattgcttcgggccgctcttcagcaaccaaagttgatttcatggaagtgactacttctttagacagagagaagcagcctgacgtgaaatttaacaaaccgaacgagctttcagatacaagcctacaggcaagagttaaagaggatgctgaaggtaaaggcatttctcgtggcgttcattcctctataccaaaccgaccaacactgctttggcaaaaccaacttccattcggtacatcaggttttagatcaactagcgataagggtcctcgaggaatggacattgatgagaatcactctaatcatcaactgttagatcagaagatagacaaggatccgatgactgctactaataacagctcttcaaaccattcagaccaaactcaactcttgaattcctcaacttccaataatagcttgtctgccagtcagtttaggcctcaatcttcttcattgggccattccaataatgttcaattatttggacagccaacaaagctagctccaggctttgttgagctcaaaagtacctcaggtctaaatggaagtaaaagctccaaacattgattcgatcattgtttctgcaagtgtacataagtcttgtttgtattgtgagtagttaagtgtcaaagaccacctagagtagaagtttgtgggtttgattagagtttatttgttccttggaaagttctttgtaacgattccaatgaatataaaaataccaatatttttggaagttgtaaaatctttttcttgtaatgtttactttttgttttgttttgatttatatctattgatcattatgtttaagtcaaaatattcgtttacctaaataagacgatgtattgttagagtaatgattgagtaattaaatgaagtgctgaagagtaaattgtgttatactacgcataaaaaaaaacattgttatttgacattagtggtgtccaacaccttttactgaaggcagtttgtctattttcttctagatgcaagcactgacacgaccaaatggcagctctcagctgtgcattgtcttgaacccctaagagtgtgtttttactcgtttttttttgagtcatattttgggggtcctgagatcctaaaacctattttaacgtttaaaatcttaatgggagaccattgccaccagtcgagacttaaaagtggcaatggtcgaccatggcttatgggaagccttagatggtgtttcttgcttattctagtcatatggatgctagaaaactaatttggccacattggttcttggccaattggttaagagagcactggcatccttttggccaaaaagataacagtggtcgcatgtgagggttatggacccttgggtgacttttcttatgagtatttgatatgtagaagttggaaatatactttggccaaaaaaactcatcattctatgttgtggccgaccactgccatcatttgtgccaaaaaaatggcagtggtcgaccaagtggtttctataccatttgatggcttttctcgcttgattttgacatgttagtgatgaaaaagtacttttggcaaaaaaaaattatccccatttggtgttgaggtaacacattttgacaagtttcctttggtattgagtgagtggcgagagctgccatcttcttatggcagtgttctccaaaaaggaggagaacactgccatcttcatgtag

SEQ ID NO: 111409 - DNA, 2218 bp, Cannabis sativa
  modified_base (2174)..(2178): a, c, t, g, unknown or other
tttcttggggaccactaccaatttataacctcatagctaggttattaattttaagtatttctaatttagcccctcaataaattaaaaatattgttgaaggtatctacacatttagcccatgacactttaatacccaatgacccacaattactaaaataatatattttgggccaaacttcaaatagcaatacactaatatagatatgagccatattgaagattttaatccaacaaacgtaaccgcgtattttacattagcgatattgacaacaaaactacttaaattttacgttttgtaacatttaactatataaatttaatttttgacggtgaaacctactgaaaccccatttcattttgctctttacatttccgtctaaaaatcttaattaagtgttgttgtgtggaccatgtgacaaatgtacagtgacaaatttttagtagtacacgtaatattaattattaaaatattataaaaaataatttaaaattataaaaaagaaacaatgataaaaatattattttaaataaaaaattaaattaaaaaaaatattttcactcaaccattacacgaccaccacaccctcaccggaaaaacacaagttaaattcattaaattattagtgaatgtgattgattatgataagcaacgaattgggtcatttcaaaaataaatgaagatatatgttattttgttttgatatatagattagacaaacaaactgtaaaaatatatttatatatatgagcgtgtgttatcgaactgtaaaagcaaacctaatctaaaattaatggatctcagcttggattaccttgcaacaagcaaagctttaatcgtagaaatctgaaccactattatatttcaacattcaaatcaacacctataaaattcaaaataaaaataaaactctaaatggagcatcaccgttgaaccaccatgcagatggttgaacaagttcgatagtgacaaaaggggtattgcaccatgggatcgagaagcccatgccaagaagaacacatatttggagactattagctgaaaggtgatccagaagccaccggatcagagtcaaacatctcgaaactctatggattttggcgaatgtcaacgcctaatttcgatgatcttcaagcccaatctattgatgggctttgttctcttagacctcacgagtttaacagtgtcgttcactatccaaaacggtactagaatctcaccgaaaaatccattcaaggttttacggtccgcagcttttactaagttgttctcctcgttggtgactagagtcaagtagggctttcacgggtggacgtttcaaagggtggtcgttctcttcgtgtagcgcgtgttgctggccggtaatggaagaccggagtcgagtttggaggataaaccaccgagagtgaaggtgaaggagagagagaagatttgaataatttttggagtaagaaagagagaaaaagaaaagaaaaaagtaaaataaaataaaatatttttttattattgttttatttttaataattttttaattatttttataatattttaataattattattacgtgtaccactaaaaatttactacgtgtacatatggtagtccatagtgacacttaactgaggtttttgaacgaaagtgtaaagagcaaaatagaatggggttcagtaggttttgccgttataaattgagtttatgtggttaagtattattacaaaacgtaaaattcgagtgattttaccgccaatattcatttacattatatcacttatttgtttataaagatttaacactctaacaaaattacaattactgtgaaaaatcatgcgaagcgcagatcaattacctagcctcaatattatttcagatacaatcttgtaatcttaagtttattgtagaaactaattaaaagtattctttcatatataacataattgaattaatcaagttcaaaaaataaatttaagtgcgtttggaagtaactgtgtaattactagatatggtaattactagggtggtaattacacagtgtagtaattacactatattttaaaattcagggtgtgtttggatatgtggtaattacatatgaattcctaatattttgtttcgcaaaatagttagaaattacatagaaaaataatttttttagtagctaatgtttaatatggaaannnnntagtaattagacagtgtaattacattcaattctcatgggg

SEQ ID NO: 111410 - DNA, 1814 bp, Cannabis sativa
tgaggagtgattcaatttatcactctgtttacttttagaagaaatcttgcgaagaaattcgcaatattatgtcaagtctcgctttaccagaatgcagatttatatgatttgttggtgctacacccatcatatcataagaagttgtattatgttaaatgactgatatgcttgtcgtatatgattgctgtagaaaaggtagtagttgtctgggtactgggtatagctttctgagtacatttactctaatcttatgagcttatttttatgtaaagctaacatatttctgtgctgttttaggtgtttggttcagacttcattgactggttgaactttgctgtatttttgaattcatggaatttgggttcacatgaacttggtcgggctgatggagatggatgccagcctcaaacttggcaaattgtagattccttgctggagaagtatattttggagaatatgaatatgacagaattttccattacttctccttggagtaatctttcagtactgtcacagttggttacagagccgtttgcttggcatagtcttgtgattcaatcatgtgttcgttcatcgcttccatcgggcaaaaagaagaagaaaactggaccttcacatctgccaactctatctcatactcgtgattcggtcctttccttgtgtggtacattagaaaagcttatggaaaggttgagagagcagtttaacaagccagaggatgaaattttggaatctttcctctcttgtttgcagaagaaaggacaggaaggccctggccaggttttccatattctagaaactcttgtctcgtccacaaatgacattgactatggcgatcgaatctcccaagctctcaaatcttggaatcgtgtcgatatggcaaggaaaatagtaacagggaaatgcagggtattggctgaatttcttcgaatttgtgagtcaaaattcaagatgcttcaggcattaaaacgacaattggctcaaatctgaatggttacttgttattttctgtgatagatagtattttatgttcttcggtggcaccacttggtgctttgtttgtttcaacttatgatgctttcatttcatcccatcttaagaataaggtgtccagcacggaagattttgaggagatcgagttagtttttatgcttctgctctacatcgaatcatcattagactgctggtgtgtttcggcatctaaaggttgaatgttggctggtaaattttctgagtttaataaaatacaagctgagttaatttatatttttttgctgttactttttgaggtgtgtgaggtttagtataggctttagtttaagctttgtattatttgagcataaattttgacaaatgtttttatctttttgggttcagtcaattattagatttttcaaataacatttattcactcttccacaaataatgtcacaatcattgggatatgtttggtaaattgtagccctatagcctattagaaatttaattaccttgtttgaaatctttgttttataaatgtctctctgttattttacgaccatcataatcaatgacataaagtataactttgaaatcatatagcattgaaattaagcatgtttagatatctcactagggattttgaccattttgttttctgtatgaaatgttatagatgcataaactagttacattatattacatttaaatgtaaagaaaccatatatgtatgtattgtaatacaacaaagattaatatatatgtattttcaagtaagtcggcaggttacctaattcaaattattaggaattttgaaaaataggctacaataagta

SEQ ID NO: 111411 - DNA, 2580 bp, Cannabis sativa
  modified_base (2543)..(2544): a, c, t, g, unknown or other
aatccgcacaagtgcggatatctgaactttgcgaattggattggatcgtgcagattggaatggatcgactatcttatgaacacccctaggatcaagttgtgcattgggtagtctagcatgcaaacctgaagtgccacctacatcacacacaaaaggttggttgggatgccaacaattagtaataggagcggtagtatatgtgacactgttatctaataaagcaatttggtcaatcttagaaataggatttagcaaatcaaacatagattaaggctaattatgatgaggacagataggtattattgcagtagctgaagcatgtgtatttggattaggtgtagactaatgtgtgggagtagttttctcataggaaaatgaaaattcctcaaagaccgcattcctaaatatgtacaacctaccatttgcatctaaacacttgtactctttgtggttaagactgtaatctaagaaagtggaaagggtggatctaaactccagcttgtgttttttgtatggccttacgttggagaaacatctactaccaaaagttttgaaagtagagtaaccaagttgaataatgaacaagacttcaatgggggatttgttatctagaacaatagtaggaagtctgttgtgaatgtatattgcagttctaaaagcttcatcccaaaacctaaggggtagggaagcttgagcaaggagggcaaggccattttcaattatgtgcctatgtttgggctaggctaaaccattttactgatgtgttatggggcaagggcgtttgtgataaattccattatcagtaagatacttggagaaggatctgaactcacccctagtcaatttgcaaggttttcaaagatttttcaagttgtaactcagcttctgccttaaagtttaaaaacaccttaaagacgtctgacttattctttaataggtatagccatctaaacctatagtagacatcaacaaaaaaatatagtacttataatcaatgaatgaaagtgtatgtgagggtccccaaagatcataaacaataagttgtaaaggttcagtgataacagtagtggatgcttttaggaagggaaatttgtgaatctttccaaggcaacaagctgaacaaacaaaatattgagaaattttattgctaataggtatacatgattccatgaccatttgtacaattttctcagaggggtgtcctcacctattatgccaaagagtgaaccagggtgaatgtcaacctaggcgcagggcccaacactcctgtcaacctgggtgttgcagccttgttttggctccctaagaatctcatttgctccctgagatcacttgtatctttgttatttctgacaacagaaaagatgcccgaaacacttttctaagaaaacacttgaaactgacccagtttgagaaaataaaaacaaagaatatgcctggaagacttctcaggagaaatgtttggtaatggcccaagttatgtcaacataggcgttggatcccaatctgactcccagatggctctgtttgtttcccaaaagcaccatatcttaattactgatggaaatagagaatatgcatggaagactttatctaaaatgctcaaaatggcccatgttgacaatatgtcaacctaggtgctgggaccaagcaccaagtcaacctgggcattgggaccaataactaggtcaacttgggcactgagtcctaattttggcctccaggtcaatctgttcctttcctgaaagcacttgatttcttattttggatggagacaaagaatatgctctggaacttcttcaatattgttgttggaagtgcccaaagtttacaatatgtcaacctagacgctaggtgcatcactaggtggcccgggcaccgggtgcttaggtactccaaatggaaaatgttttgattctatttgtgatgcttctaacatgttcgtgacatgtcttatttatctataagtgcaaagtttgagtcatttgcactaagacagactcaaaaactgaaactctacttgagaatgtcagcctgggcactaagtgaaaaccctaggtgcccagattgaattttggggtgctaattcatctttttccagtttttaggcctcaaaattagattcttcttgtcttctttgtttggaataatgaaagatagtgagttggaaataacgtggtaatttttaaatactcattctggagttcctgaagtcaactacttaactcggagatattttctttcttgacacgtgtcaaacattgatgtccacgtcactagaatcagtttctaggtaagcaattgggctttgagataatgaaaagcacaaaaccctagcccttttattatagggttcaaccactcatgcttgaagagtaagcattgactttcttgtttccttttttatttatttaatttattgttaagaaaaaggatttttagtttccctttttcttgtaagacctttggctataaaagagataaggagagacttttacacactctatattctgtcgaaaaaatttctctctctctctctctcnntctctctatatatatatatatcttacttttctctct

SEQ ID NO: 111412 - DNA, 10364 bp, Cannabis sativa
  modified_base (31)..(67): a, c, t, g, unknown or other
aacataaaatgcgatttctgatctttattannnnnnnnnnnnnnnnnnnnnnnnnnnnnnnnnnnnnagggcacaaaatccaacaaaaactcccttgagcagacatagtggactcacttcctcgtatctcgatagcaatcggtgcctctaactcttggaccatgtgacctatctctgcagtagaccacgagtcatgttggtctactcttgctggaatctcatcttctaaccgtgatgtggggataaaacagtcgctcttctaaggttcgtccgcaaatatcccaccctcatatgcaaatatttggctgttgtccgagagatcactcatttgaaagatagaaaatcttttcagcgtattgtgagtgcaatttagggaggagtgctctcacacggataacaaatttagattgaacaaaaacaacaaaactaacaccaaggtaatacatagtggttcggtgtttcacaatgtcttaaggtttatacgggtaaataaacattaaatcactatgaaacacccaaccacttcaaactcgagtagtttacgatcataatgtgatatcatcgaaatatgcaaatactcaatgtgttctagctaaaagtttgagcattcgaagttcatgataaacaatatgcaagtattcgagatataggaaaaaaattccaagaaattcccctttttgccttaccaaaacttatcctactattttcatgcaaattctaccccgaaaaacccagatggcgcgcgattacttaaagaaaacacattaaacggagaaagtttttaggaaaaaccaacctttagtccaaaggcttgttcttctaaactcgattatcactttagaaaactgtttgaaatacgaaataatcttcaacaaaaggagattgaaatcttgaaaaaaaaggtttctcttggatttttagagaaaatagttttaatgaaaataaaaaatgagagggaaaataaagtaaatcaattcgtatcccgggggtttaattatgaaccaaacccatccgttatgatctggacatgtggcattcacaaaccaaaggtcacccaatctaacagtaatatcataccacgcctgtacgaaccccgaagggttcaatgacatggcatcttggaaaaagtaaaataataaatatggctgtcttttcaaaacactcaataagacaatcaagggccaccgcaatgtgacagaataactcgcttatccctcatgaatagttttgctatttgacaaacagttgtcatcacaaaactagggacatgtgttatagtgtgatttttttcgcttagaaatacgagtacagtctcgtaaatagctgacacgtggacccgattcccgatagataaggatgacgtgtcaataaaatagctcaagtagagctaaccttgcttgatatgaacttgtgagaagatgtgatgccccacatagttaaaggataagcaagatcaagagaagttgatcctagtcacgcatatactggttatatgcgatgaccaagtatatcttccctgcgacaagtaaagaccgtttctttacataggttcggtccgcatgactaatgtgttcgacgacttgttagggactcacatgttccacgttgtcaaacacatggaaggtccaactatgcaatcaaagatgaatgcagacattcaaacgataggcctgaaggccatcctgggagtacaaacaccatagagtctacgagctcgtgtgttggaatatgaatagacaactcgcagcttattaagtcgcatacgttgttgcacttaatttaagaattgatgaaatttttcttcatttattccttaaatgtttattttgattaaatactggcatttattgtaaaaacggttctaagccgatcagttatgtaatcctaaaggacacttgctttctatataaagaagtgatccaaatcaaataaactaagctgaaattattaccaaaagtgaactaagtagctcaagctctcactgaaccactataatttttttgtctcttctttatttttgcttttgtttttgtctatttagtagcttatatcttgagtactcgctattcttggtgagtactcgcacatctgtttttaaatattctaattttatttgaatactcgtataaatttagtgttgtctaaatttttccaacaacaaattataatcatgttctctacatttttttttgtagtttttttaaattatttattgctatgaaaatataagagtttcttgattttatttatatattacatcaaaagaaaaatagactatggtgttggtgttggtgttggtgttggtgtttggagtgttaggtggtgatgtgtgtgttgtagttctattagttgagcagttttagtaagttggtgggccaatattttaaaattacaggaatatcccttgagttttgagcatattctctcaataaaaaatccatagtttagtaagtttggcaattattggtgttttttactttctatcttgaactcctctacgctcatagattcatctttctcaaattcaataaaatcaatatgaatttccctaatttgcccttatcttttaattttagtttcctattagtttatcgattgagagtttagaatgtttggagtgcttcattatcaagcaaccgaacttcattttaacctacctccccaacaaaatgcttgtgcttgtggacatggttttatataataaaatacacatactctaacaatatgagtcattattattccgatgtattattataaaaataaaatttaaattaattaatttagtttggattgaaattagtttagattggttagcaaatacaactttcatttcaagcattgcctttttttttaattaaaagaaaccgatacaaattaaaataacaaagtaataaagttatgcaactaatgaatcattttcttctatttataatagtttattgtttatcataagggcatccagaaatactcctgaaaaactagatattaaaatcttaatattaaaaaaaaatctaaaaaataagagatgtgactctgacccactaatagaacacctataaaataacgaacaaaaattaatatataacaaatattttaataaattatgagactttatataaatagtcacatataattctttgatataaagactagaacttatttattttcatctccattattgaaggtgactacaatacatatgatgtgttttttattttaaattggtcttataaaatcaaaactagtcatatagtggttttacaaaactaaaaattaaccatactaagtcttacaaaactaaaagtagtgatactgaccttacaaaactaaaactagtcacatcgatcgtaaaaacaaaaactaatcacattagtcatacaaaacaaaattaatcaccttaactttacaaaatcaaaaaacaaatcacttacaaaactacatattggattacaaaatcaaaaaaccatattaaccataaaaatcaattaagctcatgaatataaacactcttttagttaaaaaaaaaaaatattgaaagtatcttatacgtaaacgaaatttattatagataaatttacagaaaataagataattggtaataataaaacctaacgatgttggcattatggtaattaaagtaaaaataaagggcgaatgagtcatacagaagaaaaaaggtatgctttggttggttgtatcgccaatttgcctagactataaaagcggagtactcagagacggcattcacactcactctctctcccaaaagaccaaactaagactgaaccaataccatggattccgactacggcattcccagagaactctccgatctccaaaaactacgatctgcctaccagcccgacttacctccttgtcttcaggttttctcttctttccttttttagctgtcatattctctatttggttgatttagcttaggcctgctcacacagtgacagtctcattcatactcaagtaaagtagtgatctttattatgtttgattggatctattggcatgccgaagtagaccaaggcattagatctgtttttttgctattgatttagtctttggttctgtaccagatgctgcactgatactgaaattgtgtatttatttattgttattacttgattgtgtttgcagggtacgactgttagggttgaatttggtgatacaactacatcgttggacccaactgatgcccacaccataagtcgatctttccctcacacttacggtcacccattggctcactttcttagggccactgcaaaagtagctgatgctcatatcataactgaacaccctgctaaaaggtttatgcgttgctatttgttaacagtgccacttttgattttctagcgaaaatagaaataaaaagatcatcttttatttaaatgttttgtctttttaatagggtgggaatagtcttttgtgggagacaatctcccggaggacacaacgtcatttggggtcttctcagtgctcttaaaattcacaaccccacaagcactttacttggattcttgggtaagcattagttatctcattcaaagctcagatgcgttatttgctttaccaacattgattagtttttctgctattgcaatatgggattcgaccttgtgttaatacacaaacaaaactcattgtcactagccaagactgtttgttgtttgtaaggaacactgtcattgatatgatattttatctatccacagggggttctgaaggattgtttgcccagaaaactcttgagataactgatgacattcttgctacctacaagaatcaaggtggttatgatttgctgggacgaacaaaagatcaaattagaaccactgagcaagttaatgctgccttaactgcgtgcagggatttgaaactagatggccttgtcataattggaggtaaattatgcggcataagaattttctggtatatatatatatatatatatatttcttaacattcaattaattttagattcttgctattcttgtaggggtgacatcgaacactgacgctgctcaactagcagaaacatttgctgaagagaaatgtccgacaaaggtactcattacatgatactttcaggcataaatcattaaaaacttaattagcattttattgtatgaacttttgaaaagacaaaggtcattaataatgtcagtttacctggcttcttcaaaagttttttctttcccaaaaagcttagcttgatttatgtgtgtatgtcgattctgttgtttaatatgtaggtggttggagttccagtgacattgaatggagatcttaagaaccagtttgtggaaactaatgttggttacgatacaatttgcaaggtactaatactatttaacctgtgtaatttttgtctttcgataaagaagcttgtgcattccattggagtgcacatgcaccatctttctttattactgcacaaatataattcacgaacatagaaccatacaatgtcaaaaagtgcgattatatttcgctaaaatggttttattctctcttcctgccttaaagtcctcctctatcttctttttttctttctgaggaaagactctttatgctaggctttggttttatttgtttatattatttgtaatttttaaagtagtgattgtgtatgaatgctaaagtagaaagcagtggtgatttgtgaatactaaaatgtattcttttaatcaggtcaattcccaacttataagcaatgtctgcaccgatgctctatctgcagagaaggtagtgttttcttacattatttgagtttttgaatcttcttcattcttctgcattgcaacccttctattcttttgttgatgaaaaagttcttaaatgataatcatttcccttgactatttgcagtattactattttgttcgactcatgggccgaaagcattcacatgttgccctagagtgcacactccagtctcatccaaatatggtcagcacttatctgttattaagtcatcttaatgttgcttttagatgacactttattttttttcatcttttccttctctgatatcgacttttacggtcttaacaggttattcttggtgaggaggtggctgcatcaaaactgacaatttttgacataacaaagcaaatttgtgatgccgttcaagcccgtgcagaccaaggttttattttgttttagtggttatatatatagacacacacacacacccccacttcatagttattttagtgcattttgtagtttcttgtctttattggttactcaatctaatattttggacagacaagtaccatggtgttatcctacttccagaaggactcatagaaagcattcccgaagtctatgcccttttgaaggtatttgatgcagttgacttgtttatggatatttgcggagttttttcttcttgagcattctgttctgtgattgtttatgcttttgttttgttcctaccccatatcggaatcatgtgttatttgtgttaacattgtttcttttgttcctctcaggaaattcatggtttactcaaggagggtgtttctgttgataccattcatactaaactttcaccttgggctgcagctttgttcgagtttttgccaccctttatcaagaaacaggttccaactatattttatatacacaagtacattccattggtgatattgactcttaattacattggatcctgtttaaccttgattttttttgttacagctcctgcttcatcctgaatcagatgattcagcacagttatcccaggtatttctcttcatatatctcaatggtttgaatgaagagttgccatccgtttaggtgcttaatctttttgctttctccagattgaaacagagaaacttctagcacatcttgtcgagacagagatgaacaagcgtcaggtaatacatttatgatgctttctatttgtacttcattctttcctccatgcacattacgagtatgggaaatacctttacttttttaataagaattatgccgtaaaattagtcttagttaaattttctgacacattagaaattctttctaatctaactgatcttcttgattgtgtggaacagaaagaagggacatacaaggggaaaaaatttaatgccatctgccacttttttggataccaagctcgagggtctttaccatcaaaattcgattgtgattatgcctatgtatgttgcgcagccgcaatcatttacagattttagattttattttcttctctgttttaaatatggtttaataatatccttacaggttcttgggcatatctgctaccatattttagcagctggattgaatggttacatggcaacagtaactaacctaaagaatccggtcaacaagtggcgttgtggtgctgctccaattaccgtacggttttctctgtttgctttcttgcttgattgttcgctctatcctctcacttcagaatgttgatatttttgtttattgtatttaatgaacacaatcaggcaatgatgactgtgaagcggtggtctcaaaatcccattgcttcatccatcggaaaacctgctattcatcccgctactgtagatttgaaaggcaaagcatacgagtaagttttacccgcttttgatctctctggatcttagatatgggataaagaagatataattaataatgtaaaatctttgttatgttggtaactttggttgcaggctgttgagacaaaatgctacgaaatttctgttagaagatctctacagaaatccaggaccacttcagtttgacggtcctggtgctgatgccaaggccgtgacactatgcgttgaagaccaggattacatgggacgcatcaagaaacttcaggagtatctcgacaaggtgtgctaaacttaacctatgttcgatcgttcttcgttttgtttatgtataaattacttgtgtcttatgtgattcttctcttcattcgcaggtccgaaccatcgtaaagccagggtgctcgcaggaggttcttaaagtagcattaagcgtcatggcgtcaataacagatgttctatctgtgatgactacaacttcatcatcagcttgaaagtttactcctttaatttcggatggcttcactactcgggaatgaaatattttgctgtgtcaatttttcctaggccttcaggtgcggaaataaagttatcgaaataacatatttttttcccatctcatgtaactctacagaataattgaggtttgtaacttttatggatgtggaaggataatttttgcttatagagcagttttgagtggttgaaaactacaatttgaacaagtgttttttttttaacaagtaactaaggaaagtttgtttccactcttatatattgctacattttagtttaccccatcaattgaagctgtcatcaaaggttttatttgatttgattttcattattattatttttagtgatttcaaggctgatccttggatttcagtcgtgcacatggcttctttttatttatttttttagatctggaactctgaaattacaatttttttattattatttattagattttgaataaatacgattttttttctcaatatcctccatgtgctaacgggtcacaagtattttaaattaacattaagggtgtgtttggatgtagtaattacactatattttaatgtacaaggtgtgtttaaatatgagatggtaattataaataaatttttaatatcttgtttggcaaattagatagtaattttacaagaaaataatatttttggtggtaattacactaaattctatacgaattggagagtataattaaaattcctcaattactttaaattacaccgttacaatgtaataacatgtcagacaattatatcactaaacatatgaacagttttaacaataaatatataatctcacaatttattaacaaattattttgtattttttttgtatggattcttcatattactagatagatattatgttagtattacattaataaattatttaaaaaaaattaattaaagtataatacttgcaacgattttttttagttcaaaatatttttttacaaaaaataaaaagaattgatggacataactttagaaatgtcgtagtttcggaaagataaattctatttattcttaaaattatgcttacgtgtgaaatggtatattaagtacaaaataaaccaatgctattccgatgataaactttgatttttagggaaaagaaacctaattgatggcatatcaaaacatggtttttgtagttaaaaaacaatataaattaattcaatgaaaccacaatagtctcctaagaactagatttttgaggcaaaatcaatgaaacttgataaaacttgggtacagaacttttcactagtttaaagaaatatatattcttttaattatgataattctttcttcaagatatacacattcgaaaagagtacattggagcaaaagttatgcctcactaacgtttttattgaatcttatcgtaaattataattttatattattttacttcaaaattaaattttcatgggaccatcataagactatcgttaagcatcaattttccataattttctacctaaaacaattaatttgtcatgttacttttgttaaaagtatcgttaaacgtcgtttttttaacttagtcaaattctcaaggcactattcctaagcataatttttttttatttttttctaaaatgatcaaattttaatggcaccattgctagattgtcattaaaacattgattttaatcaaaaatctacaattttcaaagctccatatttaaaaaaactttctacgtaagtacttaaaacttgcaaattaatatcattagtgattatgttgttgagtttgaaatgaaacaaaaaatattgatgaaaaaaattggatagcgttaatagagaagatgtgtggttctatgaagagagaaaagggactttgaatgaaaaaggcaattttgttgagaaaataatatatcaaatttgtaagcggacaaaaaactcaaactcgaaaacatttagaaaactatgataaatgtagctaaaggttcacgatagaacgatcgacatctttagcaaaacttgttctttctttaaataatcactatgtttggtggtctgactattctaattgtattagtgtctctttgtaaatggatctttattgattaatgttattctctagtactattttccttttttagatttctcttgaatttacttaagaggttttaatgaggtcatttcttaaaaaaaaatgttataacaatattatgttgggtaaatatcattttggaccctctgttttacaaaagttatcaattggaccctgtgttttgttaaatgacaa

SEQ ID NO: 111413 - DNA, 1910 bp, Cannabis sativa
aaccattttatttcaaaaaaaaccgaaaccgaccgccatgtcaaaaaaattgaagccgaaaccaactgccaaatttggtgatgacgtggaaccgaaaattcggttacggtctggtcagtttgatggtcggtttcgatttatcggtttttatgaacacccctagtctgatgttagttgattcgtggcccatgtgtcaaggtaccagttacctggagactcttcaagaatggctgactcagagatgttggcttgaggattattagtggaagctattgaactcgaagcaccaggtgtttgtgccccattgaaggtgatatcaaaatgatggtagcatttttgagcaatgtgaccaacatggccacagagttggcacacaagcctatttcctctaccaccacgatttgatgaagcacctctgcctcttctataagaacctctgtatccacgaccacggttgttgtgtttgatggacaaatttgcaagatttgcctgaacattatttaaggtaaatgcagagaactgttgcaggcgaaccccatggctgtggagcatgaattgcatttcttgaagtgtcaaaggtatagatttggaagtgaggttcaccacgatagactcttactcagattcaagacaaccaagaacatatagagccaaatcttcatcagaaatggattgtcctgcaccagcaagtgcattggcatatcctttcatcttgagtatatattcatcaatggtggaggatcctttcttagttgattagagaagacctcaagcttgaacaagtcttgctctagaggtggtggcgaacaactgagcaaacatagtccaaatctcagacgaagtgcaacaatttatcacataaccaagcatttgttcagtgattgagttcatgagccaatgcattatgaactaatcaaaatgaatccattgaattaatgttaggttaggaacattacttgtaagagtttgcactagtggtggagtgttcccaagtatatatccatcaagattatatgcacgagctgctgctaagactaaagagggccagaatgtgtagttcgatcgatccaggcgcagattgagaggaaggagattgtttttaggtaggactagtggagcttcagcagaaactggtagagcttctggagtatcgcttttggtagatggctttgttcctttggatggcattggagcctaagcatctgataccatgtttgaatgtaaagagatgaaagagaagacaaatggaataagaaagaaattaatgaagctctgcaaagaaaagcaggctaagaacgatatatatataccaagagtttattacaacagaaactacaaacagaaaataacagttagcaaaccaactgaaataacagaaatgtaataacaaactaactgacaaggagagagagaccctagtcttaattgtctctaacagtgccaaatttagatcacattatacaccactattagaatttaattttatgaacatggactaaaaaaacatatataccacatttatagcactttaaatgctcttagctcattcgatgccgatcaattttaagcatttattttttttttatacattttagctattataccttctttggtgtgactatgtgagtgagcattcacatcagttattgtgtgagcgtgtgtgtgtgtgatttttaagagagagagagagatgagaatgatagagagggaaacattgagatgagtttggttttattatttgagtggtataattggaactaaataaacacactagcgcattttctttgatgttttttatggtggtatacttagagacctgttgggttttatgccctacataaaactcatttcaatataattagatttacttattaatatagatcagaaataaaatttaatgttgcatggtt

SEQ ID NO: 111414 - DNA, 7090 bp, Cannabis sativa
  modified_base (31)..(35): a, c, t, g, unknown or other
ttactgaactcagcatagccaatcatcttcnnnnnttccacatcctgaaaaacacaaaacttagcagcaaacttaacttcacaattaatatctctactcaatttgcttacagagagtaaattgtaatcaagctttgcaacgtaaaggacaaaatttaggacaagatttggtgagattgttatggttctaattctgtcaattcttgaacatgagccatatgctatgcgaacagtcttttcatgagagcacttacttagaaaagaaaatagtgatttatcacctatcatatggtcagaagcaccagaatccacaatccaagggtcattaagggtttgaataacctgaagtgcatgagtattgcattgtcttgcgactaaaaagatggctcttaatgagttttgttctaccatggagaaagacaacaagaaaagcaagggtagaatcccagaggagacgaacagagagagaggacgccagaaaaatgtcgctagagacggagaagaactagagatgaaacctaagagagacgatgcggaaaaatgtcgctggacactgccacgcgtgtacacgtacacgcgcctacgcatggagagggtcgcgtcagatgaaggtggcgcatggggctcacgcacagctcagatggacgtcgaatttctgggttttgttgatcggaggtgggacaagctccctgagtcggaggtgagaatataaaattcattttaattagttttctaggatggagccttcaaaccctaagtttaagaacccttattttaagaagggaagggatgagaaaaataatatagtttgagaaacttcacatgctctgattccatgaagcaaatgagggaaaatattttttattttctgatatctatttaaaagtatatacaaagggtatatataatacaatatgaacacctagtaataccagagcaaatgaaaaatgcattaaatataaatttacaactaatttacagctagcttgatttcctacaagaaggactagcgatgtctttaataatggcaatatcgacatggtgtaaaagagctccatttagatttttcgttttccaaagttagagttaccctacttttcatgggatcgatccaaatcaatgggttctttaagtaaagagctattttgctcatcaatgatttaccaatgaatataaattggaggtggtagtggtagttattgggttcgaaggggatggattactatgcgtattagtgggaacataagttgagacccatgtttctgtgggacgagatgaagcttttgtttctgaaacacgttcgttacactcaaaaaggtttgcttcaaatcaacttcttgcattgcattaggagaccttgaaagaagatcttcggtaattcattgagttagtattctcaccatcagagaatgtttttgacaaggtcattttaagtcactttatcaatgggcttcaacgtgacataaagaacaaagtgagaattcttaggcccgttaacttgggcttggccatgtatttggcccaaaaggtggaggacaagttggttgccactactcaagatatgaccatgaaagaatattttcggtagttcatttagttactattctcaccatcagagaatgtattggacagggtcactttaagccactttatcaatgggcttcaacgtaacataaagaataaagttataatacataggcccgttaacttgggtttagccatgtatttggctcaaaaggtggaggccaagttggttgctgctcttaagagacaacattgaaagaatattttctgtagttcattgcgttactattctcatcatcagagaatgtattggacaaggtcactttaagccactttatcaataggcttcaacgtgacaaaaagaacgaagttgtaattcttaagcccattaacttgggcttggccatgtatttggcccaaaaggtggaggcctggttggctcaggtcgactacacactccacgggttccattggctctttcagttgactgccctctacaacaagcccaacgccatatttggaggcttgtcgatcacagcataatatttggggtccttattgttgctttactggttcagaaatgcaggctaaaaaagatcagggagtttgttatcattgtgatgggaaatggaagtatggccactagcattcgaagtttgagcttattgttgtgagtgaagaggtcgaccgtgagtttgaaattgtcaaagagaggaagttgttggagctagtatcaacgaaaatttctaagttgatcaagatgtcgttgaatttcgttgctaggttcactactcccaagacaattaagttgattgtggttattgttaaataataggtggttatgttgattgaccttagggctacttacaatttcatctcaattctttggttgagaaactccacatttcaatttccacttacgatggtatgagcgaatctatttgggggcaaggcattaacactgtggggatggtaaggggatttcttacttttacatgtggggaagagaatctatttgggggcaaggcattaataggcaagacgggatcttacttttacaacattaacattgtggaagattttttacatttgtgcctcaacagtccagatgatatttttggaattcagtgattggaaactttgtgtatgacctatacaaattatggattctagctcatggaatttcagtcgggctaatgggattgtgacacgatgaggaaatccttcattgggcaagtcattgatgtctctcaaagccttgcggcagatgttcaagcatgagggattggggtttgtgattgagctcaaccaaatcgaggggccaagcacaacaaccttggtgcttcccttttttgtttaagatgtcgttgggcaatttgggaatgtatttgccatgcatgccattggggtttgcctaaagcattctattttgtgtttgaatgcttgtcacgagcattcttttatgtgtaaagaaggtatatcctcaattctagaaaggagatatagagactcattcaatagatgctcacaacaggcatcatttaagtaagcaagagtctattttcgaggctgatttttttggtgaagaagaaggatggttcacgacattttttgtggattattgtgctttaaagatagcccatgtcccgataaatgaattgctagatgagctctatggtgctcaagtcttttcattgctaaatttgaagttcggataccactagctacgcgttaattctgttagtatcccaaaacaacttttcacactcacgatgtcattatgagtttcttgtaatgtcattcaggcttaagaattccttgccacatttcaatcccttatgagcaatgttttccatccattcttctgtaaatttatcttggttttctttttgcaaactcatacgaaacacttaactgttgtttagcaaactcagatcgcttatgtggtttatctcatctcgaattcggatctgtaagtctatcctagaaaaatccaagtaatagtgcaatggcctactccctccaatttgtgtgaactctgtggttcttggggtcaacagggtacaggatatgctcgtattgctttgcgtttaataaagcagctgaaatgggataaatttagatggaatgtatttggttctgggttgtagttcctctgtttgtttagcttctaggacagtgtgattctttattgaatagtagtgtcagttcacctctgtccagtagtggccttagcttttaaccgattttggttcgatcttttccctgtttaagagcagttatggtcatagatcatttggtggtgtcattggattttaaatatttgtaatagttcaacttatgtgggttatcattgtactcggggttaatttgttcaacccgtgtattcagcttggtttaattttatttgggtcatcgtctatgctgctctttagtatcgtttgacctatagggctgcggtccattttaacaagtatatgaaattcatttcctcttagggttgggacctattttcaaatttagtcaatagcaggatcgaagcaagaaaataacatttagacaagagtcgatattactgtcttattgtatggtgaaaacaagagaatcgtcaactgtgacatagctagccattccctctagtagcaaatatagcacatggaataccgttggcagttatttgtgataaaatttagctgcgacattgcgaggtttgtgaagttgagaaattgaagtatttttactttattttaagagttttttgaatgatagatatattatatttttgtgctgagaggtcttaagtaaatttgaaaagttgaagctaaggttatgttacaatttcattagctgcttaaaattttagagatgtgatattttcaaggttaagcttttatagttaaaaaattttgaactgtgaagctgttggatttttttttctttttcaatttggttatattatttgaatatctcaatttataaccatatataaatggataagtttataaagaaatatttatgcatgattttaaaaaacatgatttagttgttatctcactaatttgaattatatgactaattaaaactttacaatatttttgtttgcttttctaattagatttgaatgacttatttgtttattatattaaaagagcattcatacacatgatctaaaagtgggtaagaatggggcttgtcccttaatgagccaatgctaggggcttagtggaccaggatcagtatcgtgctaaacataccaagcctagactagcctgcgatatgcctcactgtgcgacagctttagcgtagaccagtgctttgttagggcctgacaaatctagaccaagtcagggccgaatgcgtcaaaggtcctgccagggtcactaggggctaatagaaatttttggcatggctatgggggattacggttacgatagttggcattggcccgtacattttgtcaaagtcctggtttcctttcaacttgggcaaattgtaagcccatatcactggtttactcgagtgcgtttgcttttatttttcatagatgattgattgtggggttggtgcttgcaggttggaacaacagatagcgtgatgggactcccgaaagcactcactgagaaacttttaaaagaggctctctagtttcctcaacttgttgccttgtttcatgtacttggtacctatctaatttgaactccattctctactaattattacgtccctggaagcatattggagagtggaaagggctaattattggctgccctttttaaatacacatattgtgcaacatccagacaagctattatttattgtgatggagcataggaaaggagttttttttttcttttctttttactttgtgccattatatcatatcgtagacaatctgttccaaaataggctcagaacattctgaaaaatgtcgctggtgactcgtgatatatcgtgtttaggtgtaaaagtaagccccaatgggcttagctatgagatgagtttcctcatggttatggactcatggggagcaagatggttacattggcccatactcttgcttctcgttaataaagtcacaaccatggggagtcatgcttatcagatgagatgagtttcctcatagctatgagacgagtttcctcgtagtcatggactcatggggagcaagacatcggcgcgtactcttgcttctcattaatggagtcacaattagatagggatgacgattcctgtttacgaatcatatttgtgtcgtgttgagacttatatataacaggtatatgtctgatccgaatatgacccgtttgataatcgtgttaaaaaataaaaagcaaacacgacccgttttaaacgggttgatacgacatgacacgtgtaacccatttataaacatatataagaatattttgtttagacatgtcaactaataatatattttttaatattgaaacacgtttatgtcttatttataatttgttaaagtactaaaataattttaaataggtcattaacaagtcacttttgtattagtcatgtcaaactgaacacaatttgtttattaaacgggttggacgagtcaaccttagtacgacccgaattcatttaatgcaaaacccaaattcgtcacctcttgtacggttttgagtggtgttattgtgtctgtctttgtcgattctacaatcagattaatacttaagttacccttggtagtcatgaaattagtgaaacgaatatacgaacgtgaaatgaaataaaatttaatgtaactaaaagaaatagatgaaacgtttattaactagaatgatctttctcccggtttctctagaagaaatactccattttactaaaatgtataagaaacgttatctcattgaagtgacatttgatcttttaaattacagccaaataaaagaatgaatcgtaaatgatttttcttttaaggatggtaatttctgccattgtatttaattatggcctggaccatttagtttgttttaaccttctactggtgtgtggaagttgtccgcatctttattaggtagagtttggtttacacgaatgagtgtaggaatagaattattatttttaaagaaagatcattcaagtgtttggtttgtttattgtcattgaaaaactcattctaataggaattgtaattcatgtaaactaagaaattatttatattgaataaaatgacttttttcttagttttgttagttgtctttaggggatatatatatatatatatattttgaaaaatttacacagaccaaaattacaaaagaaaattaagtaaatagggaaaattttttctttttacgatttgaatttttttatttataaaaataccctttcaagttctataatttctagattgatcataaggattacaagcagttggttatgtatagttggaataggcctattaggagtcatggactgaaagaagtcttctataaaactttgagactcaaacacaaattgaaggctttcaacaagtcttctattggtgatattggaagctcctatgataaagcaaaggccgattataaggatgctcaatctga

SEQ ID NO: 111415 - DNA, 3032 bp, Cannabis sativa
aaaacttgattcctgatgaattacatcaaggcacaatatctatagctaagtagaaactggttcaatcctatgaactcctatcatgctgcaaaaagagccatcaccagagtacacgaaccaagacttgatttgattattcagacagaatccattgttcttgttgatgaaacaactcgttgctcgatcgaatttgagtaaggaactgtagagttgctctgcaaagttgttattcaaagcagataacataccaattagaaatttgttaaaaggatcataagttataactattttgggaaagcttatactaacttgagaaaaatctggatggaagatgcatcgaattcgcaaccaggcagaaagcgtgcaacatcttctgcaattgcatttagccagattacttgaagtagttgtttagaactatatctgtagaagcaaatcacaaagccacacagtctagtacaatgcaacaccacgtcccacaaaatagaacaaggccaatgctagaactcattcgaggaacacaccgttccagatcaatactgtttttccatcatgaggcgcgctacaatgtcccgctttgatttcgcaaccttaaatgcaaaaatcaatactcaacattaggcatattaacatgaatacagaacaggaactacagcactaatagcatgctataattaccttctccaacctataaagccgaccctttctggaaatcaccttaaaatgcctgatcataagcctagggaggagcaaaatgcaccaacgcggtgataccgacaaatataaatgtatattcaaaaagttagaaattttctatacagcaaaagcatgataatagttcaggaattgcagtccttaaaatattcaacgttaacataactatgtagaaaagcacagtgagaaaagcttagtgaaaattttcaagttgatacattcgcctgcagtgagattttacaatccaccatttgtttcgatccagctactgccagcaaccttctttaacccaatttcagtcattcttttcctgatattatcagattcatcaggtctcccggcttgtgcatataaatttgccatcataatatagtttgcagtattttctggctcaatttcaaacaaacgaccaaacacaaacttccctaattcaacatctccggatactgaggcaccgttgagcaatgcaccccagacttttgcacttggctcaactggcattttcgaaataaactctactgcttcggaaagcttccctgctcggctaagaacacttaccatgcaagcataatgctctactgagggttggatgtcatattttggcaacatggatccaaatatcttccaagcttcatctactactccagaatgagcacaggatgttaatactgctgtaaatgttacttcatctggatgaattccattatttaccatctcatcaaaaagacgaagagatgtattggcgtctccatgtgcagcatatgctgagattatcgatgtccaaatgatcaaactcttacttttcgatctattaaaaacccgttgagccccttgaagaaaccctgactttgcataagtatcaataatagcagttgcaacataaatattctgatcaagaccatttctaacagcataggcatgtatttctttacctcctttcagatatgataaatatgaaactgttgggagaatacttgaaagtgttacagtgtttggtcttaatccatttccctgcattgcttggaatatatccaaggctctttcatgctgattgttctgaaccaaacctgatatcactgcattccatgtgcttaatcccagattttccattttgctttggaaaagatccaatgcatcgtcaacaaacccgtgaatcatataccctgaaatcattgagccataagatacttcatcttttaggctcatcccttcaaataaatctcgagcataatccaagctaccacatttggcataaaacccaagaagtgcattaccaagcgaaatatccacgtccatttgagtctcattcgcatagcggtgaacctccattccaaaaataagatctttggactgcccacatgcctgcaagacactaaccaatgtcactgcattaggcttcaactcaaccgaacctaacatctccttaaacagttccttacactcatcataaaatccaccctgagaatatcctgcaatcatcgaattccacgacactatatccctcaaagacattctgtcgaacaagactcttgctaaaccaagctcatcatatctagagtagcatgtaatcaaagcattcacaacaaacatatctgaatcaaacccatgtcgtaaaacaaaacaatggacttccttagccaatctcacatcaaaaggtaaagatgccagcgccttcaaaacacacgtaactgaaaaattatcaggtttcacatcagttgaacaagatgacactagtgaagtaaacagatttaacatgtcattatgcatattatgaaatgaataagcaatgagcatagcattccaagagaaagtgtttctgtgaggaattcgatcaaacacattgcgggcttcatttaaactttgagattttgagtacaaagcaatgagctttgatgctaggaagttatcagggacaacagagaaaaggacaaggcgggcatgaagctgtctggcttggcggaccaaacgacgattggtgcagacctgaatgaggcggccatagaagccacagtcgagcccattggctccgtgcagagcttgtatgattctcattcatgtgctttcattaatgatggtggcagattctcagggtatctcaaaaaccccagttgaataagaatctatctcttgcttttccatttttccattatctgtatgagagtgaaattaagcaatataaacttgaaccaaagatcaattaattaattatttttttaataaaataaaataattttaaatgtttaaatttaatttaaaagtattaataaaattaaataattattttttatatataaatcttaatttaaatttaaattata

SEQ ID NO: 111416 - DNA, 4438 bp, Cannabis sativa
  modified_base (2557)..(2567): a, c, t, g, unknown or other
tcacattgctactcattaagtattgtaagattcattctagttggtttatatttgtcttttgtctaaactgtcaagttagctacggttcaatctaagcacaatgttaattgcacatgtaatcttctaaccagaaagaaataaacagagtttagaactgcattattttctctggtttccgttgagattaatgttcacaatgttagcattcttagagtctcttttgtttgtctaacaaaaccaggcggacaatttgcggctacagacgttacaacagatgcatcggatattgacaacccgtcagtctgctcgtgcgcttctagcaatacatgactatttctcccgcctacgtgctcttagttccctttggctagcccgcccgagggagtgaaatgggcttgcagttttcttttagctgatctctgaaaattgtggagttctgcaaatatcttaattgtcacattgacattctcacatagggtgctgcatcatcataacaaggtttttttgtttttggaaaattgttgtgtattattagtattagtcttgacaagttcattaatgttgagttattatgtcctctagataaatgttattggtgatatatacctgcatatatttttttatttttgtttctaataatagaaagaatcatcattgatgtaataattctacatctctattatgaatttatagtcttttttttttttttttcaagtatacagatatatttatatacaaggcttgtcttcaaggagatcagccatggtcattttaatatgaacctttgtagagaccagaaatacaaaattgttctgcaaaatagcacagagcaaaaacacaagaatcaaacaaagctataactagagttttgaatggttcggctcactggttggcttggcggcctgggctgcctccgctttttgctttggtttcttttctgctcgagaggtggaatccattgtttcagccatagaccttttgccttgacaggttttgttcttttacaatgaatttttatataaatacaccattacatctcttagaaatccaatgtacttccaagctagctgaatcatggaacctcccagccaattcttgtgtgtttgtagggattgcaaaacacccaccagaatcactttaaaagaattacaatgggaagttcaattgagcagcagcctaggcaccatagcagagtgtcataagctctccttcccccaatgatttatggttaatgattttcgatgtatgaatactaacgacgcccttcctcgttcttggagacaatagtcactgcagattagtgattcgatatagatacatttgtgttgcacatgagccagttttgaggtgggagttgccgtggcaaactctgcaacttctctcctgaccattgttccttcaacctaaaatttatatgcttagtgagcacctatataggtgttctagtacctccatgggggagtttgagcttggaaattataatgggattttaacttagaaagacaaaggcttgaataaggaaatagaggtaaacttatatttaatttctttgttaatttgaagtatatagttagaatttatgtgggtttgatttgggttgtttcagaactacatcaattttcgtgccttaagattttctagtgtatttccactacgtacgtttatagatagagatcgattagttttgattttaatacccattagtattttgggtaattacttatcaatttttttaccgattatatgactttggacaattagacactaagttgaaacaaattaaagggagagtgactgtgtatttgtattcggatagccagttatcaattcatttttgtaagaatccagtttatcatgaaaagagctaacatatagatataagattttaactgaattagagagaagatagaggaaggggtggttgatttagagaaagtcaaaatagaagataatcctgttgacgttgggactaaggtcttgacttgttcaataatttcttgaacttgatcaatcttaaaagttagtatactgagatttttggaacaccaaccatgatggctgcattctttcttcatcatcgtcattcttttaatttgaagtaattaggtgaaatttgtggtatagtttctccaaataaaaatgtctccacaagttattttttcattcctgaaaagttgttcattcgcggaagccagtcctaaaatgcttttttgtccttccgggaagagtcttcaggaatagctagcctctctctgggatggagttcgtgttggctagttattcctcttaaaaaggaagtttcggatagttgacttcagcaggttctatcctatctgaaaacttctttagcaaatgtctttggtccgtaataggggtgttcatcaaactgttcaaaccgcccgcactgcaagaaaaatgcagtttgaaattttttgcggttgcggtttgaattttttccaaaccgcgcgatgcggtgcaatttgcaattttgaattgttaatatgcggttcaaaccatactgcttataaaaataccattttttatatttatttaggtnnnnnnnnnnnatgtccaacccaaagcccactaattattgtattgttgaaatttatttttttcatatttattttcaagtcttatatggtatttttgacaagtgttgctcaagctttgttgtatttgtgataatttaattatttagtgatagtccaaactgcaaaaaactgcaaaaaccgcactgcatcgcatcattttttgcggtgcggtttctacggtcttttagtttcgcagtgcgggtgcagtttggaaaattggaaaaactgaatgtgcgggttggtttgaaaaaaatggtcaaaaaccgcaccacccggaccgtaaacacccctagtccgtgaccccgaaagctcacatttgttcctggatgcactaagacttatgctgatgtggagatctcgctcagagaagagttggttaagttagttatttcctaactaacttaacaacttcgtgtattgcagccactgactttaggatcttaatcctaagcctataaatacaacccacatttaagcatttaaggaggacgaagatcatacagttcagattgagattgagagtttgagagattgagaggtagagagagggaggtacatagaaaagagagattggggaacgagctttgtatgaagaattttctgtagatgaagaagattcttaagtaagagtgtgagagttgaaacactttcagagaactcaacaaagaatctttctcgattgtattgtacctgctcttgttcaatcaataaagaagatttagtggtgctccagaactggagtagagccatagatcacatcgatctatcatacttgaattagtatatattttggtgttgatttatttatttttagtttttcatactctgtttatctctacttttcttcaattactgtactatctgttaaatcttgtcgttgttaattgtttgattttttaaaatttaattagtttgattttgcactactagtcctaattttcctacattggccaactactttcaaaaggaagactaatgttgtgcgatccttaattattacatcatattttgtggaggacaatactttaaatgaagctgcatattgaatgatatgtatataaatatttatatatttataaagctatttgaatacatttaaaaataaataaataaataaagctatttgaataaaagggtcatgcccaagttgatgatacccatcgttctcacaatacattgaaacccaaaattgaaatattctgtccacatgatgatgagatggaatgatatccttaaaaagtgaaaataaataaattaaattaaattatgcaaaggacaagtgttatatcttgggtagatagtaacacaagtatttaaagttttaagtttgcaatataaatttaatatttatttttagcggcataagtatccaatatttgtaaaattgtaattaatttctaatttcatctgtgtatagactctgttattattttaaatagaacacatataaggcttagattctaaattattgagtttagacatatatgtagtatcagttacttttaaatgttattttattaaattcaaaatagagtttgtaaatgtaaaaatttactaattataaaagtaaaatcagtaacgtcgaaaattcacaagtaaaattactaattattcaatattataattaaaagcactctagcaaaacaaacaagctacgtgcgtacggtagaacttgaattttcttataaataaattattgaaattaaaaggtacatacatgtgattgactacacattttataatgggaattttgattttatatgcttaaataattaaaaaattttattattatactaaaaacttaaaccataaaaaaactatacttttttttttcaaaaccccaa

SEQ ID NO: 111417 - DNA, 3489 bp, Cannabis sativa
ataaaattgaaaagtaaaaacaattttatagaacatatttttgaaaaatattttcacttttctgcttttaaaaacagaaaactgattaaaaaagtattaccaaacgccacctataacttacaaaaacataaatattttggtactaaagttcacttactaatataataataataagaaaagtcctcttactaggccgttaagttaaaaaaatattaaaatagagaagtttttatatttatataaattgttttagtaccacgagtgatataaaataaataaattgcacatgtatcaacatatcatatatcagtgatactgatcatgtacaagatacacaactatactatactatataatataaagtatttatctttcattgcaaatggaagctagcagatattagagatcacattttcggtacaaacacaataatgcattattttttttcgttgctaataacgtcttttgtacccttatatatattttgaggctataaacctaatacagacccaaaagtggagagtatagtacttttctttctatacaagcaaacgatctcttctaaatagttattaagtaatatctaagcagtctttatgaatttagaccacacacacagaagaaattacctttatactcttgcacattcatttccccaattgtcaactctctcccttctgtcacaaatttttttccctataaaattaacacatatctctaaaagtacaatataaacactactctcatcccttttaatatttctctctacacaatattatttttatcaaatatgaagcttgtagtgctagtatttcttttcttgacaatactagtactactagctaataatgttggagcaataaatgatgatgatgatgatgataatgatcgaaccgtcataagctcatcatcatcatacgacacagaagatcaagatcatgatgatcgtgactatgaattcgagaaaactagtcacgattgggtacgaggtgggcgagttttggcgacacagaagatgacatgtgacaagtttcctagagtttgtcgtttgaagagcagtagtgggccagattgttgtaagaagaattgtgtgaatgtgaagagtgataagttgaattgtggtatgtgtgggtacaaatgcaagtatactgagatttgttgcaaagggagttgtgttaacatcaactttgacaagaggcattgtggtgcttgcaagaacaagtgcaagaagggtcagtattgtgtttatgggatgtgtgattatgcataattaattaattaagcaattgaaaatatcggtatacatatagtactaataattaattaacagttaattaatgtactatatatatttgtatgatttattgatgattgccttttcaattaggcacttgatcaacaacatttgttgattgtttcttatcatgtattatatccctgcaaagaagaaaaataatactaatgtacgtaatcgtttttgctattatatattgtcacaattattttcttgcttttgcacactccccttatgaccatatgattttgaggtggaatctcgttagatttgtaggatgctgtgctagaaaaacacattttcttatatcaattaaagagcatattttccattttgttgaatatttttatttcatgtaatggcattaatgatacgtacattaaaagtttcaaattgttatacttataatttggataaaaaaaaaatggatggccaagattattatagaagagacggaatgggatggctacacatcatgattttagggcttcatggtgataatggcctacaagcgcagtgaattttttcttttttgtcaatttattggagcaccacacgccctataataatatcctcaagtgttggcgacttatacgcacatatcaccaaataatttaacaaaaaaattgttagaaaaaacaagttacaaagttcatcataacaaaatttatcatatactactccataactaaagagtgtgctttatatatattttttcttaatttgtatataaattcaaatccaatcgtttagccaaaaaaaaaaaattgtttttttagtgaataagaatcattgtattgctttaaaatcccaattacatcaattacaatttccatatacccatgtacccctgaattttatatatcatcgatccttgtatagtactataatatgatcaaactattatctatctacattttttgtccttggaaaaacatggagaattcgaaatttaatttcactttgaatattttgtacaatacgattaatgtgccaaacattgtgagacccaaagacaccattctttagtaaccaaatgttgtaaaccagtggttgatttgttttgctttatcaatccagagcaaattatcttcccacattcactgttcgagacctctatcccagccaagttttcagtctttccagtctcgtcctcatagacatgtgcgatcgatattaatatcatatttactaatgtgagttttggtgcggaacttaactttcattgataaccaaaaaaatgattcaaagtttgggaatgtaaaacagagcaagaaaagaagaagaaaaagagatggaaatgaagaagatgagaataatgactgctcaactctcaactattgaagcagtctttctatttatagagatcaccgtacaattaaggactcgtgagtgagctaacaaactcaactaactgaacagaaaatacaaaacagaaataactaacataacgaactgaaaactaagtgatcattttcatcatcaatacaatcatcttctacttgacccggatccggacccgatcctttagtcatgcactcctttccaagaaatgctctataaatggtttctactttcctcaatatataattgctttggcaaaaccatgatctgagcccaataaaaataaattgagatcaaaactgaattattaaatgtgactcttctcatattgtcatgtggtaattttatttttattacatttttaattttcatataataaaaatgatattatatagtaaaaaaatcttaatttgtaaatatcattggaatcaaattaattatattttaataattgggagattattataactcaatagaattactgttacaaaaaattcaaacgtacaccaaaaaatataaaataatacttctgattaattataacattgtttgtaaaatattaatttatgtaattaaaacttgtttaatacattgattttactctttaataaaattgttagttactgcatgtttgaacttgcgagcatgtaataattaactcgctagtatatatatgaacacattaattctaattgaatccaaaaatatttttttaacttttcatgcatatgtagatgaatcaagatcacctctccaaatattatatcccatattatgtctaaccaatataataatgacacattatttaatttatttttgtaaagtttatactctaaaactaacggagcaag

SEQ ID NO: 111418 - DNA, 1216 bp, Cannabis sativa
gatttcaataaatacggtaaaagacaaatactaacatttataaataaatcaatcacgttattattgttaattaattgtaaaaaacgactccacatgtaaatttcccatttttttttgtagctgtttcttaagtcatactaattttgctggtaattttttaaattaataaaataagtctattataactttcaccattaattagttaccctttttctgttagaacaaagttatatatgttaagaatataatgattcctagtactatatattacaaggtgacaaatttttagttataacattaattttttatgactaaatgtgtcacaataaaaagttacatgtgattaaaatattatatttaaatacaagttgtgactaatactttcagccacggacgttttagtcacaacatgatgtgaatgttaatttataattagtcacatttatttttacttttagtcacaaactttgttgttactaaagtaagattttttgtcaaataattaacaacattttatgataattactaaattgaaacatattatactaaacaacatcaatagggatataacgaggtgatactagacaatgtctaatagagacaccttactatttagcatttctctaaaaatatatatacgataatggagttaattaagaatatcacctcatttacgctcgaaaggtaactttctccccaaccgccatcagaaagttggttggagagtaaaaattgacatgcctttttgaagctagggcaattgctgtaattcttaccacaagctctcaatgcttctaccccaaaccaagtaccatatgtgtagcaaactccccaacgaccatacctaattaatcccatattttgtaaatgcttaattagttttaatttttcttaatcaatgataacttcattgaaaaaaatatatattattatcatgtaagtgagaagtttaaattagaaaaatatattttctaatcaaatacattattgattgagtatacacaacataagcaaatattctcacccaactgagtgcatgtgtatttgatagatagtattaattagctaattatatgttgagagtaggtaaccaaatattcccaaacacataactaaagtgaacaatcaaacatggaaattgctaattctattttattcattaaaacttatctgacagtcagtagtcccgtgatccgtaaggaaaaataccaggtaa

SEQ ID NO: 111419 - DNA, 6225 bp, Cannabis sativa
  modified_base (45)..(52): a, c, t, g, unknown or other
tgtttaatttcattgttttagagagatattcatatttaggatgtnnnnnnnnatacttgttagtaaatttagatcatggtaaaatattctcaacaaataattcgtcctttatctcataagttaatacaacaaaaggagagtaaaactattacaagagattgaacttctataaattttagtattttctttacttattattctttgctttttttatttatttattcttatcgctttaattaagacttaatgtcattagctaaaagcgaagtcaacacttaatgttatttatttattattttttttttttgcaaggtccttaacattattcttaatttataatttatataaatgtggcatagatgatatatactttaatgtaatagagatcttactaaataacatttaatataatttaatataggaaaatacttagatagagtcacgaaaaatgtctatacatgtacattttttttttcattatgtgtcactctattattttacacaaataattaattaattctttttatattatttttttttttgaataatttagtgatccctaataaagaaagttactaatattcaatattgtggaatctttaagcctcatttactaaaagatcttcaatgaggtgtcttacatggattttttttttaaaagaaatacttctacaatattttcgtttgatatatagtgaaatttggagattgaacattatgaacacattagacatataaaactaaagttttaaatatatttatgtacaattaattaatcaaataacactaattttttaaccacaatttgtatgactctgttagtatggctttcgataaatattattcacttgaagattacttatgttgtatcagcatacatataatttgttcaccaatcaaaatgcaattaagaaatcctaataatctatcactcatcctttttatcatctacatataaaagagagaaagtgacatacatacatatcacattgatcaaacaaaaaatattacagaagtgtttctttagaagaaaaaaaaaatggtgtaagatacctcatttgaagatcttttagtaaatgaaggttaagagtcaatattagtaatttttcttattatgggtcaccaaattattcaaaaaaagaaataaaaataatataaaaggaattaattaattattgatataaaataataaagtgacatataatgaaaaaaaaaatatgtgcgtacagacgtttttcgtgactctaccgaagcattatcgttattatatattttatatatattttatttaataattactttaaaaaactactagtcactcataaagtggtgtgaaacaacgaccattagtgtttaagagtatctctaagggtactttttattttttaaccaaatttgagttaaaatagagaaaatattaaaataatgagtcaattttctttgggtcagtttgacacaattgtatagtgagaaaagataattgtagcttcattgtgagaaaaaattgttgcaggtgagctgtgaaaaaaaactgcgccaaattataactcttaatgtattttgagttgttaaaattctaattataataataacaatattataatattaattttataattgtagcttcattgtgagaaaaaattgttgcagatgagttgtgaaaaaaaactgcgctaaattataactcttaaagtattttgagttattaaaattctaattataataataacaatattataatattaattttatataatcacaaatatatcaaaatttatgttatataaaattttttattttttatatcttcttttttttaaaaaaaatatgaatttatatgcatttaataaaaaataatttaaaaatattttatttgattacagttaaaaaatcataataaacgctagattcatgtgatttgttaacataaaattatgaaattaaaaattatgtaagaaatataaaatattttataaaataaaataaaaaaaatataatagaattatttatcttattataatattaatttgtttcaaatatttttatatatagtgatatattataaataaatggataatttttagtacaaataaatttattatagtgtttaatcaaatttatcaaaaataactttttctaaaagttgggttttatcaattttagctcttagctgtaatttctcataaatttttcaataaattgatttctaattgtttagcaatttattttgaaagcagattttagttttttaaaaaattatgtcaaacagcccataatattactccaagtctctaatcatgctctctaccttttccttttgaaaaaaatgctctctactttagttataattaattattttaataaattttttataatttaaattggtaaaatatagaataatttaattaaaaagtgaaaaagtagtaatgcttttgattaaaatattattaaaataatttagtaaaagagtaggtaattttctatatttaaaaagtttcatgtccattttctactctatgattagagactaagagttcattttttaagctcccctctctatcttagcttgaacaaaaaaaaaagtatttaaaaagtatggttagaaatggtctaataaataagttaagttgcacatatgcataataataataataataataataataataataattgttgcttaataaaagataaaatgaaaatgataacaataataaaagcaatggaacactctactactatctactactactatctactactactactatgatctagtgatctactacattacatactataaatgatatatcattatccacccacagttatttatttatatatttttttttgttgaaggaatttatttatatattgtagtagatcatattaatataaatatataatatacaagaaaaataataaaaacaaaataaataaaagaggaaaggcagagaatattgggacagatttgatttgaataggtgattgagaatcttcaaatgagtgatcgaataaaaaggttgacttgctcctcataatctttgacattacctttaggattctccacaaatctccctatcctaaagtacttgaggtcaactccctcggtttccccggtcaacgccagatcagccaacaccctccccactgcgggtgccatcttgaacccgtgacccgaaaatccaccacccaaaaccacatcttttccaaactccccacccaggaaatccaacacaaaatcctcatctggggtcatagagtacatgcacagctgggtcgaaaccggtccgctcggatccacccgccccgaaaaccgcttcccgatccactccttcatggcttcaattgaaatcccgggtccccacggtcttttgtccgggtcacaagggaacccgccgtggacaccgaccttgaggagacccgggtactccagagacggagttccgtacacgtaggggtctccgtagctagcgaaggaaggaaaaccactgccgattgcataatcggacacgtggccatctttaattcgccagtaactgacggtggtctctaggggctgaatgggtaattcaaccccgcaaacttttttaaccaacttcttggtccaggccccaacagtgaccacgcatttctttccgcgaaaagtttcgccagtcgcggtggtgaccaaaacgccgccgtttgcttccctcttgatatctctaacttcaatgttgtccttcagtacggcgccgtttttcaaggctagagtttgaaacatcgaaacagccttagatggtttaatgaccccacctttctccgagtaaaccccgacccagtcatcgggaatccgaatccgacccgagaattgatgggccacttggttgctatttaaggcccggtgagggagggagtttttgagacagctggcaatgacggctctaaggcttttgcagtcagatgggcccatatcaaactggtgggccttgaagtagaccttgtagcctatttcggactcggccttttcccatagcgcgtaggactcaagtacgagttgagtgtagtagtcttctggataagtggcgcgtatggttcgtgactccccgtgggaggagccacggtggtggaggaagtcgtattgttcaaggaggagagttttttggcctcgctttgaggtttggtaagcggtggagcttcccatgaccccggcgccgatgactatgacgtcaaacgttgaagattccattgtgtatttattatgagagtagaagtagtagtatagtagtgcctgcaattggtttcttagcttagcttataattagcttcttctcattctcatcatcaacgtaccttcgtttttaacgttgttgagtaggctaaaagcactatctttttcgttttatttcaatactgccactctttaccttaaaatatttatttactaccacttatatataaattatgggacacgattttgtgccgtgtacttttttcgtagtatattagatgagtctcagggtacattaaatgaatgtctgaatacgttactatttttaaccctaattaccctagatcaattttgtcgtacatcacagaatacattccgtaaaagtacaatcacgagacaaaattatgtccctattataatataatataataattgttttttcttaaaacaaaaaaaaaaaaaaaaacttctattattgctgaaaagaatatacatatttatacattgcttctaaaatatcacaactcacaagttcatgacaaaattttgttgactttattaaaatttgattctgaataatataataatacgacaatcatataattataaagtcgaattattatttcattttaaatttcatattaatctcctatcacactagacgaattttccacgtgatgatctacatatacatataattattatatatatagacgataaatatgataccatatatattatagataacttttgaaataaatatgccttaattatttagatgtgttatcatgatgtacacaaagtaataagtgagcaacacggtagcattacatgtaacatacatctaaatgacaacaaagcctgaataaggctctctcgtgatgatatttactttttatcacaatgcatgtgtatatatatatgcactgtttggtcaacaactgattgggacacgacacgactctaataatttaatttgttgtggcacagaaaaaataggttcttttacataaattttcaaatcaaacattcaaacaaattttgtaaaattattctaattattagcataaacatatatgtgatcatatacaacaacaacaacaataatttgtccaattagacatatatatataaattgaattatgtacgtgttcccttttgaggagaaatagtaacagtcgagaattttcttaaactattaattattaaagagaaagaaaggaaaagacaaggaatggcaaaaataatagagcagagtagtttttagaaaggacaggaaaggatcgtaagtaatctattatcatgactagactccacgtttgattatttatcaaacttgagagcactcacatcacttttgtattctattgttttcattttattattagtattatatatatatatatggtaccacgcaccagcctaataatgtagctgtaaatatctatatatatataagtattatataaattaaagtctaattaacatttttgtcacctaaactttgacatgtactaaatttaacaattttaatagttcagagacatttttaacgaccttaaaaatttaagaggcataatttggtacatgtcaaagttgatagagcaaaagccctaattatcctaaactaaattaacaataaaattacatgtctatgctgatttttttttttgcaccattttttttttatgattttcatgctttttattgtccctcagtgtttaagttgaatttgtgatatgattttcaaatctgataaataagtgtttcaaatcttgatattatgatatggattgttttactatctttattcacattaactttttttttttttcattaaattgtgtggtaatagagttttatttattgttaatcagtatgtcaatttgaagagggccaactgttacagaaattttgcctataagtttatttttgttataaaataatataaaataatataaaataaataagaaaaaaagaagatgaagatgaaaagagaaagagaaactgaatga

SEQ ID NO: 111420 - DNA, 2311 bp, Cannabis sativa
  modified_base (66)..(71): a, c, t, g, unknown or other
  modified_base (2280)..(2285): a, c, t, g, unknown or other
aactttattccaaaatagaccacataaatttgacttatttatttgatgacccaacacacattttannnnnncaattgtgaccccaataaattctaacatctgggccaagtctgggttcgggatctaagttcgaatcctgtcccaattctaggtcccatcccgagtctgggtctaggtcttgagtttgagtttggatccaggttcaggttggagattagagttgaacccaaatcctttgtaaatattataatacaagctaatatggaccatttgttatgtattatataatacaacttacattgtattaaaaattttggtcgtgataattaatacaatacattgtttaatccaaacataataattattattattgaatacaatacgactcttatacggcgtaccaaataagctcatagtgttatagattttgattcagataatcccacgatttaggatagggtgggtttatcgctctccttgattgatttaacatttctatgatcccatgatttcactattttaggctggtttggtacgtcatattgtattgtattagaattatttaatacaatattatatttactactgacttgtattaataagtcgtgtaaagttataatgtattttcaataaattcgacccctaacaccgacttcaggtcgggtcgggtcctgagtcctgtctgggctcggggttcgagtctcaggtctgggtcccaagttcggtctgggtctaaatcgggtcccaagtccgggtcagttctaggtctccaatttgtgtccagggtcgagtccaggtcagatatcgggttcgggtctaagtccaggtccgagtcgaagattgaggttgatctcagatcctttgtaaacattataatacaagttaatagagactatttgttatatattaaataatacaacctacattgtattaaaaaatttcttcataataattaatacaatccattaatttatccaaatataatattatttatttatttaatataaaataacccttatttattaatttaatataatataaccgttatacaacctactaaatgagacctttataatttatttatctattgattcaggcgatcccactatttcatcacttcatggtttattgacgctatctctcaacctttattttaactgcctacttagtgatcccacagttcctcgatcacatgatcttgtagagatggattctatcatttgctatatttttttttgcttatttatactccaattctttactcttctaaccacaacatttctatctttttctcgagataaatttttgtactcactttcatcaatagatccttctcatatttcaccggatctctctgtagctcacttctccttggaaaatgatatcctggttgctcaggatattccacgtaatgatgttgttgatctaacaaccaaagttttggttggtaaggatattctcatgttcttgcctggctttgttcctcttcaacatctgagagttcgtttggttactttgggtcatattcgtaatggtttaactatttgatatttttatgaaaaaaaaattatactaatgtttggtttgctgcggagaaaatacgagttttggaaggacaactatagcatttcttataaaggcatgtgatattggttgaattacttcctccttttaaggaaaattaatccagtggatgttaggcacgttcttttttgagttcaggtgtaccgattacaatttagaatgaattctaaagctatgggggtcatgctcagaaactatattgaaacttttgtgaaacatgatgattctactcgcttttgctttctacgcatttgcattttgctagatgcatacaaacctcttcttatgggtaaaaggcttcagtttaaggattctcaagccagattgtgggtggagtttatatatgaaagactttcctgatatctgtgaattttgtagattaattactcataagacggatgaatgtcttattttattttatttttttgaaggagaatgtgttgttgttctaaatctccaagaacaagaacttcctattgaacgtacatatcttccttcactctacatggctggccttcctacacttgctctacctaggcctccactagttcttcccttatgataattcttcctattcctatggtgcatccacgaaattatggttttactctatctctcattatttttactcaaattcttctcatttcagtatactttctattttacctatatgttcatgttaggttttatgccctnnnnnnaactccatttcaatgtaatctatttt

SEQ ID NO: 111421 - DNA, 2504 bp, Cannabis sativa
  modified_base (2212)..(2215): a, c, t, g, unknown or other
  modified_base (2443)..(2472): a, c, t, g, unknown or other
agaaacaaccaacttgaggaaaccacaacccgatcaagtcgttcccggatcagcctatccaaatctttgccattagtccaagtaaacaagacactcccactctccaaatcaacggctcccaagttaaacataaactctctcagcccttggccctccgaccgggaaaccggacgacccccactcttgtcatccggggacaacacagaattcagatcacccataacaatccaagggtcagtaaaacttcccatagttgcacataaatccctccaaaaaaccattctagcgtctcttctcggtggggcataggtgaaacaacccacccaatccccggtgttcccattaccaccgaaacgaactagaattttgttgaaatcactttcaatcacatgtatatcccaactgcgtctccaaaaaagagctagtccgccggacgcgccagaagaaacagccgccccattgagaaagcccaaacgaaaccaaataccctccatatccaatgcattcttcttagtttccataagaaaaacgacatcgaggtgatagcattagtaattatcttttattacaaatatatatatatattaactaattaaaatataaatacatttctttcttaatttttttagaagatgattgtcctcttctcttctacgtgggtccgtccttatgtgatagtatttgaaaattataattaaggcttatttgttgcaaaaggggatcaatattgggcgctcctacataatttacatgatttttttttttaatatatgatttgatttcaaatagtgagaagaaaaagaaaagaaaaatattctttgtctatcttttagactttcaagtatttttaaaaactcgaattatacaacttttccaaacactactagatggatggctttgccatggtatcttatactcgatcaatccatatatatatacatattattaattcagtacttatatacataatatcaagtagtattaaattaattaattttccaagcatcacttacttacccaacaaaaattcattaagggcatactttttaagtaataataatctgccttgccttgccccatactttactgccaactaatattgttccttattccctttccaatttttctcaattatttctactttatatttatatttatatatatacatttaaatatacttttaattttcttctcgatgcaatcaatattctttctttttgtctaagaaaattaagagtgtttaaaaatcgatccaatctaattacaatcgaccattaaatattagatattaattggattagatgttgttttcaatattcaattggatcaaatcggatgttagatgtattgtccaaaaattcaatacatctaatatcgaattgaactcattagtattttcatttagtttagatgagtcattatattttatgatgtttatacctaaaatatattgcatgtataaaaattaagattaaaattttaattttttttattagatttgattggatccaatctaataaatactgaatctaaaaaaattagaatatagattcgatccgattcaaaaaatattagggataagttgagaaatagctcttttttgtatctattaattaaaaatactctcatattatattttattaaaatctacccacttttgtgagtgagttgattaatataccctcgctcgtgtagtacataatttacattaacctaaaaagtataatgaagacattatctataaaaattagtatatcttaaaaaatatggaaatgaaagtaaaaattaaatcagataaagtaaacaaagaatacaatacaaatttcctcaaaatactaggtctaaactattggataaatctgaatcaatgtaatatatatacatgaaatacattcaatagataaaacctatctaattccatatccaatgaatgttggatcgatcagataactaaaattaattaaatcgtggatccaatagtaaaatttactaagcttataaatattaaatgtgatccaataaacactatcatcaataatatttgacatccatcaaatttagatgacaagtatgtaatagtgtgtatgtgagaatgagagattatttattaatggaatcggcagccaactaattataatggtttaattaatatggaaaagatttattgaactttcgtagcttattcaataataccatatatatatatatatannnntatatatatatatataatgtgtgatgaaacgtgataatgatacatacactatttaattagtttatgaaaaataccatagttaggccaagattgaatttttaacatgggctaaatgtgcttttatataattggtttatttttaaaaaaaaaattacacaaattactaagggttaatttcacaaatgcacaaaaacaacaaaaatacagtttcacgaaattttaaatatnnnnnnnnnnnnnnnnnnnnnnnnnnnnnnaaatacgatctttttatgttaaaattttgttc

SEQ ID NO: 111422 - DNA, 3536 bp, Cannabis sativa
  modified_base (2033)..(2040): a, c, t, g, unknown or other
  modified_base (2483)..(2488): a, c, t, g, unknown or other
  modified_base (2574)..(2575): a, c, t, g, unknown or other
acgatataaagtagtccagccaatcgactggaacacataaattatttcatcacattaaggataattactatatgagtataaatatattgagataaatttactgtttattattaaaatcaatgtgtatatcatatgtttatataggacattcttaacaagtttacttttataaaataaatcatttaaaaaatgatttacaattagttgccgaatccttaaccaaaaactattagaactttaataaaactaatatttacgtggctacgtaactttcatatactttcatatagaatagatatatacatgtaaaaacatgtaaaaacaaaaaaaaaaaaaacaaaaaaaatcaagaactcttctccccgtcaataaatatttgtacaataattttctactttcatctaatcctagttatttgacttattattgcaatatgaattgctcttgtggagataccattgacagcatgattctataacatttgttaaatatgctacttgcttaacgaccagcttccacatagtacaaagatcacatagtataaacagtaccataatgttggtagaaagaagatttatggatttcctcatattccgtgttaactaaatatatatatatatgccatctgatgctaattgcactaataacttgtgtaccattgatgattatattgccatttttaattattttcttatttttacaattgcagaatcgaagtagaatcgttacggcaaacaaaaatcagcgttgttgtttgtgcaccaaatcattccaattactgaaccaagcatcttcaaaccctaactgacatacttcgaattcctcattaatctcacattcaaaattggtactctccagcgagccaaactttttgtctctttgtcttcgcagtcaaggagccattttcagatgacaacaaagaaggctctagagaacggcgctttggggttattcggattggttccctagtcaccgatccaacaaggtgaggaaaattgagcttagccttggctcctcgaatctcgaaagccgctttgtcataagccaaagccgcatcctctggcatctcatatgttcccagccaaatcctcttccccttctgttttgggtccctaatctccgcagcatacttcccccaaggtctcctcctcactcccttaaagctaactttattccccttattcttcggttgcggcggattcgacaaacgcgccaccgcaatcggctggtcatcactgctctccaattcagagaaatcttttgttgaagagccctcgtcagagggactccatccatcgataactgccatgtcttctgtggtgtagtcctccactttaatatgcagattatcagcatcagcaaagaaattgttgctaaagttcaaagtatctggagagtcaatacgtgtgatgagatcttcatcacaaaggagggctatccttatagcctccagaagatttaaatctacagaatctgagctactaatcagtatagatccagacatcctatatatattgaatatttgtagtgttctctagaagagctttcttttttcttttttgattattgagagatgaagtgctttctaataatgaaggtactacttcgagtatatatgtttttggttgtgtttgtgattgtgactgtacaatttataagaagaaatggttatagatgtttaatagaggaatctggaaagagaaacacttttataatgtttgattgcacgatgtcagtcatgtttcgaggaagctgcacgtgtgaacttttttttattctactatttttagtcacgtgtcaaaacggttgaattgacatttccctttattttaataccttgttatttgctaattttctattataaataactatatagagaattattaaaaaataatattggttcttagtacttttttggttttatatgagtgtaataattttaaaaaatatcactaactaattgtaagacgtgaaagggcattagtggtgcctagcactattagtccatttaagtatcgggtctcatataattnnnnnnnntagcttttagggagtatcgctagcaaatcgcaacgcgacatgtcgcaaaggtgttaggcagcactagtgcctaattacaatgctcgacattattagtgtccaataacaattctcgtgtatataatataaagagatacaagataatagtatataaaagtactattgattttaaaaaatattttatcatatattcatagtgtcgtggcaattttaaaattggatttatactaaatagattgttattttaaagaacagccttcaattttgaggtctcaatctatatccgatcaatgaattcaacatcattttttctcgcgtaaatacctttttgtaccatgtgctttgtaaaagttactaattggattctttattttgttaaatgacaaaatggatcctgtatttttcaaaataatacaatcttgaactgattttttatcaaaatnnnnnntaataataatccgatctaaaagtgttacaacaaaaatatttaaattttctgtatctcttcgtatattaggaattgtcttcaagttnnttatattaaaaaaaaagttgttaaaaattaaactcagggtcctattttgactattttggaaaatacaagatccattttgtcatttaacaaaacagaaaatccaatcggtaacttttgcaaaatacatgttccaaaatagtattttctctttttttctctcataaaacatcaacatcatttaaactaaaacattttttttttcattctatctaatatttgttgagtttttattaatttctgaactttttttgttgtcataaaaattttcatgagctaaatatcttcctaaatttaattacattatgctattttttttaaataatttgcttacataatcattcttcatgtatatagttacagttggaggatctatttaataattatttactactcgaaaactaatttattagtattaaatatacaaccattatataacgtgacggtaacttctctagcacaacgacgaacgcgacggttacttgtctgacgatccgactcacgcctcttgctccaccaatcgtcgcgctgaccgtaaaaaagagggagatcttaggctatgttaaatctttggtaagatggagggagagaataatggactagaataattaggaaggagaatcaagaaagtgaggatctttatgttgtttggatatgaagtgtgtggaagttgatcctctaaaccaacttattatccaactcacctaaaccaactaacttaactaactttctgttatgttagttagttagttggtgctatccttgtttgagttgggcctatatatatgtctagtcttttcactttaagaaagaggtcaagatagagaataagagagaggatgagagagagttgctaagctgtggttctgttcttgaagagggtcaagaacaaggggtgtactcgggttggtagagagaaaactgtgactgttttctctggtgtgtttcgagtaccacagggctg

SEQ ID NO: 111423 - DNA, 4495 bp, Cannabis sativa
aaataatgttaacaaataatgttttgtaacattataaataattgaaaattaatacataccctgcattctgagagaacatcaacaccattcttagcaagttgaagttgttgaattatggagattagagcagatcttgcatctccttctccatgtacacttgtcaaatggttgtgcatttctattatatgctgcaaattaatattcaaggatccatcaaaatgtcaccaaatatttcaattagttgatgtgattgcttatctttcttttttaaaggtaaccctttatttagtgaatgattcattctcattcactctaaaaacttttttcaattactaaaaggtatggtaataataataataattgagtttttaaggcctacatgtttgtcatgctctgcaatgtcatccattacacctttaaaccattcaaaggatccttgctctcctgttgcccaataaaagtaagctcttctaagaccatttccattcaattctgatgatggactactacctcttgagccctgcattagtgtcccctttgattgttagtacctaaacaacatttctaattgggtaatcactattcaggacctcaatcagattgaccatgtatttttcaaaaaaagtataaaataatatctagagctcaatttttatcatttttttctttaatataacgaacttgagatcagtttctagcacaaacaaatacaaaaaatataatcagtatgatcataacatctccaagttaagttattaataagttttaatctaaattgtcatttaaaaaaacagaaaatccaactaataatttttgcaaaacacatagtccaatatagtatttacgctttccaatttaagattcaagaataatgtactaaatggtttagccttttaaactcacagcttcaatgtcattgagctcgattttgttcaaaagatctttaagaatgctgatgaatggtgttgcgccgattccaagaccaatgagcaagagaatgtcataatcatcgaaattttgagatggagctccatatggcccttttatgaggatcttgggatacctgataaaggacaatgtttgatatgaatattgttcacatgatagagtttctgaacattcatgtctagctaaagtttctgatcaccttgattggagttcttcatctgagatgcctttggtttccatcttcacaagatctccactctttgattgtgtattttcctgcttacatacctgcatttcatattgactcaataaactaaaatccaagcaaaactcatgatttacaagtttagtttcagtccatgatttttgctaccttttcaaatctgtctctaagtgctctagtccaatcccctaagctccttatgtgaacactcaagtagtcatctcctggtgcagaagtgatggagaaaggatgcctgaagcaaatcccacctctaagtatccaaatattgagtatagcaagataaacataaagttatacaaatgttatgtggataatattgtttgttgtaccattcaaatctagatatatctggacacttgacaaaaaggtacattccacttttgtactcgaatccttccggtttactcatgcgcaatgctagcacattgcctttgtaaatggttgcctgcaacataagatgatgagtttgatttaaatttggtaatgctttcaaaacaacatatctaaaagagggtgattctactactgaccttgagaattttgactcggtgattgctctcgttgaagatcgaataagtcctttcggttgcatacaataagataggcacggcgatatacatccatgtctgcacagaaagaaaaagatcatgtgttgttctaaacacctttgataacatataacatttctttcactaaatattgctcaatagctttacttacagtctttttgtgccagtcatgagtgagaaatagaaaatatccatgtacaaccaagagtgcatacaccacaagcagcaaatgatgtacataccagaaggaattaaaccctgctaaatggttaatcggccatggcaacttgataacatttctcctaaagtggtgtgttgctagagtaaaagaaaatgccattatgatgatcattagaatcccagttacacctggaatgcttttaaccaagtccaagtaagttggctgcttgaaactgaaatcatcccccaaaatcctcatgaacttttcgtttggacacgaaacgagtctcgggaaatcgcaagttaaatgcatcaaaacatgtaataaagtcataattgctattgcagatgcaaacaacttgtgaaagtttatgttatcatcaaaagggattgattgactaagaaatgttgatcttaacttagtgagaattctcctacaaactgggattagtataagagccatattgaacttaagagtctcagcagcacctttggcaaagcagagacattcacccatgatttggtaagctcctctgttcctgtactgaaaatatttccaaagaaaaagtcccaaattgatggctaaccacaacatgatcacccatattctcttccagtattcaatgatgagttccttagttctgtttatgaacttgtttaaaggcgtttggtatcttttgggaatcattgttcttgttaaactttttttttcctttgaaagacttttatcatcagatttcaccactgccttcagtagagtttctagttgccacatctaacaattagaaaacaaaacaaaaacacaaaatcaaacaaaaatagaaaaaaaaaatgaagggaaagtaaaaaaaaaaggtcaaaaggtcagacctttatataaccaagatggtcaggatctaacttttccatgatcaaagatgcataagttgctgcattttgtttgaaatttgccaatttgttcaccgaggcactcaaaactataacctttttcattttatttaacacaaaacactcaaaaatcttaataaattatatagagaaaattatcaacaacttcagaatctttgtcttacctccttgacctcttcctctgaaagtttcccatctccattcttgtcacacctaaataaataacaaatttgaaaaattagtactcttggataaacattttacttggaacacaagaaagaagaaattaggactaaaattcatacatgtcaaaaaagatctgtaatctagcttcaatgtcttcattagtcatatcctcccaaaacattctcagttcatctctagtgataccatcttttactgatatgtttcttcttctagccaaagcatcaaacagttcaccagcaaaatcctttgattcccttaccattcctaaaaaaagaaaaaaaaccaattagccatttctcaaattctataaaaatacaccaaaatatatacaaaaacatacaaatcaagactatttgtaatgtgggcaagtgttatatttaaaaaaaaaaaaaaattaccaatacagagtccaaaattgtccctagagagtttgccatcaactgaatgctgattaaacatcttttcaatggagctccagctacctttctccttcccactgtgagttgtttcaagaaaacgaagacccattaggccttttgaagcaactgaagtcatttttcctggcatttttgctttttttgaagctgtagcagtatagttcttcttcttcttcttcttttttcttatgattaagcacttttgattataagattaatataagagatgtctatcttaaatagagtgagtagtactgttattggtcttctgttttttctttttttaatggaaagagaaataaagtttagggtaagaaagttgtttggatatttatgtgtaacatatttttctttattctaattaatataagatcacttatatcaaatgctctaaaatagaaatgatttaaaaaatttaaataattaaattaaattaaattttttatgtgtatatattaatattatatatttaaaataatagaatatattaatttttaaaaaaaataaaattattttcatgatatattgatgaatggtatgttgagtttgaggtaaagtaaaaaaaataaaattttgagtgtatattaaagaagaaaaatttatataatagattaaaaattaaaaaagtatgaaaatatattaatatgaaaaaagttttatttttatgctttaaattattttatttataaaattacatgtttaataaaaataataaatcgttttttttattgttttataatttttatttataattacatgatagttgtgataagattatttttgtaattattttttttgttattttatatttatattataagatgtgatgtaccaaaaacttgtatttattgaacatgaaagttgaaataaggatcacagggtatgatgtaggcccaagccagctatggttttagtggtgttggttagctagctagtaattacatatttaattgggataattgcggcaaaagtcctcaaaaacttaaggttgatgcagatta

SEQ ID NO: 111424 - DNA, 5187 bp, Cannabis sativa
  modified_base (5145)..(5152): a, c, t, g, unknown or other
aagcatgtaaaatacatgtaaacataatcacttcaaaactcttaaattgataactatcagattgtaatgggttttatttagggcacaaaacccaacaatccctccttcccctttcttcttgcaaagtaagttccatgattgccaatgtattttggagccattttcattcattccccactaaaaattagacatcattgattcaagttgcttacaaaaatagttaggaaggagaaaatagctcatcgcatatgttgggattgattgaaccatagttttgaggagaacttctttaccaccagctgaaaagattttctcactccatgtatgcataagcttccaaattttttccttgatattgctaaagagtttcttcttatatcttcccgagtatgatgggagtcccagatatttctcatgacattcgctgatagtcattgataagtgtctatggaagaagatttgagctgctaaggtcgtgttgggggagaaggacatgacagatttgtcatagtttagaacttgtcccgaggccctatggtaagtgtccagaactcttttgatagcaagacatgagctttcatctgcttgacaaaaaaggaagctatcattggcaaaaagaaggtgagaaattggaggagcccgtcttgtaagcttgaagtcgtgcagctgtccaacattttgttcatgtagtaggagcctcgataatccttcagaacaaatcaaaaacaagtatggtgaaaggggacagccttgtcttaagcctctagaaggaattaaatggccagttagttcaccattaatgaggaaggagaagctaatcattgaaatacaggtcattatgagagaaattcaatgtgaagcgaaacccatcttcctcttaacttctttcataaatctccattctactgtatcgaaagctttgctcatgtcaagttttatggttgcaatgccttgacgactcgagactttatttttaatagcatgaaccaactcaaaggctaccaaaatgttgtcagtaattaaccggttaggcaagaaagaactttgtgtctcagaaattaccattggaaggacctccttgaaccttgcaacaagcatttttgtgacaagcttggagataacgttgcacaagctaataagtcaaaaatctttcatttgttgaggcttcttaattttggggatgagggtgatgatagtacgattgagactagtagggtcagccccctcattgagaatattaagaacagcctttgaaacaagatcaccaactgtagaccaattctgttgacaaaacatagctgacattccatcgatacccggacttttttctgatcccattgattttaagtcagcttcaacttcggtcacagactcacaatgaacggcttggtgagattttggttgtgttcatccaggaccatggctgggatacaatccaaagtaaaggcaagggcaagatcatcaacatccgatgctttaaagatgtcttcaaaataattgtgaactacagcatcactctcccctttagagaacaccctttgacccgcattattgagtaggaacttgatcctattattggacttacgagcattggatttggcatgaaagaatttcgtgttacgatccccacaagctaaccattcaacctttgaacgctgctgccaatatatttcttcttgttcaagaagatcttcaagaatagatgcaacttgttgtgtttcatttatttgcaaaggggttcgggtatcaatattattaagtttctctactgtagcttgataattcttgatctgtttcttcatttttccatactttgcagagtgctaagcttgtaaggaatcaacacatgattgaatattgtgtgagacagtagagatagggtcggtatcagttgaattcaaccatttggatgcaatgatgtcgctacttttaggatcggacagctaaatcttttttcaaaccaaaacctatttcttctttttttaattgttggtagttgattccagcgtgttaatggtggttgtgatgactctatgatccgattgatagaagtacaaatggtggatttgaggcattggaaaacagccctcccaatgattattaacaaagcaccaatccaagcgttccttgatgattttgacatttttctgacacttgatccaagtgaaatgatctccttcataaggtgtttcaaaaagtcggcaaccatccaaagtgtttctaaaagcttccatatgggtttcattgcgaagagcacccctaaatttgtcatttatagagagtattttgttgaagtcaccaatgactgaccatggattaagagaagccacatcagcaactcttctaagtaaagtccaagaggttggtctactagccacatccgaagcaccataaaagcatgttaaatgaaaagaattactcccatcaaaagtcaaattacaatcaaaaaaggaggggccataattgagaagagcaatgtcaacatcatccttccataagatcataagaccaccactaagacctgatttaggagattctaaaccattattgtaatgcagtgagcgtcgtacacgagaaacagaattaacagagagtttggtttccatgagaaacaaaacttggggagattgttgttgaacaagcaatcaaagttgtctgaacgcacctgggttccccaagccccgtgcattacagctaaggattttcatgatgaattgcggggttgcccagcaaccaccgcacttgagtcatgggagaagctagaatcttcaaagtcagaaactagcgactcaacatcatcatcccttgacaaatgagaagatgaagagccttggacattgcgacacctttttagcattttcctcatggataaggactcactaggcctcttagatgtggaatttggtggctgattttctttgtccacaatcataatagcagtagtataagtgggagtggatggtatgggaaaattggtttaagtagaggccatgtgatgattgcaatggatagatgggatggctggagggtaggtggcatatgtatgagatgagagagcaagaatatatatgtgggatagatcagtgacaggttgtttgagattggaggtgatagcagagggaaggggtgaatcaggtgtgtgagtggaagacaaatttgtatttgttacaatagttgacacatagtgagaggtttatgataatgacaaagaggaaagaggaaggttattggtggaatttttactgatatgagaacatgtagtataggtgttggtagtgactattttttgatgagaatggctgggaacaaaggccgattgtatagtgggatgttgggagtgttcagagttggaaatagtgttaagtttcaaaggcatttgtgacttaggatcgggttgagagtgagtagagttgctgctattagaaggggcaataaaaacagtgttactgctgttagagggactgtcaaatggaaaaaatgatggagcgcagatatgggctgattgcgagttggggatgattgaacaatgaggttaaggcggctgtggagaagtggcaggcctagtgaaattacgaatggaatgttgctggttggaacattcaccataaaaaatagtcgatggttgaggttggcttcgagagggaagggcaggtattgaggcagtgagtgtagtacgggccaatcgagttaataatggccaagcatacctttgggaaaatctgcccaatagtgatcataattatttgtgggaagcttcacaccattcatccgaggcccatattgaaagtcatcatcatttccattgtccatgtgctccataaaagcaatacaacgcttaaaggggtgtcctaagcatccacacacgaagcaaaatttagggagtctttcatagcggaaattatccagaactcatctttaatcttaggaagtcagatcatttggccacgtaatagtggctttgaaacacagagtttgacccagatgtgaaggaaagggccccatccttcgttcgtagagtcatcatagacttccatgaactccccaatgatgttaccaagtgcttcagctagcactttagtcttgctcaagaatggcatttggtatatttacacgaaaaacggagtgaacaccaaattttcctttgagacattttgtagaacatctggcgcgaaaagtataatgagatgattttgaaaatgccagggttctttattcaaaacccgacgttgatctccttcacaaccaaacttcacatgaaacaagccttcttcacctttgtaatgttaatttcacactgggaatcttccacgccaatgaccggacatttgatcaataaagttcggtttgtaaatgtgttgtgtggccaagacacgagcaaggagggtgtaggagtttgtttccaatggtgcggggtcatactcaggaattgtgaaaattgatttctcctcatcagtgagggagagtttagcattcaagtcgtttaagaggggatccataggaaaacagagaagacagagagcaacaactaacgaagtagacaacggaagcaggtggtggcgaaaatgagacacgggtaggagtgtgggagggaacggtttacagggaaagatttaaaaaagaggaagacaacaatggcacttagagagaaaaggtagttaaaatacaataactgatacagacccaatagggcacaaatttatgatggtacaaaaaccgtagtttatatatgtatgtttatatatacaaatgtgtttacatgattctacttacaaaaaatgagaaaagaaaatatatactgttcacaatacaataaaagaaaacaacatgatagaaaaacttttatttcttaagtgatgaaatgcatattaggattacccttatatatagatttagattaataaaatttatttgaatacgtggggacctggtagcatatttatttatgtaatttagttagagatattttattttaaaaatacttaaagctatggttttgaatcatatgatagatagatagattttttcttattttgatttttttcaaaaataaaaagtaatatatagaattagagtgatagtcatatatcctattattaattaataataaataaatgttttgttataaaataatataaagtagatgannnnnnnnaagaagaagatgaagagagaaagggaaagtgaatg

SEQ ID NO: 111425 - DNA, 2354 bp, Cannabis sativa
aaacaactttgtccaccttgggtattttcaccgccaatttttgaggttgaggactaatcggtatcaacctcaagttttttgggacttttgccgcaattatcccaaagaattataattacaattacaagtaaatacacagaattttgaactcgtacaactcttaaaataataaacatatttttaattttaaactttacaatttttatttttttttttgacaataactttacaattcttttaattatataagaaattaaatttttattatcattttaattcaaataattattcttatattatcgatgtttactatgccaggacatatgaatcattctcacatgttatgtctttggatttattgtgcttgatatgcttgacacgattctggtacattatccagacaaaaaattgatcttatgcacaattgtaattaaggttgacatttttttttttttttttagtcaaggttgacatttcttaataggacatgacaaatgatacaaaataaatatattttggtgacacatttaattttgtgtcgccacttttaattacaaagtttactaaacatgtctttttgggtgatttttttttttgaataaataaactatgaatctaataagtaatgtttgtgtttatatatataataataattatattaatcgtatcaattttgtataacatcttaaaatatatttttttttttgaatggaatcttaaaatatttaatagtgtgttaaacgcgatagttttgagtttgtgtaataaatgtgatcatgtacatgttaataaattgtatcgtgttcgtatttagagtcttaacacaataaataattatgtcgtgtttgtcacagaaaaacgagctatagtttcgcattttagtttggacagttttaaactaacaccatatagcgttggatgattcattgacgttttttcacaattgacgcttagtacataatttttttatttctcccacctaaagctatgactttttagtgtcaattatgcgctaacaaggctttgttgtgtgttatactgtcgcaaatgaggttttaacattggttataaattgtcgcaaacaatatttttagcgtcaattatatgcatttactaatgagctaacctaaaagaggaataaggatagtaaaaataagtcgaaactcatataaccattaacttaaattcgtaacactctttatacacccattttttactagttaactttcttttctttttattttagaattagtgatagctgaaatgacaatttatttttaaaaaataaatgaatagttacataataaataataaaatcttataatgatgtttttaacgcctgttataaattgtcattaatgcaaagaccattagcgccattagaatagatgtcggttcaaaaagtaactaatttcaacgaagttggttatagacctatggctaatccctttttttttggcagcgtgtgttcactataaatgtgccatcaacatgacacgataaacatgattggctagctctaatcctagtccattggatgtggctaccttatatgttcgatcaattctcatcttaacattgctcagtcatcctccctccttcccacccttggttaccccgttataagcaccacaactagctggatttctcctccaaaacttttaagtgcatgcatatgcattgttaattttattttttgaaatttatattgatatatttccaatgaaagtatatttgtacttacattttttgttttgacagaagaagattgtacttatattattattattagtgggtagcatacttctgcttaaaatttgatgaaattttgatatttttattttatgatagctttctttgtttttttattaaaaaaactaatgattttaatttttttaaatatatggtaataaaactataatgatgtactgttaggatttataaacactcgaaaaaatatatattacatatttaaacatatttctaaaagtgttttaatatagaaaactctaaatcataaatttatataacctttgctaaatttaagaagaaaaatatgataaaaagataagcagaagcactaacctgaagtcattgttggagattgcagagaaggttatgatcttccaagaatacactatttcttaaagtattttctctgatggggaagagagaatacaaaaaccctagtatttcttggagatcactacctatttatagattcatcttagaatgagtttttggtatatataatttggccctccaacaaattataaattaacttatggtattcacacattatttccatgacaatttaatacctttttgatacccataacataattggtcactta

SEQ ID NO: 111426 - DNA, 2644 bp, Cannabis sativa
tatatataatatgtggataggcaattgtgaaaagtaaaaaaagtaaaaaaaaaaataaaaataaaaaaaaaataaaaaacagtacacatatatagtatagaaaaaacaaaacagtaaaagtgttatatttccctcacaacagtaaaattgaaataaaataggaaaaaacagtatgtagtgtaaatttcccaaatctttcttacgttgggccaaggttttgttgggtttgggggtggtgtgggcggtgtgggtgatttttggtggtggtggcagagctccttgcttttcaaataaggctgctatgggcatcaaatttggaatttcgattgtttaaggctgaaacgattttctatgtgtttgtaattgggttaagtcccctagctgtaatattgtttttaggtctattattgatgtgcttatttctcttttagctttttatggtgttggtggtgattcgtgtcgagccattttgcgtgatgcaaatggtgtagttcatatttagtaaagtctattactagttttgtaggagttcatgtttggacatatgcttgtccaagatttttaagtacgttgctataaaaattgatttagtttgttaatgatatcacactttttttaaaaaaaaaaaaaaattgatatatcctaggaagattttctactgcatttggagaatttttgtcttaaaagcttatatttgatcaattttatcatgtatgtaaataatatgttatgacttactgagtaattttgagttattttgattttttttttttttttattattatggtatgcattaaatttattgtgaaagtattagttatttttatttttttaaggagaattgtttcaaatatataattttatttgaaatcaatctacatattttagacatgtgcatatttgctagtttatttacttttttagtggtttttaaaatatataatttacagctccaaaactgaaatatatgacaacttttgaagttttttttcttagttatgataaattttctcttgagagaatggttttagtgttatgcttttatgaaatattttttttctctcaaatattactaagcaattattactattactattatcattataaataaaatccaagtagtagtggcactgtggcatattgttctttattttcataaataattaaaatgaatcaaaaatatatacatatcttgttttgagtttttggattttttaaatagtttcatatagcttgtacatttataccggttttttttttttttttttgaaatctttataccggttattaatatactataatgtgatactattaagaacttgttatatcaaataaaattatatttatttatatgttagttaggacaattgactaaataaaaactaaattataattaatattagtagacagtagttagcttaattataactatttgtttcccttcatttataactcttataatgaaattaatagtcttactttaatattgatctgtctttttggtttctaatttatattttctcatgttgtatgagaacttcttttaaaccaaattttatagtaatttaaaaaatgtacgtaaactatgaaataatggagtagagaaacctaaatgcttatatatataacattttcttctaaatattcttgacatatgaattttattatagcataatctattatcatttggttttagtttttcatttaataaaattagtgagacaactttgcaaaacgagttataatttattttggtgtaaaaactgtgttagtttaacgctaatgtaaatacaataatttgtgtaaattggaagactaacgtaaattacttgaaggtttgtgtcatttccaaaccgattatttttgacttgtatgattgtgtcacattaaattgttaaatgaatattttattttttttttaaataaaagacctcatattactttgtatacatataaaaaaaatctttaaacttttatttaattgatgttagaggtttttttagttaaaaatataatattttgcatgattccaaaccaaatttgttaatatatctttccttcaaaaaatttgttaatatatcttaggaagattttataatgaatatgaagaaatgttttctgtaaatgaccatataagatcaatttcatcatgtatctttctaaaatgttatgccttattgagaaagtttgagctattttagatttttttttttttttaaaaaaatagagacttctttcacatgtattttttatataaattattttgtattattaatgagaaagtattagctattttattttatttttaagagagagatttgtttctaaatatttgaaatcaatctaaatacttttagatttgtgtattttcgctattttatttactttttttagtgattttttttaaaatatgtaatttttgaggtccaaaaatgaaatatatgacaacttttgaattgtttttcctttttactgttttaataatatttaacttaaagacaataatttttttttcttttgaaaagacttaataattttaatgttagttttatgatatatttttcaacaaattttaatcaaagtacagtatattgttatttattctcataaacaattaaaatgaaccaaatatatatatatatat

SEQ ID NO: 111427 - DNA, 12345 bp, Cannabis sativa
  modified_base (12289)..(12292): a, c, t, g, unknown or other
gaagagcctgtccgggtcgaagaggtcactgttgttcccgtggaggaaaaagaggaagtcaaggctgaagagtcagttatcactcaggaaaaatcatcacccgctgttgagaagaatcccgttcctgtcgttcagaaggattctgataacaaatctgaattgaaattggagcccaacgggttgagaagtaagtttttttttttttctttgtttcttgtgaatatattggttattagggcatgaggcgatgggtttaatgaatttgttctaattttgtttaatcatcttcttgttagttatctatggcccctttgatttggatcacttttacttcacgtttgggtgacgcttttgtctttattacgttgatttgacttaaaaaactatggatttgtcacattgttgattaatcaaagctattaacttgatgttgttgtttctagagcttaaaatacaataaagggagaaggggtcaatatactagatacttataccataggattgtctatggcactgacataatcatctgtattcgttaagtagttatatggtgtgttctttacatttgggattaattttttctttatagttgacataatcatatgtgttatgttcgggtctgagatcattagtaatggaagcggagaagaccgcgtttgggtaatacgtatatataaaatttcgttcactgttcattttaaaagaatttaacttttgggagaaaaaataaagttgatttatagtaatggattttgtatggatctatgttatactaattcgaaactttttgaaaattttcctttatagttggcttgacttgagcatttcgtatgatatcctcttttgtttactgttacgtaatgggtgagaaagatcttagggtgatggcctaagtgtgatgaaattggatgctacccttgaacacttagaagtagatcgcacacacatttttttagcattcgtagttctgattatcccgtctctctcgatctaaggacatgaatgttttttcctactcaaattactttttggtacatatgaaaaaggaatttcagcctcatctaacgggattgctcgtcaacccctattttatgacagaagaagataaaatgaaggaatctgcggatgaatatgaaaaagatgaaaggttagacctcgatgataatgatcctgagtacgaaactgaagaatatggtggtgttgattatgatgagaaggaaactgatcaagaagatgtccaagagctgggtgaggaaggggaagaacacgaggataacttagatgaagaagatgagggtgatatggttgaggaggagctggaagacattaatgaagagcttgagggagaagagtatgaagagaatgttgaggaagagcaggagcacgtggagactgttgatgctgaggaagatgagcaccatgaagttgtaaaggagaggcgcaagcgtaaggagtttgaagtttttgttggtggccttgataaggatgctactgaggatgatttgagaaaaatattcagtgaagttggtgaagttactgaagtcaggttgatgatgaacgctcagaccaagaagaacaaggggtttgcgttcttgcgttttgctacagtggaacaagcaaaacgagctgttcaagatttcaaaagtctagtggtaactgttgatcttagttttaatgtaaactgaaacttcctcgcgtataagttgaactctttaaatggattaaatttcaggtaaatggaaaacaatgtggtgtaactcccagtcaagacagtgacactctttttttgggtaacatttgcaagtcatggactaaggaagctgtaagtatattgatttttcagatttactatctagtactacttaccggcaaagaagctggcatttgatggttattgtgattcctttgttttctgaaattctgtttcaatgctctttcagctgaaagagaagttgaaacattatggagtcaacaatgttgaggatttgacattagtagaagatagcaacaatgaaggcatgaatcgtggatttgcctttctggaattttcatctcgctcagaagctatggatgcctttaaacgtcttcagaaaagagatgttgtgtttggagttgataggcctgccaaggtttcttttgcagattcgttcattgacccgggtgatgaaattatggcacaggtattcttttgggtctttgacaaatctgcattgtaatattaggaactgaatccttagatgtttagtctacctattaataaatatattgtttgatacttgaggttttcttttttttgtttttttgaatttgaaagccaataatgaggaggctgtaatttatttgtattttggtgtttttcttatcagacagtttctattccttgcacattctaatatattctatggtcatttcacttttttttcttctttgtttttgatatattttggcacaggtattctacaatattcaatttttctgtattacatttgattttttggttgaaaatctttgttgtattatttttattctcttttttactgaatatttttgcatttgcacagagtatgtgctcttatatatgatagttttatttgatgttttgatatttatttatttagtctggattcataagtcgaaagtctcaactgttttgtttatgtttcttcttatatcttatatatagattacatattttggtatggggatagggaaggggttctgaggtggttgatttatattccttttatttgagtctggattctcatgtatgaatttacaggttaaaactgtattcgttgatggcctacctgcaacatgggatgaagatcgtgttcgggggcttcttaagaaatatggggaaattgtaaagatagaactggctagaaatatgccatctgcgaagaggaaagattttggttttgttacttttgacactcatgatgctgcagtgacatgtgcgaagagcattaacaatgcagacataggtgaaggagacaacaaggttcgtaatgagagctgtttattgtagttttggtactttttaatcaagtattcaaagagttgacattagtggtgtttaaatttattaatttagttatgttgacatttcaggctaaagttagggctaggttgtcaagaccacttcagaaagggaaaggaaagcatgctggtcgtggtgattttaggtcttcacgaccttctgggcgagtgtttaggggttcttggggccgtccatcatcacgtagtgtttccatgcgcacaacaagaggtgttgctagtcgttttcctccaagtacaaagaggcctctaggatataaagatcgccgacctgtgatgtctgtgccatccagacccaggcatttgcctcctccagctaggtcatatgacaggagagcacctggtatgatgtggatcgcactctgttttgcccgtttgcttcttgcgtactgcatatttatatgcttacattgctgttaattttttcacagcacaatcttatccaaagagtagctcgaagagagaatatagtcgacacgatgagattcctcctccaagaagtagagctgttgcagattatagttcaagggctgtccaagagagacggctgtcatatagagatgagtactcctcacgtggtcatggctactctgatccgcctaggagtacatcgcgatcttcaggcaggcgagcttatgctgatgatggatatgggcaaaggtttgacaggcctccaccttctagttatcgtgaaggtgggcgtgcacgtgattatgattctgtttcagggtcaaaacgtccttactctgccgtggttagtttcacttcatgctatgtaattttgttttgaaaaatgtcatttttttactattttttgctctgcatgaaagctgaactcatatatatgtcatgctaggatgatgcccctcatcgttttagtgatgccagtgttcgtcaatcgagggcacgcatagactatgattatggtggcagtggttctcagtatggggattcctatggtgatagacttggacgttctaatttaggatatagtaacagcagaacaagtcaagactcacatgggatgtatagcagccgtcagggcatgggttatggagggggtaagcttaatgtgctggcattttgttcttgttgcatctcttttgtggatttgatgctaactgtgtaactatgaatggcttaggttcttatggtggcggtgatggagtatactcatcaagctatgggagtgattatatctcacgtgcatctgatgtatgatgattgttttttctattcttttcccattcggaagtgaggaaatttataaaaagagaagattagtaatatgactttattgatatcctatttgcttacataatttcttgatgttattaaataggttggtggtggctcatactcatccatgtactccagtcgtggggtgggagggagtagttatatgggtagtggcggtggtggttccggttctggttcatactactgaggtaatttaagcttttttattttcgttttgctcttagtggatgggtcaattttctaaatgtattgccagcagataatttttgtcgatcctaaaaaaaaaagtaaatagttattggagtttttattagtactttctactggggatctcagctactgaaggcgggcatctctattatgcttaagtgatgtggttggtgaaaatggagcctggtcacaagtgtgactttatctacggaacagatctgtgacatacaaagaggctgctgtaggatgtggacttttgatgctaactttatgaagaaagaaccctatcaagtttaattgcttctcttatatgttccaagaattattctttaatatttaagggctgtattggttcaaccctgcttggatctctacatatgtggaaattgtgtcggatcataattgtaatgctgtaaggacgcatgaacatttcaaagatgaaaccaagaagtgctatgttgatatttatgactttcatcttctgttttatcttctataagaactccgctaattggacaatgtggaggcttgcttcgatatctgttcttttggacagtattatcagaggtttgaggattttctgtattattagggttcttttggatattttttgaactggctcttctggaaaggttctagctttttctggccactttttactgtttcagtgcctcattatacaagcgatttaatgaggctaaccagagactcaagtttaagggaactatttagcttggttagaataacctttaagtataaggttatgatctttaactgttgaattggattttatttgattggtttttgagttttggttgctattttgaaaagaaaattacagttctatataattgaattatatgtgatggtgtctttattatattggtttatttatcttgtgggcataacttagcataaattgtatcctgcaaattttcattgaggattagaggaaatttaatggcatttttgataagtttgataaccagaatttatatatttgtacattgtgaatagccattcacagaatggtgagctacatattcccacaaaatgatatatattttcaagttttgagagcttatatgtgggtttgtaaacctctgttgagaattctctaagagagccagtgctaaagctagactaacagcggtaaaagtttaagcgagcaaaaatgtggacatttgatgcatttggagcatctatctcttttctaattttagccttaagaaaggtgccatttggaattcttctaccatggatttcgtaagacttgtataattgctgctaaaagtttatcgtggaagtttgtgtattctacgctatgaatttgttcctgttctctctgcaattcttggatgtgtcacactttcattatgttaagcttgctggtgttgagatttctcttagtgtagcaaagttgatgattacatttggtatgggaaaagaagtatgctacaggatctgtagaaaactatggattttgttctacaacatccataatcacttctcatgattggaacagaattttcagttctggtagggatttttttcaatttagttgcttatatagttaccataacaattctataacggggtttaaaatatttctaataatatcaagccatatcaagtgtagcttaaccttttggtctagagatcttagtaaacacgctaggatttttggagccttcccatttcggaaagggttttattaacaaattagttagttttggcgttgttatatacttgtttgccttacataatagatgctagaaataggctgcaaataagtgaagcagttatcgttttcgttctctaccattgttgtcgccatctgttctatgtactagttttgggatgtgcgacagatttttactttttctttcccaccggaatgaattgtactgtgattaggagtccaaatataggttcctgagaacatgagcacatggtttgagttctttagttttggcgttgttatatatttgtttgccttgcatgatagatgctagaaataggttgcaactaagctaagtagttatcatttttgttctctgtcattgttgtcaccatttggtctgtgttgtagttttgttatgtacaacagatcttatacttcttttttcgttctcaccggaatgagttttactgtgaatgagccaaaatataggttcacgagagcattgatcacactttgagctcatataattatcttgcaaatcattgtactgtgagttgcttttgcacacgctacctttcggtgcaagctataatttcatgtctgtttctgttttagcattattgcttctttttgtggatttatctgtttgaaactatgctctcctttaaccctacaagatttggagttgaaaatcgagtagcagatatttaagagcagaggattcacacatccaaagttgttaccaactatatgtttttgagacatgactagtgtttttaggttgaattctcgtgtgaatggtgacaaggtattgtgcattgtggtgcgacgagtattgtaaataatacagcttattgttttatctaatcaattttttcttccaaacgttgtgtacttgctgtttatatcaatttcagattgtctagaaacaatggctagctgcaatttgctaaattaaaatcaagtaatttactattttgaaccaaattaagtgcataaactttacaacaagcactatacaaaataagcaaaacattcggaaactcattattaacccttaaaaattatatgtacacatgaagataagcacaatacacgaagatgattttaagtatggttaaatgtctgttattaactagtacgaatggacaacaatcctgcaaagagccctgcaaatcaagtcatatggaaacaaaataagcactgaaattaaatatgaacaaaagctagacgtgagagcttcgaattgaaagccacattagcaaagtgggaacagacagcgacagaggaaattggtactcacccagttggagagtaacatccacaaaatgaacccggtttcacacctcccctaacatctgcccaatacaaactatggacacaagcttagttcaaaatcgacagcgatgttgcacgctcttactgctagagaagtggcctcctatgagctctgctcaggtagcaagatgtgaatggtcaagatcctctcggtcggattaattaaacaatgtgtgtaaaaaaaaagtgatagaaatggtatctatttttttttctccttcttactttggattagacaaataggagttgaatagtccgcgactgaagccttggtgaacatcggcgttaactataacggtgctaaggtagcgacattctttgttgagtaagtttcgacttgaacgaaaggcgtagcgatctaggcactttctctgaaagaggctttgtgaaataatcatgtctatgaagatataaaaaaagggaacaaaaataaaagttttggaagcaaatattattgctaaatgatttaaatattaaaaaaattacaataggggtttaaatataaaagtaaaaatatatgtaaaaaaaacagaatagaattttgcattataattatttatccaaaattgacgtagaactgatgtgatgcatagacataaaatatatgtataaatagttttttaatgacagtgaaaatttatatacattgttaattgaagtctagacatataactaactggtccgtggagcttacaacaccaaatcaagattacgtacaactaaacataagaatcaattacaactgaaatcatttttaaacctaagaaatgtattttttatacctaagatcaagaccgatcaagtatcgcacaagccaatccttgctccgagaacaccaaactagagagagaagctctcctcacaagattaaagagagagagagagagaggaggaggaggaggagggggaagattagtgtgagattaagagagatacagagaaaaatacttgtaaaagaactagcaagatgagctagaaaggattacaattcaaagatgatcttttcatttctgttggtataacaattgaaagcaaacattgttaatctgatgaaaaacaaagatttagcatggcatttagtgaagttaaagcactgttcaattaagtgtgcatagcatttatgtgtttatacatttgtgtgtgaaaggtcaagattgacgttagtgtgtctaacccaattgtgagtggtgtagggatgtaaaggtaaattttaacataaatatttttggagcaaatatttatatgtttaatgtgaataaaattaatttcagtcagcttaaatagtggttggtttaattacaaagtaaaaatatatattgctgatagtggtttagtaacaaaataaaaatatatacacttttaaaattaatttatatgtttaataccaataaatttaattcagcaaacctaagttagttaaatatacatttatactgtaattatatatatataatattctgggttcgagtcttaaattataaatgactgtaatatgtaaacgcttaaataaaaaaaaattattataataataattatagtttgatattttttttgtttgttaaacaaaatgtaaagaataatctctctgagaaaaaaattctatttattctaaaatgaaacatcacttatttattttatttttcccctaaaaagataagattgaaaattataatttaattcttttaaaaaaaattaattccctaaataaacgtagttgaagtaattaattttgaccttttcctttgttaataataataataaatataaataaaaaaaaagtgttctaatcgtgtccacgctgtcgtatttctctgcaaggtctgccaatggaaccttcccaacttctcaaagttcctcatatacgatagtgtcgactacatgaagaagaagctctggatttaactcgaaccgtttctgggttttccgattcagtctccgttctcaaatgggtcgccggaaaaatgactcagaagtgggccgtttcgcgattctgatcatattcttgatgggggtaatctcctgtagcatggtctacttttgcatctctgtgctcttcgttcccaccgctaccgacccaataatttcagtctcgtattctgttcaaaacgttgaccaagattcggggactcaaaatgaagaagaaaaagaagtgtgctgtagagggattgagcatttggagctttggggtgacgccgcaaaatggggttctgagtttaagctcagttcttctgaggagtgttgcaaggcctgtaaagctatgtgtcggaaaaaaggcccttgcttgtgtgattcgtgggtgttctgtggaaatcgagaagcttgtggagctagatttggcgaggtatggttattgtcgtttttctaatgtcaactgtcgtttttgagtaaagtggtctgcaatagttttcgtatttttcatgagatgataaactaaatttgataattgtatatacatttgtagctgattcagtgaactgaacatgtttaaatttatcaactgtatttatgaattgagagtttttttttttcaatcaagtttcaaacttttgggattgatataattcattgtaaccgaaaaatgaccaaaattaagtaatttgttgtaagatagagcttggctatctaagataagaattcacaaatttccttatggtatttctgtttgtataagatgttttccattcttctgtctttactgcagtgttggttgaaaaaacaaaagaattccttggtgcttgatcggcgagagtccggtgatcatgttatgtggacttctgggtttatctttgcagaaggagaggtatagttggtatctaataagtatcaagcattagaaacacaacaatgagcttgtctaattctctttagaacgaataagtggtcttttataggaactttgaaataatgtcatttgaatagtttatgtaactttggaggtattgattgacaagcttgtttcaatttacagattaaatactgtagatgtgataatgaagcaatattagatagtctacaagtcttatttatgcttgcatcttttataattttacttccttaattcgcaggacattgttggcctggaaaccgaacatgggactattcgcatgaaggttaatgcactctttagaaagttggatgctttaccttgtttagaagtccagttgtctagtgattacaaacatggataagctgtgtgtatggaagatccgtctttgggttttctttttttcctgttctgtttccttgaatagcttagctccttattctgcttaagcttttataatctagttttttgttctgttagtctttcttgtgaatttaatttgacattatttttcaatttctgcagctttttcctgattgttccccagaatctgctgcctatattctcgatctattgcaattaccacaatataccggctgtcatttatatcgtgcagaaagccggggaagcatttgggattcagaaggaaatcatgtgaaaaacgtacattttcctggactcctttctagacatgttgtgatagtgaatacctgttgttaactgcttgacaataaaccctcttatttcggtttttcacttgtcagctttccctacataatcattcataaagaaactaactttcataaagaaagcattaagatatctttcatattaatgtgtaattcttaactcgattatttcgttctagaatttgttactagttttatgatgagcgtagaaatgagctaggacagtgtgatttgttatagcatagaatgcttatttttcttagtttctaacttgcatgttatatttattttcagactccacttggtcctccttatgccttagtgcaagggacgcttgaagcgcacgagactgtttttaagaaaatttcatctgagttcagttccatcatccgaagaggatcagttgcttgggttggttctggccctgatttctttatcagcttagccaatcatgttgagtggaagaaatcatacactgtatttggctctatacttccagaggacatggagattgtcgagaagatttcacatcttccaactaaaccggagatttggggtagtactaatgtaactgtcttagagaaacctattaaattaaagttccgaaggatgaagacgacgagtcacagtaaaccctagttgttatagtagagaggtccaactgaataagaccagaatttctttaccattttccatttaagattttgagccatgtaaactgctatgcttgaatgtattcccctggtagtttatattgtagatagatttgtggatattatggattcatttttaacttagtaggtagtcaaagagtgtcacaaaaaaaacactgtcatttagttcatttttgtttcttattgaaaagaaaattatattgtttttttttgtggtttgcggcataaatacttaattttgattggggataaatatttaagtataatttttgacggtagaacttctataagtacctggtagtgtcaagtcaatagtcacatgaaaattcttaattagtttgagttattatatttttgttttttatttaaaaattaatttaaatataccaataaaaaaataatacgtggataataaattgacacttaatgattagacaatttcagaaatttaaaaaatataacttaagtatttatgcttaaaaattactctttttttaattttatttttagaaggctaattaggattttcgccccttgaactttgacatgtacnnnntcatgcctcctgaacttttaaggtcgttaaaaatgcccattgaactattgaga

SEQ ID NO: 111428 - DNA, 2232 bp, Cannabis sativa
tgtgtctttatattgctttactacatatcaattgctataaattactaatcgcttactaaataaaattcactatcgttggctaaaagcgagatcaacaatatatacatatatcattacccttcatgataaataaaaaaagtttattcacatattagttttcttttcaaacgattttgtctcatagattctatgaatatttttagatttagtcaaactaataaataacaaatagtttcacataaccaccatttgtttaaaaaatagatacttttccaagatcatctttcttaacattcttaaactatcctaccttaccacactaactatatatatatagataattaagtaattatattatttattttctctttaattgagattttgagtttccattaatatttgtgagatatttggaaaaaactttaaattcttgatgaattattttattcggtagtattttttatttgtgtgacaattaaattacaatgaattttcattattgagtaataatatttttgagaaattgaatatattgctataatcaaggccacaaatctgcaatagaaaaacatattagagatagatctctcgcactctattattttattattattaattattattttgttcctgtcattaagttttatttatttatatatatatcctaatttatatttaattgtctagctaatattatggttgcatttgactgaatttttcaatcttcgatattaataagacaaaaatctaaattgcaccactaattttattcccctttattaccaaaaaacatgaaaaaatatctaaaatgaaagaggaatgtataggtagagttttctagggtacttgaaagaattccattaaagtatatttagctatgacaaaattgtgaaatctattagaaaggaaggaaattaataattttaggtagctcaaaactcttacttagatgaaaaatataaattttaaactcttttgcttagaacttagtttttaattttaaaatttcttggttagtggtgaaatgttattaatttatcaactcaaaatataaaattctataactgtgtattaaacaatttgatgtgaatttcagtttgttgtttttgaaattggtatgtgttttttttttataggaatttgttattgaaggcgaggaggacgaatgttagaagagtttgataaaagcacttagaacaattaagaagacccctacacttttattgacaaaaataaaaattaattacaaggtgttaacatttttttctttgtacttactatgtatttgtgttacaaactaaattataataaatttttatcattaagtaataaatatttgcaggaatgacattgctgtagtgaagggtcacaaatcatattgactattgagcgtcttagtgatagatctccctctctctcattcaacaagccttacattgcaatgtttctaataaacttatttattcatagacccattaaaacacaaatcatgttgagcaccttaacggtagatcttcctctttcttattaaacatgcctcacattgtaaggtttccaataaacttgatttattaatagattcattaaaagttgttctcattttttattatagaatcttaatggaagcttaactaaaaagaattattttttatttttggattaagattattgtaagtctaaaattttatagttcatgagtaccattttgagctttatatctattttttattacttcatgctactattaactaattatgcctaattattattttatcagattggagctttattatatagttatgtgtgattcaatctcataatattatggttaatttaattataaaattcttttttgtttaatttcatattttcttttttctaatgtacatgttaataaattaggtttattagtactaattatctatataaatgttataaattgttaaatagagaagacaaccaatcaatattttgggattattaataagaaatagtagcccaagcaatttcatgaaactatttgattgggctaaattatatccttcctttcgtattttgctttaatttattttatttattgtccacaaattaattatcaataccaaccttattatatcttatagttataatagctatcatgtcaatttttaaaaattctatgaaaaaccgtgtttttgcaaatttcaattatatatacgaaaatataaaactgtatgcgtctgcagaagcaga

SEQ ID NO: 111429 - DNA, 7733 bp, Cannabis sativa
ctggtgcatagatgtgatgtgtatgtggtatatgtgtaataaaatatagagaaaaggtaaaaaagttgctttaaccgtgtgtaggtttatatataataaagtttgtaatttgtatttttggtgtaaatttttttagagattatgagttcttttatttttatattttaaaatagttttttttatgtatttttacgaaattgtacataaaaacttctattacaattagcgtctaacttaaattataataaaaaatcgtatagaaatatctattctaacaactattttagaaacctaatctgtaaatttgaaaaaaaaaaaaaaaaaaataatatatgaaataattcgagtaaacattatatttttagtcttaaagttttgaactgtaaaacctcagtaaagtccgaactcctctaccttccctcattcgtcttcacactgttctctggtcttctccttccatggcttctcggcttagatctctttcgaagccaacaagctctttattcaaatccgccatggggaaatccgtccctaacgtcacacccacccctcctcttaccagtgtccgctcttctctctccgtttcaaggtaagcaacctcaattaattttggacaatggaggtctccaaatgcatctttgtaaattgaattctttcgtctaagctgatattcatattgtttatcgttaaaaactttgaattcaaggtcatttcctcagttgggttgtgttcaatctctgctccctcttcactcagcgatttcttctgctcgcctcacctcgtgtctcgccattgattcaacaagctcaagatctttgtctcagggtatgcttaatacccctggagtttgatactttttaaggtttttactctaattaatttgataaaattgtttacactttacaacagattagctcacaattaagcatttattctttaacaattttagctattgaattagtaatgagagaaaatagtaactctctccctgtctgggccatcattcatattacatatctgttttcttttttcttcaaaataattaaattaaaccgttatactggctttttacatattcatcttgaattttgaagtttgaactaaaaagatctaagcttgccattacgcctcttatgagcaacaatgtgaatgtgagtcaaggtctaccccaatgtgatttgagattgacatctcacaccttttttctagtcttttatggcatatttggtttacaaaatgatcgcccatcactctttgggtttgtgaaatagagaataaatggtgagaggtctgtagtttgctcccaagaagggtagttcaaactgagtgttaagcttacggtttgctaccaagaaagataatttcaaatggtcaggcttgtagtttgttgttcccactgaaattcgagttccacttaggtacctacatacaattgctatagcttcttgctccccaatcaataattattgtagtcccaatttgggacttgggtccgctatgtacggtgattgcttctaccaatactaacttttatcttgctttttattttaaagccaaaagcactgctaatatattataaccaaaatttcttggtttgcttgaagttctttgataggattatgaggcctcccgtgaggcttccttattggaggagaattaatagacgttaagtaaatcaaaggctgttaattagtggctgttctttgtacttgatgttttccattaagtttttaagaagttgctatgttatctttgtaatttattggcactagtatttttcacagtatgaaatgctcaagagtagatggatctaggacagaaagacacttcggctacagttttggactgtgtagatgaaaggaatagagaaatggaagtgtgtaaccagaggaactgaaaaatgatacaacctagtactagtaatgaatattgctgatctaggatggtgttagtgccaagtgggtctgttggtggtaactcaatgtatttaggttatgtttggtacactgcatagtgtttcagtattaggtgtgataatacaatacaatgtttggaattttcatatgtaagtgatatgggatgatagagaactacaagaggaacttatggagaggaagaattgagattgggaagagaaattaacatgtaaaacaatctaacattatgcagttcacacattttcatttatttatttattttgtgtatatcattaagttaacttatacaacgcataattctactcaatacagtacgacaaagatgtctcagtgtgttatccaaagctattgttgtcatttgtcgcttaaaagtaatctgattgacaaagtggacaatttatagacattttgtgacttgcaattgtcaacttttactcaaaagatttgtcaaaatttttagcgtcattcttcaaggatttatagagtctgttctataaatagatctttcatattgtaatgtcttaagtcctttggttcacaattgaagatgctcaagtaatcatgcattatacttgatttagattattcagtagtattggtagagtttgtaaactgacaaaatgtatgcttctttttcagaattgggtcttagtgtgccgcgataatagattgcagctgaggtagcagaagaagatagaggtttgtagatctattctcatcaacgatcatgcttcagttattggatcgttttcatcatctcttaaattaccatttaattgggtccctggagttggggatatacatagcttaacagcaagaattcaattttctgactcatcttgttttgctataaactcaggctacacataagtatatcaaacactcaaagtttagataatgtaataataatcttcttcttcttttttctttttaataaaatcattttagttttcttttcttattgaacctgcattatagattctttcaccgatatacatttttttctctagttatatgtaatatacatgtcacttagatcgaagtgattcatgtactctattctactcccatcaaactcatgcttccttagttacttaccttcacgtaggtatgtgaatgtgagctaaaagaggtacgtagccacgtgtcaaacattcacgtcctcaccagtcaccactatgtttcatgacataacatttggaaatttttcataaatataaagtttctttatatatggtataaaaaataaatgtaaaaagatatgagattaaaaaataaacaaagtttaaaatataagaaaccaaataaaagactataaataaagttgataaaatttttaataacaaatatcgtcgaaaagttgctggagtagacactgttgctggaaaagtcattgaagctgttatcgtcgttggaaaagtcatcggagtttctatcgtcaccggagttagatgtctcagacataaattaaaatagaatcggttccacaacaaaataagtaaaaacaaatagcacacaataactaagaaaccagttataattaaaaaaaaataaagaggaaatcagttcttaaaacactgaaatagaagtttagtacatcttttcatcctcagactgacgggcagttagagaggataatacagatactagaagacttattgcgagcctgtgtcatggactttgagggttcatggagcaaatacttgcctttgatagaattttcctataataacagttatcaaagtacaatagggatggctccctatgaaatgttgtacggtaggaagtgtcgttctccaattcattgggacaaaataggggaaaggaagtatctgggtcttgagttagttcaaagaaccaatcaggcaatagacaagatcaaggcttggatgcttgctttgcaaagcagacagaaaaattatgctgatacgaagcgtaaagacattgcatttcaggcaggagaacatgtttttctacgggtttcatcaataaaaggtattaggcgccttggaaagaggggcaagttaagccctaggtttatagggcgatttgagatattcgagaaggtcgggtaggtagcgtattggctagccttactaccaatgttatcggttgttcataatgtatttcatatttcaatgttgatgaaatatgttttagacccaactcatgtcttgagttatgaagccctagaactacagtcagatttatcctatgaggaacaactagttcaaatcatggataggaaggaaaaatttcttcggaacaagaccataactttggtcaatgtactctagaaaagtagtaaggtggaggaagccacctgagagctaaatacagtatgagagctcaatatctaaaattattcaggttagatggatagccattagagtcatatggataagtttagaacctaattcttagtggacaaacataagagatattttgaatgtcgggtttaggtggggttatggttttcgaccattttactcctaggcttattaattttcttaagttggagataaagggattttgggtattttagttaggggtttaggtggctggtttttaggctgacaactggccactaaactctattttcatcctgagtttatcattaattaattagatgaatgaaattgggaaaataacaaaaattagaaaaaaaaaaaatcctatccttttactctttctctctctcgactgaagctagaactaggggaattggtgttcttcttctcttttttttgaaggttagcaaggatttaaggaagctcaatttttttgaaggttaggaaggatttaaggaagctcaagctaaggtaagccctaaaaacttcttttccttgaagttctttaaggttttagttagtttagacttgcaatatgaggttcttggtactattaggtttaggttttattctagtttgatttctgaggttgttttaggtagaatttcataggttgctactggttttgttagtttaaggggtggttgagcaagtttgggtttgaaaactcaaacttagctcaacaatggcacttttggtttcagtgcatttttcttgctgctactgcttggaaactattattggatgttagtgtaggtgttctgaaaagtttgagagaatttggggaagaattcattaagtttcgaactgatttaggatttctagtatgaaccggttaaccggttctacaggtagaaccggttaatcgtttcataggcaggaccccagaaaatcttgtttactagtttgggctatttttagagccttagctttggtgtttcctcgataattagggcattgttttgctagttattgatagggaaactttaaattttgattttaggtcgcagaaagggttttagcaagttgtttacccattttcgtgattgtgacataaggcatccattcaacacgtaattttttattcaggttgactagcacacttgaacttggaccgaggtaagactagcataaaacatatttatatatatgtgtatgtgtaatttatgcatgccatttgtgatttgtatactaccaatactagtacggtagcagtactgagtgcattggtacaatgtataatgttcaatgagtacaatacggtgttaccaatactagtacgaataggtacgtagtgtatgtagtacaacacttagtgatactcaaggtacggtgcaaaccctaccaacactagtacagtagtggtacgtagtgcatgtggtactttggtcatactttagtaaagaaacattcttactcatctgataagccttgtgaataggtgtatgagcgcgtagatacaagtcggtattatattatatgttatgtacttttcttactgggtctgttgactcatagatattactttcatgtgtgggtaagggaaaggtcaaagctgaacaacattgagttctgagcttgggagatgattgtacatgtcgagacggtgagatctggagcgttcagtctcgggacgacttgggctgtattttgtagtcgctgcgcgacatgtctgtaaaagttcttttgattgttaagtttaaacacgaaatcccaatttttatgtaaaatatatatgtttataaagtttaaagtttaatcaaaattttaatttggcacgattttcaagaaaacctttgattagcaaagacgagcacagtaatttgaaaatcaatgtagtgtgcctaagctttagggcgttacacgcaaacccatcattaatactaggagagaaacacactgaagatttagaaaggttcaccaaatgaccagaataaactttctcataccaacccaaaatatccctgaatctcatgcaactatcttgagaggcttctaaaaaaaagaaactgtcatcatcaaacaaaaggtgggagataacagatccccttctcccacaagaaaggccataaatattcccaacacgacatttattgttaatgaccgcagaaaggccctcaacacagatcaaaaacaaaaagggggtagcggatcaccttgacaaatcccacgagtcagagggatgttacccacaatattaccattcacattaatagagtttttttatcgaggagacacaatgaaaaaccaaggaaacccaaagcttaggaaagcccaaccttcttaccaaggaaatcaaggaaacacactaataggcttttgccatatcaactttgagggccaaaaaacccttcttgcctttcttgtgacgttttataagattcaaacactcaaatccaatcatagcattatcggtgataagtggtccaggaataaaagtactttgttcctcaaaagtaatactaccaagcacactatgcaactgattagtcatcactttcatcacaaacttataaataacatacataaactgataggacgaaagtcagtagttctcaaaggttatttaattttaggaataaaaaaaatggtggtatcattgagactagccaaagaaccattacctttgaaaaaatccagcaccgcatgacaaacatcgatctcaatctcgtgccaaaatttttggtagaagccaacctccataccatcaattctcgagcttttatacggattcatctggaatagagccgccttaacatcctcattggtaaacgacgtaagtagaagatcatgcattttaggggaaaacataagcggcaccaaatcaaacatctgactgaaatcatcaacttggggggaatcaatagcaaacaagttcttaaaataagaagtaaagacacgagccatccctttgtctgaattcaccaagctctaccaccatcaaacacccctttgatagccattttattttctttgagcggtagctaacttatgaaagtaagacgtattacgatccccactttcaaccaagacgacttagagcgggaggtccaatacttctcatcttttaacgctaacacatccagctctttctcaattttttggcttctcaaccaggcctcttcgatattaatgttactaagctcttattacttatatcacatctctttcttggtccttgtaaaaatctctttattccacttatataagcttgaagaaacacaagcaacacgttgcttcaagctatccaagtctgagccaccatgagtatgccactttgaggaaacgatgttagcacaatcttcctcatctgcccaggccatctcaaagaagaatgttttacacctcacacctgacataactttgtcgtcttgaaaataagcgtgttaagcaaaaatttcacatttagaatattaaaaataaatgcaaaacacaatttcaccta

SEQ ID NO: 111430 - DNA, 2079 bp, Cannabis sativa
  modified_base (2017)..(2043): a, c, t, g, unknown or other
gactaaggctcattaacgccccaatcacgtaaaaatccttctctcactttcttacagctcaatagttttataatattttattagttgccgaaaacctcggtcaacaatacgattcaaattttactttataattatatacatgaatttaatagtaattatttatacaagacgtagatgaatatgttttgaaacttaaattaaaatttacttagatcaatatgagttattatataaatttataaaagtttgtgcagtgtggtttgaactgcaataattaaatttaaaatcgcaaatctaatcaaaccgcatggttgtttggccaaaatataaactacaacgacattgccaagtgtttcaaactacattttttatgcagtgtagtgtggtgtgggtaattttatgaacacttctaattttttcctccaaaaatttaaatttgtttaattatacataaccatttatcagtttcctttataatattttttttcaaaataattttatatttttattaaatttctaattatttattctttcttttttaagatatgaatttataaatataaataagtttgattttttctcacaaaatcttagtttgtttaaattatttattagcttttcaataattttagtttaatattttaagatatgtattcataaataaaataaaatttgaaaaaaaatatttttttttgaaatactttagtctttttaagtaaatttaatatttttttaagaagttaatattttatcaagtttcttaacgatttttataatcttttaaatataaatagagaagaaaaatatgacccaccaaattttttctgttaagagaaagatctctaacaaataagtcaaagtaaaattacaaaatattataaaagcatattatattaatagttttaaggataatatagtaattttattatatatcaaacaataaaagaaaaagagaaattttatttacacctcaaaaatttctaaaacactctattttaataattttattttatataaaatatatatctttaattatattaagttttttaagttttttctttcaattcatattctaaaaaaatatacctatcaaacaaaaataaattatattttaatattataacaaaaaaattaaaataaaaatttatatgaaattttcttatgaaaaaaataaaaaatatatatacataagttagaaaaaagttataaaaataaaattaaaataattattaaaattaacataaaatagtgtgaggaaaaaatttttttaaaaaaatattaagagtaattttaaaaatgatttaattttatattttttttaataatagggtgtatttataattttatgtggtgcaaacagaactccccaagaaaaaatatgattttaattcattctttctaattttctatcactctcgaatttgatttctctcctattttcttctcttgctaccaagcatagagttagctgtgttattctattgattttttaataggagaaataggttatattataagctcggtaaatatgaatctcttaaaagagatgactaacataagcatacaagttgagaataaaatttaataggggtgtacaaaaatcgacaaaaaaacctaatcaaaataattcaacaacaattcaaatgtctaattgggggttgaatattattctaacatgttcaatgaatgaacctaaataaattgaagaaacaaatttacaatttattttgaaaaaattatgcatagtatattaaataaattatgtttaataattaaattaagttttattcactttggatttatggtgtttaatttattgggttttataattatttattttaactgtattttgatattaaagttgaactttattttattctttattttattatactatttttatactattttttatactattttttaaattttaaaattttttttttttttcaaatttacggtttaggttcctaaagtagttgcagggctaggtgcaataggggtttctatacgattnnnnnnnnnnnnnnnnnnnnnnnnnnnagttgcaatagaggtttctatgtaaaattttgtaaa

SEQ ID NO: 111431 - DNA, 3854 bp, Cannabis sativa
aaactgtatttttattgttttttctgtatttttattgttttttttttatttttattgttttttttttatttattgttttttttttattgtttttgttttttttttattgtttttgtgtatttgtgaaattaacccatgatttaatagaaggtccctattatttataatagaatgtgcactgatatacattccttatattattattattattattattattattattattataagtgatggtatttaaataattaataagaaagataataaatgtggaaaagattgtttgaggttaccaagaaataaataaactggcactaattatggagcagtttgtttggaaaggttaataaatgaggtggaaaagtaaaaataggtgacaattattgattagagagacaggattagaatagaaaaatttgggacaggtgattttttttttttcgctagaaaccatcatggagtggtgtgtgggggtgcatgcagctagataagagttctttgatgctctttgtgatgaagtgggagacagtgggagactgctgcttggtgctggaagttgctaaagagaaaagcttgaagtatattattatagagagtgattctaggatggttatcaattcgttcagcaatttggagtttcattgggaaattgagaactacgttaatttttgtaatactctcgattttttgcatattgtaatttttattttgttatttgtaattttatggcccataatgtcgctaagtgaactttcacaaacaattaatatggtcatttttgtgtttcttctattctgaacaatatcatttgcaataaccgcaaagtgtaatcatctatgcacgttttattttattttattttttttaaaaaatgactttaaattaatattttataataaattatgaagtagaccaactgtaatacaacatattacacccagaaaccagctaaaaaaaagtactaaaaccattaaaaccgtataacatttttgagtacttttttgtcgcaattttcccattttaaagtataactttgtcttgtgtcaaagaaaaaacaagtatacctttggcttattagcaaaaacaaaagtacacctttggctttattcaaagaaagatacacaagagagagtttaaaatgtgaaatttttggtggctttgatcattatggaggtcaaaaatgttttggagtccttgtacaactgtgatttggtgctttttacgttgaaaataaaatccaagaggagaaactactgtcgtttcagtgaaggaagcaaacattcatacatccgtccaatgcgcgatgttacggcgagcttatacccagtttggagaccaggctttcccaagtcaagaatgtcttcctttaagctgtttgaaataataccgctcattagttctgctgtccaactcatatttttatccttctttcttataatctaaaaatatgtaaataaaacagattgaaactaaccattgccattcaccgctcgcttttgcatgtcgctccacagcacggtataagcgatccagactatacaacatcaaaccaagcatgcattgtgcatcattttcctgtaatagcatgacccatcatgtttatgccctttcgtttacacagtttcttaaaatatataaaacaaagctatgcaattatattagatgtttaaatgaattgcaataggaacactaaaatttggagccaaggcaatctatcttcagttattaccctagaaaaaaaaatcataaatttcacacaatttcacgacaatcaaagcaaaaaaagagaaaaaagagcatcaaaatgtcaagtagtatagccaccatgaaacaaagttaacttaaactaagacagaccaagtaattccagcaagaaccataaaatccaaatcaacacaataattacactacatctgataaaaataaatatataaagttttgcattatctattctttgctgcccccttttttaaggaattttttttttaataataaataaataatttggcaagaaaatgatcgaatcgttcaggctgagatcacttttgctcatatgaagaagcatttgcatttgttaataggggtgaaaaagatcaaataagcagagtattaatatttgaaagaaaagattaaaaaaaaatgtaaaatttcggaatgaaagttcaattttagcttctcaccagtccttggtcaaggaaagattgatacatcataatccttttctcaacctcaacaacaagtaaccttctctggatgcgagaaactcttcctcttccttctgctctagtatcctgaacagaaatcaattacaagtctatataattggtcaccagaaacaattataaaatgaaaaagttcacattaagttcatttcagcttcccattttccatatggtaattttctaaagttcacatttaggatcctggttacatagttagatcaaaagcttgtaaggatgacttcaagagattagtagtacagcttgaaaaaagcattcgagactagaatgacagcagtagatagcggagaatatttggtgtgataataaggcttatatatccttatcttataatttggttcatcacaattgtcaatacatgttaaattttgattgtcatttcataaaggagaatattttgttaagtgattcttaaagtctcctacattcatactactcaacaggtcgctgacatttttacacaggtattgcatatgccttagtttgaaagattgcaagagaagcttggattgtatagtatatatcatccaacttgaggggagtgttgaattattcaaatgaataaattagtcaggtatagttagaaaataggagttagttggtttattctctcaatgtaatcttatgtgatgtgtacttttaagattatgcctaataaaagtaaatattattttcagtatatgttttcttcttgaaactaaatgcttttaactgtccaattttccacactctgaaatggatgctagctgcaagtgtcaagagtaattggataagttttgcatagtctgctacctgtgtataccatgcacgcactaacatcagcagaagaagagaaagaaagaatgcgggtaatgcagctaatatagcaaagttaatctcatttgccctgagaatctggttgagttcaagcatcgccctgcatataacattccgttaagcaactaaaagaagtgaaaaactgagaaattgaattcttttattatctaccaaagcaaagtttgtgaaactcacgtctcaatgtccagttttaacttctgaacctgtaatgcaaaaacaataatataaaacaatgtaatacaaatgcaccatacaccacggtgaccacatattgaaatcataattacctggatgagcagagcacgggccagctctccattaaggaggttctgaatgggatgcataagttccgtttcatacctatatacagaaagccacaaaacctttcaagtcaaacttctaaaattcaccaagttgtatcatagcaatattttacgtaactggcacatgtaaacaactcatcactagcatacaatggcagaacatcatttaagttacaaactgaaacctacctggccataactatttccagcatttcctgatctgatgcattctctggtaacttgttaccttttatctgctcactaaaagctaataacatcctgcaaataaacagaggaatattttaaatggagataaacacccaccaatcatgctacattttaccaaaacggaataagagactgtagaaaatagtgattcgaattgtgtgttgatttcatagaataatacatatttatatacaaagttaggagactaaatatctactaaata

SEQ ID NO: 111432 - DNA, 7362 bp, Cannabis sativa
agttttataactatttctcaactagctcatctcagctcaacacattaaatcacatacaacaacaacactataaaaggagtatcaaactgctcatttgaagttagcttcggtctaaccctttttgggagttgtagaagccatctagaggagaaataatgctcagaaacatgagagaaaaataaagagagttagagatatatgttgtaaagaaaaccagaaaaatagagggaagaaaagagaaaaggctttgagattacttgctggtttgtggcaaggaatctccaaaaccttgtaaccgatagtggagaatcaagctgcttagagggtcgcttgacggagacgtacctttggttttagagggaactccaaaatcaattattgtggtgtttctactcttatttttcctttcatttttttcctttattctctaacaaacaaaaatcaatttagatctttgtggttttcttgtgtatattttggcttggcgttactgcaagtgtgaaggaaaggggttgtatgctcaagacatagcttggagaataatagaggctagggttttagcaagaagaggagaaggagaaggagaagatgatttttggctactagggtttgaagagacaagaaagtgagctgctagggtttgcagcaatataaagtggtttttatactacctttaaacgacagtgttttgaggaggaccaaggcttgacccactttggggtagttggtgtagggttactttgggtattgtgcatttcctatagtggtatcagagctcggtgaagattcaacaacacctggaaataaagtcaagaaacaagaaagatcatcaaaacattgaagaaatcgaatctgcgattatcaagaaattaataaacaagaaaactctagtctaaaatatatcttgttacattcttacttttattatcttgttcaatttgattaacatgagtaatattagagtggatgttgacaagtttgattgattaggggattataggatttggaggaagaagattagagctcttcttgctcaaaacaaattactcagggttcttattgaacctatagaatggtcagaaaatacttctaaatcaacacaagaagaattacttgaaactgcaactggattaatcatttttaacttatctgattctattatcaagttagttgacaaagaagatactccaccaaaaatatagaaaaagcttgaagatcagtttcaaaagaaatctttgattaacaagatctttcttaaagaaagaatctttggttacaagatgagtactagcaagactcttgatgaaaacatagatgaatttctaaggatacatattgaattagaaaattctggtgaaaatgaggcattaagtgatgagaatcaagccattaagtatatggtaggacagaaattactctagatgaagtaatttcagccttaaagtcaaaggactagagatcaaaaatgagaaacatggaggttttaatggagaagtaaacttcagtagaggaagaccaaatcaaagaaaaccttaacacttcaaaagtacaagtcacaacagagttcacaacaaaggaaagagtcacaacaagggaagatcaaactcaaaagaaccacctgatcctacaagatgctacaactatggcaagccaagacatttcaagagagattgctattttctaaacgaaggaaaaccaaataaatataaatgacagggagaaaattctaactctagacctaatttttctaaaaataaccaagccaattatggtgatggttatgaaagtgctgatagtggtgaagtatatgttactgtatcatcttttaaaaatggttggattttagattcagattgtacttttcatatgactaatgacaaaagttacatgtttggttccaggaaatctaaaggagaaaaagtgatcatacggaacaataaaacctgtgagattaaagggttgagatcaattactcaacaaaagattttttactcttcttgcttggaggctgtttctagaaagaaaaaaataaaatgcaattagcaattactcaatataattttattttattttagcccttaggggatatttgagctactattaccttaatatttactcgagaagctgaacttgttcgaacatgtccaagtccaacacatttgagcacatccaagctatataggtccgaacatgctcgaacatatctgaaaagatcccaacaaaattattgtatctgagtcttttgcaccttcattcctatgctttgggaatctcctctaagtaacccttctttatcttagtgcaaaacaaaataaagggataaaggtttcaaagacgatcataacaaacaatagtcttattgagattttttctgaggtaagatttcagacattttcaaaggcggacaaattccattttgtttcggatgacgtagatcttaaagtgatagaatttagatgtctttaaaaaaatttatatgataaaaaaaatatttttgtaaaaatccatattttagaactatttctgtcccataaaacatttaatacaactaaatatattttaaactgaaatttataaacttgtgataaaattttgctaatataaatgttatatttggtgttattgtataaaaatatttttatatattttaaattgaaaattttcatgtcggtacttggtctacttatttcaaaaaagtgaaaaaaaaaattacatcaatagagttggattacgtacactatcttgttaattaaagaaaaaattaaggggcaccttaaggtgtcaaatattataagacgtgacagattggtacattttaaaagcgtgtcctatatattttaatttaataaataacataagaaattactaatcaattataaaataccgcatcgttatagtgttaggcgtcttaagttgcgaaatatcaatgttcataataaaatagtcacctctatctgtaatcacaacacactcttgttaatgatccaaagtagcaacaagaatagcccagctctgtgtccgggtactaattacaatatcaattcgttctttgacaaaatactcatatactgcatttattaacctcgatgtgtgggttttcagatctcttttaaggcgtaagaaaattttaataaaggaattgactatataggcaggcagacaagaagatggtggcttcactttcataagattaaaaacataaacaaatatgataacactcatgcagattacaaggaaaatgcacatggccactgcaggtaacaatgtttgactttttgttaattaaaaaaggaaaaacacaattgccaaaacaaaccacacaaaaaaagatgggctctttggcttcttccttggctctatatcctttaacaaagccttagtttcagacaacagtcgagtaactatgagaaaccacagtgaaccctccatcgataaccaagttgtgtccactcacataggctgattcatcagaagcaagaaacagagcagcctctgcaacgtgccttgtctttaaagttatacccttcaagttagccaacgcagagctattagcttcaacttcatggggttcaagatggaaagctttacaggccagaggtgttcccaatccgaaaggcgaaacgctgttcactctaatcccataagcgccaagctcactacaagccgttctgaccaaccccacaagcgcatgtttagagatcgtgtacgcgtgcggccctgttcctccaagggatgcagacacgctgctggtgcatatgagggagccacggatgttacgggcgaccatggcacgagcagcgtgcttgaacgtggctgcaacgccgcgtacgttggtggccattgtgttgtcgaaggcgtcaatgtcaaggtcaagaaatttagtcagagggcctatgataccggcgttgctaaacagaacatcaaggctgccatacttttctaaggcgtagctcactgttgcttcgacttgtttctcgtctcttacgtcgcagtggtggtagctcactctctcggagtctatggattgaaccacctcatggccaagctcgtcttggacatcgacagccaccacggaagctccattggccacaaataatctggtcgtttcttcgcctataccactggctgcaccagtcacaatagctacttttcccttcaacctgagatttgctcacaaagattatactacaattactacacattaaaagcagcagaaaaataaaaataaatggttgatgtttatttagatagatcgaataaaaaaaaaggctcaccttagagttggattattggacattttctttcgatgagaaaagcccaaattcacaaattaataataaggtctctccttggatctgctacctgttttataataccttatgtttatggtggttaacattatatatatagttattattgttatatagttaaagtattataccttttctaagtttttacatgtgaagagagtttaatttttgacgttatagatgtataatgttttttttatctaatatagatgtataatgtcaatttctatgtgtcctgcttccaaatctttcattgaaaggctagcctccgccggcaacatttattgttagctatatatacatacagtgtagaaattttataatggtactttgcaaagtaattataataaaaatgctattttgctaaatactccatatgttttatggcctggccccacacgaaaattcatttctctttgtttaataataagatctaaattcgtgaaaccatgaatacactttaattgagttaaccattgcacctcctcaaaggttttgaatctttgaccttgaaaatacagaaaagtattaaagtttaatgcatcaaaatttgatgattgtcattgaatagtgattaattagttcaacattttaagcaacatacatgaacagtgtgttaatatttgcttactaaattaagcacattccaatcttctcaactttgtctaaaaagaaaaagcagttggctttttgttgcgtgggagtatagtgcttacataaataagtgagcgcaggatccgatgcccatgtatatataaatatcccatcatatcatatcatagcatcatataggctctataggctgcggtgctcgagcagcattttgtgaaatctccactctccaatgctggacattaaagaaaagcttcctatatatgtagagacgtttttgtcatttatctacaaataattattagtagcacttgatgattgagctcactaacgatattagcctaagagagtaattctttatatacacatcttatttccaacatcttccaatcctaccaaacatcattttgattcaaaactctcgcggagcagaatccattcctgctgtagatgtagtcttctactagggagggacccctactcgaaagttagcctcaaagtagttatttctcatatttttatcacgcatacattcctaaggagtcccatatcataatgaatctaatcccatattacaacttctaggatactttggatggttttaaggtggattattttggatcctcagtagccctgtacctgttctgtctctcgataaattctcatttccaaagttcaatttagggtcaacactacaacgtgggccaacttgaaagaatttaaatgggcttaagcccaactacaatttcatattggagaattttcacatatactacatatttgtggtttttcataaatacttagttttttcttttacgtattttttatttatccactgttctattttttatcctttcaaaaatacgacctaatgtttttttttttggtttacgtattccacctaatgtttaaaattatactatttcgaagttctttattttcaaaagtatgatgttaaaaatagagaaaataaagggaaaatgtttttggaaaaatctcagctcaattaatgagagttcaagtaaaatctatttgtaggcaaggtcaaagaccaaatacaatagaggagcctaaaggctcatttactgtaaaacaattctaagagaaaaggaaatctctcgtacttctcatgattgtctcatcattacaattataacggtaatagctcatagggatcaataatattagctgccaactaacagtgagccacctgtctaatgcaggactacactaaaccagcacaagaaaacaaaagaaaaaaagctcatttcttcacatcctctctcaaatgcaggggtgagttcatcactccaagtttgtctattaagaaatagaatcttgaacttgacaatccctttggttagatgaaggtatatatcttatgtccagctctttgttcaagactttgtcacgaatgaaatggatgtcaacttcgatgtatttggttctggcatggaaaacagggttggaagccaaagcatatgctcccacattgtcgcaccaagtaatagttgtaggtgttcgaaaatcacgctctttgagaagagattcaatcaaaaaaaaaaaattctgctgcaacatgagccaaagcacgatattctaactctgtgcttgaccttgcaactacaggttgcttcttggatgaccatgacaccaaggtgttgccaaaataaacactaacctgttatagatctcctatcatctaggcaacatgcccaatcaacatcacgatacctagtgatatacagtggctcatcacaactaatgtggagacccttatgcatggttcctttcaagtatcttaagactctctttgcaccactcaaatgaacagttgttggggcctttaggaactggctaagcttgttgacagcataggaaatgtttggccgtatgtgagatagatattgtagaccaccaattatgcttttataggttgcaggattagatagtaactcaccatctattaaagacattggtttccctgttgtggcaggtgttggacatggctttaggttggtgaagttagctcttcgaatgaggtcctcaatgtacttagtttgtctcaagtagaaccctgcctcatctctaaaaagctctattcccaaaaagtaatgttaagagccaagatctttgagagtaaattttttgttcaattcagtaaggaagtcctttaatttgttgttgttatttttgttggatcttattttactaggatttagatttactaacatcctaaatatgaatttcctaaaataatgaaataaacacatacaaagttatagaaaaccttacattggtggcagcggaatataatggctcattccattcacctttctgtggcagagtattaccaggatcttgttgggttttataccctaaataaaactcaaattcaatgtaatccgtattattcaatatcaataaagaaacaaaagta

SEQ ID NO: 111433 - DNA, 2604 bp, Cannabis sativa
  modified_base (2052)..(2065): a, c, t, g, unknown or other
aaattgtaaacttttgtccaaaatatagtatttttataaaaactccaattattttttttattgtaaattattttattttttcaaaattttgcacacataaaagaagcacacatataatatattgtttgaatattatttttgacatattaaatttttaaatttcttaaaaattttaaaaatatcttaaaaaagaactataatatgcactaatatataaaataaataaaattaaattatctgttatagaaaaaagtgcattgatacatttatttttcagagtgcacaaaagaatatctctatattttttatgaaaagaaaaaaagagaagttaattggtgtgatgtgtaggctttgcaacatctatttctttaatattaatttagatggcgtggcaaaagaatagcacctaaaagtgagtactttttaaattgtgttcaatattttattttatgtttgtttaaggtgattaaaattaaaataatggtttcctcgagtttggagttttgtgtgtcacacttgcacatattcacgggcaattctaattagagaggttatattgggatcttacaaataatattctcaacttttataataaaggttgaatattgttataataatatgtacaatatttgaatgcacatataaaatataaaaaaaaaaattgtggcataataattattttaattttttttctttgttgctaataagtaaccaaaacaataatactcaaggcttcattttttgtactactgctaattctattctaacatttccgttaaatagtaagaagataaactaaaatttttgattggcaaatatgtataattttcaattttttttattaatgacaaatgaaatcatgttttaaaattagatccattctgaaacaggatacaatttttccaattaatcaagagtgaaaaatggtgattgaatattgtttattttaggtggagaaagaacgtagaagaggatatttgattatttgttttttaattaatttcttttagttaatttatgaatagctttttataaaatttataataaatgaattttattattttaaattttgaataaatttacatattttctattgtttctaaaatctacaatacaatttttatttttctaatttaaaaccaatttaaatgattttattttttaaaaaaattatatgagataagctaataaaatagtgacgcgtggtaactctattagcattaaacgaaatgattagaatgagtactaagggtaatacaaaaatatgaaattttgattattattagtattattgcaatttttatgacagatacttattagtaacaaaacaaataaaataggcatttttactacaaaatttcctatatataggagataaaaatatattggatttgatcaaattcttaccattctattcaatctaatatgcaaagtgtacggattatgtagcagattgttttgttggggatgtattactgaaaagtgcttgcttgaggtggatccaacattccaagtttcatcaagaagtgtatatagttttatgggaagctaaaatatatattgtacaattgtttgtaaagagaatttaaaaagagatttgtgatatattttctcattttaaaagaaataaaattagtagaaaagatagaatattcatggtttgaaaagttgagtaatctcaactaatttgtcggatgtaatttgattcttgagcaataaattttcttatttactaaaaaaagaagtgtagagattataatcatattggattaaaaaatttaaaattagatgttgatttacatctaaaaaataattaatctaatttaatttaaatatttaaaaaattaattataaatatattaacataaaaaataaatttaaaagtatattaaataaatatttgtatgtaatgaaagcataatttaaaactaatatttttttctaaataaaactaataaattcttacacaattttttttctttcgaattttgctattattttttgcttttttattttgatgtgttgttaaagacataataataataataatannnnnnnnnnnnnnaataataataataataatgttatgtttatagttcgagcagtaaatatggtcgcgatacatatataggaatccaaaaataagtaggtttgcatattaaaaagaatgagtgtttggcagctaaaccttctaaactatgattttacttgcatttaaccctttaatctcaaatattggtggtaaaaccctccaaactattaatctgttagcaaatttaaggtatcatccatttagcacagttaagtgacaacataaattgcttatgtctaaacttttttacacgtgtcatgtttatattgggccacataatattattatttaaaatacatttcaaaattcattttaaaataaaataaaataataattattttaaaataaaaaaaagtcatttaaaataaaataaagtaatttaacataccaaaaatcataaaaatcaaaatccaattttttttcatctatctctcaacaatcaacactaggggtgttcatccgatccaatccgtatttttttggtcaaacaacatccaatccgcactaagtgc

SEQ ID NO: 111434 - DNA, 2315 bp, Cannabis sativa
ctcaactagaatggggaccatgggtctatatattcgagcttccaataagtagatcaagaatttatatcttaaattcacttgacccattcaaatcacttcgggatctggttcataataatactcctagttattattgttataaccattattctcaagatcatcgttttattcatcatgttcctcctcattaatgggatcctcatcaaaaatttatcatgttgttaattcttcttggcagggcggctatccacttctgacgtctctccatccccaacaactcccatctttgcgtgtgtggtgggacaaggattaacataattcttggtggtattcccatcacgagcgaaaagtttgttaatggtggttctagtggttagcattgttgtagtgtacaatgtcggtataaactttttcttcaactctcaatgaaagcactaaaatatatgtcgaattttttggaaactgatttaaaatataataaatttaaagaaaataaataaaatataaagatcaagaagagaatttttatgtggtttgagtgttaatgaactctagttcacgagtcgatattatttggctagaaaaacctttgagtattacacaaattcttgtctggtttatgaaccctagacttttgccatatcttgtaagaattgaatcttgaaccctttgaatgatggggttttcttatatatatataggctagaatttgcatgtaaacatgacccactaatgggtaaatacaagtattatattaacattggccttgcctgtgaggcaatagttatctgtacatgtggaatttatctaatgatgatcggtagaaaatgtgcaccatctttgcatgtaatatagataatttaataatttattgacaatcacaatatttccttttatagaatgcatgatttatggacttgactctggacatacaaccctaatatgatgtgattcggtattaaatgagctcccaatcaacattgatatctagatgcatattaacagggtcggccttaggctaaggcggactaggcccacgcctatgacccactcctattaagggcccaaatgaaaacaaaaaagtttttaatgaatacacatttttttaataattttaaaaatgtcatttatttgttagaaaaaagacctaaaaaatttatttttctagggcttaattttactcagggccgaccctccatattaattacctttttagaagcatcgcttcaagatatgcagatgtcctctttgttggacttttctttcgcctggatgagattttactttggaacgcgaatggtctgactcctttattgagcttactccattatccagattgggcaggcaactaggcctgtgttgattgaatttggatcttagaattatatgtgtccctcttttaaaaatatggataacacttggccatctaaaaagcaatccattgttgctcgctcgagtacagaatctgaatatcgagctcatgctgaggtagctgctaaaatcacttggctcgaatctcttcttcaagaaatctatttcactttgccatcaataccagtggtttaatgtgacaatatgagtgtccatgccttagcctcaaaccctgtttatcatgctcgcataaagtatattgagctcagtggcggacccagaatttaaagttcagggggcgtaattttttttagtaaaagcagggagggcaaaaagaaaaaataaagtgtagttagtgggatttgaacctttacctctaacatatttataatctaccttaaccattacactaagcttactattatatatataaatatcatcttttaatacaaatatatgttgtaaccaactaaaatacatatacattcttttcacgatttttttttttcaggggggcaactgccccctctcactacaatgtgggtccgcccctgattgagcttgatatccactttattcgagacaaagtcccgttgaagaagattgaagtctgatatttccaaactcaagaactaattacaaatggccttacaaagggactcactctataatgaccacatagatatggaaaattaataataaactagtattatagttaaatgtggaataatatgtgtaattagaataattatgtatagaaaatttatattatatgtgtgacatatgtatatgatatttatttaatatgtttatgatcggtaatagtgaaaactcaatagattaggaaaaaattcacaacggtattattttaacagtttagatgttgggttttatgccctaaataaaactctttacaatatgattagttatcaatatgagaaatt

SEQ ID NO: 111435 - DNA, 1668 bp, Cannabis sativa
  modified_base (49)..(61): a, c, t, g, unknown or other
atttataactggcccaaatcgggaattgatttttttataacaaattagnnnnnnnnnnnnnatagagtattcttaaatagaggttttactgtaccactgattttttcaaaaaaaaaaaaaaaatactactagtattttttttgtatttctcttaatatatattcatcacaattttaaataattttttgtattcacaattactacttcgccaagctctaataataacattggtctagctaattaatcatatcctttcatccttaatattttcttaatttaataagtgttaaaatttaggaagaaggtgagtatttgataattaaggtaggtttattttaaaattaattgataataaaaatagtagtttatgcattctatgcatgctattatatttctactcattagtaattaatgtgaatctatttatgatacactcttcttagatttaaactttgaagtgtgagtacaagatcaaattgagaaatttgtaagtatacaaggtgggaaattcgaggatacaacacaaacgtttaattgcgggatgataatatgttagaatttaggataaaaatgcattaatttctatttcaaaattaattgacaataaaaaaaaagtagcttatacatcttatatataatattatatttctacatattagtaatataagactatttctaacaataaattaatgactatttaaaatttgtatccctcaaatattaaaactataaaatcgtgttcatagaaattttttatctattaaaactttttttatttttagtcacataattttattgtgactaaaaattagattttttgtagtatgaagaaatttattttgtaatttgtaattaataaaaaaaataattttttgaaaaataattttttatttattggtaattaataagaaaataattttttaaaatttatatttacatgtgcggtgatgatataaaaataacattttaattacatcaatatattttgttaactgcataaattaaaatttaaaacttttaacacgatttaaaatatagaagttggcgaggtggaaaaatattcagaatagagcatgatatgaaaaaaaaattccataaataatttatttaaggaaggaaaattagaattgataggaattttgttaattattgttgttttgttacgtgtggaggaataaagaaagtaataaagtgagatgagttgctcgtgtgtgttaagagaagtgggacccacgtgtgttattagaagtcaacataaaaagagagagaaagtcaataaattaaaaaacgtggggacctatttcaccttctaccatgtgatcctgttggtttgtcgggttttgtaatgaaaacaagaatcttccttttctttattaaaaaagaaaaaataatttattattttaattgacagactgactgacacgtggtggactccacccgttttcgctcgcggtttaccgttgttagtcagttaattcccgggatttccgcctcttgtctccttacttcttctaattacccaaaaccaaatgggaattgctaaaacagaccaaccactttaataatagggaaatttataaaaatactagaatttaagttaatttttacaaaaatactgtcatacaatttttttttcaaaaatattgtgtttttataagacaccagtaa

SEQ ID NO: 111436 - DNA, 7824 bp, Cannabis sativa
taaattatgtttaatagttaaactattttacatttaaagtttgtattttatagtgtttaatttaaaatttagaatttataattgataattttgattgcgtttgaatattgaagttgaaatttaaaattacatatgagtatattttttattctatttttttaaaaatattatttattcaatttatatttattttttaatattaatttaaactataattcttttaatctttaaatgtgtatactatacattttttttattcaaatcaattatttgaacatcaaaaactaacaataataaaaaaaaaataaaaaataaaaatcgatttaaacaggttaacctaaccaaactgacaaaaattattggacgggttacactttttatattttttcattggacgagttataattagatatttacaatccgatatttatattgagttggtaaaaatacactgtaaccccaccaaaacgacttatatacactcttagaaagtaaaattttagtaacacattttaaaaaataaagtaataaagatatagctatataaatattttcacttcaaaggtatcacattgctacttattgtgtacttaacaattttaaaatatgataactagcctgaaaagttaattattgtctaaaacaattttaaataaatattttatcttaccttaaacttttaatgcaacataacattttgtttaccaaattaagataattattcttttcaaaaaaaaaaaaaaattaagataattattgtaattttcttaacacgagacataattaaatactctcatgattttatggaagctactccaatattaagcatccatttatagaaattttattgtaaatggattcacatccataagtttaattatgattaatttcataattagaaacatagtcacaaagttgaatataacatatgtaatttgacgattaaattattatgttttataaaaatataattatgttagtatacttttcttcaataatgtaaaaattttgagagaaagtgttttttttttttcttttgtaaggttgagagaaaatatttttagttacatattcattgcaaattctacattttgttttaaaaggattattatatatacacataaaaagcaaaactatttttctttttttaaaaaagaaaaattagttgattttttttatttgttttacaatcatatacacatatttaaattattatgccaatattttcactttttttttttttttgaaagggtgtagttttaaacattaatatccatcctttttagggtcatgctaaaaaaattagtacatgattttttttttttataaatagaattaattagtacatgatcaaaccaaaagaagtaagatgtaatctcttcccggctggtgcatgcatgtaaaaaaaaaaatgtaatctcttgcctctttcacaaaaataaataaataaaataaaataaaatagatgtcatctatgttgtaattattcctattttgtaagaacattgagatcttcccttaaaaaattgagattcctttcctttcttaaaaagaaggaataatattgagatgaggaggcccattaaggaaaaacaagcccaaactaagcgagtagagttgatgtagtaatcgagcgagtgggggtacaatggcgccggttctcattggtggaagccgtttagtgagctgtataaaactagatcccaaaacgaccacacctctctccatttctcacctctccactcactcaactcaactcgctcttcaaatttttctttttcttcctcttcttcttcttcttcgtttttagggtcttaccagggttttatgtgatcgaattttaaatatttttttaaatttaaaattgcttaatttttctttgttcaattctcaatttcgaatcacatgtttcggttcaaaattcaaaaaccctagtcagctctccgttttctagggttgtcgattttttctgcagtttaattccaattgtactctattcttgtacgctgaagttcgttaattctggtaagactctcgaaattctgctttctttctttcgttcttcccatttctggatctttcggctttctttctttctctgtctctgtgcttcgtatatacccagaacagggattttatttattgcaacgggaagattttgaattttcctgttctttggcttgggaagacacctgggtcggtggacattttcgactctttcaactgctctagatcttactgtatttgttggtttggatattcaaagtgggggattttagattcttgtactttctgtttgcgaattagtcaactcgagctgaattactagaaggatacctgggtcagtggagattttgggtttcatgagctgtcttatgatacattgcgaagagctcgagtaaatgggtttaattatgttggcccaagaaaaagatgaatgatatgaaggatttgaatatgaaccatggagatgtggatggtacgagagtgaatgaacaaggaggagctgcgccaagaagacctggagctgacgatttcggccgtgcggtatctaagattgtagttgctcagatatgtgaaaacgtggggtttcagagctccaaggagtctgctttggatgctcttgctgatatagctatcagatacctatgtgacttgggaaagatggcgtacttttatgctaacttaactggaagaacagagtgcaatgtgtttgatattattagagctctggaagttttggaagcatcacaaggttttgtaggggcttcggatgttagccattgtttagcaagttcaggagtggtaaaggacattgctgattatgtgagctcagctgaggagattccttttgctcggccggtgccacggtttccggtgctgaagaatcggagattaattccaagttttgcacaaatgggtgagaacccacctggccatcacataccatcttggttgcctgctttccctgatcctcacacttatattcacacccccatgtgggatgagaggaatgcggatcctcgtgctcataagattgaacatgctaggcagaggagaaaggctgaaaggtctttgttgagtttgcagcagcgtttagtctgtaatggctccttgggcacttctgcttctgtctcattacctagtgctgaaaatggattgcagcaggttgaaagaaacccttttcttgaaccacctatgaattcaggggagatagatgtttctccggttgtctgtccagagaagctttcagacaagaagggaaaccatccttctgttctagaggcatttgcaccggccattgaagctgtaaagagtgggttttcagacgatggagaagatgagagaaaaattcttcctgatcctaatgtgaggtctgctgttcatttcaagttcagaacggccaagaagtactttggtgaatctttggatttgaaccttcagaagaagggtgttggcagacctgcctactggtttgggagggacgatgagagggatgataagaagaggagggctgagtatattcttaggcaatctatggaaaatccacaggaactcaaccaattgtagattaatcttgttgattggcttttttcatgggcattctgtttcttagaagttggtattagaattgggatctaggatgtcataagtggatatactgttatcgataattctgtagtgccttacttacttgtagtcccattctaacaattttttttaggtaatgtgaattaatttttcaactccatttgcgttttaatctgtgaactatcactattttgcaaatttgcaatgaagtttatgctgcttccatccttacaaaaatgtggttcccgtcccctcaagaaattctgtaatattgaaattgttaggtgctagttgttttgtgtacttattggcattcacagtggagaagatagacagtgctcagctgggaatggtaagcctccaaagttcaagttcttgctcttaccagccaagtttagtttgtcttttttatttcatttttattctctggtttatcattcattcagtgttcatttgttcatatctaacagttttaatcttattactgtcagtctatcattcaatgaatcctgtgaacttactccatgagcctttttttatgacaattcgaatgcttgataatggacgaagttttctctgcgatcactgaaatgtcaacatttcattcttctaaggtctctctcttttcccaaagttacttttatagaaaattgcaagatggttatttggtaatcatgttgaaattccatttaatcacacatgcaacttttcttgtggtaaaaaaatatcataaagtatatattttttaaatgattattttgtttgtgggttgattttgcactttaaactttcatgacagtatatgttggagtattctctctggtttcattgcattgccattgtctaatacttgaaccgttaatgacaggttctatttaattttctaagctactatatgtgatgaaagataaataaataaacagttaagtgtttgatttaatttcgatttcataagtcacattttaggtttggtttggttgcttcaatgttggaaaaagtgtgaatgcattttttttttctaaaaaaaatacatattatatatatttgtttaatgattttgtagtttattaagaaaatttcattccatttaacttgcaattttttttttctaaaaaaaaatatatattatatatatttgtttgatgattttgtagtttattaagaaaattccattccatttaagttgcaagttgtaaatattttgttatatttcattccatatatattttcattagtcaaaagatgctttgttttaggagcattgctattaggcaccagtgacatctaacatcatcatgcgtgacaccttaataatagttagtatattctaaaatagttattaactaaaatatgtggggcctgtaatttagttgcagctgtagccgtagcggtatcacacctcatgatggtactcaataccactggtgtcttttagtgtttcttttaatttagagatgaggtgacatgttttggggtagttatttcactatatgtcgtagaccaattcgtgtcgatcaatttgagtttgtgacagacgatagaccaactgtttttctcacttagttaggaagaacaagaataaagagctgcatgacaactattcattggctccgccaaatgattggttgacttttgagaggagatgctggctgttattttgagaaagggagtgtgtgtgtttgtgatgtacaaatctgttaggaggtgagagaggactgagaataagactagtgggattagaaatgctatgttgaatttggtgtaattaatcagatgttaatacaccaataaaataaagagaaggaaatatttttgttgaagtttaagtggattaggacattgtttcttctaattttgcaaattacgttagacaactgatttcctgtcaaaaatgtatgtgttataaaaaagtttattgttttcatgcatttgctaagctacctaaggtgaggtttttttttttttttttctctttaaaggaagcctaatttcttggctttactttcgtcaactgaattatgtataatgtgtggtttctagacgggatgtggtcaacttagggtttgttaggactttaattcagatttttcttaccccctttgaattaattcaaatagttcacctaaaatttcttgtatttagtgaaaccttatgtgttccacatcggcttgaacttgcatgaaaatatagagttgcaatgcatttagcgagtaggtggagtcaggattcatcatgcaatttgtggtacactttcattcccataattttgcaattaaaacatagtgtggcctcctcagcgcaaatattgtgcctcagcagcctggtagttgttctgactagtatatatagtgctttttaagattagacattatgtgatctctagtctgtgcaagttaccgcatcttgtgactatttttgggattctcacatgatgcattgataatgtctttctgcgctatttttacctttgtttgctttgtatttttcttttcccaggtcaggatttttctatcatcttgtgagaatgaagcaccctggtatgagagtgaaaggactgatgttttcatagtggcggatgttagctgtgtagcaacttttaagtttgggtaacggtagtgaagatttttgattaatgcgggttccactgaagagattcatttgctctggtgatgaagaatcagagagtagttttgtacaagtgagtggtcaagctggaaaatcatcatttagattaaaagaaattgaggaaaacaaatcctttttcatataacttaagccagctaccagtaccagacatgcttgttctgtaatgactcttggagcaagacttcagtctactttattgaatgctggaaatgatggaatataaatcttcctttggtagtttccagtgagacagaaaagggaaaccatacttccgttgaagaaacactcacactggtcactggccattgaagttgaggcctgtgggttaggcagattctccatcatgacataagtcctgctatgtgaagctaagaatgcctggaaaatatttggatttgagccttcagaagatctgtgttggacctcggtttaggaaggatgactggaagactaggactaagtatattgttaggccatcaataaacaggggacttccccaaattgtgatatgggacctgtaattgcttacttaatgtcccaggcactcgtatttttaagattagatacttatgtaatagttgtttgtgcaagttaacgcatccaaagagaaaacaagaatctggtagttatattggtactatttttgggttttttacatgatgatgttgttgacccctttctgctatatttttattattgtttgcattgtatttttcttttctcaggtcaggactttgctatcatcatcttgtgagaatgaagaagcttcctgatatgaaagtgaaaggccaagaaggtacttaactgttgaagattgcagtgccccatatctaaaattgtgggttttctgtaggcaaatttttaatctaatgtgttttatatcttcatcaacgttttggaagcatcacaagggccctccatagcgacggatgctagctatgtagtaagtttgtagcattgtgaagaagattgttgattaatatgggttccagctaaaatgatttcatttgctctggtgatgaagaaacactgatccaatcctagttttgtgcaaaagaaagaaaaagccaacatttcatcgaaaccaattcgtactatttcgctcatagtacatttgatttgcactatttcgttatagtatattcgatttgcactaagtacgaattttatattttgaatccaatttaattcgcataataactcaaatctaatgcaattcgcaaaagtacagattgaatcagttttattagattgttactttttaatatttattaatttttttttcttataacttataacaaaataaaacaaataattgttgttttatgtctctaacaacaaattaaaatgtagaaaacaaaaaataagaatttcaaaagaagaaaaaaataaattgtatgtataaaaaaatatttaattttattttagattatattttctttataaataaggatataatatatttgatctactaaagatttaaaatatatttgtatgtgtgcacttttaatgggtattacccatgaatgggtaaaattagaaaattttgaattttcatgcttgatttttctatctaattataaaaaa

SEQ ID NO: 111437 - DNA, 14315 bp, Cannabis sativa
  modified_base (343)..(349): a, c, t, g, unknown or other
  modified_base (1560)..(1567): a, c, t, g, unknown or other
agggcacaaaacccaacaattgctagagatgtggttatggcagccaagaaatcaggggtcgtgaagacctatcctcaattggacttagctctcactgttgagggagctgaaagtttaatttgtaaaaagagtactcagaggaaggacatgtgaaagacttcatttggtactgagtgagtaaaagctttagccccaatgaccgaaaaaggaaaccagatggaccaccggttgtgggtccaaatagaaagttttaaggtaaccagggtttccgttgaggtagaaatgaggtttggcaacctgaatgcccaaaatgcaagagacaccacttgggtgaatgccggtnnnnnnnttgctaccaatgtggagtagcaggccattgtcgaagcaactgcctgcaactacagaagcccgagactaagaaggagagtcatatggttcctgctaggctgtttgctttgacccagatagatgctgaggctggcccttcgactgttataggcgagatatctattggtggtattatgtttactattttgattgattctggtgccacacattcatatatttctagtagaatcattgaaaaattgagtagaccatgtgatatcatgtatggtgggtttacctactggagaagtggtaatccccaggaggtgggtaaggtccctcccagtgttagtagaagggagagaacttttagtggatctaattgaattagacttagaatattttgatgcaatactgggaatggattggttaacaaagtacaatgctatcatagattgtaaaaggaaaatggtaacttttgaaccagagggtgagaccccatttgtttttatgggaaaggttcagggaacttgaattccaatgatatcagcacttaggactagggaattattgtgagaaggatgtataggatacctggctagtgtattagataccacgaaagatatacccgatggaccggagaaggttcgagtagtatgtgaatttctagatgtgtttctgaaagagttattggggttaccaccaaagagagagattgacttcgagattgaattaataccaggggctgagccagtttctaaggccccgtatagaatggcaccaacataatttaagtaattgaaagtccagttttatttgcgattcacgaggttgagtacctctccttagggtgcaccagttttatttgtcaagaagaaggacgagtcgttatgtatgtgcattgagattaccaagaattgaacaagttgacaataaagaacaaatatcctttgccaaggatagatgatttatttggaaagaccatcttctctaagattgaccttcgatctagttatcaccagttgaggatcttggaagaagatattcccaaaactgctttttgtactcaatatgggcactacgagtttctagtgatgtccttcggcttgactaatgcaccaaaaccatttatggactgataaatgtgaaaatatcttttaggaattaaagaagagattgattgccgcacaagtcctaagcctgccagtcagtgatgaaaagtttgtgatatannnnnnnncctcaagacaagttttgggttgtgtgttaatgcaatcagggaaggtcattgcctatgcctctaggtagttgaaagactttgaacaacgctaccctactcatgatctagaactggcagaggtggtttttgctctaaaggtttggcatcactaattatatggtgagaaatgtgagatttatactgaccataaaagtttgaaataatttttcactcaaaaggatctgaacatgaggcaacaatgatggttagagttattcaaggattacaactgtgaaatcctctaccatcccggcaaggcaaatgtggtggcagatgcacttagctggaaagggccagggcaagtctacgagttgaaggaaatctctccaagattggccaaggatatggccaaggctgagattgagtttgtagtcgggaagttggaaaatattacgtgcagtctgatttactagaaaggataaagatttgctaataaaatgatttcgaattgatcgaacttagaaagaaagttgagattgatgctacaaaggatttcactgtgactccaagtggactactgagatataaggatagaatttgtgtttcgatagatgtatcatgacataaaagtaatatattagtggctaggaatgaagagtgatattgttgaatacgtttcaaagtgtttaacctgtcaacaagtgaaagctaaacatcaaaggtcagcaggtttacttcagtctttgaggatacctgaatgaaagtgggaagacataaccatggacttcgtagtaggtttaccttggactattgggttacatgattctatctgagttatatcgatatacttgatataagataatggatcctcttttctcatgtacatctttcaagtgggcatcttgaacttggtcaaaagatcaagagagttgatctttcataaaatggtgaacctcttgtttgatcaagctctagatcggtgagttttgggccaatcaggacttgaatgaggctcttaagctgatccaattgggcttgcacccctagatcaacttgacctgcttattgattgacttatgtcacttcttgactctctggagcatcaaaatgtacacattcatccctgttttgtggaatatagttctccacattaattgtttgactgtcaggcaaaggcacaaagtatccttcctggtttcctctcctatgatttaaattgtctcaaagatcgatcttgggccccatgtttggaagatagcgttgcatggagctcttctatttggttggctcgtagaccgagtggtctaggaggattagcatcgttttggaggatcttcctaatttttttcttaggtacgaagattatcatgacaatagttattacattgtccactatgagctccaccatcattcttgctcatgtatgactgtccactgtgagaccttgttcgaccacgatgagttcgctggctggcatacagacactttccataggcttggacccgtctatcttgattgtaaactgccacatgtcctcgagaccttccagctagtcgaggaggtgcatcatccttcctccctttaggctagggtaaaaaattgtgttgatcttctcttccaaggtagtgaccggtagaacttggtcatctaccgagttgccaatagtttgattttggggactggaatcggaaggtctgtcatgattgcacataattagttgggcgctcctcccagccttactccagtcctccagggggatgtaaggtgccttttcctgattagaatctcttctgagcggtaggttctccaatgcctatcccccagtctgttgatggaatcctctgatcaggtcagtagcctctcttaatcatcggttaatccccgcttgttctgcacgcatggattcagcttgtttatccatccactcttggaattcacacctctgctgttcaaacacatggttcattacagcacgtgtttcttcttgattatggtggagggcattggtgtgacatggaattgtcccaatgcatccctcagaatctctatatcagtgttttcccccaaatcaacttggggttctcccacaaatggatgtccggtgcccgactcagtttctccagcatacgcatggctggtatttccattttctaggacaccgcgcgtcaccccagtgagggaggttgtaatcgtagtagttctgaagttaacattagcatgagtagtgggaaggtttccccaaggtggcagtcgtgggttagggttgtctactcctaagtcaatgggagcttggacgttaggatctgtcaccattgtatcacgttgctcagttgatgaggacctccttctaagaaccatcatcaaagaatcaaaattttgaaaggataagactgtgttcctttgctttcaatcaaagcatcaaaatatggacatcgcttttagcgaacgacactgagtctttaaactgatgaaattgaatgatcaattaataataaaacaataataaagtgaggcaataagaacaccagagatttatagaggttttggccaagtgataatggtaatagcctactccccttttagttgtattacttagagaattattaagatcacaagattcggctaggtgagtttcttaataatctcgagaaatcttacaagtattttttttttcagaataattactcttcaaagtgtaaaaaagtagtccttttcttaatgaaaagctttactatttatagaggaaaggtaatacatttaagtcttaaaaaataggagcagtaaattaaattctctattttggtgggattggttgaagatcagctccaaactgcccatcccacgaatctcattctagtgagttaatcccaaataaataggaattccagttgttatttttgtgaaaataacttaaaagagaatctggagaagatctgcttctcttgtatttgtatgtacggacaattcaccatgcgcgacgtattgtgagatactagttccgttcaaagaatagttgcaggatagctttacttaaatgaatctaaccttgagagggatatggccgacctatttgggtaatattctctaaccagctcttaacatacctgccactttaccttgtgcgaaatttgggattacaaattaaattctatggaccactaaaaattaacaaatgtgtatactatgacatgcttatttggcatttaacataaatttttggatggagtggtgaataccaaaacataatgtaaatttagagagttttaacttaaaaaaattcaagattaagtgttacaatttgtatagttcaagttttactttaaagtactaaatgtaaaatttcatactacaaggtaccaaataaacattattaaaaacataaggtattaattatatttttcgaaaaaaaaaacacaatactaatcgaatttaaaagattcgtgacaatggtgaaataattcatgttagcgctgaaactgaaagtcatttggattgagacttcactgtttatattaagaagaaatgcctcattgtcattggatgccccccaaaatgtaaaaatcttttagagttaaataccatgattgaagctattaacctagttatcaattatcataggtaaggaaagaaattacaagcacaattcagggaagtgactgagactgccacggcccacgcttgccttttctttctgctcaagtgcgtgtcttgtcaaacagaataagatatgctattgtgcccagcactccatatactaatccaaagtagaaaggcatattaggtaaatttcaactctcccagttcccacacatcaagccgagagggccccccttattgcaatcagacgacaaaggtataaaatttattagaggtgcccattttctcttttcatattattctgaatactcagtacttgttgtcttgtggcagtacaagataaaaggatcatacaaaagataaatacgattccaagactttcataaagctctactttttatttgaatataaacactatcacgaatttatagatatcccacatttattcttggagaaatgtacaaacaatgcaactatgatatctttctaagtccattttatgttggctgttgccagctcagaaacattaaacacttgtcttcgaccatccataaatacataaacagcaccagggttatgcaccttgataaaaacgttaaattggaagtgctcaagccacatatgctacgatttcaaaatcagacagcaaccccatgatcggttcataagaccatattcaaaaacatgatcacacctaaccgtccctagtttgagaaacaagtatgtatacgtaaatacatagtatctttgtgtttctttgttgataacttgatattgatggcaattacaaatgcctactaaaattaaccagaaattactcaaagccccttgtaggtgaaatcagtacgggatatgcaaatatgacaattgggaactggatactggtactttttcattttaaaggaggaagtattgtcgtaccattgagttttcataatttccactttcttcaattgaatccccatggttgaccaaaaaaaaaaacagtcaactaatacctaaacagcacagcagaagatgtattaaatggacaataaaaagaaataggaatgctaattcaaaactgggacccatgaaatgaagacgctgctgtacaaatttgccaaaccaagtcctaattttgcagttgattcatatatttatacaaaattataagtacaaaaagctacacataaattttaattgaccataacttaccaagaggtaagattggcatgtcctagcaatgaaatcgacctcatgattggtgcgaaggaagctcccacacctgcttccaataccttagcaaaaatacaatgcagcctgtgataataactcgctgaaaaatctagcatatgcacatacagaacctttgctattctctttcatttttcttttctagcacatacataacatgcaactttgttacaaattttcaagtaatggtgaacaagtatagatcttgttcaaatgatatgattttctttaaagccacatgcatccatgccagaaacaagacaaaccattcatgtaaggccacttttgaaaggaataaataattttagttttaatctaacaccacagatagacatgcctatgaaaatcttgatattaaaacacataaaagaatcaatttttgtcaatattaatcctacctaaattaattatttttatataaaccatccaccattaaaagagtagactgtattagaacataaattcataactaacaataccgcttttaaaataaacataattgataaaccattacagacagctgctttgaagtacacaaatgctttctgtctttgaggacaaatctagacagccaagaatcatcttcaaaggtaataatggaaggcatgaaatgggagaggaagaggacaaagagccaagtacatgctgaatggctagaatgtccatagttcactgcaaatcagagtcgtgccgccttccaaaataccaccattaacgaaaatgacccgtgcatatgccttcaatcaaaactactgttaaaagatatacaaacttttcaacataaggtaaaatggcacatccagtgggcatgacaaattaaaacagcaccgattttcaccaaaattgaaagcatgtgcacagatgttcatatgagatgcgctgtgtgatggttgtaataaagtagtaatttaacatacatcaactcctatatatgccacaataaactaacttgccacaacaagaggatgtttgcttcttgaagagtggtagatgagtaaaaacaggctgttgtgccacaaaaagcaagaggttaaacgtatgtcagaaatttgcaaaaaactgtggcagctcatgagacagttcgaccatagcaaatagatgcaatgtaaaggttcttcccccatttgtcctgcaaaaccacacagcattgaaataaaaccaccgaaaaatagaacagcagaatgagagtaaagaagaacaaatcagataatttaccttgacatgtgtactagggaaagcagaagtgcggagtgtctcttgagtctcatctattggttttctccttggcacactcagaacaaaagcagcctgatcccaagttgctgcagttgcagtgatacggtagccactatcccatcttctgtgaataccttcactaggatacagaaaatctagctctacaacctaacaatgttgattaaaagaaaaacgttgtcagaattctgtctacaaaaacatacatgtatatgcttgggtcacctactgcaattccaactaggatgattaataatttcctaacattaacaaacacctggtccgagaagcctgcacctcgagacataacaattgcccacctatttcccgcagcagccatagcagtaacatgaaatccctccctccatttcttgttgatccatttgaatggaaatgtatcactcactttatatgactgctgtaagtactgagtccctacatgaagcaacaaaagttgaatcagacagctacaaagtacaaacttctccatatatttgtgtttttgactccagactaacctttcgacattatgactagtgaactaccattgttagctcctgctattgcactaatatagaaattcttctcccattgctccatgatccattccttcatttacaaaaacagtccaatgaattcagagttttaagtccaataagcagttgtcatgcagagtttttacccactgtaatagtcataaacaaatttttctgtgtataaattttttagagaaagtatatgcagcaaaatgaagggcaggtattcaacgcacaccaaacaatgcaagaaaatgataagcaataattatatatatttcataaatccatcctggatttgaaaggagaaaagaaaccttatgaagaaagtaaggagagagtgcataaacttgatctgtgaagccagttccagcatccataatgagagcccaaaggtttgaacaagatgagacactgctgatatacaacccatcatcatttcctttgtcaatgtgttgggatagcctcatatctgcaacattatagtgatatctacaagagaaattgaaaaacgaaagtgaaaatgaaaatcaacttccgaagctttgagtaaatttcaatatcaggagtttataagcaagatgaacatacctttgtttcataggacgacgggcattataaacactgatccactgtgtcgcaggcattcccatacgaatcttcttcttcggttgttcctcatcttcgccttccatggacaatcttcctcttttacgtccaaccagacatatgagctttgcaatccataatacatgagttaggtgtatttcaagcaaaaaaacaaccaaatttctagtttaatgtaaacgaatgaaatgagaagtaccttctgagcaccttcagtatttattggcctaatatcaggattagggccaataattccatcaaaaagagagatatattttgcatagttgggttcttcgtcgaacttcaaattcaccacatactccacaaaatgtcgaaaaggttgagggcaaaaacaacatagagcttctggagaagtagccatcttcttcttacaaacaagaaatcccttattatccccctaatacaaagagatgtattagtattgcatacaaatttaggttaggtatacacataactcaacaaaaacttgaaaattctgaacctgatatccttgccaaggcaagcgtcctcgaagaagaaatacaagtgtgtaagcaagagattccaaatcatctctcctactaccagttctacctagatgagcatgcacactagcatatcgaactgttcccctgcaaattagaagttatcatataatatcaagcaattgtcaagacggaaaaagaaattcatctcctactaagtataagatgtctaagtacctgaatacatctgggcgttgatcatagtcaacatgcaggcctgttccactatctcgccaccgagttgctgaaatgtcaaaacaagtttcaaaattatttttcacatcaattataatatattaactaattttggcaaagtaacaacagctgagagaaacaatggtactgcacagttacctaatcccaagtcaacaagaaacagccttttctcatcagaggttccaggggggccaagcaaaaaattctcaggtttcacatcaccatgtacatatctgcaagaacaacagcagaaaatttatagaaccataattatcaaaataaacaaggatcttgtagtgatgcacatcattctagataagttcatctatctggccagttcaactagaagtgattgctgtgtttttatacacaatcaccatcagataaggaatcaaaccttctttaaccaaaaagaaaataaaaaatagcatcaagatagaacgaaaaacacatatcacgatatgaagaggcttcaacaaagtataaggtaacgcctattatgttgtttaattgtagatgtaaataattcatgtgaaataatacaccctatatgtggacctacaagatgaaaaattagaattgtaatcatacaatgaaacagtttaaaaaaatttgacatgagatagtaaccatgtttgacaacagaataaaagaaaagtggtattattagaagtataaaagcatcaccctctagcatgcatcttttccaatatggatatcgcctcaatagcaatacatgccaccatttcaattgacattctgcgttgaaaaatgtatgtcaaatgacaataaagataatcaattcttcaatgaacaacacagtatacttacgtatgtgaactattattccaaacatcccacaaactaggtccaagcatatccataacctgtacaaggtcagataggattacttaaggcaatcacagagttgcaattggaaggaaagttgatgtcataaacaaggaaccataccatgacaaaatagtcaccctgtcgacccttataatgaactctaggcaccccatgactacctccaagtgcactgtaaaagcaacaaagttactgaccgtactaagattttggtggtgggaatgcagcatggaccagacgaaaaacaaatgtaagaaggtagataggagcctcacttgtaaacttgccattcgtatggtggtccatagttacatcctttactggttctgtgctcgaatttcaacgcaacctgagataatgaagatcacaaaagtcatcataaactataaacacaattcagaaagagcaaagaaacaccaaacaataaattgtcaaacctctaatgctccggggccagttctttcatttatatttataggggtagcacgcctaccgacataaacttgtccaaagcctcctttccctaattttctttctactttgtataatggagaaccaccaacctggatctgttgttggaaatcaaacattaaaaaacttaataaaaaattataatttttgcagactaacataaattagcgggaagatatagtataacagtgacttaacgacaccactaaactaaaactttgtaaagtatcacaacaaatatgaaaaaagaaaagaaaaagaaagtaaactgcagtgcctcctcagttctcataaaagtgtttttttttttttggtcaggacagttctcctaaatcattaaacactcgtccattaacaatggatatcaacactataaaattttctacaggactttatcaaccaaaaaaaaaaacagagcaaacttttacaagcttctgaaaataatcaaagtgtggggagctaaaatattcgagaaaatctaaaaatgaaacacgaaaatccccacatttcgctgtatcttcatttcatttctacagatagccatcatgaaaatatatatatgtgtgtgtgtatttctaaaacgaaaacactgagagatatggaccttctcaggaatcggagcattgcttccgtcatcctcagccgccacaactcccttatcgccactgcgaccaccactttcgaactcgtccatacctctctcaccaactcttttctcttcttcgaccttaaacgacctcctttcaacaccgatcgcgtcttttccctccttactcttcttacttcctttcgttcaccgcaggccttctcccctgatgaccctttacagttagctgagtctgtagctgttcttgttgatgatgatactcaaggtgtgtagtcgggttgggtagtggttcaggactaatattaggtatccaatttctgcgagctctgctacacagctcaagcatgataaagccgttgttggttggagagaaaagagaataccatgcaaggaatattcatgaaggttccagaaccatcatcagcctagaatcgatcactgtaaagggggacagaggcatataaaagtttgtatatttatttttcttagggttcggtaagaaaagaatggaatttggaaatatgtggagggaaatgaaaacaatcaaagggattctcttctcagtctctagatttccacttcgacagaataaaagaagacatgtctttgatatatcacatctatataaatatctatttcgaataaccaagtttcatcctttcaaaatgtataaataaattaaataaaattcatcaaaacctagtcggtctgtgctgaaaaagagaaaaccttaaagcttttacaatcaaaataaacgatttttactgtacacatataaatatgcaatttattttaccttatgacatgcattttaaactatccaaatccattaagttggaatcacattatttttatgtatagttctcttttctttttttaacggaaatttttatgtgtaggagtagtttaacacactactattattttgtgtgtaaaataaatgtgaagggagctgctaactaagacggctgattactgttgcatttatccgtagatacactttgatttttagtacatagaatgatagaagtgttataagttaaacttgtacattaattatataaggtatttcactagttttaaaatctatggtatttaaatcagagtttatgttgtttgttttacatggctattaaaaattataagtgtgtaattaaaatttgttgatttacatacacttcttttcttttagaaaatagtctcacaagataccaccaaagaacaacgagctcaaaagggtcgagagctagaaaaatttattaatgcatggcatcaaccaaaataaagttttagatacaaaaaggataatcaggctatgcgactgtatctgttaaagcaaacttagctaagaatcagctataaaatagtaattaaaactcacaatattgagatacgaacataaaattctaatatcgtcaggaattaaacctaaaaaagaatctaaaactaacagattattatgtttatgaactaaactttgcaatcggtgtcgagttgaatactgttgaggttgattgtaatgcattgagacaagacatttgaaattgcaaatgcctctgcaatttttgggacactaatgccagacactctccaagcggcagacgcaagaacaataccattagaatttcgaatcactatgcctaggcccccactgctcctaccaaattgatagttgtgtccgaattaactttgaatagtccacagggagggtacacacactttactcccaatagttttttactctatgccttaaaatatatcatcaaaactcaattttcattattatagaacacacttttacattataccatcttcatattttcttttacctcatttaaagattatatttttaaatactattttaactaaaataacatagaaaagaatgaatgaaaaaaataatagaataaaaaggtaataaagttggagagagtaacatgaagaaagtaataaaaaatatttaaaggattcctaaatattttataaatttggaaaatgaatagtataattgaaaggatctctaaaataattatagagtttaaagaagttgttggagggattaaaatgcttggcttctttaaaatttgaaagaaaatgagagtttaaaggagctatttgagagttctctaatgttctccgcattctaacatgtatatcttgtaaggaaaagaaaatgttccactctaacatttgagtaaaatgttatgcatcacaaaaaatttcataagattatatcgtaaactatcgtatcgttatgtattatttcgcgttaaaaataaattttcatggcaacaatgttaaaatattgcaaaagcattgttaatatcacaaaaacatcagtttcttaaaatctctcaagattttcagaattttagatcaggaaaaaaaaaaggactaaaaccaataaatattttagatctattctaaacgtctacttatgattataaaagtttgagatatgcatctgggtattaaaatgattgaatgagtttatggattggattgaattttcaattaaacacattaaatatatatattttttaataatgtttcatggtgtcaacgttgccattggtttttgtattgatgattttggcaagtagaggggaagggaactgagagaaaggagacagagaaaatgagaattgagagactgataaaggagaggagagagagacgatttgtctaatctttctaaagccctttattagcaactaggtaactaagccgcgcttcgcgcggtgttgtttaacttttataatctttatttgtatatatatatatttattatacttatattgagtgatata

SEQ ID NO: 111438 - DNA, 11053 bp, Cannabis sativa
cgctcttccgatctgattagcaacgagctgcacagtatgtttaaaactcacgtaatacgcctaaggtagttagggtgttacaccatgcatctccaccaaacgtgcgacttctcgtctctactagaaaacgagagagagggacgaatctagaggttttgggggatacggattttaattttgtggctcgtttcaaccatcaattgctagatttttggttggttatgggcagtagattctatcgagatagagagaaaaatgaaagagagagtgagaaggttgaagatagaattaggttttttttattttttttttattttattttattttattaattgttggttttattaatttttttttaaaatgatttatttaatttttttaataattacttaggtggaccaataaaatgtacctcatgtaaaatgtgagatgaaaatggatggaaatggctaataactaacaaaatggagttttaaggttttatcgccaaaatttgagttttgggagttaaattcaaataaaataaaagtattaagattttaacgcaattaatcctagttaatttgttttttaacccatcaacaaatcacggtaatttagtaaaaaaaaaatggactccaattccatcgtgggctaaacaaggaagcgcttcatcttcatccgtccaagctattgtttctttctcaaattcacacaaagaccctaaatccctccctttcgcgcgcgccactctggttctccggcgtcaaaagctaatgttagtctcactttatgtttcatttgtttgtatgtattagaaatattttcttgaaggtggaaacgaaagaataatgattcttgtgaagtatttgcttttttcaattattgttattattaaaaatcacaatcccttttaaatttgttgtttgcttccaaccaagattatgatactttgaaatttttcttgctttcgaaatttaatcacttatattaccacaattaagaacaaatggcatgacacagatggagctttacttatttttgtgtttgaacttctcttgacagtgaaagagttggttgggttagagttaagagaaagtagatggcatcgtcagatgacgaggatgaggctctgccactatctgttgcaaattaccattttgttgatgacaaagatgaacctgtttcattttctgttttgccaattcaatggagggagaatgaggaaattggtggtgataatctacaagttttcctacatgggactgctgataatggactccagaaactatataagcaagtcatagcatggaagttcgatctttcctatgtgaagcccgagatatctgtactaacaaaggataatagttggatcgttcttcaaaagcccagaaagagtttcgagaaagtcattaaatcaatcttgataacagtgaactgtcttcattttataagtagaaatcctgatacaccagggaaatctttgtgggatcacatgtctaaagttttcaggtgtttcttacacttacgcacatagtgacaatcatccttttgttttatctcggtgccattgttcactgacatttttattcattattacagttcatttgaggttaggccttccaagaatgatttggtggatcaaaaatctttgatcattgaagctatggaaaagaatgacatcttagcaaagtccaaggtttgtatagtttccttcccactcagcacccccatggtcatttggtaatcctaaaagaagttaggatttaatcttattcgttttactttcagcatgcatgcgataaatcctgaaattaatactttactgaaaagtagaagcattataacataacataatattagctatgttttcaatgaatcgttggttagatgctaagtagtaaaggccacaccatctttgaattactgaaaatcatctcacgagtcccttttattccttgttactcctacactttagtttgttatctaatttaatttgcatggctacctgtcaatttgctacatttactagttctttgtatgcaatggttttaagttctattgtacttctatgtcttacaactagagcctcagtttttaacatacatcttaactgcaatttaatttgtctgttgcacagtttttacttgcatatcttgatgagaagcccagaaagaggaaagcacctgatgaggtcatattgtcccacttataacctccttgatttatgttttttctcttttcctttcctatcttatttttttttttatccactttttgaaagggaaaattaaagtatttttcaggaaaggcaagcaacaacaacttcaagttttatagttgatgaaacagaggaaacagaatatgcagaagaggatgattccaatgaagatgatgaactgtttgattctgtctgtactttttgtgataatggtggtgatattttgtggtatgctattgctgctgaacatttaatttctgatgctactctatataccatagttgttaaatagcggtttatttattagtgtggctcccttctatcactcttattttttcccgagctttgttgtataatgcgtttttacgtctaaacaagtattgaaatgattagattattgtatctatcgtcactattaaaagccttataattttctatgctattgtaaatttatgtgtcataatcagtggatacgtctatgatgtatgaacatttatgtcaattcaatacttataagtgagtagctgtatgaaggattgaagggatagtaaaatagattcttctgtgaaataggcattagtctgaatctatttagtactaatgtatttaaccttttcttcttcatttttccccttaaaaaagaattaagttataaaagaccaaatctcctccaaagaaattcagaataaatggaaaacctataaagaagagaaaactcagaaaaagtggttgaccctatattagaaagctcctcatcctaccatacacaaaagctacctcaacgctacaattctgcaattcaacaaaaaaagaaactaacagatgcatacttcatcatcaccctctgtgtgtggacattatcacaagaaattttagaaccactatgtgaaattctattttgcaagtttcggcaggaaatcttagtttctgtataaagaggagaaagtagattggttttaagatcatatgttgagttgacattgttgattgcctcagggatcagtttactgcttctatttcaatttgtctattataatttgtggaagtttggttgtgtaccactgtgaagatatacattattatttttattatttagatacaatagaattttaatattccacttcaactttcctcattcatgattgttttgtagttctctcagcatttgttctgaaacccgggtattgaattttaagatgttgatgttatttgtgattcactgtagttgcgaagggagctgtttaaggtcgttccatgcaactgtggagagcggtgaagattctaattgtgtttctcttggctatacagaggatgaagtaaatgtatgttgttgatttgtacgaattttgcaacttgattccatttttgttgtttattattggaataatcttcgtttatgtcctttatcatgtaaaacttccagttgatccagcaatatttgtgcaagaattgcgaatataaacagcaccagtgttttgtttgtgggaaattaggctcctctgataaatattcaggtgctgaggtatgagtttcatccattctgcaactaactgatatgatttaatatgtttgtctgtactatcaatcatgattatggttaaagttaatatggaaagtctgagagtgttaatactagctaatatgggcactgaaaattgggaaatatatcattttgtttgtattggaaccagctgaatacactgttgtttattaatgcaagaaagcaaagtaatagctatatttttgtatgtctgctcactttcattcatacggtatagataattatataaactagggcagtaactaacaattaggtatttactaaaaataaaacactaaatataacaattctaaaatttaggaatatttagatttaaatacatttaccattaattactattatttaaatttaaactaagactataactaaactgccaagaatacaagactccccctcaagctggtttgtaaatgttagataaaccagcttatcgatatgagattcaaatagcactcttgagaatcctttagatatcagtcttttgttcgttttgttggaacatatggcatgcaaattactccattttccggcttctcttcgataaagcacctatcaatctcaacatgctttgtcccatcatgttgcattgtgttatttgccatgttgattgtagctttgctatcgctgtaaagtttcacaggactcacaggtgtaactcttagcttgtaatttctttcatgaaagaattcacacttcccttgtgcactgacttatactcgagtgacactacttctggattgtttttccttctcgtgtaaccaggttctcttcctcaattttaaaccaacctaacgtttaccttctatcaacaacatatcttgcccaatcaacatctgtataggtttcgatttccaactctcctcctcttttgaatagaaaatcatgctctagactcccttttaaatactttaagatcctgtaaactgcctcgagatgctcttctgttggatcatgcacgaactgacttgacctactactcaaactgtaaaaataatgtcaggtcaagtatgtgtcactaatgttcctttgttaaactcggccacctctattccaagaaaaagcctcagcttatcaagatctttcatttcaaattcagcttccaacacttcctttaacttcttaattttgtcaagatcactccctatgattattatatcatctacgtacacgtttacgattatggctccccttcctttagattgctgataaaacattgaaaataaaaattcatgtaaaaaaaaattataaatctcaaaagttttttaattaaatgcatttgttgcattttaattggatactaatcataatatgtactagaatttctaattggaaagatatgagaacatatttatatttagtatcctattatttaatgaatagtttttaaaacattgaagagaatgatgaggttttgattgctggattcagaagaaagggtcacgttgtgggagatattcctggagttaggttcaaggttttgaaagtgtctggagagtctgttggctattttgaaggagaaggagtagcccagatcttaagctatcattcatgcttttcaccctaaaattgttgctgtttattttagtgttatatggtgaattttgagtacaattttttatatttggatgttgggttgaattcactagtagttattgtcccttttttttttgaaaaagagaaggagagcacttagcaggcctcccctgatattattaaagtctcacttgtggcggaggaaaaccatacataaaatgtataacaatacaatgagttagcacattgagtgaccaatcaaacaaaaggagagaattctggagttttacatcaaaccactccaattcctgcttaaatctaggaaggagaaagcctcaaagtgttttgttttaaagatccatgtggctgtccaaaattttattctctcccaaacaaagtttgctgatttctcttgtcctttgaaaattctgctatttctctcattccacacagcccataatagtgctaacattgtagtcctccaaagctttactgttcttttgcttcccaccggtttacttagtagggcgtgtgtcaccaaacaaggcaaaacccagtccagactaattctttataaagtaatgaccaaattttttgagtgtatgtgcaatgaaggaacaaatgctcgatcgtttcattactggacttgaaacaaatacatcatctcggagatatggccatttatggtcttctcttttgtattacctcatgaacatttgctttccctagagccaccaactatccaaaaacttttacttttaccagaacgcaacatttccatagagttttggtccaatctaagtccctcgatccgtgacttgaggtgaaccaaaggcagatttgcaagagaaagagcctccatattctggcttccaacccctactatcaatcgaggaatgagctatgttcacatgttccaaaagctgcaccagctccattaaacttgggacttccctgtctaacagatttcttttgaagttaaagtcccaattaatcaccttgaagccaccttcttcaacaattgccatgtctttaatgcacttattctttgatttagccaaaattgctaattccggataggacgtcaacaaagagttctgtccaatccacacatcttcccaaaaccgaattttctccccattccctacctgaaatgaaaccaaactcaaatattcaccatgtaggcttgcaattcctttccaaggtcctcgagaggacatcctttcacttgttttagtatcccaaaagttgtctgacattccgtatcgactttttataactctataccacgtgtctgtttccaaagggaatctccatagccatttcatcaacagactcttatttcgcaagtctagacacccaattcccagacccccttcttttcttggtctacacacttcctcccaagcaaccataaaaagtttatcatcatcttctcaagtgtttggattaccgcctttggtgctttgaataaggagaggaaatatgtgggaagcgaggaaagaactgattggattattgtcaatctcccccctagagaagaaagagcatttccatccatccatcctcttagcacatttttccaagattggtctccaaaattcaattctattcggggatccccccaatggcattctgaggtatttcattggccactttcctatctcacagccaatagaagcagcgcacctcgaaatcacagtctcatccatgcaaatacctaagagttggctctttctcatgttaactctcaagcctgatatcgcttagaaagcattcaccgccaaggccatatttttcaatgacgtctcatcgtttacaaagagtgccgtgtcatctgcgaactgtaggtggctaacttggaccttctccttaccgaccaagaaaccagataacttcccagactctattgctttcaccattcttcctaatacatctgccaccagagtaaaaaggaacggcgaaaggggatcaccttgcctaagccccctagatcccagtatcttacctctctattttccattaacgaatatggaaaaagaagttgacgagatgcatcccctaatccatttcctccacacttctccgaatcctttgcattccagtactagatcgagaaagtcccactcaactctatcgtatgccttttcgaaatctattttgaataccattccctctttgcttctacttctatattcttccaccgcttcattggcaatcaaaactgagtccagtatttgtcttcccactacaaaagccgtttgagtctttgaaattgtatcttccatcacacctcgaagtctagatgccaagactttggcaattatcctatagacacttgtgatcaggctgattggtctatagtctttaaccttacaactgtcaatcttcttggggatcaagcataagaagggttcatttatgctgtctgggattcttccttcatcttcaaattctttgaagacttccagtaggtcatctttcattagatcccagttattttggaagactgctagactataaccatcgggtccggtgctttattaccttcacagtcaaaaacaactcttcttatttcttcctcgtcaaatggtcgctctaattctccagctgattcatcaggtatttgtccccaagcaattcctaccacatctagctcctctcttctttcggaggtgtagagtttggtataaaaaccaatcaattcttcgactatttcctcttctttgtcaatcacggatccgtcttctttctcaattttggatattgtgtttctggccttccttgcattcaacaaattgtggaaaaatctggtatttgcatctccctccttagcccatttgcatttagacttcagccacacattcctttcttcttcaaatgctaacctttgccattccttcttgatctcccttctctctttgttcagagtttcattccaatcattgcttccttctattttatctaggtcttctaaccttctttctagagcaagtttcctcatgcggttatctccaaacgtagctttgctccacacctttatcttctcttgaatcttctttaatgtactcatgattttggttcccggccaacctgacatcgatgtctctttccaccattgttcgaagagcttggaaaaagacttgtgttccatccattggttgtcaaatctaaaggggcaggggccccactttggtgggtctgagtcaagtaatatcgggctgtgatctgaaactactctgactgccatttcctgtctaacatatggaaaggcgatgttccacttgttagtaaacaagaatttgtctaatctgctacatatcggtttttctcgaaagtttgaccacgtaaatcttccattgttaagtttagggtcaatcaatctcagttcattcactaattcatcaaaaatcttcatacttctcatacatgagttgctgttcaacttttcttgtactcttctaactacgttgaaatcaccccctatgcaccaggactccccacaaagcgaattaaggccagccaactcatcccagaatttagatcttgctttatatgaacaaggcccgtaaacacccgagaaccaccaaggttctttttcttctgcctgaattagcactgatatagagtattctcctatcattgggtccaacactgtgatacttctagtgtgccatatcaacaatgtaccccccgacctcccaatagatgggagtagaatccatgttttaaatctaggtctccacatacttcccacagaacttctatctaccacttcctttttgacttcttgtattattgcaatatccgaattgagtttacataaagttgccttaatagccctccttttctccttatctccactgccccttatgttccatgtaagtatcttcattttacatgtttttccagccctgattttttattatcttttccataattgatgttaaagtccaaatttctcaattccctgttttcttcttgtttttttttttgaaaaaagggaggagggaccactcactaagattggcccccacccttgagataaataacaaccctcgcttatggcgtggaccactcttgttgtagcttctttggactcttttactggcactatttcctatttgggattattttcatccccaaatcagccatggactccaccatctttgaccatgaaacgaaagtattctccatgctaagttgctcttcaccaggtgtcttcccaattcctccactcaccagattatccttctcactccataattctttaatgttgcccaaaatgtcttcatacttttcattgatctcttttagattgtcctcacaatctgtatccgaagcttcactttctgagaagtattctccgattgcttcctctcttgggtcttcatcatcttccaatatttccattatgttgatagtagcttcctccccaaccaaggttgttgattttcttttccttgtatacactcttagttgtttttcattctcattagcctctgttgactacacttcttcattattatgcagaactgacttccgtgtttcttgtctttgatcttcaaaatctgcccagaagctaattatagccgctttgaattctgtcctcttctttggtcgaatcctcctcagagttccgttgaaaaaatcatgtatcacttgttctggttttttcttattgcatactgccaacttattttttcacctttcagatttatctttattctccaggcttttattccatctaaatccatcgacgagagtgtccaccattttttcttttagaattgcagggggtgcctccttttggcccaaaataagagtaaatgggccattttggtaataccatagtccactaagctgaatagcttttacacctattatctcactatttttagagatattattactctgcccaaaagacttacgacccatttccttattattttcaacaaaggctcggcccatcacacccattctcaatttatttccatatattgagtcataagagagacacgtgttccaaaagatgggattctggatttctatttacacgtggctcatttaaatttctcaataaacgattaaaaacctgtggaagaggaatcgactctctcgttccttgttcttttatggggactctcaatcggcaccagctctaaattcctaggttggctatcaatcttgaaaactgcactcccataattatttattaattccttctctctctgctgtaccgacgcctggccgcttcccgaccgtccctcttccacctggatctccggtgtcgactgcagcaaggaacccaacgacactcgtcgccgcctattacctctgcctcattctcagacaacacaattgtcgcccgaagccctttagtcgtctcgactcctcctccttttaccatatacgacgcctcttccgtcttcatcatcatttgtgctttatctttattataaaacacagaatcttggtgctaaatagtattgaaaaaatcactaaatctatatccccagtcgttcagtttgaataatttcagtgatatttccaagccttcattttgaaaagagatgagagttggtacgaagccatgctcatccccttccaatttgtcttagatgatgcaagaagctcttttctgcagtatccttcttgtagaatatagtgattcgaattgtgtatcgatttcatagaataatacatatttatatacaaagctaggagactaaatatctactaaatatctaattctttta

SEQ ID NO: 111439 - DNA, 2443 bp, Cannabis sativa
  modified_base (2386)..(2394): a, c, t, g, unknown or other
taagaataataatttataattagtgacaattttttcacttttagtcataaattttgttgtgattaaaaataaaattttttgtagtgtacttttactgaaaaaacaaacaaattaagtattaaatattaacaataaaagatagactggttgtacaaattagatctgtaaatcatccatatgtattaatgtatgattaaggtcaattatggtacccatttcaaaaaaaaaaaaaaaaaaaggtcaattatggtacaattaaagctaataattatataagtataagagagattaaaatatcaaaacttcagaaaaaaaaaaaaatagaaaagaattagtagtatacatatagatcaatttggaattgaatattaagacaataccatttaagctaatatataactacatttatgtaccatataacatcataccaaaataacgttatataattaattaattagttagtaatttttttattatgtattaaattaaattatataaattttgatattaaaatatactaataatatatatatataccttgacaggtgagctaataatatttttttcctatatatttaaacatatatagagtgatttttacaatgcatcctattaaatatatacattctatacttatttcagtatttagaagaatttttaagtctattttttttttcatatttgtgtatattttacaaagttttaaaaaattcagaataatttataaaatagaaaggagttttaaaacaatctatttcacgcgcgtataaaataaaatagtcacgcgtgcagtacactatttgaatcatattttaagcgtattagattttttttaatttttcaaaatttcacagaatgttttaaattataactataacgtacataaccattagaaaaaatttaactaaaaaaatttattttaaacagataaaaatacatccatatacccaaagatacattacataattttccatatatatatatatatatattgtttaatgatatgcatttgatgatgaagttgaggagattataaggatatatatatagaaagaaattaatgaattataataaatgacatacattttctggcttttgaaaaatggcagagacagcttttgtggcttcagaaaagatggaatcagtatcaactccttcttcttctaagtttacatttgttgttatgtaaaggcaaggcatcttcttcttctttcttctttcttcttcttattatatattcttatagttttgtgtttctgtaatatatacatacatatatattgtttggtgttgtgtatttatagtagtagcaatatatatatatatattcttaagagaattttcaatgataattcaaaacacgttttttcacacgtgtgtagggcagccgacataattctttcttctctcttataaaaggtcaatagtctttttcattattaagatgtatacacatgtgaactgttatttcacaatgataatattttcgataaatattattttcgatcttttattttacaaaagttactaattagatcatttattttattaaatggtaaaataaactatgtattttctaaaatagtacaaataggaccataattgatttttttatcaaaataaaatttcattattatccgatctaaatgtgttataatgataaatctgtttacattttttgtatccattcgtgttaagaattgtcttcaagttggttatattaaaaaaaaaaattcaaaaattaacctcagggttctatttttactattttaaaaaatacaggatccattttgtcatttaacaaaatagaggatccaatctataacttttgcaaaacacaaagtccaaaatagtatttatcttaaaatttttactaatttacagtgtaatgttagacacacacaaattacccaccctcgacctttgacatgtattgaattatttcaagttattaaaatttctttctgaagtattaagattgttggatttaagtaggcgtgtttatgtgatttaatctgcactattttactcatagttagtgtagattttatattttagatccaatccaatctatacaagagcttaaatccaatctacaatagtgtagattcgatcgattattttatgttagttacttttttaacataaattatttaatattcattaaaatataaattattttcacatataaccaacaacaaaataaaataaattattatgttgttaacaataaattaaaataaataaataataaaattcaaaaaagacaaaaaaatattgtatataaaaagaaattaatttactttctttttagattatattttccttgtataaatatatacatttggggctcgtttggaacgctgtattaggtcgtattgtattnnnnnnnnntatattgaattggattatatatcatatttttatataatactatgttaaa

SEQ ID NO: 111440 - DNA, 1101 bp, Cannabis sativa
attattattattattattaggaagataacatcaaacaactctcgtaattaattatttgagacacaaccgaaagaaagagaaaaggaaaataaggcatttcattcatttatttaatatattcataaaagaaagctcatgatccaccgcacccagctagaaagtcatatttcactcaataccataatcaattaaagtctcaactttagcttatgctattacataattatattgatattataagagtcaatcaaaccaaacccaaagtggatctacttaaacgacacgtaaccacataaccatttaaatgagacaaacatgtggcggatcctgaaacgaaaaacgacaactatttacacatcgcattgttggtggggccttcttctcaacttattgatgtttgctcctcgtctcactactgtagagcctgaggtcaaaaagagtaaatattagtgtgagaatttaggattgaagggtagggttagtccatattacatattacgaatgtaattaattaatatactttcttaacatttgaacgtagaaagtattaagtaaaataaacaattttaaaattaattctaatacaccctgttaatatttacgcgtaaaaaatataaataaaataaacaaccttttagaaactacaaagacccaacctaatattagaaaaaatctcacaaaatcaaattgtaaaatttgtaggtacacacatcgatcgagagaaatttataaaattacccctttaaagtgaaaatttgttattttttataaaatttttacacttttatatttaaatattttttacactattacagtactttcaaaacacaaaaaagaatcaaaacacaaaaaagaaaaaaaatatatatatatatatataccatataaaaatatcatgaaaaaaataataaaataatatcacaataacacaaaaatattagagaaattatctcatataatattttttattttctttttttaaatttaagttgcaccgttagttgcaatggaaatttctatataaaatttcgtaaaaataaaaaaaaaaaaaaactgtttaaaaatataaaaataaaaaaaaaataaaaaaaaaactctaaa

SEQ ID NO: 111441 - DNA, 1462 bp, Cannabis sativa
aaatgccctgggattacaggtaaagccctgcaatgcaagcattacagcagcacataacatatattaaagaggaaaaattaatatttagagagaaatttactaccaagctttgagaagttaagaatctcactttgtgaaatctgggatataaagccttttgcacataatgccttactttaaaagtcccacctgatcacatgtttcaactttcaatcatcttaaaaggcaatccttaacataaatcacaagaacatgtccatacagaaagaataatgcataagtatcacactagtattaaaagtttttataagaaagaaaatttcctcgagctctactagaaattagaatgcaaattcagcttacatggaaaagacattcaatcaaaggtggaaatttctaaattctaagtgaaatgtgttaaaaaataccaacttttgagtaatgttgagccaaaacaagttcaatagagcaattcaatgtagcaatttccacagggacatggcttcaaccccacttatattttgtgaaaagaattaagcttgaaaaggaataatcttgttcctcctattctattggaacggttagttagttacttagttagtgttcttaaaagctaaaaccaagcaaaacccagaacacaagaagaataaaaatgaaaacaaaattaaagaaactcaagcaataattataaaactaaccacctatgaaggtagaacttatacaatgaggtgggtttgtggcagaacccatgaacatggtactggtcgcccaatagttaactgtgagcgaccgcatgctaaaaattcagcttttgggattccactgggttcttcaactgaacccaaaaagagaaaaatagtgagacgaggtttaacaaagaagaaaactgcttaatctcagaattgagaggagcaatggaaatctcagaggcattgaaaatggcagtagtattacgaccaatgacaacagaaagactaattatatgaacaaaaaaaaaaaaagatgacttaaatatgtaacatttactttagtagttttatatgattgaaatgaaacaaacgagaggcctcaaattgttcgagtctgaataatatgtcgttggtgttttggaaaatataagtagtgacaggtttgatgtcgtttatcctattcttatatgttggggtaagcaaagtttgatgtcgttgtactacattttatctataattgaaaattatgaaggcaataatatcttaaataaatagtccaaattatatatataaagtgattaatctatttacatatatatcatcaagatttcatcccctttggtcaagcatgctccttaactctttctttccatttgcatagtttcactatttaccttaataatatacctcatatcaaaatttataccctaaactaatttgtacaaattaatgcctataattttaaaagatacccaaattaccctttaattaaa

SEQ ID NO: 111442 - DNA, 1428 bp, Cannabis sativa
aataaaatctagtttaattattaaactcaatttttatttattttttgattggaatttaatattggaatttaattattgatgaagtaataaattcaaaaaaaaaaaaaaaatcccttatatgttggttgtaagttgtaaccaataaaatatgatatgttgttacaaagtaatcttttacacaataaacatttcatataatgtcatcaattattctcgaaacttattaatcaaaagaaataaaaatatatatggtttatattcaaatgcaaatacaaatagtctctccactcgtgaatatagaatagaatctagtgataaataaacttaagaataataaacaatataacaaaaaacagctggcctcaagtatgatttctcatcatggaattatcctttaccatattggagtggtttttataatatacatttatctattaaagaaatattattatttttttttttgaaaagtattaaagaaatattataattaattgatttggtatatatatgttgtatttatattatatttaattttattttatcgtattattctctttgtcattatacaaaaaattaatatgaagatactaattgcgaaagtttcaaacaaattttctttatgtcaaaaagtgctagattatgacctttacaataataaaatatttattttcttagagccaacctaaccaactgtcatgcttcatgtaaatatttttatgttaatatatattaatatccttcttttatttttcaaatacagtactctaattggttaaatgttaaatggttaccaatcggttttttttttctctctttaattatttttattttttatatgtttaagttggtattaaagtcatatagttgaactcgaccgatcacaatactattgtgccaaaaaaaacttacaagtacactttcaatttttacattttatttttatcctcctaaattattcaatttcaataatatttttaataatattgtattttgccacaaacatatataagcatactgtgatatagtttctctaaatataaatgtctttaaaagttgttcttgttatggaggttagaagtcatccggaaatgtgttcttgtaagtctatcttgtccactctggaaggtgtttttagggaaagttagtcttcttccagaaaggattttcggatgcatgactagttattcccacttggaagagaaatccagatagtcgactctaattttcgtctttcttatcccagaagtcccttcagcgtacgctctggtcttccttccgaagcgtatgtctcatccagaagcgctctaacttaagttgtcgtggagattatgttacaaggattttgttaagtttgttatgtcgtaactaacttaacaacttagcctttgtagccatcgactttcagattagggatgtaaacggggcggg

SEQ ID NO: 111443 - DNA, 3408 bp, Cannabis sativa
atcttctagtgagatattccatgaaaagcacaaataaaagaggagataaaggatcaccttgtcgaagccctttttcacctttgaagttgccttgaactcttccattcatcatgatagaataagttgtagcccgaatacaagtcatcacccattttatgaacctagctggcagattgtactctgtaaggagagctttgaggaaatcccagtcaaccgtatcataagccgtgcttatgtctacttttatggtgcatctggcagagacattcttcctattataattcttcaataggtcttgaagaatcataacattatgggcgattgatctacctttgatgaaggccccttggttttgattgactagaataggaagaacctgagccagtcttgaacaaaggagtttagatacacatttgtacaccgttgagcagcaagcaataggtctgtagtccactgctttagaaggactctctacttttggcacaagagatatcatagtcgcatgaaactcctttggcatgttacctgtagtaaaaaaatcttgaatagcattagagaattcctgacccaattcagcccacatttgcttaaagaaacctgctccatagccgccgggacccggagatttggcatctgggatgctaaagaaagcctccttgatctccttgcttgagaaaggttttagaagactaagttgctgatcaagattcaattgagcccccatagccatactttccttgttcaagctccttgtggtcttactcctagtccccatgtaccctttgaagtgagctaagaagtgactttccccttcagcaaaatcctgaatcctttcgccttgatcattggtgaaggacgctattctattctccactttcctcttcttcaagctcgcatgaaaataagcattgttatcatcccccttattcagccaggttatcttacttcattgactcaagaagctatgatacatgttttcagccaggctatatctttcagctgcctctttttcttgttgttgcaagatatgactgctaggttcagcttgcgagtttaattttgcttctgtgtacacatttttggcagcttcatattcttttcctatataacctataacatggttattgaactgtttgaaacaatgtttaagacgaacaagtttgaagaagacaaccttcatccttgtgcatcttaaaggtttgttccaattttccttaaccacattaataaaatcaggatgaaaggaccagaaattgaagtacctaaacggtttagcaccaatagctttattcaccttgatcgagaccacacacgcacaatgatctgaaattgtttcccagttgaaatgcgctgctgagtttggaaatctgtcaaaccaatactcattgatgaaaatgtggtcaatctttgagtaaatcctttttatcccctcttgattgttagtccaagtgaaattagatccactctttagcataggttctaggttactctgagcaagccaattactagcatcttgaataccgcttaactccacaacattacctccctctctatcctccaactcaaaaagagcattaaaatcaccaactataagccacggtttcacagggaaacgtaactgtaatagactactccacaactattttctctcctcagcagtattaaaaccataaacaattgtgatgcagcaagcatgttcttgaccaaccattttgatgaaacaatgagtgtattgaggattctcctctattactataaccctaacaaagcttctcctccaaacaatgaggatgcatccttcaattgtaggactagagtattgatcccattgaacaaacttcctatcaataaactcctgaattttattccctcgcaactttgtctcaagcaaagctccaacccctattttatttttaacacaaaactcacaaatagcctcctatttatccttattattaatgcctctcacattccaacaagctaaattacaactatccataaggaggatgagaattacccgaaacctctgctttgctcttactttgattctctgctaaccccacttctagatcctggagcacattgaacgaattgcattcttcaccctgtgtctttgtttctgctgtagccttctcaagggtcttcaacactttcataggagttgttttctttgggataacccactctttaccctgctgttgttgtttattctcaatcagtctcttctcctggtaagttgtggctgctggtttcttctccttgttttcaactttccccttaacctcttctcctactttcttaatttcacctcttctacattcagctatcgtatgagcataattagagcatttcttgcacttcgcaggcagccattcatagtctatattctgctccattaattgcccatgttcattaaggaacgaaatgaatgggggcggggtcatctgtaatttccatctcaacaagaactcttgcaaattgaacccttgttctctccttggtgtgttgatcaaccataataggtttccctattatgctgattattgcacttagactcttattcccccaatattggagacctagatcatatagcctgatccatagagggactgaatgaatcatcttaacagtattaaggtcagttgtccatggcctaattataactggttttctatcaaaatgtataacccctgcttccaaaacttgatcacgagaagcttcatcattgaatttcaccataactagccccatagtcaatttagcaacctgaacaatccccaagtgtccccaaattcgcttcaggaatccctcaaagactgttataggaggattggctccaaggactttgcaaatgactactgtggtctagaacgctgcttgttctttcacttcatctttatcaacttgtgctattttaatcccattacgaattattggctcagtatataggagttgtggatcacgattaaataccttcgtcttcccaaaagatgcccagtgttttttggctgaattgttaatctgacctgcatcaatggttgcttcgacttccattgcccagctgctacattttggtgtcaagagatctctcttctcctcgtctctggtgaaatcgcagccctcgtctatcgattgaacctactctgtttccatcactttcgctatcagattcagtccctctgtggtgactactttatcttcttcctctcctggttcctgagtgtcgtccttcgactctggatctggatctatgacaataagtttacggctcactcttttcttcctccccatggaagcagagaagagcagagcaaaatctcatcttataaataatttgtagcaggtaaattttgtacttctttcatctgtgtaaacctagtaatatgatagggcccatccaaatcattt

SEQ ID NO: 111444 - DNA, 3106 bp, Cannabis sativa
catgttcttatatatggctcaattctttaccatttattttatgtgggacaatgtccacaacagtaaataatatgagaaaaattatttcatgttattattcattaattttctttatttttttaaatataaattatcgtagtattttacaatcatgcttataatttttttttttttggaaagaaaatcatgtttataatttatactaatatttttgtacaattttttacattagaaaaaaaattaaaatgtgtgatcttttgtccagataaatgtgacattactagattgtagtgctatattttattattattattattgatattgacttaatacattgaggtgtactaatttatggtttcatgctaatatttttttttttttgaagctaagaattttattaaaccatcatgccaatatttttgctagttatacaaagtttttttttgtaattatatttgcacggtaataaaacgagtaatttattgcgtgcatgcaaatagtcacccaaaatgacccaattcttatataaaaaaaatgatctaggactaatttatataatttgatttcaaatcaatggtcacataatttataaataattaaggagaaaattccaaattaagccatagattcaatgtgtactacttacgattaatttactctaatttccaacaattaaacaagattgaaactcaattaccttaacttcaaaattcaaaattaagtttacaaattttgtgaaaattaaaattatgatttttatatctagaacatataaaatgtaatttaattcattagacagctttaaaattatatgccaagttgttctagactagaagtactaattaatcaagagaggcttaattagtcaaaattaatatcccaactgtagattattgaatgttgttgtttccttccaaatgattattttatttatatatatattgatatttttatatgcaaaattcatcaacttaattataattagtgtcggagaaataaatgtatttatatctgtctattactaatcacaacacaaagtaccagctcaagctagctttcttaatttgaagacggctctcataaattgccaaattcttatagaaaatcactaccttatacattaattacttttcattttcatagataatataatgattggttacccattgataaaaaactatattttaaattattgatttttatattgtgttattgtaataaaaattaataaaacaggagtaagaaaaattggtaattaattatcttttttaatttactattagtattatatgttgttatcatttatacaattagattattataatacaattagattattataaaataaattaaataagtcaaatactcaaattccacctcaaactagatattaattatattgtaatatatgctatattgttacacatatatatataattaaaattaatacaagcttagaaaaatgacttatatttaactatgagtctatgatatgatttcctcatctcatgtccaatttttgagtgatcaagataaaaagcgttgaatggaataatatatgttatgatcatatattctagctagtattcttctatactatatattttttttttcattaaaaaaaaatatatagtagaagaatactagctagaatattaatctactatcatcaacactaaaataaacaattacttttagtaattttttttagttataatataaatttttcgtgactatatgtaactttcagttagaacaaaaaattatttgtaactaaaacataatatttaaatacaagctgcgaataattttgttttaatcacaataagtattgtgattaatattatatttaattagtataataaattataatttttgtaattaatacctttagttattgataatatttttttacttttaatcacaaattttgttgtaattaaaaataaaaaaatttatggtgaaaggaaaaataactttaactaataccaaacctataatctcttgtataggttaaaaccaatgaaaatcaattaattttatagtattaattaataaattaagaattatgatgtgtacttaaagtcatatagtatacattgtggggtgatgaactgatgattttctcaactaatatttaataaaatgacctctttactctatattttgttggaagagttgagaaaaacgtgtggattttgatatgtgagtttactctatattttaagtgtacctaagataaataataaaagaaaaaggggtccattttggatatattttcattaaggtcacttttattggggagggtaagagattaggtcggagaatctattataataatactaattgcatattgtatgcctataaattaaataatagtgtcactttgaatatataagatagttttaattaaaaaattaaaattgttaattattatatcaagagtacataaaaaatattttgagagatctatggagaattcaaatttgagaactgagggagatactcaatttgtgaaaaagatgtaagtatattattaatattttatgtttaattacccctttgattaacgagttaataatctaattaatacaagtacatttaaaatatatgaaatacattaggatgtttatataaaatgaataataaacttgagcaaatatataattaatatgcatttaacattgaacatgaaaaacgtatctgcaattgtaatgtttctttaaagttgaattttagaataaaaagaactatttaatttctattcgataaaattcaaaaatacagatcaacaaataattaattaattattatcattgcatcaaaattcaattttgaattttatgcaataaaaaaaaatcaaaatggggtgtaaaattttattgtaaacttttttttttgttcaaattaaaatagggagttagaagtaaaaaatatgataattgaaatagtataaatgttaaagaaatggtgtagattggagtgactgtaagtgtaaatttaataaagtatttaggctaattaggattttagccccctgaactttgccatgtaccaaatcatgccccctgaacttttaagattattgaaaatgccccctgaacta

SEQ ID NO: 111445 - DNA, 5925 bp, Cannabis sativa
aagaaagaaacttctataaacatagcatattagccaatacagagctcagcatcacctggagtcatgcctagctctagcattcgggaaagtatttgcttctgcaatttcaattgattatccaaccaattttgtgataacggtccaccccacctgtataacacgtatagtttcgatttttatacaaacaaaagtgtatgctaataaaacaagtttaattcatgaaatgtcagcaaaatcagtactcatgcatctgaatctgatacttacgcatgtaaatttcccatccgagcccatgcaaggaaggcaggtccaccaaaaaagtcattgagatcttccttgctgatattaaaatcctggaatcaaactttttcagtcaaatgatactaaagttcaataaaagacaagtgatcatcaaagttcctgcatttatagcattcaacaaatgtccattgttatcataaaagggaaaaaaaaacaacaaaaaatatacagtgaactttaaattatttgacttattcgtgtctcatgtatcagagagtaagaaagcttcaaattccttagtagtgtccaagctttaacctcatgataaggttttggtaattagatgaaagttatgtttggtgagattaaaactatcaaaaaataaacttgtgtgtgtattctgcttcacattgttcatgtgtgagtaatcccataataggattttggtaattgaataaaagctatgtttggtgttattaaatcaatcaaaaaaacaaagctttaaattcaaacaattactgtggctgtgggataaggcagccaagttctacctagaatttaccaagccactaatcataccataaaaactttttgccaaatggcttcttgtccagtaaatgctaaaggcagattaatcccctgaagggccatccagtctatttctttctcccatctttcccaatcccaccaaacaaaggaatctgttaaacaatgagaagtaaccatgtgaggtaatttatatcaaccaatgttgagagcaacaacattttcctgccaactttagcaagtgcaaaatgagtggacttttctctcttaacagtctttagctactgtccaataaggaagcaataagaaagagtccacacttacagctggatgtaacaacattttggtaatagttccaaggaactggccgctttattacaatgcccccatcttttaaagccggtagagaacccgggttaggaatagaagctatctggctgccaccagtcttgtcccaagaaatatgaactccacaccaatactttaaataccaattaaggccagatgcaagttctactccagtggtccctttgactcttttaaaaacatgagatgaagccttaaatcaggctgcatagtcatacaatatagcagatactctattgtgataaaatgttttttacaaaaactaaagaactcaattccacatacattatttgaggtccatcttggcttgatggcttgtgattttgtaatataaagcaactttgtccaccacaatcatcctgatattagatttttagaaaatcagcttaattaagtaacataagatcaaataaatgcaacatcaataaaaacccatgtttctgctcagcaagcaataaaaacatttcaaatgcaaaatcgcagcaatgagtcatatccaaagttttgaatttgtaactggcataaactcaatgatttttttagcagcataagtaagtaaaactataattttcatccagtttcattagtacaaactccaatagtgtaaggttgagattctatattattaagtctaaacggaaacatgtagtatcagttgttccaaaatcttcttccaataaatttaaaactaaacttagttacaaatttaagatactaacagagtccgtattggtattgatgtaactggttttatgtcttacaaactcaaaactttaagtgattatgctgtaagaaaatacattaattcatgtctttcctcagcaagcaaaacacaacacaacattatatgatcacaactaccaaaaatttgaaatcgcaatttgattacatctagttattcaacttgctgtcctagcaaaattagaagcattgaagagaaatctattaaacccacttaagaatcagataaatagtaagtaaagattgaaccttggatacaattttgaagacaaaactggcttcatgggcaggaggaagtattctcttgagaagagcattagcggcaagttcttgaactgaagcagatacccttttggaatccaaacgcagaagaagattctgaatggcctctggttcagataaagctactgggataagtagcaaactcaaaactagaaaaagggtcatcaaatttgacatctttattggctctcctcctctgattatcttcagaggaaaactgaatcaacagctcagtttggtgaaactgaaatgtaccatatatatggtttagttatggaatggttggaggaggaagaatcacaccaaatggggttactatgtaatacaaaataaggtggggattatatgatttgattatagttttacataataatcaaaagattccaataatgttagcagatggataatgatgaattgttttttcaacgtttgaaagtcaatgtttttaaaatggctacgtgagacgcttatcatagaccttgctacaccggattaattaaatttattaaataaatgaaaaaccatttcttttcttttattttatttatggaaaattagttataatatagaataattagtatttttgtttcataaatttcttataatactaagttgtgccccttaagatatacaacttcaacttattaataatacctttcaaaatataatgtaaaacttttacattaatgtgatcctctcatcactctattcaattgatacattgaataataatttataaatgaatgcaaattatatacttttcactctttttaggttaatgaataatataataaaagacaattttaataataattaatatttttaattttagatttttaatcttcaaggtaaaaaagttaaaaagtatataatttgcataagtttgtcaactactatccattgtgtcttcacgaaaaaattgagtaaagtgtgatagaaggaccacgtttaggagtgttcatccgatctaatccgtactattttgctcatagtgcatccgatctgcgttaagtgtgaatttcatattttagatccaatccaatctgcatagtaactcaaatttaattcaatcaaattcacaaagtgctaccgaaaagaagatgtatcttgttgatatatataagattttacatgacttcagttgaagcacacttaactttggagttctttcatgatgggctactgaaaagaagatccatcttgttaatatatgtagtaccaattaatctatttaaactctctttaactatgtaattccatacttacacagtctcagaatcatcacacttagcattttcttcgcgactactgactgtcacatatttacactcgaacaacttataggtgtaccacatttaaataatatttattttagatagaatatataactttatatatgtaaatattttttatttttttttcaattcatattttaaaaatatatatttattaaaatcaaaataaattatatttaaatattataaaaaaattaaaataaaattttattcggaaaaataaaaaaattatacatcatttaaaaaaattataaaaataaaattaaaataaatattgaaattaacgcaaaataattaaaaaaaaattcttaaaaaaaaaagtattaaaagcgatttttaaaattattttaaatttaattttttatttttaaatatggggatgtaataaaacttctgtatataaatatattgatttgttcatattgttttccacaacagagttagggtttttctttctgaaaaacagagctagggtttcatattccttcacaccactccgccaccctcaatctcactctgccggactctacccaaaccttgcacacttctctctatcgcaaatcaggtcagtttttcaatttctacaatttcttccattttggttttaatctaaaaacccactaacgaaccgaatcttacttgtaatatttgatattaatgatcaaatttctaaccttgatctgttccaaatccaaaaattaaactttaaaatctcttaggtagctctattactcattctacaatagtaaaattataatatttttatgtattgattgattgattgatttatgaacatgtatttgaataaatattatgagagctttgaattgagaaaatacgcgtccgaggccgagcgcttacctcttgaggaaggggtggcgtggtattccacgggagaggtttaaatcgtggcgcacaatagtgcgttggacgcatatcatcaacttttgttgggggctactttagccgctctgctgtaatagtttgcagacagagcaagggtttgccctacattcattttgttcttgaaattttaagttgttttacccaaataatcattaggacttagcacttacatgaatattgaaggtaatactttacttgttataaagacactatttttcataaattttcatttcaatcaaaagtttgagggaggtaggagaacaagaagaaacaatgtcgtatgacgatgtggagatcgaagatatggagtggaacgaagagctgaaggcgtacacatacccttgcccgtgtggagatttgttccaaatcactaaagatgatcttaaactcggcgaagagatcgctcgctgtcccagttgctctctttatattactgtcatttacaacatggaggatttcttagtccaatctgatcagacaaagaagggtattgacccacctaaacagcagcctgttactgttgcttgaaaattccaggttcatatctaatcagctctttgccccacttaatcaattacaaatttttgtatgaatattattcattatagtttgtttgaacctttagttatgttttccaaacttgggtttcaattcgaaaccaatcagaaatgtttttattgatatttatatacaattatttattgttaagatttcttaaatcttgcttatttggacagtttaaacttgttcatccatggctggaggtggcagagcaatggaaggaggattttttccaagttttgataatggaagattcttttcaagttttgacagagctttttgactacttgtgaaaaaaaaaaacattattattgggtaaataccaggagaggagattatgtgagtgatatttttggtagagattatcattattattaagtaaagggtcatcactagttgaggcctttgatgtactttaaggatcaaccagtgataatatatacatgttatagtgaataataattgatttgataccttcttttatcattctgttcttcataaatgatcggttttatttgaatctgtttcactgtaaattatgctccttatgatatgaggagggagaggttgacaattgttgagttggcaagtgctgcattagatgtgagtttattttcacagaattaagaatcaaagcttcagaaaaattgaacagaaccattcattctgatttgtacaaatgagtggaaagaaaattgaaagagatggttgtattttgcttgatagttgccaattctaatattgctaatccacacatcataaatcacacaatttctcaaaataaaaataaggctaattagtaatattttcacttgaactttgacttgtactaaatcgtgccttctgaacttttttggcaaagacttttgtctaagggcatgatatattgaggggcatgatttggtagatataaaagtttggggagcatgtttagtacataaacaattactgaaacagtaaaattgaa

SEQ ID NO: 111446 - DNA, 6870 bp, Cannabis sativa
aaaaatataaaaaaataaataaagtatagatatttttgtcaattcaattctaattacaatattcattacaaaataaatcaaatataataatagtattcctattattattaccattacattatattactattcttattaccatataaaaaagaaacgcttaaagacactatttgtatttttaagtttttatataatttaatataaaattgggggcaaattatgaaataattaattttagggtaaattgatagagtatgtataattttttatttttacaaaataataaaataacaataaatgattaagaaaattggtgttcgtagtgtgaagcatggacaaagacaattactgctttggtcaaaaaatttataatttcttgtctgactaacaaaatataattttggaatgagtaatttagtgtctgtaataggggcattttcgtaaaattaagtactaaaaaaacaaaacaaggaacaaaaatcaattctttccccactaacatatattatacgtttattgaaaaaaagaaaaaaaaaacacatattataagtttataatttattttatttttttatataatttaatttctgtagtgataaaaaaagataaagcgttaggagcgcaaaagaaagctttcttcttccctcagaatcacacggttttttactctcttttttttctttcatttttcatgaacaagaatctcaaaaactggtgaccaatcttattattagtttatatatatatatatatttggagaagaaataagaataagaagaggaagaaagagttgaactttgagttgagactctgtttttaattcagatgcggagaagaaagaaaacagagagagaggagagttgttagttaacgttacatgttgaacctgcaaaagaatttaagtctcaattggtttggaaggtaaattatttatttagaaaaaaaaaggaaagctttggaaatggcttagttgttgtcaccttctttcttcttcattattacttgttcacatttaattttttcacgaatgtggaattgaatttaaagcttatttattttacttcatgagttttgaggctatacttctcaattgttgtataaagcatttattgagatagatggtctccccaacggtactgatctttgcctttaatttctcaaaaatttattcaaatagaattttttttttatttttatttttcttagctgccaaaacccaaaacccaaaacccagaaactgtttgtataaaatcctcagagaaattttgttttcagtttgattaatattgtgggttttttgaattttgtggcagaaaggtgatgatcctgaacctgaacccatttaagctttgcaagattttttcccaagaatgaataccccaccaacaattttcgttcttctcatcataatagttcttctcgtagttatttcttcaagcgaagctgaccatagccatggctcaaacgattgccaaaggttttgcaaaggtgattctgtaccgtacccgtttgggttctcacaaggttgcaaaatccaattgaattgtagtgacaatggcgaaaagagaatcggagaatttttagtcaataacatcacatcaacaagcatcttcatcaatctcccagcgaaatgtaaccgttcgattgaatcaatcaaacccctttttggttcacactacggtttgacttggaataacagtctcttgctccaagactgtactagctctcgtgttaatggctgtgtcatacccatgagcttcgttgagaatcgggtcgtcgatgtacaggactgtaagattcctaacaagaacgattctctcagctgtttctctaagaattctgatactgatattatgaacttcaacgccgtgaagggaacttcgtgtaagctattgtttgcttcgatcgcccttgactcagtcaactcgttccagtttcagaggctggaattgggttggtggctcaatgggtcctcaaatatgtcatgtgatcgaaacgcaaattctatgcatgttactcttcccgaaggtaaaacaggggtccggtgcttttgtaatgaagggtttcacggagatgggtttctcgccggctcccgttgccggaaaggtaagtcaactcgctgttttttttttttttggtttaaagttcatatttatttaaggtaattagaactttttgtcctgaaatttcacatgatgtaacaaaatggtagaaatttgacatgtaccaaatactgtagtctttcaatctaaccatctccattgttcttgagaacttttaactgtttaaaaagttcagtacacaattttacagatgtcaaagtccttagatagaaatctaaattagcctttttttttttaatttaatttaatttttaatatttggtggatggcctaattgcctttgacgatggaaactggggaaggaaaagtatacggtttggtggggctattattatgtcttttgccaattagaaaacgacacctgattgattgaaatttcttggttgtttactttggtgggtttcatggcaatgaatgattcgttagagggtcatattattatataccaatggtggatatggattaagattttcatggttttctttttgtaggatttgtttgtgataatggtttaacttttttttttgtacctaagtgccctcttatcattattgattctttgactggatcttcaccttagaatgggaacgatgactaggtagacaccagatatggggcatcattagtttcaagtttttgaccaactaaaaatatgtggacacaagatattgcataattatttttctactactacttttgtcaatgcccaatttgcaaaggctacctctttttgtaggtggtaattacaatacctagaagaactgtgcaagtgtgcataaataaggttattgttagattacgtgtgtttaggctctacttttcctcataattgataaaaggacatgggtgagacttttggggcggtttggtgtttgacttgggtgtaataatgccagggtactgtgcttgttgagaagtttgctcttgtgtttgaaagctggatgtttaggggaaagtagtagtactatgatttagctattttagttatgattgaaggaacagctattttatattagtctttctttatagaccctctggagctttggactttaaagaaaaaccaactacttcaggagttggaaattgttttaaatattggtcttataatgtaatgtatcttccaagcagatatctgcaaaagtcaaatgttagaacatttgggaaatctcccatttgtttatagagtaattaggctttgcacatgcctaagctagctaagtttgaacttcattttaaccaagtcaatggaaagagaaattgtgattttggaatacaatgtcagcttgaagatgtgggtgttggtggattttccaattataaaaatatgttggtgtttgttttcaagattattgaactatgtaactctcagaatatgtcagcaacttcagtttccattaggtttactaattactgtttcattgtcatatttcagtttcagcatgcagccctcgaaagtacatgtctagcaaatgtggaaaatttagtaaagtgggtgttcttattgcaggtaaaatttctaattattgagtctaatcttccaattaaattgataattatatcaatgtattgcttgtgtatcaaattttaatttatgttcggtattgctatgtgtttgaagggccaaaatggtcatctgtaagtgtaacaagcaattgatgtggttaaagtacaatgtttgattgatagtagccatagctgagatgttgaggaagtccatggctttcttattaacacgtgctacattgcttttattagggataatatttggagctgttttgatggtcatcctaactttcctctgccacgttgtccgaaggcgttctacttgtttgaaaaaccggatgagtgcaaagcgccttctatgtgaaactggcaattccagtgttgctttatacccctacaaagaaatcgaaaaggccaccaatggcttctcagaaagtcgaagacttggaaccggtgcctttggtatggtttatgaaggaaaactcttcaatgatgagttggttgctataaaaaagatcaaacatagagacaataacagcattgagcaagttatgaatgagatcaaactactttcatctgttagtcacccgaatctggtgcgcctcttaggttgctgcatagagcaaggcgagcagatccttgtgtatgagtttatgcctaatggaactctatctcagcatctacaaagagaaaggggtaaagggcttccatggactataaggcttaccattgcttctgaaactgctaaggctatagcttatctccactctgccatgaatccaccaatttatcacagggatatcaaatctagcaacatactattagatttcaacttcaagtcaaaggtagcagattttgggctttctagacttggcttaatagaaacatcacacatatcaacagccccacaagggactccaggctatgtggatcctcagtaccatcaaaactttcatctctcagataaaagtgatgtgtacagttttggggtagttttggttgagataataacagcaatgaaagtggttgactttactagacctcagactgatgtgaacttggctgcacttgctgttgataggattggaaaagggtgtgtggatgatataatagatccattccttgaaccaaatagagatgcatggacactttactctgtaaacaaggtagccgagcttgcattcagatgtctcgcgtttcatagtgacatgagaccttcaatgatggaagtagccgaagaactcgaacaaatcaggagaagcggatgggctacaatggaggaaaacacatttgcttcatcagttgtgtcctcttgttcatcgccttacaacgggagcgaatcacttggtagcgtgacatcaaagaaaggtggcggtgttgggagtcagagattgtttcttccacaaaaaatagatgataacttggagtcaatggaagaagaagaggagaaggaaagctctcctgtttctgtgcaagatccatggtttagtgaacagagttcaccttcaacaaatagcttattgggtaatgtagtccgatgactctaaatcacttctgcttcacatatatatttctatatatataatcgtgtgaatagtgaataccatagatgtattatacaggttctcttaaaccccattaatgcccatatcttatagtattgttattattaatttttgtatgcttaaccaaactgtatttatatatatatactatatcatcattttccctcagttcctttaaagcaaatgatgccaaagccaaaggccatcaagttacttgtgtttgcaaaacatttttttaacttgtaacttgtgagaaaaaacagattatgaagcctttattttgtaatagtttctagattaatttatgcatatggtacttcaggcctatcattttttgagaggaaagattttgttggatagctatgcaaaatgatatatgcttcaattacacaaactccattattaccggcactaattcaatcatatatgattgtatatgaattatggtttggtaatgattgtgaaaaagtacactacaaaactttggtcctatacttagattcaaatatatgtcacaaaaaaaaagtgtagcttcattaattagagcaaatcgctcgcgagaattgacaaccaaaaggtacacaattaatagaaaatacacggtaccaagaattttgtgtaacatattgggcggtttatttagcagatcgtttaacaaaatacaaagaacatttgacaaatccctcaaactctccttacaatcttcaattactaagctaaatgctgaacccatcaccattgaactacatagcttccacaaccatcaggctatctgtttcaactacaccagaagagaagttttgagcatgtttagcacttcccaaacaccaatagcctcccccattttaggattcaacttttctacaaaacaaccaggtaaagaatggactaacacccctgttgtatcacgaaccacacacctgaaaccaaacttgccttcgctgttgaacaaggttgcgtcaacattaagcttgatgcctaaaatcagtttagtctacagctccaaactgtcacctacaacagacggttgtaatagaggaatagttccccttccttgagctctgaaccattgatcaagacttaaattagcaaatgcaaccacatcctccacagaacgcaatctttgcttttagatacagtcgttacgagcaaacaacaaagcccaacacactataattacatgccccaaacccggactattgttaggctaattttagtctaagtttcgagtcgcgttttcgggtagtttttgatctttgcttctagttttagggctattttacgcatgattattttgtttcaggtccccggatgtttaaaggaagtattcacaagaatagaggacaagaaatgaaaaagttgaggtaaaaaatatacaaagttcttttctaccaaagctcgtcgcgacgggcaatatccttcgccgcgacggggaataagctttgccgtgataggacttggcagaaagttttccaagttgagagtgctccagccgtcgcgacggggaataggcttcatcgtgacgaagcctttctgacgacaaaaatgggcagttttgtaatttcacaaattttaaagagaaaacttggctcatttaaaaggaaacttgtgattgtttatgaggattcaaaattggagccctagaaacaaaggagaagacttcaagagcggcttgtggc

SEQ ID NO: 111447 - DNA, 4470 bp, Cannabis sativa
  modified_base (4418)..(4445): a, c, t, g, unknown or other
atacccagcaaacttgttctctttgtcactctaatatcaatatactagctattttctattgttgctactgtttggttctattttcttctattttgcttctgtttgtagcaaaatgataggggattcctatcaaaattctcagctcatgtgagtcagctgaatagtttggagttgttgggtcccgctcttccatcttgttgggtcaccacctccccttaactcccatattagtatgatataagctctcaatgtgttccacagatattaagaattttagatggttctcacatgtctccatgaatgagagagaagggttgagaagtttgcaaggccttggggcgaaagaatgacaagtgtttagaaaattgacaaatatcaaagagagattgagggttattattgacaaatagggatgaaattaagcgtttgaggtacataaaatgtgaatgaccaagacggtaatgccataatgtgattgtgttgattttattggattaatttactgatgtaagagattgacattgaaggagagaacaatgatttcttgtagtgctgttgtacaattcctgtttgttttcttaataggattttgttttctttgtatggtgggtggtttaatatttgtacacactttggccttttgtattattctacttattaataatagagtattggcagcagtggtaactagacgtgttaccttgtaattggttagtgatactcttttaaggttactatattaaattatatagaacttgatacttaattacactaataacgatattgacacgtagaaggacatttctcctaataataaggaagtacttttcctaaataagtaaataataaacaaaatctaatggcatatatgcttatatacaggctgggtgctaccgagacagagacgaattccatggatagaaccattgctcatttgctctttcatacccctttggagctgtcaggaaaacaacccgagcagtccgaatcaacattttcagctaagctaccatgtgaaactcgaagagaagcaagtgctgcaaatgtggctgagaatttgaaaagtaacatacagtgttttggtcagcaagaaactaaagtttgttcgagtctggtggagccacaatcacgcaaagacatttctcacatggacacttcagaaaatgcttcactcaatgaacaactcacagatggtggagttgtcccatccatagaatcatcccaataaacaaaaacgtttccattgcttacaaagggtaattccttcctttttctcttccatttattttttcaactattgaattttcttcacttgtatggctagtagtacatagtacacatttactggttgattttttttattgtgtgcagttgatgaaactaaatgatagaagaataacagtggatcatcaacctttcccggcgggtcaaaaatggtcgagataaagtggtgatgtttaaaaagtgaaaataaatcagtatggctactactactactactacttcaactactgtctattgtcctgagaatgtaccaaatctgttttcttggcaaacataagacgcccaagtattttgtgatttagttttttgtgttctaagctaagccttgaaacttaaaatttaaagccaaagcagaaatgtacttctatacacaaatgtggattctaaacttctgtccctttttctttcttagctttttaataccacttagctattttcttcaatatatagtatttttgacccttgaatactagtccatattctttggtaattgtaaccttttggtatgttaactaataagcaataggaatgaatggtaagtaagttattctcttatatttgtttatttaatttattaaatttaagaaagagagaacttgattaaataaaagaaaaaaaaaaagtaaactttgttttctaaaatatgtcaagggtaatgaattttatttatttttattttattttttaatattaaatttataatgacaattttatcttttaaaatatgtcttacaaaataattactatatactatagtttaactcaaaaggataatttagtcaatgtaagcattctaattagttttagtaaacaacatattacaaatattaatttcgagaatattcttcatttattctattacatttgtttattactttatttcgattctgaatgttaagtcttcaatatttttttattttggctgcccttaccgtactctaaatactaaatagtaaaatgactattttgttgatttttcagtgcagtatttgagtggtgttgtattatgtaatcatacttttatatttataatctttcaaaaaagtttaatgacaggtgagaataatatataccatagttcaatcctaaattttcgactaagacagtaaaaattttatgatagtcatactttaaagtaaatttaatgttaaaataaatagcataacatttaaacataatattatctttcatattaattaatcttcttataaaatattagttatggagaattggcagctaaagtcctaccttcaaaaattgtatcatttaagtcatttattttttattttctggtgacaatagtaatcacaagatgggaaggtaaataattattgttgcaaaaaactcattgtttttttaaatagaatgacaaatctattaaattttttgttactaaatccaagtatgctttccattttgtttatttttaaaaaatccaaattatacttttttttagatgccaaattatacttactatttaatcaaataaataataataataattaagaaatataattccttttcattatttctattttattatttctataaaatagaaatatactaagattattaaattacacttttagttttagatttccataaccaaaactactttaacaaatattgttttcttgctaaaaaatttcaagtatggaaattttgggatgttacatttatcacttgtaattgagtataaattgacttaaatgtgtgatttaggagctatgtagaagctatatatgagctgttaataccaaacacaactttctcaaaacgctcaaataatgtatgttagcataatattagtatatgctaatagagattttcaacaactaaataaatagaagaagacaggagagtttagaataaactaatagataatacatacgatattatgtggttgaggtatacaaaaataaaaggtgtgaggaattctggttttgtagagttagattaaaatgaaaaaaatttgaatgagagagagagagagagataaagttctagctcaagaactagatgttcgatatgttgaatcttcacaccagtttactgacatctttacaaaatcattagctgcaactcctttttttcacttcaaggacaagttaacacatgattttgacatgtgtaacttaagggggatgttagaatacaagaagaccactcgttcttgctccagtgaatcaactctagaattagacataactctgatactatgtgaggaactctggttttgcagagttagattgaaatgaaaaaatttgaatgagagagagagagatgaaaatggaagtaaaagaattgttcaaccaaaatatgattggcaatgatctttatttatagaaagaagaatacaatttgattacaacaaaaaaagatcaactgacttaacagaaaagttattgcaatactgttaagaaagaagttagttactgattttctaaccgttttcggtcctcttgtattctaattgaaggaatattacaataagtctccaagctttgaagatgagcttggttgagatttgtgagtacaaacaatatattttcctcattagtaaggctcataaatgagaaatagcgatattggagaatgctagtacatttagtgatgctaactctagtaaaatgcttcaaatctcacccatcgaacaattgacatgtataggtgaaagggttagactaataactttgtcaaatcatataaacttaaatttgatattttagcatcatcttgcacaaactggaccaattaaagctaaaatggcaactcgatagaactcttgtcctgcagatcattgatattgacactagtggttggataatttactatatactactaatggttggttttgactgagatcagacaagggattttagtttcagggaatggatcggaattagggctctcccatttcacatgaccaatatcatttgggacctagtctggatctagagttggccttttagtatcacattcgagatcatctatgtaaatttaaaggtaccttagtctgcgacaagaccgactctaaggtgagacaattgtaaggcatacgctttgggcctccgaacactcaaagttccaaaattatataaaaggaaattattaggtggcgtttggtaacactnnnnnnnnnnnnnnnnnnnnnnnnnnnntagaaaagtgaaaatattttttaaa

SEQ ID NO: 111448 - DNA, 2891 bp, Cannabis sativa
  modified_base (64)..(68): a, c, t, g, unknown or other
acactataatcatgaacaaatacacatgttctggacctaatagaatataatcatgaaataaatnnnnngaaccatgcaacataaaaatgattcatgatctttattaactaataaatatgattatattgaataaatatgattatattgaaatgggttatatgattatattgaaatgggttttatttagggcacaaaacctaacaaatctatttcaactttttctaattcttccgcgggtccaatttctagattagagtccccatagagaggatccatgtcattgtcctgtctttgtcgggtccctatttgttttaactttttcagctttagagctttgggcaaactggtctttttttttttttgcctttgttaaggcactgttgtaacactgacgagcatgatcaaaatatttaatagtaagggtttgcaccctcgctttggaaaaatctaaaactcagtttggagctccaacaacttgatccaggcattccatgataagatgctagaaatctctgccattagtccatgtaaaaaaagtgccaacactacacaagtccacaccaccaataagcaacattgaaaaacattgttgaatttaacttcaatacttgaaagagatgatgagattaaatcaatttgaatccctgccttccaacaaagacaaagtcccccaatagagcccaaaggctccacaataactgcattaaagaatccaagactatgccctaatcttcccaacggggaagcattagctttgtttccattgaaaacagaatatttacgtcctcctgaatcaccaagccctgtaaggccataactgccatgaactacctaaggccataatagttccaagacagtagtcccatgacccaccttagccacaagagagctctaaacactcacatagaaacaaagccttaaaaaggctcagaggaaacaattcctaacccctcaaggaaactagcaacgtgccactaccaacataggaactagagaaaaccagaactccacaaacatcgatcaattcccataggcacaactcattgacctttaaagctaaatcatctccacggtgccaaaaactagcaaaaggcagagaagaaacatcatactaaaccaaacaggagagaaagaagcacataccccaaagtagaaaatgaagagacctgatcaaaagttgcatcgagataatgagccataacaataaaagaagggcccaaatcaaaaccataaaaatttgccttccgaacgagatgccccataaaaccccaaaattaggcgagcacctggggatgccatggacgaagacccaaaaaatagaactggaccaccaggggaacaccacatatcttcaaacatgcaattgaaaaacccctcgcagaaacctaaaaactactctcagaaaggaacccgcaaagacgagaacaaaagaagaggagtgtggaatggagcatcgatgcacactggccaaaaagaggctcaaaacccacacgcaagctcagaggagcggcaatttcaaaattgcctaggttgtatggagagcactcgacgacatatcactttagtgtgtaaattttgtacttttttgcaattatttttttgaatgaaagattaatcttcattaagcaaccacttctgctactaagtaaggtagcaaaatagttgaatagactccaaactaaagtaacaatcaagatataacatagtggccttagcaaatgaatgggtcactatattagctaatcgtttaaccaaagagacataaacattatgtaaattagcaagcaaattcttacaatcttgaatgacaagtccaaataaggaaaccatgtttaatgaacattgaatagcttgcaccacataaaggcaattggtttcgacatacacttggcaccaaccacaatctttaatccaactaagtgcttcttgaacaccaatggcctctactagaaccggttctactgagctaagggaaagttttgtatgaccctcaataagtagtcctaaggcatcacgcacaacaatacccaaaccatagcttctgcaattattaaataaagttgcatccacattaatcttgatgctattaacttaaggtaaagtctaatactcaacaacatcactggttagaaagaaagaccatgatgattccaacttagaactttgagtacttctccattgttcaagataatcatttgtaaacataactatgtcttcatccttcaccactttctccttccaaactagatcatttctagcaccccatatggcccattgttcaacaccaccgtactgttggggattaatttactaggatctagatttactaccatgtatgttgattaacaccctaaatatgaattcactaaaataatagaattaaacacatataaagttaaggaactttacattgattgcaacgaaataatatgtctcattcaacccagatctctaacccttgtttttttctatcaaagagtattatcaagatctgagcccgactctccttcaggtgttgtattcttcacagtcttacacactatgattgagtacttgactttctatgggtgggcatgtactcttacactataaggctcaaaattataaaggaaaagaggggagattcaaattctatagaaggaggttctcaaattttctagttgtttgacagagaatgaaaactaggtaaacttaagttggagatagaatgagaactatatctttattccttttataggatttctcctagggatagatttaaattatatgacattaaaaaatgataaaaatgggctagaattacccttaagtcaccggccataagatgggccccactaaattagaattttgccattttattaaacaatttatcttttctttcacaaatgcca

SEQ ID NO: 111449 - DNA, 9201 bp, Cannabis sativa
  modified_base (176)..(180): a, c, t, g, unknown or other
  modified_base (9143)..(9146): a, c, t, g, unknown or other
tctaataatggggcccacaattaattaaattcataaataattataaaaatatcaaaaattagtgctaattgcctttactaatcccaattactaaagcgattattacaagaaagcacgctggaaatactcgtgttgctttgtagggtcagttgttagtccatgaagcagccagagtnnnnnactcgtgtataagagtcatcattctgtgggtgtacgggcttaatggaggcttgaagcggggacgttacataaaacaaaatggaattgaataatgagcacaagggaatataatggttcagtcagatcactgtctacttagtccactgttgcaaaggaattcgatgcaatttattcatgttggatcacttctttatatacaaagtaaatttctttttagttacacataactgatcagttatagaactattttacaattattatcaaaattaaataagaataaacgaaaaaaaaataaatgaagaatagtttaaatctatttttaataagtatggcaacgtatgtgacctatagggtgcgagttgattgttcatattcttgacaagctcgcaagctttgggtgcattctatctttttaaggagggtttatgagcctcgtgctaaggtgtctgcgttctgtctgagtcacatatatggatgtctcatatgcatcgacaacatgagacagcgagtctctatcgagttatttagtacgctttgtcgtttggactagttcattatgtaaagaagcgatctttacttagtcgaaggagaaggctacttagtcatcacatatgtctcacggtatatgcacgacttttataaacccatcttgctcctgcttattttatattacttggggaacaatatgcgactagactctgtcaaggtcgcatcatctcgcgagtttcagtcaagcgaggtcaacactcagagagtcgttaattaacaactcacccaaggattggatccacgtgtcaatttcataggagactgatctcgagtgtctatggaaaaaaatttcactgtaacacatgtccttagttttgcgactaacaactatgtcattagggaaactattagagagagaggcacgcaagttattatcacgagatggtgacctttggttgtcttgtcgaggttttcgaaaagacgaatgtaattattactttatttctttgagatgccacttcctcaaaacccttcggggtatgtgcaggcgtgttctctagagaccgttggatttgaagaccttaggcattctttttccatgtgtctatattccaaagaatgaggagtatcaatatttaatcgccacaaatttaaaacaatcctcactcatttttccctctcttttcttactttttcccctttacccaaaatttcaaactttttggaattttctagagtttcaaattcttgctaattgaagacgattttaaaggcttgatcatctgcaagagcatcttagaaagaattacattgaaggttagtgagtttcttccctgtagtaattttcttttccttaaatatttgcatacattctgggatttagggatagaaaatgtatgaaacgaatagggtccataaagagaataaaatttttaggcagaatatggtattttctctgaaaaatacttgcctaaaatttgaatactcgtaaatttttatgatgaactcttgaattctcagatctctatgatatgcccttctaaatatttgcatttttgaaattagttgacatagagtaatggtctcacgttgtctcagagttttaactcttaggccatatgtaaccagttttgcttaacttcgggattttagtctatatgcacttcagttgttgtgaaaactatttgagttctcaaaatggtgggtgtttccctctaagttaatgttcatacagccgcatgccccttaggatattggaaaacaccatactatttcttgagacatgcggtcaattttttttcctgcattttgatttgaaattttattattcgggtgagaacactttctgttcgaattgcacttgcaccacgctgaaaagttcttctatctttcagattagcaatctatcggatagctagaggtacgattctggagagggcgcctttggtaatgaatctcataagagtgatagcttcatacccacctcactatctgagaaagagattcttgatggtatgactcgagaaggctcactatctactagggagatagatctcatggtacaggaattagcagagccagacaccttagaggtgcaggatagcgaatccacaatgtctgctcaaggtaatttcgcttatccacaaattgccctagacgtggaagtcgaaaagatcaaaaaggatttcaaatttcctgatcacgaggtaaaagatgatgcagatggtgaaggtagtgaaaaagatactgtggacaatgcccaactagatgagcctttttcctgtgaggacttagtctcgcgagttaaaaagtttgatctatcggcatttgaaagactaaatttaattcacattgccacttgaaaaccgatgtcaatgcagtgacctcatcttctgtttactaaccctgcatttatcccaacccaaaacgttgtggttttaattcccattcttcgttgtggagagatgcttcctttccatccttttgtaaaggttatcctaacgcactacgacgtttctcctttctaacttactcccaacagttatcgcataatccttggattctatgcaatgtatgtggaatacacgcgaggagaacccacagtcgaggattttagctatttttacgatattaaaagtgtttgtcataataatggcttctactgctttagcaaatgggccaattttgagataaatggggtagaaggcacagtttccaatatgggagattggaagtcaaagtgattttacgtatttaagatgtcagggatcaggatagactttaattgtcgacctcgtacgtcgcctattttaacacttaaccattatttttgtcattttacagaggttaacatttatctatgttcgcagatagatcggctcgatctgtgctagacaaaaattatgtggaaatcattgaggttttgagcagccttccagttcaagatcggtattggcgtctactgtgtacttttgcaaagctacgagaaaataaattaatttcggctgacgctaagcttcagcaagaagcaatatacaaaaagccttcggagaagcaaaaggaaaagatagacaagcgcctctccaaacagacctcaagacaagtatcaggtaatgtaacttaacgattactgataatactatcttaatttctcaaattcttagttctgtgtacctgttcgcagatatgactttcttgaagcaagcttcctcttttaactgtaaactgaaggtcaacattgcgagtgcctctattgcaatgccagaaaagaggaagagttaagtcaaccactactcctggggtggatctgtcaaagaaacacttgaaggtcacccaagacaaagggaagaatgtcatgatggatcctacaaccaaggcttgtgacttcatggtcttacaggagaagttcgtgagcaaaaactttgtcgccaaagtcgaggggactcctaccgaagatcttttttctcgttcagccaaacttatctcctaattgatgattgtgtactcaggggcctttgttgcaggttttaaggatctcgaccttgaaaagaaacaaaactcaactcttcaagaaggtttgaagaaatcaaagttggacgttgtttccaaagacaaagaatttaaggaccttggcaaggccagagatcaggtagaggagagggccaagaagtcaaaggaaaagaccaagaagttagaggaagagaatacaaatctcacttgtgatttggggaatgagaaggagaatgcaaagaaggcttatgaccaagctatttctgattacatctatactaccttgaccaagctactagacttcgatttcgtagttttcggactagaggccgttgaaatggctaatatttttcgcaccatgtcccctactgagactcaaggattaggtgggaaccttttccctgaggatgctaaggatacaaacactgatgaagtcacggatggcaccagcaaagtcgcagaagatcccaatgcccctgctacttaatttatttccctttcttcgaactatttatttgagcagtacacgagtactcgcactttgtattaggtatctttaagaaacttataattatctttttatgttgctctgcacgaataatgtatccttcagggataccttttcttctaagtacttatatttaccatgaatgttttatgcatttacaattgtaacttgatgcctttaaacacgtatttatctggtcgttgtttttatctatatagccatccttcacagcttggtgtgatgacatatgaacatttcaattttcatattcaatagtgaaaaaattcacaaaaattctaagtatgtaattgtgaaaatatatgaaaaaacttcaaaattcaaaagttttgaaaatttaaagattgacaaattcattggataatcaataatacaatggcacaaggtatggatataccccctatacttagataatttagagcacatataaattgactaagtatatacatttgagtactactgataataatacttcaagtgttctttattctagactctatcgaagactgagtcattgagatcagataaccggtaagttgcgttaccaatcttttcagtgattaggtaaggaccttcccaattgtcgctaaaaaccccatgcgcagagttgcatgtgttgggtatgacattacgcaatactaagtcttctactcataaacttctttctttaaccttggagttaaaatagcgtgttgtacactgttgatagtgtaatcccataatgtatagggacgccacatgtgtgattttataaactagtttaatactaatagattaattaattattagaaaccgtgataatattaaaaacttgtctgaaataaaatactaaaaactgacattataatgacataaaaaacgtgttccaggaatccctattataacaacccaaaacaactcctagcaacccagcacgtaggtcgacgaggtcaatatgtacattgctggagaagactgtcacctcatggttgatctagtttttctttgcctttacctacaccacatagcacccgtgagtcacaaggactcaaaaagaaaagtaataataataatcatatagtttattattcgaatactatcatttatacacagttagaatcaaaccatcacgcattgttcataagatgaaatctaaatcactattggcatctgccacgaataaacattagtatacaaatatttggtaataaaaaactattatatcaataatagaattcatattcatttaatcatataaattatatatatatatgtgttacctcataaagtaaccatcttcattacatcacattccctaatcaggcaagtcaatgctttaatctgataatcctgtattgcattgcctaatcaggcaagcatgtgcaagacccaacatatcaacaaactaagatatacaatgcctagaagcacaaataatgcaagaaccgaattggagaaagcccataacagattacataaaagaaaaaaaattaccttaatgttcaacagaggctaaaaagatcatatcaagggcagcaaaatataaaattatcaatcatcagttgtatttgaagttgtaccacataccatacttaaaatgcgttgtcaaacccaagtcgaatttggtgttggttgaaatagacaaaggggaatgcgtaagccatttcagaagatgaatcagtgatcaacgactcatgcgccagggatatcattggccaataatatatgatgactcagccaactattctagggtatgtgagaatttttagagccatgccccatccattctagaccccacaattgaattaatatcagtgaagaactcgtggccattcttgaaatgggcaatgggcattgttggaccattaccacaagctccaatacaaaagagattcatgctagcactcactggttatttttccaaatggatcaaagtggatgccttttcacaggtcaaggataaaggagtagagaagtttgtgttaaaaaaattagatagagaaaagtaaagcccattatgaacaaagaaaagagagaatcccaagaaaaaagtctgtttgagaagcttcacaccagaagaacttgtactacaaaaggtcttccagaacgtcgaagaatattgggctgaaaaactaacagccaatgggaaagggccctacaaaatcgttggacttagaggaaaaggagcttatcaaatagtcgtgatggatggaagtgtaatagaaagaagctggaatgtcaagaatcttaaagattttatgtttaagcagtccggaaaaatatgtaaagataaagtattcttagaataaataaaatctagagcaaggctaaaagatgtatggaaaagagggatggaatatgaaaagaactattttgagaactaagcaaagtgtgagtctcctccacaagtggactaagacgacataattaaaaggccttcttaaaggcaatgtacgagttgtctctacaagaggactaagctgacataacaaaaataccttcttaaaggaaaaatacgagtcacctccataggtggactaagccaaacataacgaaaagacctttcttaaaggcaaaatacgagtcgccttgtgatatgctaaaaatttaatgtaaagaatataaaataatggtacattttattaaatggagaatttggtcgaacttactttactatgattttgtttactatcaaagatattgataattagcataattatctaacaacctagaacatacctttttaaaatagaatataaacacattaagtttgagtatacttacagaggtgacatcgcagaataatgactcattccattcaatcactctaacctttgatttgtttctgtagcaaggtattatcaagtgatgaacctaaatattctttactctgacataaccgactaagtttcatccgtcttccatagtgtcctgggtctcacacatgacaagtgtgagcaatttctgaattactaagataaagatgatagctgaattctatgagaaagatagaaaaatctcaaaagccattgtgtaaaggcaatttcaaaatcctttgtgtaaacaaaatttagaaatttcaataaaagaataagagaaaagaatgagccatgagggttttctagcttcatcacaatctttatataggctttcaataggtttaggttaaatatatttttaattaaaataataggataaattattttgagtggttgagattaaatttcactcaaaatgatggttgaattctatgagaaaaagagaaaatttttgaaatccactgtgtaaatagaatttttaaatttcactaaaagaagaagagaagagaataagccattaggaatttctagctttatcactttctttatataaacattcaatagggttaggttaaatatttatttaattaaaataatatgataaattattttaagtgcttgggattaaatctcattcaaatcagattagctccaattatattcacattatattatatatataattaaataaagattgttattattaattaattaattgtataatataaataggaatttttcaagaatatacaaaaaaacaaatatattactaaaatatagtgggccgaccttttaaacaattatacaacccacaaaaaaaattacaataatatttcctgttctaaagcttcagccgcacgaaacaaaaagaatcaccaacgaaagtttccattgttcaaccgatcaagacaaccaaaataaaacccaagtaggagaaaaaccaccattaattccggtgacttcacctgagaagaagacagggatcaatcgaaacaaaggttgattcgtattgatgaaagaaagagcaaaaaacctggttcaaaactaaaattcaaacaaaactaatcctcctaatatcaaatttcagattcataaaatgtatatttcaaataaatatatctggagcttccaatcaatcccaatcagatatattccataaaaagaaaaaaaaatacatcaatactatagctaatatttatcccattgcattgacgctaattttcgaatttccaatagtaaatttattaatatcaaatcacgaaaaattatagaaaattcgaatgtatctacaaccacatacattgaaatatgattcatgttttttatgttgcatgatagttgcattatcaattcataatggcatttatcaaatttgcgggtatttcatttgttagtgcaagagaaatctctttaaaaaaaaacttctataacatggttagttatatgaatttattcaattggttgatatttaagttggtttacagatgtctaagagttgtttctcaacttatttatattaatgtacaattggttgttgttaaatgttttttttttttttttaaaaaaaagaccaattacaaaatattagttgcataacagtttagttgcaacaacaataacgaataatacatacaaggttcaaaatttttattacataacttgaacagatgaaaatcgatagaagtaagtttcttttctacttcatatagattattattatttttgttttctgagtttttataaaaattggcccgcatcatatataatagtagtattacaagtttattatagttttaaacaagttcacttacaataattaaacttttataatctcaaaaaaaaggcgaaattatattcctagtcttttacaatggacagtttgatgatggaatgaattatgaaaattataaagctatagtgggcaatacatctcaattgattgtaaatatgatgaactaatacacaagctgaaagaagtcccggaatgtaacaaagaaaaaaatgacctgcaattgaaatattaagtgaaagaatgataccaaccgttaaggataaaagacgatcaaagtttatacttctacacacaattaaaactgaaggaacctaactgttgggttttacgccctaaataaaatccattnnnntataatcagatttacaattaataaagataaaaaattattttatattgcatgattc

SEQ ID NO: 111450 - DNA, 6299 bp, Cannabis sativa
  modified_base (57)..(62): a, c, t, g, unknown or other
  modified_base (6258)..(6273): a, c, t, g, unknown or other
gtacataaacaatcactgaaacagtaaaatttaatgaaattagacaaaaatctttannnnnnacaatcttaatagttcaggagaaatttttcacagccaaaaaattcagaggtcatgatttggtctatatcaaaatttggaaggaaaattgctaattaatttctttttttttttctcgagaaatatatattcgttgaaaggttaaagggttaagctttatttttatttttttcgtaaatggttaaggtttaatgatcccacaacgtcttcaattaattttaattaaaaaaaaatagggtcaaaatgaatccattactaataagtacacatgatcctgattctaaattttcaaactataacgcttatttaatttgagaaagacgataaaaattaggaataaaaatatatgttaaattcatataaatttggataatatgatataataagataattttatcatgttaaaaataaaatgagttgaaatgggtcaattagtaagatctactccaattataaggtatactaaaattttaaatttgttgagattttacattaaatttatgctaatcctataaaatttatcttatatataatattgttaatagtgtcatactatcaactttcttttattatttaaataatatatttataaataaactttttgtatatatattattggtgtttatttataattcaataaaataatataataataaaaaaaatgtagttttaatgtaattttgtgttgtgattagaacaaaatttagtgttacaattttattatttttatgttgatttaacatcaaatttaatatttattattggagttgccttaattagaaaagtagatgaattagacctatttcaaagtataataagtaggtagtgattcaacattttcaagctagagcattctcaatagatgagctaaaatagttctttattaaacttttaaagaatttggtaaaattatacatccaacaaatgagataaatagagagctaaaatagtttatagctattcttttaactacatgtagctcaatagtggtgaactaaaaatattatatataatattctatttttctcttgttcttttaatttttttttattatttcattactcttttttgtctttttcattataattaataaaatatataaaaaaatataatatttaaatgactcaaaaaaaaaaatatataaagaaatatcttgtatagtgtaatataaatatgtgaagtaaaatagaaaaacaaaaagtaaaattttgaggaagtattttaaataatagagtaaaaaaattattggtagcactcacatcaacttttctactctattttttttttttaaaatacatcacaaaaattttatattttttttattttatcccaaacttttacatcactatatatcaatttctctatttttttttttctgtacatcactaaaattattatattttaaaatatatatttattttattacaactattttttattttttataaaaattattctattattttaaatatatattttataatataaatgaaaaaatctgtcagtattatttttcaactcagttggagttgccttattttgtgactttgaatcgttagtttagaggcttctagtatttagttttgatcccaaatgtcaccaaaacatggctttattatataatgaaataaggttgaaaaggcaattatacaatcacagtccacactaagaatatgcttaattattaatgggatataaactagtccactcacccagaagtcgttgtaagagtagaacgacaaaacaattaagtaaaaaaaattcactaacggcgctcttaatttatgattattttttatttaatgaatggagcactaaaaacatacaaatattattaattaattaatattgtattgtcacattcagccccaaagtgtataaacccaagctatagtatagtatattacttataatagaattattccaaactaccaagtttttggacctattaacttggaaatatatatttttcataatatgtccatgcaacattatttatttatatataaataaattcatcaccttaatgtgtgagtggatggtgagggtggcaacgtttgcgaatcacaaagtgcaattaacacaaaaggtcacttctttgtaaagcaaaatattaagataaatcccaaaaaggaaaatgaattatttaaaaattaccaatctgagtagtattgttattgtattgatttcatcactttgtttaaatgtatttattatttatttttattagacactactagttagtgatattatttaaaaattattttttaaaattatatataatttaatatttaattacacaaataataatatgatattaagtggagtactagatagcaataatatttttaaatatttctttaaatatatttagttgaaataaatattgttaatgtatgtatttaatatttgagtacatattttttgtaaattattattgtcatgataaagtttaataattagctagtactatgtagtttttttaatgatcaattatttatactaaaggaagaaaaagataagaggtcacaatattatttcgtttggaattaccaatctaagtagcaatgattacgtttgcttagtaagatgataggccatacgaatatatatgagaatggctaacatttatattagtgcttaatttttttttaattaaacattaagtttcatataatattaaaaaataatttttaagaatatggtgttttgcaaaaacacgattagtgctcaatatcactactatatatacatatttataacaataataattataaataaataagaagagacaagataaaaagaaattgtgagtggtggtggtaatggataaatgctatagggtagtagccatagtaatactagtggtagtagtagtcgccataaaagactttagaatttttattttatttttcttgagaggaagactctagtctttactttagatttgggtacttaggttcttactttgtttgaaatatatattataatacaaaatttaattagtaataataaagttggtaaacgcacttactaagttacaaaagaaatatcagtttattaggggaatggattctaagatatcatttaataatagggcacaatataaacacttcaattttggaacaatgttttctatttattattattattattgtatttgacctaatagaagattgtgttagaccaacttgattgtaatattaatactaatttaatgaggaaatcataaattaagaccattttctaagatctaaaatttgtcttaagtttgatacaaaaaaaaaaaaaaaaagcttgtgttatttttggcttactatttataattatactctaatataaaagatataaaataagtaaaaaatattaattattattaatggtcatttaatattttattaaaaatatataaaattgatatttttaatcctttttattgtttgaatttaaagtatgttttgtaaaagtgaaagaattataattattagtggcacaatagtaaataaaaaaaaattatggtggcttaaatttggcataatattatattttttttatcaaatttaatacatattttaatatattgcaaatttagcacactttttataaatattattggagtggtattatttttaagtggagcattgctaatttattattgggcaccagtagtgcctagcacattctaaacgtatcgtcttgtaattgactaacgatattctctaaaaattattacattaaactatttgagactcgatacttaattagaccaataacgatattaaaacgtaaaaaaatattaaatactattgatacatttaaaaaatattaagtatactaacaatacatcatcctttagcactggtgggagatactctaacattaattcattctctttcattaaaaaccgtccaatataatatggtttctcttacgcactcagctcaactcaaactaagtagcctatggacaagtgtgcctacttccccattttattactttttatgtttggcaccttatcgacttaattaaatgtcattaaatagccaaaacccttgaaaaccccaagtaagcttctttttttcttcctcctttctaatatattcttcatttaaacaaaatattaaatgaacttggaagttgaaacaagagcaatagatagagagagagagagagataagttaataaaggtgagatactcatatttgtggtggtggggaaaagttaataaagatgaggagaggaaagagaggtagctaataagtatgtgtaacaagagtaagagttcacgtgatgagaaggcatatatgtcatgtagtatttggccattttgggcaaaatgtgtgaagcatggacctatgtgttggcccatattaattccattccttaatgggtgcattgccaaactcatttgtactccttcccaacaaattaccgtatgctgcaacttatgtcatcttaaccactaagctaataactttcactcaaataccaagcaagacttcaatgaacatgtgcaactttaaattattgtcgtcacaatatctcagctctggacaagccataagatgaagtagctaagattgtaataaatgtaagacgaaataaatttatgtttggttcataatatttattatctcatattaattccttgatggttacattggccaacccatttctacttcttcagcacaaattagtatacattaagctaattaattgcttcactcaaatgtaaaccgagttgtgattatagatgaaatcagagaagattcaatcaaatgtcaatgtattatattcatttcttgtaaagacttgtgctcatctcttcattgggataattgatagcattgtcttatgagatttaagattttacaagtgtcaaatagccatgcacaaccactaaaaaaaaaccaatctttagtgacaaccttttaattacaatataaattttttgtgactaaatgtgacttttagaggttgtttgcttgtgttttttagttttatattttcagaattgtattttcaaaagtgagaatagaaaacaattttttgtcattttaaaaatttaattatgtttagctaagatttcttaaaacttttttttttagattttttttactaataaaaaaaattcaatattctacaacacactatgacatgaacccatcctaccccagaccggacctgaactcggaccccagcccaaacccaaacacgaacctgaacccaatccctgtacgctggaccctgaacaaagatcctggactccaacccggacccggaccccaaacatgggccctaaacccaaatcctggatcccagacccggagctaggtccaaggtcttgggttgggtttgttatccaaggtccgagtttgttttttgggttctggatccaagttcgggttcaggtctagggttcgggtttgttgtttggggtctaggggcagggtttgggtccaagtccgggtcaagggtctagggtttgggttcgggtctaggtctggattcaggtcttggtttgggtctacaatctaggtctgggtcgcggtccaagtccaattctggggtccgagcccatgttgaggtccagggtttaggtccaggttggggtacgggtctgaggtcggggtcgaggtccgagttcaggttcagttccaggtctgagttcgggtatgtgagcaaaaatataaaatatgtataatatgtttgacaaaaaaatattttttaaaatagaaaataacattttcatgtactctgttttctagctttaaatttttaagaaatatttttaaaaatttgaccaaacgacccctgttagttttttaaagttgttttctgtttcaaaaaactaaaaacaatttttaagttatgaagccaaacaacccattactcactacaaaaagttacttgtaactaaatcatagtatttagatatacgttgtctgtaacgccctaaataattaggcacattacccaataaacttatgaaaccctaatcccctaatcaagattactagtaaaataagcgtggaaattaaactttattaataaacggaatgaaaataacttgtaataatttaaaagttacaaaagttgggatcccaaaagtatttacaaaacactattacaagttctttttttttggccgacctaagcggtaaaacagagtctcaaaatacatcactggtagacccnnnnnnnnnnnnnnnngtgtggcccgaacatgtacattcttc

SEQ ID NO: 111451 - DNA, 4585 bp, Cannabis sativa
ataataataataataacagaaaattaaatgccatcaaacacattgaataaaacaatgtagttcttcttagagccgcgttactactgatcagttgcagtagtacaatcctggccccaccctaatcatcctctctcctttgctacatgttaccatctctagtctttcaatctctatgaatatctctcttcttacaaaaactcatacacatagttgtcaaaatgacagatcaagatcaagaataaatccccaatgtgatggttgtattaaataacattattaattgggccgaagtgtcacattcaatgccagttccacaacccaccacaactcttttttttttttttttggttggattataaatatcaatatatataatttttccttttgacataaaaattgattttcttatttcctttcagctgtgcttaagatccctatacacctagctagttatgctcttttctgtatagacgactttccttttaggagagattaagctgctcactctcaagtcagccaatagaattctgatcatgactttactttctcaacgtgaactgaaacctaaacagaacccttgtgagttttgagcgaaagcgaatcccttaaaccaaactagttctagctacgctaatggcactggttatggtggttctggttctcttctagagtttattactttctctccagctaaagaactttctttggttcgttgggggcccattagagatagagatgggtgacaacaagggggaaacaacaaagaaaccgcagtcatcatccaaacaacagccgcagccgcagtctcagcagcaacaaatttcatcttcttctcctaaagatgcaatattagacgaatcaaacgaaacaagacctcaccaccaccaccaccccccacaccaacaaacgtccaccgtagtcgtaagtggagcctcccacataatatcaagccctttgtatatccctagtggtgcaacttcatcttcaccgttcgatcaacaacagtttgatcaggcagttaataatccaaaaagacctcgatacaccacaactgggcaatggaagatactcccgtctccttcttctcagcagaaacagcaacaagttgcccaaatggcaattttgacgggagaatcaagcccaatatcggctccccagcaacaaccacccacgcaagtagtactccacagtactgcagctgcttcgtcttcggacaccgcatcatctccgtctcactctattccgtctctttcgggatccggtcaagacacgagcaagcccgaactagctggggaaaacccagttcaccaacaatttagaaaaggtaaatacgtgagccctgtctggaaacctaacgagatgctgtggttagcccgggcgtggagagttcaataccaaggcgggggatcttcatcgagaatggagtcagtgagtggtgcggatattaatcttgttggttctcaaaccaaagggaagactagagctgataaggataaagaagtggctgattttctccaacggcacggggttaatagagatgctaaaactgcgggaaccaaatgggataacatgttgggagagtttcggaaagtttatgagtgggaaagaggaggggagagagaacatgttgggaaaagctattttaggctttccccttacgagaggaagcttcatagattgccagcttcgtttgatgaagaagtgtttgaggagctttctcagtttatgggctctaaaatgagaacaccactcagtaccagacctggtagctccctaattgttgccggagaatctagagctctcactgcgccacctcctttcaaagaagacgatcagtttcctctatctgcaggtttgattttgcggcttttcttttttccctctcattaattattatatatcaagaaataaggctaggcataattaattgctgatcactctcactctcacacacacactctctctctctctcatctctttaatatttatatacatgtacgcagttaggacgacaaagcaattgattatgggaagcggtgttgagacattatactatggtgggagagggggcttaatggggtttgagtcgtctgtagacatggggggcccatctccaccatcaacatcatccaaggaccttcgccgaattggtaagatacgaatgtcttgggaagaatctgtgagtttgtgggctgaagaaggtgagctccataggggtagagtgaagttacaaacctcgagtttcttgaatgctgatgagctcacttacttggatgatgccatggttgctaccacaatggaagctttcgaagaaggtcctctacgaggattctccgtggacagattcgtttctggacaacaagtcaaagtttttggcaggaaaaagcctttctcagtctctgcttctggtaactgttattacgtgtttcttaatttatgatatgcaacgatatatttggaatatacttccacacacacacacatatatatatatatatatatctcttgtaaatgagacaggaacaaaacgtatttttttttaaattcatgattgtatgcatgccaggattcgctgagaaagttcaccagcttccattcacggaaccctcagtaagatgtgagttttcttctaacataaatttcgaataaatgtcacattttgtgagctaatgtgaatttaattttaatatacataatacatttttactttagttagacaccgtatacatgcatatcatagatatgatctattttatataataggctatatatagtatatagactctggtaattaactatttagtttggtactttttttttttttgaatatataatagtatgagttttcttcttacatataattaatataatttgacatttggccgggtgagctaatatattaaatttttatataaatacttcgcatatcatattatgtatatatatttgtacactgcaataatccattagtttgttggttgatcagcgattccaccatgggattttcaagatccatccgattactacgtgggatgtcttcgagtttctccaccatcaatcccaaccttgttcgagctctcttggtatttacaagaggcaccaccggaagagctacgtttaccacttcgtaaggatgtttatcgagacttaccacaagggaaagaacatttctttacaatctctaacgaattagtagactgtagagctttcacatacgatatacttagtcccataatccgtacaacacctagtcttaccagctccacttccacaagtagagactccttcattggcctttgggacgattgcattaaccgaatcgtgtcaaaattctgctcagttgatatagtcactgttcgtaaacccactaatccaaactcaaccgaagttttacaagaccaatggccaaacatgacgggttttgtaagaaacttttgtttgtggagaggggaagagactgatcaagtaagagaaggacaaattgacccatcaaattcattagttgaaaaattattctggacttatcaagatcttccatacatattaggttactacgcagttggttttttggtaacattttgtgcgctaagtcgaggggctaatcaggaccgtataatcaggacagatctacagtcccttgacttatcctcaccgtcagatcgactaaaagccctaatcccgtgttatcgaattgctagtctactccctttactagccgaccgttgtttccacagcgttaacaacatgatcaacgtagtggccagctctaaaatgattccctatagcgatttcgagagactcgacacgggtaatggaaacgtgaccgagatcacaccaaacacagtgactagattctaccccaataagagaaagtgggctgcagtcaaagaaatatacgatttcctggaccaccgtatcccacacgccgagttcatccaccgatcgtcggagaagaacttgggcctggtattcaagcccagaggcttctcaaagcccgccaggcccatcaactacgatcaactaatagaatcactcaagtgcgtgaccaaagcactagtggccttacacgacttgtcgttcatgcatagggatttaagctgggacaaggtggtgaggcgggtcgacagagacaacgagtggttcgtctccgggttcgaggatgcggtggtggcgccccagatatatcccatggttaagctggcgggtggaggagatcaggcggcggcacgtggaaggcacgcgcccgagatggagaggggtttgcatggggttaaggttgacgtgtggggggttgggtacctggtgcggacgtgtggggtggggaatgtgccgaagatgttgagggagcttcagaacaggtgtttggatcagaacccggagcagagacccactgccgccgactgttaccaccatcttcttcagcttcagtcgtctatgcagtcagccacggctactggggtattgatgtgactcgtgttggttctctgatccaatggttatgatacaccaactttctttgtttttatttaacggggcatttttttattattttttaaaatttctttattgggtattggattatatt

SEQ ID NO: 111452 - DNA, 1352 bp, Cannabis sativa
cattgtaatccaattcttccaaattaatgaaattcaatttctctctgctattcaaagctaataaatagtctacaactaaatcacctctgctttgtagacaatgttttgttattttgcaaaggagatttcaggtttattttcttattgttttaggagccaaaattattttctcaaacttcaggcttaattctgagggtagcaaaatctgctatatattgctacgaaatggagcaaagcgaagttaaacgggtattagatgcttcaggcttcacccaaagtaagttaccttttcggtacttaggcattgtaatatgctccaaattattctgttatcattgagaaaatggttgctggtattcgtgtttgcagctcaaggaatttatcctttgcgaggagattcattctaatcaactcaacattaatgtctaaacatgcttatcaggctcaaatagtattcattcttaagagtatattgaaacaaattaatgttatttgtagaccatttcattggaaagatgttgcagattatggtggggttggtagagtagcttgaaaagaaatttacaaaccaaagaagaatagaggattggatttttgagagatagcttctttgaatgtagcagttttggcaaagtatgtttggatgatggagacaaaacaagacattctttgggtaaaataggtcagcaatgtgtatctaaaaaatcggtcatggtggaatttcgccccttcagttaatagtagccggtagtggcaccaaattattaaagtgaaagagaagattaaacaggtacgtatagagcaataatttgtttcttcttattattcaatcagtaaaggctattctttgctcaacctgagtgaagagattattaactagagtactcatgttcggggatatattttaatgttcgcaagcatcaattcatcatgcagcaataagaaataggttataaacataggagagactattcaaatttaatgtttgttaagacaacatttgtctagttcgtggggatcaaaaggaagagctcactcctcttttgtttgaatgtttatataacaagagttgtttagatgctataaaattgtggctatgatggagaataccagggtgacagcttattgggttactaaggtcgattttaaaagcgagatggtcaagatttaagaagcaaataattagtatggtgctagtggcagtggtttatcacctttggagaaatataaataaagttttatggtatcaaaaagtattaatattctcctcaatcattaagtatataaaacatgatattaaaagtggattgtatataattttgccaaagaaaatgacaaaaaaaaaaaaaaaa

SEQ ID NO: 111453 - DNA, 3511 bp, Cannabis sativa
  modified_base (47)..(52): a, c, t, g, unknown or other
  modified_base (3481)..(3483): a, c, t, g, unknown or other
atcataaagtaagaaaatttatatatttaatatatattaaataatannnnnntattattttaataatttttagagatgcttatcattagaatactttgaccattagcagaagacccactaacattaacatattggtatctctaaagatagttaatagcccaaggaccgactatactatctgagagatcaagcttatgatcatgaacaaaagtattatgcctatgccaaatgtgtcagctaagggcaatgaactcctctaatttctatttactcaaaatatccacacgacccagtaacaatttataaaagcaagaggcgttatttaaagaatcgagacctttcaaaatccaatctaagcgaatagacttaagcgaagggaaaagccaaagaacacgaataatagtctcattattctagaaataaataggacaaaccttagacgctttcatattatgacgagtcaaattggcagatgacgataagaaattcaaacttgccttccaaacaaactttttaatctttggtgggaggttgagtttccaattagcttccaccaacgagaagtccctgagaaacctgaaacttgtcaccaacccaaactcgaaattgtgctccagtaaccattctttaccgaataaatattgttatccaagaagtgccaaataggcctatcttgtcgatgaaacaaagaacaaggatagacaagataacactagcttccatattatcaaacgaatattgaactaaagaggagttccaacaaccaggatcaagcttgagatcactaaccacttgaagatgagagctaccagagaacaaataagaccaacccacacagtccttcgaaatccaagcatcctctctaacttttacagattccctttaaccaacaatccaacaacatccttttttcaaaaaatcacgaccccataaaatacttttccaaaagaacgaggctcgcttcatctcttcaacatccagcaaaagaaccattactataatagaagcccttcataatatgtaactttttataattatatttattaattttcaaaaaattaaaaaaaaaaatattctaaaagctatatttagaaaacaataatcaaacactttttgttatttgaaaactacaaaaatcgttttgtgtttgcattttttaaaacaaaaattaaaaataaaacatagaatatataatgccacacatgcctgtacgcatttttcattctcgtattcactaggtctcacttatgttaagaatgtcgagtgaatcttaaatatttcttaaatattacttcgcaagttcacacttattttgaagttgtaagaacattttggaagacttatgagtcactcacaaatatagttaattgtaccaaaatcaaaatatcaataacattttcttgttttatctcattaatcagttaccggaatttgaattatattcttaacatattaatcaaataaaaaaaatcataaaacttcatgatttcaatagattttaatcataatgggagagcgctaatcgaaggtatcatatacgcaaaatttctttggtatatcaatactctaccaaattgtgtgctcaatagcttgcagagaaaactcgatagcacaatatttgcttctaagagttaattttcacttttaaaatttttgtagggttcattaacatttttatctatgtaacacatactatacgaaaatgggcttttattgtcacccaattacgatagtcaacgttgttgattgtcattattgaggatcgtatctctatatggcaatagttaattactgtcaaaaaaagagagcaagtggcaacaatagtaactatcaacaagtaaaaaattaacaacgataattattaaccatcgttgatgctctttagcgacagttattaactgtcaacaaaacgactcatacataatcaacacaagctatggcaacaactattgtattgaccatgtttctaaatatattggtgaaacatgtttttggcgtaataacaaacttgtcgtttgccctatttttgtcgttaatcgaaatatggactacaactataaaaaaataaaatagatatgtctaatcaaatgtaaactatatgattgtaaatatatataataatgtatatataaaccttttgaaccccaagccttagaaaaagatgtaaaaccaagtaacttttcattgaatataattgatcgatattcatgttaatgttctagctatagttcgtacttattaaacctagctagttaataagccaaagatgattatgacaactaaatttaatgttgccaaccaaaaaatcttgaaacttttggtataccccttttatatatccccttatttggatccaaactagccaaggaataaagttttaaaatacacataccttttttcaagcaaagagagaataaaaataaaagacatgcatagagaatctaaccccatgctagttgtaattgatgtaactagctagaccagttgtgaaccaaaagaatatcaatacacatataaaaattatacgttgtaatcatttggcatattcttattttatcgtgaattaatttattcgagagagtgatacatatacaaaggttttgtattgtagtgtgagtggcatgatcatatactttgatttgataacgtaggtaccaaattaaggattggagagtgtgacttatatatattatactatatcacttttttggtttggtgcatggttggagatagagggtctcaaaatttaagaaaagaaagaaagaaagaaaagtatataaatatatatatatattaattaaatgttaatttataattaatcacgacggcaccatctcatagtgttattagatatgaatgataccaaataacaattaatcctgtaattcttacacaatatttactagagaaataacaacagttactatttgtttcttattttacaaattacaaaaaatttaacgataatgacgactcgaccctaaatataggcagattagggcactgactattgaggagtgaccatgcatttaaagtaacaaagcaagctaattaagtaagtaaaagtaacccatgtgtttgtttgtgttgatgagcctcacaacttgcaacaattactgctgaaataaaggcaacataacgtaacataacataacaacaattaccacttggctgtaaataaacgtgacgtaatgaaccaatatttcaaaattacataataatactatatatatttgtgatgatgaagttgttaatttatacatgtattactctatataatttatgatgataagaatatttattttactaacgttattatataacatttatggacagtttattatatgttatgttagagaacaaagtcacgctttgcataacatataataattttaaattatatatttaatatgtatatatatttaattgtttgatgtagtttataaaaataaattaatagtatatatatatatctattctnnntaaagtgtgcctatataaccgaattctt

SEQ ID NO: 111454 - DNA, 4249 bp, Cannabis sativa
  modified_base (4224)..(4224): a, c, t, g, unknown or other
tattaggcttaataataagagaaatatcacatttttctaataagtaaaatctaattatcctaatttaatttatacattattatgtttatttttttctttttctaaaaagttaggggagctatggccactccagagatgtatgtagttccgcaatgacagcatacaactaaaggcaaaaataaaattaagcataatttaataatttcatatttcttcaaaaaaaaaaaaaaaacagaaattaagttggaatctccaaccccattatttgaaaaaaaaaaaaaacaacaaaagttaaccaatgcataattttgaatatattggatcagccctgaaaatttcaaaggagggatgttagtgattggtgggaggcacatgatccatgccatgggcaaagatatatatagagattattagattagattctatcctttgattgaagaggagagctagtgggtcccacagaaatggacccgcaagttagggtatatatgttttctttatcgaaagtctcaaaaatatattctcaaacctgccatgctgtcactgtcacactacgttcactcagtcacaaaaatacaaaccatcatccctttcctagcgtaactcatgagattatatatttatttttttaattggtgtgacgaccacagttgtgaaatctgacgtgtatggtcgaaatccgacggctcacaatgtcccactcaactcaattaggatgacatcaaggccgtcagttgatggtgaggattttgggtccagtgtgttggggcagtgtgcggacatggtcgggtccactcgctcatgttctgcccaccgacgctgtttttttttcatattcttttttaatgtttatacacaaattaacaatcctagtcttagttgcccttttctcttctccttacttatagttcccaccaacccaatccacacaccaaaccaaactaaaccaatcagtttttatatttcacaactctctctctctctcttcctaagccattactactactactactcatttttggtttctaattcacttgatcgtacgtaatatatatagtgagaattaaatgatagagatctccatatattctatatagtactactcatacatatattgactcactagaacttcttttcgttcttcttgctatatctcttcttgaatcatatatatatatatatatacacacacactacatgggctttacttctgtacaagtttgcatggatttgtcatctgattggctacaggtatgttactgttatataatactgccatgatgaagcactatatactttctctccagaaaccgaaccttatgatagatttggcaaccaataacaaaatggttttgtttatgtactaacgaaaaattgtaaatttatagcaaatccaagttcatatttttatgctgtgaatttgctaaattcactctcatacgtacattgtgcttttttgtcaagttatatataatactcatcttcgtgtaataccgtaaccacatttttcacgagcaaagagctagcaaacacatctaactctgtataaatttgactatttgtaaacaaataataaccgttaatcaaatgaatagtattatttctttttgttttgttttgttaaaatctgtaattttttcttagtaaatataaattatatagactatttgtatagctatagctgtcagtatatataggtctctagccctataattttgatttgattgatgaatagacattattgcaaacgacattattactgactcaaaaatctaactctcctgaactaccttgatccaatttcagggcactattcacgaggactcgtcaggaatagattcttcttctccatcaaacgacaacattctcacatactcgaagcccacaataatggaacaacaacaacaacaacaacaacaaaggctcagacccccaaacgacaatgccctcgtcaagtgtccaagatgtgagtccacacacaccaagttttgttactacaacaactacagtctcactcagcccaggtacttctgcaagacttgtcgtaggtactggaccaaaggtgggaccctccgtaacattcctgttggcggtggttgtcgtaagaataagaaacccgcgcccaagaagacaaacgacaacaattcggctgtcgttttaatcaacactaagaataatcataacaatggtggtggtgatgatattggagggagtaccagtaccactgatcttaagctctcgtttcctgaccaggttcagttttctcacctcagtaaccttctgggcactcatgggccaggcccaaatagctttttcgaaagccctaggcccattgattttggcatggttgggataggacttggtaacataagtaactcttcatcacatcatcatggaattattgaaccaaataattttcatggcttgtgctctccatttggaatgtccttagatgggactggtactgggacctttatggacacgtgtcaaaggataatgatgtcgtatgaaggaaatgatgatgaccagaaatatgggattgatgtaaagccaaatgcaaagctcttggcccttgattggcaagaccacggtggttgtacggacgctgggaaagactcgtttgggtaccttaatagtttaggcttgatgaacaattatggtccccccacaatgaatccattagtttaatcttttcttttaattagtgcttaaggttaattaatggtgtgtgataagtgacttaattatgatatgctttagactagctaggttatcccaattataaatatatatatgtatggatctcccatattgacagttctttctttcgtttatctttacttgggttctttttatgtaatgatcatcatatgatctctttattgctttttattgtcttgacttattataaatatcaacatatatatatatatatatatgaaagagtaagagtgtgaatgaagcttattatagagtcaaaaaatgactgcttttatggaaaatattgatctaatatctttctcttatttaattatttttttttgagtaatttaataatttcaattggtcttttgggtgcaacacattcaaaggtcttaggattttgttatactaccaagaaagatatgataagagtttttgttcttttgtagacaatcaaacattattcttatattttcaaatgttgatgtctgcttgctattgagcaggtgattaattaagtaattattgattaaagttatttcaaatattttttatggtttttatttttttgaaatcttccccttttcccattatgtctctctactggtagagaaaagagagaagctgatataagttgttttattgaaaaaaaaaagaactaataaagagagaaagaagaacgaaagggtaagcaaattaaagcagagagagttttccatatataataaaaagggcaaagttttcagtgaaagtaaaagtggagttggaattgtgtgtcgttagtttatggctccattcaattcaattgtactttgttgtgttaggtgtgagccctttttatgattggtaaatcgactgggaagaagtagatactggatattaattgctagtaaaaaggatggtttatcttttgaacaagtatgcgtcacaagcataaatttgggttgtttagtttctttctacgtcgcctaattaaaagaagataataatttggcttgtgggaattttactggggccacaagtaaataaataaatttagttaactttagtacaatttagaggaattgtgattccctaaataaaaaaaaatatttagtgtgtttgaaagtaattgtgtaattggccggccgttattactgctgcagtagctgctttggtgtaccatatatgaaaaaatcgcaatgagatgctatggaattcagggaaaatagcacaagatactgttgtccacgccataaaggaagatgtaaagaatagagtgttctgtaattggccaaagaaccacaaaccagctgatgccgattggtttgcactactatagcagccttcctttttgttttcagggtcagttttccttttgttgcagctgtgaaataggcgctgccactgcttgtaaaaatatatatatatatatatttatatatatatgtggaacacttaatggggaactcaaaaaaattaataaggtaataatctaataatctttttatggcaagtttctaacaattatttttttaaaanaaattatatttattttttataaaat

SEQ ID NO: 111455 - DNA, 15068 bp, Cannabis sativa
aaatatttaaaattccgtaaaaccgtatttttgtaatttttttgttgttttggtgtatttgtgaaattatccttttttttaattcaactttgattggaagggaagaaattatataaacaatttccattaaaataaataaaggtgcaaaaaatgaattgattttttttaggtctttatattatatactgaaatttcaaatttttttacttttttattgtggggcaattttttttttcaaaaatactgtattttttttttaaaaaaaatactgtgtactgtgttaatttttcactattgttcctcgattgttttttagttgttccactattattttaataattatcttttattgttttacgattattttataaaaatatattatttttgtaaaaaattctctgtgacaataaaattgtaatcttttatcgaaaatttaatatttttgcaaaattccttttttttttttttttttttattttttatgaatcaaatacaaaacaaactatttacaaattaaacatcatctccatttgagtcctaaaaaaaaacactaatcacttacaatgtattaaaccacacattttcctatattgaaattgctatctattcaaacttttgattctatgctttacattttcttttactcgttgaacacaacttttaattgtttattccaaaagcaatcatttcgatacattgagctcgttatccctgcaattgtcattttcttcttaaacttagaaagcttagcccgagaaatatgtccgaaaaatcaattgaatttagttttatgtcaatatttctttttttttttttttttttttatgtcctcattaaatatgacattttgtactaaaaaaattgatagaatatatgtaaaataatgtttaaatattataagaaaaaaaatgtatgtgaaaacacatttacatattctttttttttctatgaagattaaactttcaaaattaaaaaaacacacacatctttatgttattttaacctaaaattacaataataaagtaaaaacaaaaccctaataatttctgactctgtcactgttcctataaatagcaaacacatcaccttctttttagttaaatatatagtaacactaataatagatcattatttattatttatttattttttaaaaaaaaccacaaatgttatgtatggccttaaaaaaataaagaaaaaaagaagtgtttggcacgtaataattaaaggtgagaagaaaaaggataaccaattaaagaataatacatttagagaataaaataaataataataatgacttgtcatattccaaaaacagctagattaatataataataataataattaagctcatattattatttttagggcataacatgcctataaataatgaccctattcaattccaatacctcctcacttaggcatttgctcttttcattcattctcttcttctattgtgaataataataataacaataattttttgttgttattattattcatatatatatttttttcatttgcgaaaaaaaaaatggagatgaagaagattgtttgcgctgttatgtttgcagctgcctcagtcaccgtcgtggtggctcaagagaccacggcggcccccgccccttcaccgacgagtgcagccacctcggtcgccactcttcctttgttgggtgttgcctctcttgtctccttggttggctactacttgcactaattaattaattaattaataattaaattattttataatttaattataattattattatttggggattaagatggtgatcatatatatatagtattactattttttttttatccttgattattggaatttgtaatttttttaatattgttatgggaagaagatgaatatttgtttctttgttatgcaattaattaataaaagagtttttttaattagtgcaaataatattattattgttgtcattgttttcttcttcttgaaaatgtatttcatttttatggtttgtgagtataaatcatccatagaatgaaaaaaaaaatcttattggttcattatttatatttacttgcaaaatatattttagaaggttgaatggtgaattaatatataattatatatatttatcaattaatgaacctcaatacaatggcaaaatttatgggaaattagttgtatattggtgaaaaatatagtatagcattgcattgcaaaaatgatctttccaaatcttcatttgaaataaaataccaaaaatatgataaatttgtacttaatttttatacatatgtatggaaaaatatatattatactgaaaatctcatatttattgaaaaaaaaatcatatttcttataattacttctaccttagaacaatatatgctaatgaatagaatattaaggataataaaaaatatataattaaagaataatgtctttttatccatatatatatgacatatacattatacatacatatattgtatattaaatataaagttgatgataagaggtcatgggtttggaatcaattaaattaaagatttggtcactaaaacaaagattatgattctgatgaaaagtgaaataaagttggcatttttctttatttatttgtttatttttatgaagaaaggaatatttgaacagatcattccaagagagacaactagatataataatggggctttaaaattctatattcatttttcctttaactaacacatgcaatgcagttgctaatcaaaccaataattgagtgttactaattaaaatttatttattgaaaaagtaactaatttgcagagctaaaaagtaggaacatcctaaacaattgacattattacaatgtttataataataatatttatcttgaaaaaaaaaaatcaaaattgtaaattagtaaaagtggtgaacttttcttattgctgtttaaatcatattgtctatatatatagtgatatttctccataaataaggttgttcatacaatgtgaaatttataatttagaactctaattaatttagaccaaattatttaaaatcagatcaaataaatttagtgtcaataatttgatcaattcggaccatttataattttttggttcagtgatagttataaattttttgtgggtgattcaaaccaaatcaaactacttaattatttatatatacttaaaatgatttttttttattaaaaattgatatttaggaacaatcttaagcataacattgatagttattttaatatatattgttctaaaattatctattttcattattatttatgtattataaattttacaacatttatgaaatacaaattatgatttcgaactatactaatccatccttaagtagattgatttagtttgatttgagcatttagtttgtttggtttggttttaaatttaaaaaaaatcatcattattggcagggccggccctgggcataggcggactaggcctgtgcctagggcccaaaaaaaaaatttctccttttaaaattatacaattttttttgctaattttaagaaataccatttttttttctacataggggcccaaaaataaatttttactctgtagcccactaaatttcaggaccggccctgattattggtttggttcgaaaaataaaataaatatccaaatcaaactaatctatgaacacaattaccacaaggatttttcaagtaataatgtattattagttttcaaaagaaataattattgtcaacaaagctagcttagtgtttagcattttctatccaaaataaatgttatgtataatacatgtgaggcacttctaaatttgttcaaccattgatgataatcattaattttccttgcagtgtatattcttaatataattttttgcttaatataatgctaatttatgatcatcccttaccattttgtatccactaaaatatttcaaacccaatttcattaattattgtaaattaatttgcaaagcctattatttttgttgcgtatttttacaacaaaagtattttttattctaatattaataaataaataaatttaataaaatgatcaaatgttttggtataaataagttccatcataaatttatttttatttaatcattaaattagctatgaatggctaaaatgtaatcaaataaatttctaaacccaatacaaacgacgtgtcgtttagggaacgaatatctttacccaatttaaacgacatgtcgttcggataattgcccaatcaaaacggcgtgtcgtttacatgatgaatttcgctaccctatccaaacgacgtgtcgtttacataatgaatttcaatacccaaaacaaacgacgcgtcgtttaaacaatggatttgtctacccaatcagaacgacgtgtcgtttgtacaaaactaagatatagccgccaacgccaccaacagtcgttgtatcagtttcttcttcttcttcttcttcttcttcttcaaaaatggcagccatgatctcacgcagagtaatgatcaagctcctaaagccttccccaactccaaacccaccttccttcttcccataccaaacccacaaacgtccacttttcgatccccgcaattacgccaaactttcttcaatcgattcactcttctacatacaaacccactcattctctttccaaacccacgaaaccctccatcaatggcaactcattcgaaaacccattactctaatcacaaacccaacaagaagattcacctcaaattcaaccgaatcagaaaaacccaataacaacaacaaagacccaaatcaatacccaagtcaaaacccccaattcaagcaccaagagatcgaaggcccgacagtggaaagagacctctctccattagcgaaggagagtcgagatgtgttggagaggcttatgaagacaatgtacggattgagcggagcagtggctcttctgggtcttgttcaacttggggttggagcttggatttcgtacattacgaggtcttctccgatcactgaggtttcgattcagagctttatggcttttgggtttccttttactgtggcttttttgttgagacaagctgtgaaacccatttacttctttaagaaaatggaggagcaaggaaggttgcagatcatgactttgagtcttcaagtggctaagaatttgaatattctgtttcttcgtcttcgtggggtttctttcatgtgtgttgctggtttgtcttttggtgttatgttcactctctttatctcatcatcaaagtgataacttttgtttttgggttttttgaattggatttttattggatagaatctcaacaaggtgtaataatatgttttatgtattgtgatttaaactcatattcatctattttattgaaagacagaaatatctttggtttatatcttttagggaaatgggatttaattgaatgtatgagttagtggttttgtttataataatgaaaatttagtggagagaaggaaagaaatacccgttggttttcattttttaggaaaatgggatttacttgaaatgttaagctacaattcatggttttgtttgtattgcgattttagcaaaatgggatttcattgaattgtaaagttaagctcacaaaagtgctataaaatatgccaagaatggtaactcaaaatcaaatgatcacttagtgagtgagtcttaccattagtaaggtaccgtacctatagcaaaagaagaaagttacaatgaatcttttccttttttttttaacttttctatatgagaaagtgaaattacaaaagcaaagtagtgaaaacatcgttcgataaataaaccattcatccatctatccatgctgctattcacagtttgtaattaatgccgccagtctataaaagaactcaagggtaggaacacctaaacagctactactttttcttctcttactatattcccaaattcacaaaattcaacccccccattccaatttccattccccttaaccaaaacaaaaaataatcccagaaacagaaagaaaagacgcatcgaaatgcaaaacctttgcccccacatcatcgcattcatatcctgtgattttctctacttgcttcgccgccattgatatttggaaaaaagttaaccatgtacaaaaaatactatagtccgttattgtgaatctcttggtttattttgggtcccttccctgttcacttttggttcaaggtgatcataatttgaattcttatagtaaagacaggtcgatgaccttctaggtggcggtagtagtacccaagttggcttcttgtttaggttgttcagttctaacataggttagacttcgcgcagtgggagaaggaacagcgttggttgatatcgaagccccactctcggctggagaaggctgagcatctcgcttccattgcatgcttctggcacctggtttaatgagtggacgaggacgaaatgaaccaaggccccctcttggataggcaactctaggaaacctgccggtggcaaacatagcaccccgtgatgctcgtggccatgtcatcacaggagttgtttcttgatgagcagcagctctcttcacaacctgcagaagaaaaatccataggtaaacaaagagaatacactggaatctgttcatatttactcatataaagttaaattcagtttatgttcatcaaagaatactaaataagaattcggagaaaaaaaagtaagaaaagatagcttgtttctacaaacaaccaagtatgggaaccggaaaggatcgtgtttggaggatctgagttccaaacgatggaaaaatgagggagcggttataaaagaaaacaacagccgcactctcattaaaacacagacccaatatagcacaaattcaatcataacacagctatgtgagcaaatagaaaatcctattttcgatagttgaaaaaacaaaaggtatttggaaagcagacacattttgttcaaaataaatcactactttctaacattatattaccttgagaagccgtgacatgaaggaggttccgtccaaggataatgcattatctgctgcctccttgcgcatgaactccacatatgctgacctgcacagcatgtaatttagttacccaaataagaaaaaggccaagaaaatttacttgagcaaaatctaaaatgacttaccctgttggttgccctgttgctgcatctgtaactatgacaacctttagtacttcaccgaacttgttaaagtgccttgaaagactatctttggtagcaccaaaatgtacctgaccatgaaaataaatgatgaaacttaattctctgcaatggacaatgacaaaccaaaaaacaagggaggctcagtcacttacattgttaacaaagagtgttcgagaatctgcatcttctaagggacgaccagttgcataacctgcacaacacaatttacatttatacataaataagacgttacaataatcggacttgacagtacatggcaaagatgttgaggatcttctgaaggaaattcaaaaactatgttttaatattttcccaaaagcaactaatttggtggattttacttttttaaaaacaaatgggatgttttatgacagttaaatcctcaccagtagtagatggcagagttttctgatgctctttatgagattctgtaggaagttttatctgtaaaaaatcaccaaaaccacaagttcagtaccaaaatcaaagtcaatagtagaattagtttgtgtgtgtgtatttatatatataaatgtgacgagcatatggacacatgtcttacatttccatttactgtgacagggtttctgttatctttcattattcgcattccagatattgaagctcctacatcacctgcctgcgcagatttccagccacccacttgagcaacttcccttggctcctgataatgggaaggcttccaagtattgacattcacagaaatgtttacaatcttttgtgaggtatttgaagccacagaggtttggccctgaactttatccctgatcgaccgcattctatcattagcattcttagctacactatactcaaccatcattgactcttcatctttgtttccaccagatgtcccagtttgagaaacatctctaatattgcgacccaatacattgacatcatcatacccttcattttcagacaaataatcagaagccaacccggtctcatcttcaagcatggtcatattgccaatgtactgcccactctgatcacttctttccagatatgttgaatgattttgcttctgaatttcattgacagctccaaattcagtgtcctcaaaagtagtttctccatatgagacaaactggtcgtgagaccctgatacatccatttcacggccaagtcggtcaaacacatttccagatggtttaaatcttgatacatcctcagcagcttctgccacagctttgattactgctgacataggatttgcaactctggcaacagactgaatacgacgaggacgatcaactgctgatgaatcagtggtggatgtagacacaacagaacggagacgcttcaatgaaggctctgttggtgcattagagggcctagacattgatacaatatcacgcactgcaaattgaagcagtcgtcgaggagcatcaacattcatctgagttgtttccctctgttataaatttataaatgaatcagaaaatgagtgaatattctaactacttttctgtgagtttgttcagatctaacttttggtggaaattaatgtacaacggaagaatattatgacttcaaaaaagtaacattaaattttataaaagacaaaaaacaattaaggtcttaaatgtgagagtggccaattgtccccccaagggaccaccctcaacccgaaatccagtaatctaatactgtgtaatcaatatcactcttaagaagaaactctaataaagagaactgtaatcaagattcgaacctttgcattgtgtctgtcatcagttcgatccctcttcctttgaacagcaggtcgagcaggccgtgcaggtcgtggagaagaagtcttccttgaacgcctacttctatgatgagatttttcatctgactgaagattttcaattccagagcttcgaagaggaggcggttcggcaggatttctaacaaggcctttccattccctgttgtgccttgttctagattccttattggattttcctctatcagtttcagaatccaaatgctgggaatcattcattccagatttctctactactgacaatggtttagacttaatcaattcactcacacaaggttcctcaggttctacatatgaatcaatatgcgaagccaaatgatcccacaacctatttacgatgaaaatagtaaaacaaaggtgtcaacaacaacatcatcatccataacaaataattaatcaaaacctcagaagattttgaattaccaagacacaaaagaatcactgtcatctcccaagaatacattcaactcgttcttcgcctcttctttgcgcctcccattctttagtaagacaattacatattcctgcccatgcaaaatcataaatcatttgcataaaccaaataagaagtaccacactcaacaacttctctaattcactgtctttcagatgaaaattatgtataacataaaggttgaataatgaaacatcaatatcaaaagcttaggatacaatttaattgaatgaataatatgaagaacaatgtaatcccaatatcaaaatctaagatgaaacagatagatacttatatttacaatctcccaaattatagcaacatttgtctattgaataaggtatggtacgaattcaaaattcaacaaaaacaatcaaacataatcctacattgcgaaagcagtaaaaccataactataaccaaataaaataagaagaagaacatacaacgagagtgtcatcagtgtaatcgcccataaactctttaagcttatccataacacggtccctcaacttctcagcgccatcacccgtgaaattagacctaaatgttcgatcgtcaacctgatcaatgctccccatctgaaaaccctaagttaacagtgttattcaaactgcgtcagtcgtatcgaatcctcgatctcccaaaaaccctaacaatgaatcgatatatctatctatatatatatatattcaaaagacaaaaagttttgggagtggaagaggtgattatggagaggaaaggctcaggtgaggagtagggttagggttgtgtgtctctctgggtttcatggaagaagaaacccccggcgattggagatggcgattcagatcagtgagtcgcggagcgagtcgagtcgagttgtaaaaaagaagaaagtgtaatgtttttgttatcgtaaacgaaataattatctttatatatatttttattattattattattactaatcctactttcctaaaacatattttgaaatattaatattattatttatttaaatgaatgttattatattataaaaagttaccgtttaaatataaatttttgaataaataaatttattttgtaacatttaggctaatcagtagattattattattattatttttttttttttgaaaaaaatgcaaaattcattaagaaaaatccgttgttatagaaaaactcaaaaattgatgataagtatatgttcagtctccactagtaacagaagttgccagtgtatgggcaacactcttcgcagatcgcgaaatgacattacaagaaccactaccaacaatagctgataaagaataattatataataaaatagactgaaaactaaaattaatgtaaaacttattcatccaaccaattgctattaataatgaagatattgaagccaaattgatgcgcaagaaccaaactcagatgaataacaagcaactctgtcacattaacaaaagaatcacctaacacacatgatgaccacgccaaccaaaccacaccctctgcatcccgtatcactcccctcaatctaacaaatgtcctcctcggaatcaccaaagcatccgtcgctagagcaaagaattcaggaggaagaggcatccatcgcatagctcggtttataattgggttcgcaaggcccaagctcaaatgaaggtctcgccgatcatactccttaaattctaccagatggttattggctgtgtcaggaataatatccaatcttaactgtttgttgtcaaataatattgagttcaccaaagagttgtcattatcaattcaaaaacctcacgaaataacttgtcaaaaaataataggagaatctcatatatttgcccatatgcacaatgacgagcaccaaccacacccccaatcgatccacactaaaatcaaccatgaacaaaaaagtttcagcttcttctccacaatcagtagattatttaccagtggtttatttaaatttcccaaaataataacatgaataaacaaagttaaaagacgaataatgggatgaaaaagcccaaggcccatttcagtgtagaaagaaagcccaattattagtggcggttgttcgttagccaatgaaaagacgccacgtaagcaagcttagtgtagtatcgggaacagtgtataattttgaggttcgtcttcatctacaaccttctttcttcacccacctttatcaatggtgatagatgctcagctgaaccctcttttctttggacttatcatccgattctgatctcttccctcttcgctctacaggttctccatctactccttctccttctccttctttttacctttttaattctctcaaatttcttacttttttctatttattgtttatggcgatgtttaaaggggagggaagacgaagaagaagaagaagaaccagtctcggctgataggtgatgttcttatttgattccatttgatttgtgttttttaattcagctaaattgtttgattgcatcttgtttggtaaaaggtcagagttcatgtattatgattatgattctttaaaatttgaaattgttgaatgatttttatagccatggtagttttgtattgttgatttgatgtttgactttggaaattaaagtggtaagtaattttttttgtattggataattgttgatcttgaaatatttgaaaggcatgaaagtctagcaatataatcaaaccttatgaaatgatgagatgaggggtgtcaattagtaatcacggtcgtgttcgtctcgtgtcgagaccttgatccacaactcgtttaataatcgtgttagaagggttacaagacactactcgtgtaacccgtttataaatagatcttgtttggaaggcatgaaattctagcaataatcaaaccttatatgagatgagatgaggggtgtcaattcgtaatcacaggtcgagttcgtatcttgtgtagaccttgattcgaacacaactcgcaactcgttgacaagacactaaccgtgtaactcgtttacaaatagatcttgtttgaaagacatgaaattctagcaataatcaaatctcatgagatgaggttatgagtagcgaatcatgagctttatcactctatctaacccccaagatggcttgtgaaagtttcacatcatatgcttaacaatgtttttctgtattttgtttcctaagtacttaaaatttacatatgaaaatgctatggatagaatgttagttcattttcatcaaaattagaggacaaatcagtgttcaaattgtttccattcagcttgatttatattacatcttatttgatttggcttctgaaattgaaaatgtggagtgggagagagatcttaagataattttggtgtttgcagagatggagaacaaagatacagggtgccaagtaccaccaggtgctcccaaactttgtgccaataactgtggattctttggaaatgcagcaaccatgaacttttgctctaagtgccacaaagacttcatactgaaacaagaacaatcgaaacttgctgcctcatctattgggagcattgttaatagcagtaccaccatcgacaaaagcagcgagcatcttccaatcgaagtagaactaaaagttggctcaaccaattcaattctcatttcgacacagacaccctgcacttcatctttgaacacaaacaacgaggagaagaacaacaacgcgaaagagagtccaaatagatgcggaacatgcaggaaacgagttggcctaacggggttcagttgcaggtgcggaaatctcttctgtgcatcacatcgttactctaataaacatgattgcgcttatgattaccgaaccgctgctcaggctgctataagaaaagccaatcctattgtcaaagcaaagaagctagacaaaatctgaaaaaggaaggttcattcatgtgctgctcttctttatcttatctataatatcccataaaagctttatattttaagtttgatgtttatcttttttgtgttatagaaatgttgaaagccaactcaattattcataaagctaatatatattaccactttggtttcattatctcatacatgcttggtttaatcacctctttactcttgccaactacagctctgtaccaaatattctcttgaagtgtagttaagcaacatggacccatcttaagccagaccatacccctcatgagaaaatgacatttttgctgcttaactgttccttcccacacagtacactattagttcgaagggtaaataccattttagaccctgtgttttgcaaaaattaccgattggatcctgtattttgttaaatgacaaaatggactctgtatttttcaaaatagtaaaaataggactctgagcttaatttttgacgacttttggagcccttactataaagataaattgtattttttaaaactattaaaaaaaatatatatattattaatataatctaacttaaattcatatgtattaacttaataaataatctctcccttttcaaaaaaaaaaaaaatctaatatattttttataaataaataaataaataatctaatatgtaagtctccttcaggtggacgaattttggccacgagtgagtgactaaacaataaaaagccatttcttttttcaacccaaaacccatcacaatcaagcaatgttaatccgccacgtacttgaaaacatcaatccaatcaccaccgttggatcattctaaatccatagtgtttgactttactttgggacccacacaaacccatcctcaaagttgttctttctagtagtgtaatggtggggcccacttagccaccgccccctctttcatttcttctttttgcaatataataatatcctttctcttctccttcgttgcgcacgtgtgttcttttagcttcaaacgaactaaccaaatatatcacaattcacaaatagaaaatacacatgaccaatttcaacatgctttttttctatttatttctttttaattttattaactaaaaaaaagtgtattactaataataataatattaagttttttttttaatttttatattttaaataagttttttttagtattttttacaaaaatttacatattaattaacgaaataaattaaatcgcaataaaaatttacatagcaattcacattaaaactaactgaaagactcaaaacataaatttttaaaaaataatgtattaaataattcttcttctaataataataatattaataagaagaagaagagaaattattattttttgttagtaaatatttgttatgcttatgtatttgaggaaataaaaaaattacaacttgaaatacgtttggttggtggtataaagacttttcctcctttacgaaaagacaaagtataaatattaattaatagtgtttattaatatttatgtactttgtcttttgatgatctcttgattaatggtaacatttttttaaaaaaaaattactaaattaaatcaattatggaattttgctcaatcttttagtgtaagtgtattttacacttttctaatatgattattactgaatatatatattattacaatattaaaaagggaattttgattttatatacttacaaaattaaaaaattttattattataccaaaaacttaaatcataaaaaaacta

SEQ ID NO: 111456 - DNA, 6167 bp, Cannabis sativa
agagagagagagagagagattgggcttgggatttgagatttgtacgaaaaatcttctgtacatgaagaagattcttgagtaagagtgtaagagataaagactttgagagatttcaatagagaatcaatctcgactgtaatgtaccatgttcttgctcaatcaataaagaaaatttggatggtgtttcaaaactagagtaaagctatagatcacattaatctataggacttgaaccagtatatatcttggtgttgattttatttttttattgctttattgtttctggttttattgctctactcatccatgtttgtatctccgattattgtttgtgaattattaatcatgtcatttttaattgttggttgattaagttttaattgatttgattctgcacattagttgttatttttccacatattttttttaaaaaaaattagtggcacacccatataaactaaagaggcatttgaataacttgttatttttttttttggcacatggatatgttgcaatcaaattttacttttatatgatgacgtatattataataattcatacattctatttttttgagaaatttcaaacaatttactttgctaaaaaaatttattttgtatatacatgcatgaaattagagctcgtttggtagaccgtataagggtggtattgcattaaatgacaagtaatactatatttggataaaatattgtgttgtattaattattacaaccataaattttaatacaatgtgaattgtattatttaatacataaaaaataattttgtattagcttgtattataatatttacaaaggctttgcggttggagacctcgaccccaaactctattgaaccccaaacctcgacatcggacccagcctcgaaacttgaccccagcccaagactaagaccaagccccagcctcaaccctaaccccgtatccgaaccccaaactagtcctcgaatcctaaacaagaaccctagactaggaccccagcaccggactatggactctggacccatgacattaaacccaaacccaagacctcaaattcgaaccccgaactttgaacccagacctcaaaccctagcccaaacatggccctagccccagacttgacctcagcccctgccgcagccccaggcccggactcagaccccagacctgtccttaaactcggactgaacattaggcaggttgactgggttttgcgttcgcagattttgggttcaaaaattgtacctgaacacgacccgtgaaatggtttaggctcgcgggttcgggttgacccggttaagtcgttaatttttttgtaaaaaaaatcaaattctatatagttttttctatatgataaattaatcatataagttataaacttataacaccatattctatattcgttagattaaaataaaataaaaatgcattaatttcaaatttaaaatacaaaagtcaaggttcaaactatatataatatattatattttgttatttttaatatcatctatataataaaaatataatgattagattttagggttttttttatttttaatatattatatatgtaataaaaataaaaatataatgattagattttagacttttttttttatttttaatatattatatatgtaataaaaataaaaaataaaaaaatagtaagaagtgatcaggttggcgggcgggttcaggttcaatccgaaactcggtgaccataaaaaaccaactctcaaacccgcccaaaagtgtactgggttggacccgactcggccaaacataatggatttttttaattttacgggttgattgggtcgggtataggcaggttggccgagtctaggtcaaactcggtcaaaatattcagtctaatctgctactccttaggcacaaggagttgtaaaaaataattttctgctccaactctggagtcagaggtgattggggaagacaatctagaagaaataaaaaattcattaacatatagtagttggaagaatacgagaagtaaaatcaagaaaaagacaaaatacttactggttgtgttaaagtccaaactaagtgtagggattcttttcaagtggaagtcagagatatagagaaccagtattcccagaagtcatgactgtacttcacgaagctaatcgaacatgccaccttcttggagtagcgttccaacatgttgaagccaatcttccccttgtggcccctcatgggctcagatttaattttgtagaaacacaagatctcctctggtgttggtgctagttttttatgctaggtacagaggatgtaccatccagataagaggcaatacacctaagggataaattataaaggcaccatttcgactacgacacaaaatttggcaaaataaaactttagcaaaaggtgcacacccatatccacatgggcccaactccagattccaaagcctccattcgcacactttcttggcttctctccgtgaacggagagcctttctagtgcaacccaacaacaccttctaacccttgcaaggtttcatacttcctcagattgttataaatcctaaagttgttgatgtactggtccatatcccatggactatcattcaacattaatcttagagcattctcctgctctaggttctcttcttccagttcaaccactttttattggacctttttcgacatagtttctataaatagaaaagaaaaccaagtagatagctacccaaaatatctagcatagaaagggagcaagggaatcctccctactaaactacttggagaggtccccacagttacaggctaaaagaattcaaaattcgttcaaagaaatcctaccttcagtcaaaaaagaacatgcaaatcccagattccacagtgaattcaaaagtgtgattagagacaaaacagtaaataaacacatacctattggtggaatcaacggtacgaaactgatctttgctgggtctggtagaggtaatcgagcacacctatcatgaagaccattgactagagtaatcaatgagttgattttaaagttcaggtcgacgttctccagttcactcctctgtaaacaattgatcactaggggtggacgatttagaaaataacgatttctcagatagaaaacaattcaaagaacggttcattcacaataagaatctatcactgtattttttctctcgaatggatttgaattcaagtgattgaaaatatgaaattggagaaaagtggtaaatggtgttttttgtggatatttatactcaaagtggcaatttacgtgagaatgaatgaacgattcaggatcgtttccccaaaaggataagcacatctgacggctaggaaatctaggcatcaagcgtgataagtaattaatgcattcaagaatcgaggtgcaaaataatgattaaaatactttccttaattttcacgccaacaatgaacaattgtcaaaataaaagctatcctggaaagtaactcctcggtaaatgtgtccctcaaccaacaaatggttgccatgttaatttcccaactctaaagatggaagtttactttccatgatcagttagcaccatgaaagaaataaaattactacttctcgatctccacatgcccactcatatagactgggacaagctttcacaatgcataatatgctggaagcttggagggtaaatattatccgtatttccagtaagggatacgtggactctaggtcaatatttaaagcccgtcagtgggctcaaagaagataacacaaaaccttccagaaaggtatccaagttccataatcagacaagctccgctaaggacaacccgcacctagaggcagttccagtaccgcgatcccagagggaccaaatagtgtgttcacggaagacaagcctggtttccctttttattcaatcacacagattaaggaattaaatattcctcaaatctcgacagaagatcgtatcaagctaaaaatagaaattacctaaataaagaccaagcaattaatttctaattatttggccataattataggacacagttttgatagcttaaccatattccatatgcctagtcagtagatcgaccccttcatgggcatggcttcaagaaggcaacccaatcttatgtattttcatgtaattaatctccctattagaggaaataaaaagtaaactaagtattgttctcataatactatcaatacctaatgattcattctgattgaggattaaattcccttgcaatacttactcaggaaaaagtagagaacatatactcattgtatttctaaaggcttttctatctaaaaatacataataatattgactcgtggactaaggctcgttaacttttcaaccacgtaaaaactttgtgttatttttatttctttctctgaatgatcatttatttattttattctaaattattaaaattagctttccgaaaatttcggtgaacacttgctatggatccactcccgcatttcccactcctcttggtgctggatcatcagcacgtcatctcgagactcataacaacgatgacaatgatattattggtctttaggaccatagatattttataattaactttcgaacttgacattttttctcaaactttttttaatattttactttagcacttttatttattcactaagtttataactcgaacatgttcttattgtagtttgatcgggatactatttaattatatatgtgaatactgttttcttatttgattatgattctttcaaatataattcaatatttgaaattaattataatcctattataaatttttaccggtgcaaaattgtgctggcaaaacttacctaatcatcaataaaatgtggtgagtaagcgttttgtcggcgcataagtgcaccagtataactatttcccaccatattataattggtgggtaatggttttaccggcgcgtatttgtaccggtaaatcttttacccgccaattagaaaagatatgtgaaccttttatcaacgtagaattgtgctggtaaaagtcattttaaccgtcaatagatggatttagccatctattaacattggcgttttaatttttgctgacgcataaactcgtcactataatccaatttgattggtgcatttagctattgcgtcggtaaaaactattttaccgattgaatattgcgggcaagttttttcagcgtgtttatacgctgacaaaagtttgccggcacattgtgcatagttttatcagcgcaaatttgtgtcgttaaaagtcttctttcttgtagtagttttcttaaaattgatgagaaaaaaaatagctaccatcttagagaatgatgttagagggagtctcacactagtaatgtgtggaaattgaatactatatataacattcaagggtgtactcctctgattgataattaattttatggtaaatagcagcataagtatctaatgttttaagtttgtaagtggcataaattcaatatttatttttagaggcataagtacctaatgtttgtaaaactgtaatttttttccaaatttgtcagtacagactccgttttgaatttattaaaagaacacttggaagtaactgatactacatgttttttatctagacgatctagaatttgaaccttatatgtgtcttatttaagacaataacatagtttgtactgatgaaattagaaattttttttacagttttacaaatattgaatatttatgccgctaaaaataaacgttgagtttatgtcacttacaaatttaaaattttgagtacttatgccactatttacccttaattttgagatgaaatcttaccatatcccaacaatgagtcgaacttgctattgtagggtttctaatcgatgtgtgtgtagtgaataaggaagtgtttctagattatttttagattattagacttatttcttgaaatggtagtgctttaattagtagattgtccgaggttattaaggttggactagggaaaggtcaaaatttaccttgagtactaaattgattattgttggtatagattttaattgtagttttctatttacattagaaatcatactttatagtcacaataaaatttgtgattaaaataaaaaaaaattgtgactaattataaaatatctctcttatgttttgactaaaaagtctgtggctaaaggta

SEQ ID NO: 111457 - DNA, 16096 bp, Cannabis sativa
gtggtagattataattagccaacaccactggccacatactgtatgcaagactcatgttgccaaatggattaaatccatcagcatctaaccccagtcgaacatttctttggtcgcttgcaaactcaggatgttttgcatcaaagtctttccaagcaagaccatcgactgggtgttgcatcaccccatcatcttttgctttaccagtatgatgccatgtcaaaaagagaaaccttaaggctgagcttgaaggtgctcaaaaagaaggctaatgatctttgtgaagctcatcagaaagttagtaaggagcttgatgaggcaaaccaaaagcttaacaaggccaataagaaacttgaaggggctgaggagaatgccatagccagagttaactctatggctaaaaggtctatctattgtgcctggatggctaatccaaacataaatttaagctttttgggagaaggagacacggagatgctggccttcatcgagcaaaccaaaaaagataaagttgttgatgccgaggaagagaagaagaagaagaagaagaacttttcaagtccccaactatatagggttagttatttagatatatatattatttcagaataatggtcatctggctgagacattgtttgccctttgtggcttgtgaaaaacttttcctgtgttggatggccaacatatcttatttatatatttttactttttatgtctcacattttgcttttgagttatataggtttatttattgcgtttcaattcacaatttaaatatttttctcttgatttagcttaagatactttgagttttatgcatttctaatgtcattttctttgtcatatgagtagttaataatctaccatgtttttcgtgagcagtttacaatctgccatgttatacacgagcagtttattatctgctatgttttactcgagctgtttataatctgctacatttttagagcaaactttaaatattttgaataatttactttaggaactattttgaatatcctttgattgctcatatgaatagttaatcctatattcatatttttagtttaagtattttttttcaagacacatttctaagatgatgcgagccgttatccactcagcttgcacatagctttctgttgtttttgtgagaggaaatctcatttacaactgctatttcaattctttattttaaagaaaaggtttttcagttcatgaatttatactgtccaaagacaattttaatcaattatcctttcttttatgaaaaaattttaatttttaggtttttgcaatacagtatatatttctaggtggactctagttattatacatatatatgcccccaagtaattttaaaggaaatagactttgtaattgcttgaacaaatttaattttattaatcattacagagataaatacagtatttacatactaacactactggtaatatagtcgtaaatgttcattattctagagattttttattagcgagtcgttaagccaagctaatttataaacccccattcccacgacaacttcaatgacataaggaccttcccaatttaggttaaacactcctacaaatgaatctcgcgtatttgtaaatacacatcttaacactaaatctcctactttaaacaacctttttctaactctcttattaaagtatcttgttattcggtgttggtaagctgcattggttatttgcgactcattttgcttttcttcaagtacatctaaggacacatttaaaagttcttggttttcctcttgattttaaaattcacgcctgtgggtcacgatgttaacctctacgggtaacattgcttccaagcaaaacgccaatcagaacagagtgtgtcccgttgttgttttctctgtagttctatgggcccaaagcacttgtggtagctagtcaacctatcttcctttggcagcatctaacttcttcttaatagtatcttttaagattttgttaacgactttttcttgtccatttgtctgaggccttgataccgatgagaatctcttaatcattttattcctttaacaaaactcagtgaataattcactatcaaactgagttctattgtcagatactattttaataggaatgccaaacctgctaatgatattcttgataacaaaatcgagaactttttgcaagttatggaaactagaggatcgacctctgtccactttgtgaagaagtcgactgccacaactgcatactttgctcctccttgccctgtgggtaatgcctcaatcagatcaatctcccatattataaatgggtatggcgaggtcatcattctcaactcggttggtggtatgcaaggtatatgtgaaaacttttggcatatcgcatttctcaacaaattcgtgtgtgtcttttttgattattggctagtaatatccttaacggataatcttcttccatagactctgctaacctacatgatccccacaaaagtcttcatgaatttccttaattatttcatttgcttctactggtaacacacagcgtaagagaggcatggaataacgtcttctgtataacttcccctcgaccattatatagcgaggtattaagtataagagtttgtgtgcctcggttttgtttgtaggaagttctccactaactagatacttgataattggtgtcatccatgctggtgaagtatctatcatcttgatttcttcctcttcacatatacttgggtcgtctaaaacttccaccggtaccaaattcaacttattgatatcaaattgggatgctggctttgctagtgcatttgcgttagagctttgttctcttggaatttgttcaattttaaaataatcaaacttttccaagttcttttgaattttctctaagtagttttccatctttgaacctttcgcttggcattctcccaagacttggtttacaattagttgcaagtcactatagcatgttatatttttgacttttagtgcctcagctattcttaaacatgccaataaggcctcgttttatgcctccttgttcaaggtatcaaactgaattcttagtgcgtagtggaatttgaagttgttaggcaatattattataactcctactgttgagccattctcatttgaagccccatcaacatataatttccagttttccacctcacgctcaacattgggtctttttctgagttcattccttcaattaggaagtaagctagagcttgttctttaattgacactctcgggtggcaagttatgtcaaattatcctaactcaattaactattttatcaatattcctgaagcatcatgttttgataaaacttgccttaatggctaattggtttaagactttaattagatgcgcctataaatatggctgtaatttgcgagatgcatgaattaggcataatgcaagtttttccagaggtgggtatctcgactctgcccccagtatctcgactcttcacttcatttatatatcttttttgggcatcattattatttcccgcgaggtgtggcgctcctgagattaccaagatatcctcaccctcaactggaggaggttgcattctctagttgttcgggttattagggttgttaggctggttaggctcgttcccttgatttctcacatactacctaatgtatccccgcgagatcaagctttttgtctcatctttcagttgtcgacattcttcggtggtatgccttatatctttgtggaagcgacagtattttttttaatctcgcttatgcctcgcgtgcctcattggctcgggtttgcagaacgcaatcctgttttcattagcaaggaatatattctcgcgagtttcattcaactcagtatataccaaataaattgatacatacttgtcatgttttttctatttctttttatttttggatgattctttcgagtcatcctttcttttcgtgatcgatccactaggattgtctacctttgtcattattgtgctcactattgtcgtacttgtgctgggtttgcttctcgagcttgtattcaacagcttcattttgtttctcgcttcctctttacgcacaaagacttgtgcttgttcattgaactcattaatgttcctcacaagatgaccctggtgatcacataattcacctccagttgttgacaaatcaattgtgattcctacttggagtgattttagttgaatactatcattcaggtttctgacttctgcagcagccatattgaagcgacttaaatatgccttaagagactcaccaagttgttgttttatatgggttaaggatgatgcttcaagtcgacggtctcttgcagcttgaaattactttttaaagtccctggataactgttcccaggatgttatagaatgatgggtaaatttatcgaaccagctgctcgcagctgctgttaaggaggtcaggctaccttcgctcataattacttacagatcttgtctccgagtaactctcggattgataacttcgtgaattacttatgctttcttagttagcataataatgccgagatctacttccttctcgcgtttgcctactcgatcaactatgccctcgagaccttgaatgtcccaagcttaaacttgcttcatcttgtaccgaccttcttctatagaaaagattagatacacgtcatctattcaagtacgtgtatacattttctctatttgctcgagaatgacgttgaggatgtctggaaggaagcctgcttgaccttagttgatttccagggtttctcttattagtgcgtgggattccctagttccttggtcgaggctaccttgcttcttcattcctgtgagatgcttctggcacatcagttcgttcgttccctcggttagaaaatccatgggaagtttggggaacatctcgtcgatgttcttcattccttgtattacttggattggtttcattatccattgggacattcattgtatccccagattgtcttccttggtgttttggagattcccttggtttgttttctgcctcctgattttggagcctcgaggtcttcctcatggtcttcttaccgtaggatcaggttggtcttgaggaactgttccttaggccgccctggctctgcagcctctctctccaactcaaacgttttgtcagttagattcagccagtcgttatcgaagttgtctattctcaaactctaccaatggtacatacctggttggatgataagcatcctcgctcctagacaagtatctggcagaatcattggcatcctcattcatgctttctgagttttgaccattattgccatcgttccttcttgaacgtggcatttcagaggtgttgggtctttgagatcccatgggctctttgctctcaggttgattattgtggcattaatcagcactagccattgaatttgtgtagataatgtttgtaaggagggttttttttttgagtttttatcaccaaggctctcaatgaaagcaccaaactattaatgcatatttttgttaaccaaaataaatagtatttttgcaataaatatactatagagataaatacgtaattaataaacaccagatatttttacgtagttttgtagttaaaatctacatactccacgagtcctaattattagggatatttttgagtacagaatacaataataatttttcaataagtaatcttttctctcaaatttgctatcccttttcccatggattttgtccctatttataggaatataggtaatcatttactctttttggaattgattcaaatataattgttcatgaaacgtggataatccccacgtttcatttaatcacacatgggatagtatccaataactaccgaatcgctctttatttttatatattagacgattatgctgacttggaaggttatgtctcgtctggcataagttatccttcttgttcatattgataagaaaaaatgctaagtgttgggaggtagttcacctcgtcacatcccttcattcgaagcaatattgcgaggtgatcgtctcgctatgtgtaatgcgaggctgttgtgtgttattacatttattctgctcgagtggatgaatattcccttcttgtctatttacttgtgtatatttcgagtcgtacatatgtctcgtcaatatcagtttaatagttactatcattgtctcgcttaagactacacaatcaacgagtttgaatattatctattaaacttttatttaattgtaacgagttatttaatctgcatttaatgatataacattactatatcatcagtattgattcatattccttctctaggacatgtgtcagcttctggagtataactgaattttgggtataacacatttatattccctacacgccaaatagcccttgaataaaatactcgttaccccataaaatatttttccaaacaaatgagcctcgttttgattttttttttatctcggtgaaggatcttttcctgaagtacaaccccttttacacttgaccagccaaaaaagaaggaacattataaatatgagaagcttgcttagaaaggagagattgactaaaaaaatgaaggtcctagaattccatgccaccatcttccttatgcaagcaaagcttatcccaagtacacaatgcatatttttcttcaaatcattccctcaccaccaaaagtgagcagacatacgatgaatatttttcataaatgctttaggaagcttgaacaggttcatagtaaacataggattggactcaatgacagccttaataagaacctcacgatccaccatagagaaaagttttgatttctaactattaagttttttttcaaatcctatcttgaatagaatcaaataaactcgccttactatgacccacaaaataagggaggcctaaatacttctcatgaaaatctaccccttcacacctaataaatccaccagtctttcttgatcagagcacaacacgtttgggctaaaacaaacaacaaaacttatcaaaatttaccaactgaccggaggctaccctataccaactcaacagcagtttgaacctcacacaacaaacaccagaagctttgagaaagaacaaactgccatcaataaataagaggtgagaaataataggaccacttctaccataaggaaagccaagaaataagttatttttacaatctcctctcaccaaacttgagagaccctccgcacaaagtaaaaaagacaagggacatgggatcaccttgtcgaagttctctctcaagaataatagaaccaacaacctccccattcaataacactgaatactccattgaacagatacaatcaatgattttcttgacccactcaccgtcaactcgatcataggatttggacaaatcaagttttaggacaaaaaaagcatcacctctcttttttttttcaaagcattaatgcattcaaatccaataagtgcactgttagtaataagaaaactaggaaggaaagcactttggtcttcaaaaataatatgacctggaacctcacaaatgcgattagtcatggtcttagtaataatcttataaaagatattataaagactaatggggcaaaaatcaacaattctaatgggattatcaattttatgaatcaaataaataagagttttgttaatacctctcaaactagaatctccatttaggaaagccaaagcagcagcaatgatgtctcgaccaattgttgcccaattcttctaataaaaacaagtagtaaaaccatcccccagactcttagatgggtccatttgatacaacgcttctttaatattgtcattaaagaattcttgggtcaagcgttggtttagctccgcaaaaatcttcattagaaccgaatcaataactttggcaaatgcttcgtctgaggggcggtccgacataaagaaagtgcaaaaataatgctaaaaactgccccaatctccgattgacctgtaacctctatacccgtctcatcctgaagctttaggattttgtttttagctcgacgatcataggtacacttgcagaaataagcaacattattatcccccagtttgagccaatcattcatggcctgagacgccgaaaaattctcttctttctcatgtaaaacatcaagctcttttttaattttttggagctcttcacaactaacattatcaagatatgcatccacaatgaagaactttttaagtttcttattaatggcagttcaatgtctcttgtgaatctccttattccaattattcaatttttcccccacatcgatcacattcaattggacattttgaagaggatttagatctttggcagtctaatttttaccaattatatacatatttttacctcattagcccaagcaattttataatgaagacgagagcaaaacatcttgttaattctgcccagagtcacaacacaattagagagtaaagctggcggttcaaacctttataagtaagatgagacacatgagaagcaaggaaaaagttaagctaagataagttacacataaatctatcacgccgctcgtaaaaaaaaagtagaatcagaatatttaatacaccaactgataaatattattttacattcttagtgttgaaagcttttctcaacattgatacatagtatcaagaacaagtaacacaaagagaaaggagaaagaaagagaagaaagaaagaaaattgaaaggcatgaaaatgttactcttcattaagttagctggaaaggattatatacacggcaaatgatcataacagattcaacagaaagcaaaacaagaataattgaatacacactaacaaactctaactaacttcaattgaattaactgccttcacactccccctcaaacttggaattggtattgggaccaatgccaagttagttcctgaacagagcgaatctagaagttgaagtagctttagttaaaccatctgcaatttgatcagatgcagatacatgttgaattcttacaagcttttgagatagcttttctcgaacaaaatataggtccacctcgatatgtttagtccttgcatgaaggattggatttgcagtgagtagaatagtactcaagttgtcacaccatattacaggtgttcgaggaagcttgacatgaatttctgtgaagagagaatgcatccaggtgatttcagacacaacttgagcaaggctcctatattcagcttcaatatttgacctggagacagtatgttgcttcttgcattgccaagcaacaagattggagccaaagaagatgaagaaaccagaggttgatctcctatcataaggatcactggcacaatttgcatcacagaaagcagtgagatcaagatcagatagcctttgcagagacagtacccgttagatatcttagaatccttttaactgcatttcggtgggtattaagaggatttgccatgaattggaaaactttgttgacactataagaaatcttaggtcgagtagttgtcaaatattgtagggcacccactattgatctataatgttgtggattttccacaggatccccttgatatgcagataatttcaagccactagtcataggagtaggagtaggagcggcttagtatcctgcatttaagctctgcataagagatcttgaatgtactttccctgagacgtctattctgagaaagtaatgtaacttcctaagattcttgagagagaacttagtgcaagtgcttgaatcaaagagttaacttgtccagcatcactacctgtgatgataatatcatccacataaaccaacaaaagaatcatggatgtggatgagtgttgaataaacaggttgtgatcagatttggatgacacaaatccaaaatacagaagagcttgatgcagcttgtcaaaacaggctctgggggcctgcttcagaccataaatggccttatttaattttcataccaagtgaggagcgtcaggtaattcgaaactaggggttatgtcatatatacctcttcttttagatcaccattcaaaaaagaattattaacatctagctactgaacgtacaagccttttgccaaagctaaggacagtaaaattctaatagtcactagtttaacaacatgactaaaattatctgtaaagtcaaagccaagttgctggtgaaatccctttgcaaccaatctggctttgaacttattaattgtgccatatggattgagttttatcttgaatacccacttgcagccaattggtgttttccatcaggtaaaggaacataagtccatgtaatatttttcctcaaggtccctatttcatcagagatatcatgtctccatttttcttattgaagggccattttcacactggttggttcttgaaaagtcaaataaaccttaggcttgtatatcctaaattttgctcttattttcattgaatgattgtttgtgacaggggctttaggctgtgtcacagtatgtgtagacacaggtggagaaagagataatggttttggtttaacaatagactcaaatgactctgagttatggaggttgctagactcagaagagagatttggaacaagtggaatagcaatagtttgaggcttagcagttgtggcagggtgaaacacaggagtttgaggagttggtgatgagatatcatcaggaaataagaacttagctatgtacatatgagatgatttaggaatagtggcaaggggcaaaggttcctcaaaattgttagacatagatggagattggatagactgtttattgtaaggaaactttgtctcatcaaaaattacatctcgagagatgtataacctaacagaagcatcaagccatttatatcccttatggtttagactatatccaacaaaggtacaaggagagaacctaaagtctagtttgtgcctgttataaggtcttatattgggataactagagacacccaaaggtccttaagttggtatattcaagtttgatttgaaacaacaattcaatagtagattgttgttgcaaaataggagttggaagtctattgtgtagataaacagcagatctaaatgcctcatcccaaaacttgagaggcatagatgcttgagcaagtaaacttaaaccatgttcaactatttgtctatgttttctctcaacaagaccattttgctcatgtgtggtgggacatggatgtcaatgcaagattccaacctgttttaatggttcagtaaatgttctaaattcccttccccagtcagtttgtaagactttgatcttttcgcctaattgaagctcagtttcaattttgaaattttgaaaagttttgagagcttcagacttgtttttaagtaaatatatccaagtaaatctagtgcaggcatcaacaaaactcaaatagtgcttgtaaccattataggaagtaatatgggaaggcccccaaagatcagacactataagttgtaatggctcagtatagacagttttagatgctttaggaaaaggcctttttcgaattttcccaagaaaataggcatcacaaatagaactttcacttttattactagcagaaatattacatgatttcatcacagagtgaaccactctttcatttgggtgtcctagcctattgtgccataagtcaaagattgacatagatggcttattacagggattacaattgtcactagaaaaatgagaattgctattactagatgtaacaagataggcatgagtttgatctttgaagttgaaagttgaacagggaggagcaggttgaaattgcacctgaaattggcctagatcaaaagtatataggctattgtggagagtcacagtcaggattatggctttggtcttcagatccttaacataacacacaaatgggtgaaattcaaagaaaacactattatcaagagcaaatttagacacacttaagaggtttttggtaatttctaggatatgcaacagattcttaagaaccaaagttttatctgaattttgagatttaaagaaagcagaaccaatgtgttgaatttccaaacctgagccatttcccacatacagtctttcttggccattgtaatcatcatgctgagccaagttgttcatgtttggtgtacattggttagtagcgcctgagtcagggtaccattttgtgtcttatccttgtgctgagtttgaagcttgtgcagcatgagcttggataggtttggtactgtcttggccaggaagaacaccagtatagcttttgtcaaatctataaaagcactcgagagccaagtgtccaatcttgtggtagatttgacactgaggcttgttgagagctggttgtgatttgcctccaaactgatttgtaaagtgtcctcttccaggattgtagttgtctgaaggtcctcgaggagtgaagccagagttatatcttctattgtaatattgattaggaaaagtagaggagggatattgggagggatggaaagaaaactgacctcgaggaggattagaacctctaaaatttcgattgaagtgtgcaagaaaagcttcataggaacattgattctccagatctgttccttgattcatagcagcaagattgacattcagatcaacttcttgatctgtctttttcgattcttgactcagaagcaaggagcaaggcttcaatttctgttactgaatatccttcatttcgagtgttcgaggagataatgaatgtatcatattcacttgacaatccttttaatatagcagctatatgatcacgatctgagagaacctccccaactgaagctaacaaatccacatgttgtttgactttgagtaggtattcgtttagcgattgagatcctttcttgagattttgaagtttggttctgaactctaagattttttatgagacttgcagagtgaagtgtttctctagggcattccatatctgtctagcagtattacaaccaaccattctcgttagcaagctttcagtcatggaggagagaagccaggacactaaaagctgatcttgaacttcccattctaaacacttaggattttgagcacgagctgcttgatctgcatcactcaaatattgaggtggtggagcataatcttgaatgtacttcagaaccctgttacctctaatggcagccaagacttgttgcttccataggaggaagttgtggtcattagcctaatcgacagtgtgtgattgaagtgaaccggagaaatatcatcatctctggttctggttcgatttggagcatagaagcctagaggaggtcctggataagtagagctcgagtttgttgctccaacattttccatattcgccccaaatggtgggaaaggctctgataccatggtagtgttggaagcttttctcaccattgatacagagtatcaagaacaagtaaccaaaagagaaaggagaaagaaagagaattgaaaggcatgaaaatgttactcttcatttaagtgagctggaaaggattatatgcacgacaaaggatcataacagattccacaaaaaacaaaacaagaataaccgaatacacactaacaaactctaactaacttcaactgaattaactggcttcacatacatatatttctcttttagagaaattatccacccatgtaggtaaattattactttaattgtaattaaatcaaattaccattatatcgtcatttattatacagacaaggacctacgtgcaaagtctcaactttattttattttttcaatatattataattcatttaataatttaactcaaaaaataagagaaaaataataataatccactaaaccaaattttaaattctaacttcattactattattctttccaaaaagaacttctttcctgttacacactaccaaacctatccattatttatatttttttgttacaatttagtctttgtttttttaaatttatactcttgttttgtaaaatattttacagtctctatttttgtaaatatttttacatttatgcttcattttttttcttatacattttgtaccttttccctaaattatttttcattttgaatttttgttttctacacttacgtcgtttataacttattttttccccaataaataaaagtctacaatattatttcggcatataaaagcttttctaatcaattttttgtatcgtgtatattataattatataagattatttgtaaatacttaaaaaaaattgagtagtttacaggaaaattactttatatattattttcaatttttttttctaaatttatggttcgggttgctctagtagtttttttggtaatttctatatgaattgctatataaattttagttgcgatttaagttgttccgttagttgctatatgaatttttatgtggaattccgtaaatttgtagaaaaaaaaattattttgaagtgtaaaaataaaaaaaaaacctctaatttataataccgaaaataaaatttttatattttattgtatctatgactatttttttatatgcgcagtaagtaattgtttagatttaatttttagcacggtaaactgtttgaaattttctaaaaattttcaaataattttaaataattacaacgtatacgattataaaaaaaatgaactaattaaataaaaaatcaaacaaaaacactactacacaaatttccaatacattatacaatataatacataaacatatattatatataaatatccatctcatctatacatgacatgagtacgtagtgtcggttggaacaaaaaaatgaaattaatacttggtgtgggtgcgccgtgaggacccaacatatctaagatcgagattgttacatgtctttttaatgtaaaagatttaatttaattttcataaataaataaaatgagagagaggaatataattgtttgatatcatttttgtaatagatttgattttttattggtaggaccattcctacagattcgccagattttcttgtaatgctactatactcacgtcatgagtagtgaatagttaattcattggaaacttctctaattatttatttttattcaaaaaaaaaaaaggaatagtccattcaaataataataaaaacaataatgataagaaaatgaccgtaattttcatttacacacttttgttgtactaaaaaatctatacattttggtcgtacattggaaagtagaaacctcaaattaatacatggttctacacattaaaaaaaatgaacaacaatatatgttattgcggaagagaaaaaaagtaaaaagattgtgttaaattgaatcaagaatgctgtttatattgagatcagttcaagaacaaaataagaaataagctaaccaatatttagttagcagtgtagactgactaactataagagaataacggttatatataaccaactaattagttaaactaactaaacaaactgatacttaatatactaaatattattacctccctcaagatgtgttagaatttaaaataagatgaataaaatttcatttcaaaaccaatggcaatgggaggagtagctcattctttttatatattttattatctttccacatattaacgatgtgagaatatctaacatcccctcaagattgtagctattttatttactcaccatcttggacagctgaatcataagtggctctttctttagctcactatctcggatcacaagtggttctttttgctctacttttttatcgttattgaataacatcaacacaccagagccttcttctctgaacttcgttgctcatctctttgacttccgacgaaatcaatatgagttgagctgtggacgctttcagtttctctgatcacttacgtcgtttcagtgcgttgtagtccttctaacgtatcttgtgattggaagaaactagtaacacctcgcgattttcatgtcaatgtgcattgcattcaagggggtctctcaacaccttaacacgatgaagagaactcctcgctatttctggcaggaaatagagtaaggggagacctatctaataacattaacacaccggagccttcttgtctgaacttcgttgctcatctctttgacttccgacgaaatcaatatgagttgagctgtggacgctttcagtttctctggtcacttacgtcg

SEQ ID NO: 111458 - DNA, 1171 bp, Cannabis sativa
aatatatttctttcctttcccattcggcagtaatcgagccacaaggctcccatattctttctctataatttgagaatattcaaaacaattaatttaatttttctcttggtatcagagccaatcatatcactggcaagtaaaaccctagtacagaagaatcaaactctgtagcccctcctgttgctccagcaactgtcttaaatgtcactgctacaagatctaacaactcttagctccaaaaacctacctctcatcatttcaacaccctcaatcagtctttctccttaaaattagacagaaataattagagtatgtgaaaggctatggtctctactattgtaagaggtcataggctagatgatttcctaaatggaactaatgtttgtccacctgaatttttctttgcaggtattagcactggtgaattctctcttggctcgattggacttgtcaatctagactttgaaaattggatcatcaatgaccaattactaatggggtgattatatagctcaatgacaaaatcaatagctatagaggtgatgggttcgtcaatggttgttggtttatggagtgctttggagcatttttatggtgctcatttaagagctaaaatagtacttgatgccataactcgaaaaggtagtactcccttaattaagtatttaaaataaaagaaaaataggactgattcttcaactcttactcttgctagagagccatattcagaatattaagttgtttctaatgtcctttctagaatcgatgttagctattttcctattgagtttaagattgaggcaacatggcaagaccttattgaactgctactaagctttgacaaaaaaacttgaaagactttagggttttggaccatcaagaaaaatatctagtggagtgtcagatccacaggctaatcttgctcacagaccaaattgaggtagtcgaggcagaggatcgtacacatctcaacacagcaatggttgcagacatgtaaatcaagaaagaggcagatttcatggtagatgaagtaacaatagaaacataaggtccacttgtcaagtttgtaggaagtttggtgtaacgtcctaaataattaggcacgctacccaataaacttatgaaaccctaatcccctaatcgggattactaataaaataagcgcggaaat

SEQ ID NO: 111459 - DNA, 6264 bp, Cannabis sativa
cacatttcactacatttttttcttgaaggcctttgaattttgtgttttgctaaaattattaattattctgttaaattataaattaatttatatttttttaaaataatttaaattatatagtttgttgtagggattgaccgcttactttgaaatcagtttttattatttttttaatataaccaattgaaaattaatttctcccagacatatatagaaaatataactagtcttgtaataaaacttataaatcgaattatcattatgtttcattttaataaataatcaactcaatcagtagtttttacaaaatacacggttcaaaatagtatttgttcgaattaaaaagatatctaatgttgtgaatttttttgtgcagcaaaatttcaatatgattatcagttcatctgaataaacaaaattttataaaacatatattgattccttgcaacaaacttttacaatacatataaaaaaaataagagcatatcttttttaggaagtgtaacattgatccccaccccatatccttcgttttgctaagggatgagaaccaatgttgattgctacaactaaattgtgttacaagtaaattacatctatgatgacctctgcttttacatgttacacttctgaatttggatttagtgtcttatttttcctcattgaacaggaggagctctgtaatatgctggtacagttactggaaagaacatttgtcttactccttctgcctttataattggaaaaattatacctgatgcaccctgcaatgaatgaaggaacattgtccttagcaattatacaacttggaaaaatagattctagattagtaatctgagagagtgagtcagagtgtttttactaccgaaatcagtctagccccaatccacattcttcgtggcgaagggaatggaattaataagcgtccgacaccaaagacagcgacagcaaaaaaatggagaaccaagcttaatggacatgggttgagaccagagagcagagctactggtccgtttgtgcaaatgccaccaagactaagatagtcaaaacaagcttcacgcatctctttccttgcagggtcaggggaagcacagaacactttgtacaaagcaccagccaatgtgtttatggtagatgccactggctgcaaacaaagccatcaacactgagttaatctgtattctatgactagaattccatcttgggtaaaatctaatatgtgggcatataagtgtaaggtgttttcctaaatttagcccattttaaggatatttacaaagaaattgagctattgggtactacttatctcatggaatctaatttaataaaaaatcagaataaaaatatccataattagatcatcaccctctagtccactccagtcatgaattcagctaaggcttctgctgattatgttcttattctcattgatttcttcatgggctattaggaacatgtcatggagtttgactttaagatatcgatagcaacttgcaagaaatttatgttctggacttgcttaatctaagttcttgcattaaggtgattcaaattctaacattccgtgctcatgcactagtttggacagaggactttgttctaagatgcttaccttacgaagagtgtaaaaggattcaaggtatttgcatagtgcagatgagtcatggagatcatggagtggccttagaaggttccttaaaacaacaatgtccgaaagagcaacggtcattcccccaccggtcaaagggtggcgcatgttgaatgcgtctcccatcaacaatgcgccaggagtaggatatggagaggcaggcatgcttctgtttgtcatggttctgatgtttcctttgtcaattgcagctatgaaagaagcattcaactccgggggaatctaagattacatcagaaaattcagtaccaaaaaatcacattgatacatgaaagtaaatgattagatatgtttgttggtcatagttacctgaggagctactgcacttttcaagtaagtagccatttcaccattagccacagaaggaactttttggccaggcacatcaaccagacaccgaatttcggtgctgcttatagggtaaaacaggattggggaagggtctgccaagatcacatggccatgatttgcataaggaagatcacagttttctaacaccaaaccaacaaaacaggagggaatatcaacctgcaccaatagtaagtatagtattagactaatcaaatcttaactaagttatttatgcttacaatctaaaagccaattagtattgtttaggttacctgtggcttgcaaagagagcgtcttagatttgagaaacagccatcacaaactatagttaggggagcatgagaagtcaactcttgaccagccttgtttctgtattgaacacctttgattgttcccttttcctcaagaagagaagttactgttccttgttccaatctcacactgcacacaacatcatcaaccatgataacatgcttcgaaaacaacaaacaaaagcaaaactaaattgtttagaaaaggaaggagataacacttagaaagtgatgaagccttttcacgcattctttgtatgaatcttccattgtgaaagcttctgccagccacatcagaatgaaatttttctaagggatatgaaagtttggtgcttttcccatctttgtaaagagcatagccaaaaacactttgagcgtcgatctcttttacacaatctaataaaccaaacacacataaatacacagatagatattcagatcagcaaatgaaagtaattatatttgttacaggtagtttttaagttattggtaaataccttcaagacccagctcgatcaattttagataccctcctggttgaagtagctcaccaacaattctatctggctcattcaagtccctttcaatcacatgaactcttcttccatcctgccatgaaaaaaatatacagtgaattttcagagcataaccacaaacaccaaggaaacctcatcacgaggtttttggcaagataacatatttctatacaattcagttttaatttacttgacgtaagagctactttgcaaattatcaaaattcaaaataacaccattttgaaaagctgcattgaaaaatcattctactttcaaaaattactcaaactctctgtatatttctctttgttgtcgataaaataggaaaaaaaattaaaggattttgaagaaaaggactcaccttggcaagggtgtaagcaagagctgcaccggcaactccagctccaacgatgatgacatctgtaccttcttttgggataccagaaggagaaacggcaccgtttgatgatgtctttacaaacccattactatataactccattgatttttctttggtactactcatgatcttctttcccctgtaactgtaattatacaagaacatgaaccccgccaataaagctatgactccaccaagcaaatactgatcaaaaaccatcttcctataatggatttggatccctagttttctctctctttttcttttacaaatgtcaattaatattttcttggttttacttctctctcatatatctactcttgtttctgtttttacgtgcaagttaggcgaaagagatgatagcttgatggatatttatagagttggaaaagacatttgtttcttcatttcaaattataagacgtggaagtaaattctgatcaatttaaaaacaaaaaatctgtttaatttaaaaatagtgatatttgtcttttattatattggagcacaactggtattgtaaaaaaatgagtcaaatacatcttttattgacttttgtgctaaattttggaaagtatttccttctcctatatgttaatggttttagaccaaaaactctcatcttaggattcaaaatcggacaagcttgaatgtcattgtagcttctattctattcatgttataacatcttagacatgtaaaaattgggatatgtttagaagaagaaaaaatatgatatatttatagtaatttttgaaagaaatgataaaagacactaataatgttactatcctctttatcgctattaatacaattaagtatcgaatcctatataattattattattatttttaaaaacaataaatatattattgaaataataaatcaatgtcatacaacttaataaaactacaagaactaaacattccaaagataatacaagaaattcttaataaataagttattcatctattcaaagaacatgtgtagccaataaatatagattaggatattcttaaaaatttagataacaaacttgttacaaattaactaaaaaggattcaagatcattgaaataataatgtctctaagaacaacagatacaattgctagactattgttttcatccacatagagagagccaatccaatactatcataggtgctacacaattcgcttgagtcactgtagagtaaacctatagaaaaaaaaaatatcaatgaaacacactaacactcataaatgacaaatgaactaaatataaaattatataagaaaaataaataatgattaaataaaagaattatgaagtatataaataagtttacttgttaaattcaacactcataaaataagcagtaaaaaaattcaattctataaataaacatattacatataattataagtgtacctttgttgattcaaagagaataactcaagtagtctaagcgtaccttaattcatagatagtgatgattttagtccattttgtagacatgatctttgtggagattttgggtaatgatcttccaagaaaacaagacttagggttttctaattttctctcttgatgggagaagatgaggatagaattaactcttatttcttggagaccattgctattatataacctcatagagaggttattaattttaaacatttctaatttagcccataaacccttaatacccaatgacccacaatcactaaaatgatcacattatttgggtcaaactttaaatagcaatacaccaatacatatgagcccatatataggattttaatctaacaatctccaacttggactatatatattctgtgacagtgtataaccttataaacacttaacttttgctatcataattaatataggtattaaataatctcgtccattgattatattaatataagatcaaagtgactttcgtaacatttaaagtagttaaacacatcaatggtcacgtaaatcattataactaaatgtcataaatcaatcatggatacgtagcatagaaattacatgcaaatatgatcttagcatgcttatttccaaccggtcttccttaattgagatcaatcatgtattaattctttctaaccttgtacttaaacctcaatagaaagaaaacattcagagtacttaaaacttcaatccacattttatctacaaaattaaaccataaatgtgtatcagtttgatggaacatctcaaatacaaactcccactaaaccagcacaatcttaaataatatcacatctatttatgagcaacaagctcttgaaaagccttaagtggtatatccttaatgatccagatttgaaaatatggagtttgtccttatatgctctatggacaccttattactctgaattttattttaataacaattagttcaaagtcaatgtgcctttgactttgtagagcctatgttgttactaaaatgtaacccgattgatttattatcacaacatatatttttattagttttcaataccattcctaattttgtagctatatgtgacaaaaatctcacaactaaaaccttaatgagatatcaaaaatcttaatgatctccaaaaatttttattttttaattagtgaacatgtagtcttttgttcttcataaattccttttacccatttggttgcataccaaagtcccatacaaggttacttaaatatttatccaacatatatatatatatattaagtacaaatacatacacgcttaagtatatattcgggctagcccatttttcttaaatagaacaacttgttttcttatatgggctcaaatttgtgctccattttttttttttttttttttttttgcatttttcagtaaaatttatgagctaaatgctaaaatatatgtgtattttattgttttaatcacctttatatttttgttaataataattacacacaatcatttaaaaaataattataattattataatttaaatattactatcattataattaataaataaatattt

SEQ ID NO: 111460 - DNA, 3248 bp, Cannabis sativa
gcttcgtttcccggaaggtggtccgaaagccaccttctccggcgaagagccattgagggagaggattttccattttagcagagaagccattcagaagcttaagtttcgagctaataactactctgttataaccactaaaacgacaccgtccaactgtaacggtttttctgactcgtcagagactcttgggaaacaatcgaacgacagctggaaaaccgttaacaatggtaacggtttcgatcggacggctgagatttcatccttccaatcactttgtgcacagctgtggcgctccgtcacacgtgcgagaaaaatagaagagtcaaaaacgacgacgtttcgtatggccgtgaactgccgccaccgtgtggagccaaagatggattcacactacttcgggaacgcgattcagagcatcccgacctacgcacctgctggtgagctcatatcgcgagacctcgggtggtgcgccgatctcctccacaagaacgtggtggcgcacgataacgctaaggtgaggttcggcgtagaggattgggagcgagagccgaggcttttcccgctggggaatcccgacggcgcgtccatcacgatgggaagctcccccagattcccaatgtacaacaacgatttcgggtggggtcgacccgttgctgttcgtagcggtaaggcaaacaaattcgacggtaaaatctcggcgttcccgggacgagaaggaaatgggacagttgatctagaggtggttttggcgccggagacgatggctgggcttgagaaggattctgagtttatggaatatgtatcggaaatagttgtgtgagttgagtggaagagttattggtttagtaggagaaagaaaagggaagaaaatgaggtgtcagtctcataatacttaatggtaaaggctgacagtggtgactagcacgtgtcaatatcgctattggttcaattaagtatcgggtcttatataatttaatataatagcttttacggagtatcgctagccaatcacaatgcgagatgtcgagaagattctaagcaccacaagtgtcttataacaatgctctactgttaattagctgagtcagcgaaggctgtttgggttgagacaatttgtccgtttattagttaaaatgtaaaagttgtacttgtatatttttagttaaagtgtgtcttaggctttcctatattttgtagtgtcagcattaatatattttgtgttttatttatttatttattttttgcttctttgaattctaactcttaatatttatttatttatatttgtagaagaatcatttgtactgctcaacaatcatttacaaacactaactacaattcaataaaagtaagtctatacaactatacccctcatattaattacaatttttgtataaatttatgaaaatcaattcttatcccccataataaacattttactagttaacacccctcttagcttattcaaggcatcaaatggaattttcctaatagtgtgttttactagccacaatttttgattccataatacatcattatataactgctaagatggataataacatgttttttccttgctttgtttagctttagaaattctacctagcagctcaaagatgttctagattttgccttccaatttagtcaaattccttcagaaaacttcttgctaaggataagcaaaaaataagtgtttgatgtcttttatatcttccccacacatcatacagtgaagattcaaactcagtttaaacttcataattctatcctctgttctaagcctttcccacattacaagccacattataaatttgtatttaggagtaattaatcaatcctaaacagatttagcccaatcttttttgtcattaagatcaaataaaatagtatgccccggctgaatactatatttttgagtaacaaaacaatcttaattgatctttttcttaaatacatttttgacaacaactagctttttctaatatcagctacaatccgtggcacaaacatatttccacaagttatcttttcccaagtagattgtatttatccacttaacaaacaaattgtctttctttttggcaattgcccaaacatatttccccatagcaaccaaattctattcttgtacgttcttgaaacttaagccactagctgatttcgatagaaaagtcatattccatgcgaaatgctttgcatattgcttccacatcatgaagcaattttattggtaaaatcataacttgagcccaatatagatgtatagtcattagcactgaatttatcaatattactcttcctatataagataagtttctagagctccaaactctgattctattagtcattctctccaaaaatacatttacattcaacataagagatttttttagcatataggaataccaaagtacttgaatgaagatggctacgagaaaaacctgatacctccagaatccgaactacatcagcttcaagcatgcccttgcaatacactgcagtctttatttcatttggaactaatctagatgtggatgagaagagttccaaccccctcaacattagcaaaatagagatataatctccattgtaaaacagtagtaagtcatccgcaaaacacatggtttagttgaaaatgagcacaccgatcatgaaacttaaagtcactccattctccaaccttcttcataattttagataaaatactccattcccaatacaaaagtaggagagatatgggatctccttacctaagatctcttttagtataaaaaaaccacacatagagccattgaaaagcaagaaaatttttagagttctaatacataccatgatgagatttatgaattgttgggaaaatccatgctaagatccattttggtaagcgagagtcatgttgtatttcgtaatggcaaactttcagctttcacttaggaaaggctaaaagtgctcgagaaatttggacattgactttgcttacaaaagctggaggaaaaatatctcaggatggcgagggtcatgttgaatttttatgaggtaagcttcgacttttgcaaaggaaggctgaagttgcacaagaattcaagcttagactttacttgaaaagattaaaaagagaaagcaccacggggagtaatacaaacatcaaccagtccttccattccgggaaggagggttgaagacgtgccataatcatgccattacacttattgtctatttggcataaacctgcgtgttacgctcacacg

SEQ ID NO: 111461 - DNA, 5161 bp, Cannabis sativa
ctttccactaacaagatgcaacatttccaataaggaggaacttctctaccactcacccttctctaaaaataaaattccagataaaactcggagattactcgttcgctcaactcaccataaatctgggaaataaccttcctgcagcctagaaccatgacataattttttccagaacctcagcctcctcctatttcccactttaatcctcacacaaactacaaagtcaaggtatgtgataacgtatttgactcaagaaactcccctcaatcatttcataacaacatatttattcttcttaatcaaattttcaatatccaatcctcctttctcacatattttgggcaacctcctccgaaaccattaattgattctgctatccccactacaatctgccaacaagaaatcactcaatacctcctttattaaagaatgactaactcccactgacagagatatataatatagagggattgagaacgtaattgagataagggttagcctgacacctcaagaaaggttctacgccatccatcaagacaatttgcaacctttctaataatcggtctctaaaagatacactcaaagaatttcctccaaaaggaaggagtaggaataattggcctctctccagcttacagtccaccacctcagccaaagacagcacaaaatcatcttgaatgttaacacctaagaatgtactcttgctcatatttattctcatcccagaaaccatacagaatacctcccaaactcttgttcataattattctcagcccagaaaccatagagaatacctccaaaatctgaaacatattcatgaaacatctcctcagccccctaacagaatagtctcatcaacaaattgaaaatgtgaaagagacaaaacatttctacccacttgaaaacctatatattcaaccatttaccacagctgtattcagcattctactgagatcatcagataatagggggttaagaagagcttaatcacaaacatttgttcaaaaaaatggattaggaaaccattcttggagcaattatcacccccattagagtatacatgcacaatgcatatgaaatttcgaaataactaattgaatccatactaatatctaacagcttaatgaaaatatagcaaccactacatgtgatgtgaacctaaaaagctgatttcttgatataattatatcaagctatacatcacggtgtaccagacgagcccaaaaggtatgaaggtaaggtataacttgatattaaaaaaaataaaacacaaaacatgcaaataaaagggcatgcaaaaaattagaggggggcaaaaaaaaaaaaaagaaaaccttcgtgtcacatctttagcaccattccctgcaaaggcaactgcatatctcaaagatgttttgcatgccgcagctacagcttcaaccttctgctctccatcaataatagcattaatagcatcgacatgcacccactttccagtcaagttctctccattgcagtgtacctctgcccaatacagaggagaccctactcttttcgatccaattgcagtggatattacattggaacatgattcttcacatacaatctttttcattctcttcgaatgtgaagagaaagcagacaaactattgcctgaattgttcacaactgatggtattttagtgcctgcatttccaactgctgtggaagaaagagccatttccatctgcaactcgaactcaagatccccttttctctttgatccttgagatttttgggcaagacaggcctcagaggaatcatgcttcgactcaaaagctaatgaacaatctcctgagacatgtttagtcttcaaatcataattagtgggaaaatctgtgtgttgagtgttgtctgttaagtggcagtccttagtcgtgcatgaactcctctgagaagtttcatacacactctgactgggtgaaaatgatttgcccagagaagcagacacctcactttgtctcgcaaccattggagttgaattactgaagatgcccctacatgatctgcttgcatcttgactaaaataatcagacttttctccatctggttttaaggaggtgacatccaaaatggacacaaacctgatttaaatacaagtctgcttattagtaaatacagagatatttatgtttaacatcagacataatgtttttcctaacacctcaattatccatttcctttatatataccaaataattacaaccaccaacgtgaaatgccaccactatttctcgaacatcaattcatcgctgagacaaagcaaattactaaagtcacaaagtaaacacatgaaaacccttgatacagacataactaataaacaaaatcacacaatgacaaatcaataatacaatttatttcttagctaagccattgcctatcataatatttcctttctatcatcatttcctttcaataaaaatgaggccgatattatctacataaacaggggcaaaagatgacaagctatctttaattacagccaaaatttctatctctagttaacagaaaacaatgtatccttaatccaactccaaaccatatatagatcccccactgtctttgaaaaatttaaagtagaactgcatttgccaatagcataaaactaaaatgattaaataaaaaaaattcaactgttccagtaattgataaatttattattatttagagtccaatccacactttaataatccaaacaaaactaatccaagtctgattccaatttccataccaaatcttctttgttttattatttttgaaaaagagacaaaatgcacatgcccatgagtgacctcctcccaaagttattaagagtcctcacttgtgacagaggaaaaccatatttcctatacaacatcaccctcacaattccgactcttttagttaaggattactatttaggcccaatttagagtcgtagagacaggggcaaaaaagccacggataatggccaaaggctcaacaacataattctgatgatgatcatgaacatcaccatggcattgtgacgacaaagtggcaatagccaaatagaatgacaataaaagaaaattttgaaaaattccagatgcatccttcaatttctaatctcatgatgaaagctaattaattattttgagattattgtaattcatatttaatggatacttttgaaaagagaaaattcttgcaatagctttccaaataaactattgtgcctctgcatgtaaggttatcagaggttaaaaatttctttacatcttacagatgttatgaatcaggtagaaaccaaaaattgcatgtaatttctgtacaaattgaacggttttcagaatacccaaactcatatagctaaatttctcaatgacttgtacatatatcagcaaattagagtactctgtcttaagctaacatttaaaaggtataaataatttttttaaatctaagtttcagacttctcaatcaaattctctttcacaaatcaatcatggactatgaagtcctaggatacttgcaactttagggtaaaaatcacatacttgaggtcataacaaacatatgataaaccaacaaaaaagtaaccatttttcttataaatgtcgatgaactttatacgccctgatgataattcttggtaaaaggagaagcatgcaccacatctaaagcataaaatgtcataaaacagaatactcaggaaaaaataactatttatactgacaaaaatattaacaagaaaaaaagaatacgtcaatgaaagcagtaactatagaagaatagtcaaattttaatttataattatcatacctggttgtaagattcaaagctctaaacagtgccacagacaacgcagcaatctgcaaagaaaaacaaagttctcgtgtgagcacatgtatatgattttgattcccttgggcttaacaataatcaatatgaacttataaattagcagatgaaactcatgaaaagcaaaggggagaaacaataatccaaacaatgggagttaaatgtaattattatcacaagttcacaacttacgcaaatctagtatcaaattaaaaccattacgacattcacattctcttctcagagcaaaggtcaagaatatttatgatactctaagtatctgttcgccatcaaagtgaacaaccatttcaacacttgctccacattgttattactctataccttactccatactattattactctatacattaggaaagttcataacaagaagaattcaaaaaggctaaaaattcatttcaaagactacctcttctgaagtcccttcgcgagtttcaagagcatgtgccaaagccgaatgaaatgacattttcacatcagttaaacttctaacatgaaagttatctcgaaactgcaaagtttggtgcacaggcatatacaagacgagtcaagtcataaaactgcgtcaacatggtgtgttcgctgcagaattaaagaatcaaaaataatggagtacccaaaggataagaggatgcaaatccttcgcagttaattttgcaaccattgatatattcagcaagtgtctaggaagaagagaaagtaaagcggcctgcaacataataatcttctgtcatttacaaatacaataataaataataaaactaggtggttggggcatttgcctaaaatctctttggaaaactcttaccctctttcactaaaaaaaaaaaagaaaataatgaaaatttctgacggggaagccaccgagagagagagagaggaagaaagcactaaggaagctacagagagtaaatcagtaatatacatgacaacaaaaaaaactagtccttcctaagcagtaacaattaagtagggagcaactgttcttaacaaatatgaaaatccagagataatgataacaagataataaggtgaaatccaacatattaaagtcccacatggaattttaaccaaaaaaaaaaaaaagtcccacatggaaacaatatgggaaacacaatacccacataaaggaaggggtgacaccaccttgacctctattccggaccttgttgtgcataattttttgacctgtttcacctttgaccactatagttttatgtaattatgaattagtggcagatttgttgtcaaacttctgtaaattatgttctattccctagtctaaatggtggaaaaa

SEQ ID NO: 111462 - DNA, 1633 bp, Cannabis sativa
gtttcataatttataatgtcatagttttttttttttttgagataatttaatgtcatagttaaatatactgataaaagagtacaaaaacataaatataaatgaaaaaagtagtgcatttatcgtggtgtaaattttacatcatagtaaatgttgtgctaaattttacacaaaatttgctatatgccaaatttacatcactttttggcacactattagagtacatttttttgtcgaatgagctatattttagcttcccactacttatttacatcttcattggagatgctcttaaggaagttttgccacaaaaaatagataaaagagttaagtgtataaaaattaaaaacataaaaaaattttgccacaaattactctaaatgttatatatttatatggggagaatacccttagaaaaactaaaaaaaattgtcattattttctgtctatatttataaaagctaagattaaacttatcaaatttttgtaaattttctcgagaaaatacgcaaatttattatcttgttggaatttgaaattgactcttggttttttcaaatcttaattttttttttttttttgaagaaaatcttaatttttcattttcatgaaggttcataatttctatctaatttgtagaggaattgtaaagacaaaaatgtatatttcaactagtatatttttttaaaaatatttattataactagcatatctatctaatatatagaagaattgagaagacaagttacaatgtaatggcttgcctttttcaattttcatttttgtgtattttgttagctttctcttattttgttttatagattaaaaaaatatgtacatgtaaaatatttgtttgagaacttaatttctctatttcatttttatttatcattttataataaatcaatggcatggtgaattgatattttaatgttttgatgtttttttttggtatttttttcttattttaataaattatttaactataacaaatttatatcataatttgtatatagacaaaatactttgtactctttctaaaaatttacttaatgatttgataaaaatagcttaaatatttccatcatcacaaaaatactttaggaatactcattagaaatgcttaatgggatatttatcaagcctattcatacagaatatatctgatgtcctaaagatgaggatgacattacaattatttttgtcaagtgaggaaatgatctctatttataaataagttctcaattataaacctcatttaaacttgaatgagtgtctaggttggtccctaacctaaaaggggcctaataaaaaaatgtagtacattaacaaacattgcatgcatataaagtaacatttttagaggttaataaagggacctttctgtgtagcaaaatattggtatttaaataaataaataaaaaaaaaaaagcccattttaatagaaggcactaggccttggtctaacttgccatggtcctatgcacaaagtcctcggctgttataactgtttaattcagcttagatgaacttaattgtgtcatttgttttgaaggatacattgttacaaacattcaaaaaaatttgagtaaatattattaggataatttcataaatacttaaaaataacaaaaaa

SEQ ID NO: 111463 - DNA, 3298 bp, Cannabis sativa
  modified_base (3211)..(3213): a, c, t, g, unknown or other
  modified_base (3240)..(3242): a, c, t, g, unknown or other
ttctgcagtaacagaattactttctgcttctgcagacgcatacagttttatattttcatatatatataattgacatttgtaaaaacacgtttttcaatatttttgttagaaaaattcaaatagtatattttaacttttttccaatatatattattaacatttaaaaaaaaattcatcacaccagaaatttgtcaatctcttctctctctccccattcgtcttcttccccaagccatcaactccatagtcgcttggactgagcaacccaattaaaaccctggctaccaacggtgacatcaatggtcaaggcagtcggagtctttccccttgtcctagaatcggagcaaggatcggtaacggagatggagaacacactaattcttgagctggtggaagtgatggatatttaccgaacaactcttcatctgctagaacaagattaaatgatgacaacgatgaggacactgatacttcatcgagttccatatcagagaaaagtctagaaaagcttgtgaaaccaagaggagaaaatacacacatttgttgatataaggagattttgggactcataaatgaaccaaaaagcaaagtgaaaaagttagaatggttggaagagcttaaacaatcaatatgcatagatgcattgacaaaaaacatatatgcaattcctcttttggattggtgatttaaaacaaaaaaaataggaaacaggtcgggaagaacgaacctttaggagcattggcttctccccctatcttcttaaaatataacattctttgatctcccaaccttcccacgacatctttgtgcttgttgagcaaagaaaagaagtttctcatccatcaaaccttcttcagcattgttgatcttggatttggtcaactgacaacggagccttatttattactaataatcaccacgtgtaaagtataaaagcaaataataaaattgacacagcgattgttggggggtaatgacctacttcgcttttagttgtataaattttagagataataccatgcaaattacataattttaacttgtaacttctagctatggtctctttgaatgttaaaatagtgagaattgatgtatgaaagattcttaacaagtgaaatgagagaatagactaagtgtcaataaagaggaagtgtcataggagtgagagagctctagggtttcagagattaaaatttaggttccttttcactttgcctaatgcccttatatagtttagggcttacaaaagatcaatattcaaataagttactacccctcaaaaataggggaaaatacttttttatcatatatttaagttataaaaataactaattgatgtccctaaaagatagaaagataatttgaggtttaaaccctatctttgtcggttgttcgagttgccccgtaactgaaactgagttgtgacccgtctagaaagatggtcgtggaccccaccattcaattgggattcctttgatgctctttttctatgtatcccggtctacccttttcttagggcctggccggcacataggctcccttggccagtcagggtatggtccgaccaaatcctccttgttggccattttcttattacttggtcatgcctgagtatttggaaccctttttgattgacttgatgtacaaggtggctttgcttatctattggcacgttgtattccatgtagcctcagttttgcctatgtggacatgccacgtcatgtgattgaaaattgggataatattttctccctaagtacctatgcggacgtctatacggataaagacttttcaaatcaagctttggcaaataaaaccttaaccggacaacaatggttggtcaaatatttgacctttcaaatgaccactttatgacaaaaaataactttcattaggggattttatttttcggctgctcattttcccacttatgaaatgttggtcttctgcatgacaattcttgtggacaagtaatcacccactaagttttgaggggaaaagtgctccagaacctatataaggttcattttctttatttttatttcactttaatatctctctctcctttgaattctcttcaagaaaaagaagaaaaaaaaactctccattccctcattgcacccaacgcctcaagctcctcgttccctgaggtttttgcttctttacaataatccaaccatcccacgagcatccacagtggatttcatcagtgggtaagtcttcaaatctcattttctcattattttcttgaatctaccattgatgacttcaagctttttgaaatctttgattctcacgttaaagtgtagtattttttacatcataatccgcatgatagctttaggatatataatgtatcacatcttgatgaaaaagattagattttgggcttcttttagattcttgactatttgagtcacaaataacacaaagaacaatgtttgagtttttaaaaaataggatttttatccttaagaacccctggccggcacacagggtttgtttatgaccctagccagcacataattttggcctaagaacttggccggttcgtggcttcaagcttgagaacctgaccgatttgtgcttctgttctgggaccttggccaacacgtggctttggtctcactaacctggctggttctagcctacacttaaccttaacaaggactccttgattttgagccctttccacccttatccaatactcagttttcataggaagtctgtatggcatatcttaagacaagtctatcttagcaaattaatagcctaagacccaatgtctatttaattttttgcacctaaaacttgtgcgttgctgactatcggcttcgtacactagagttttaaggctagtatgtctaggcctttttatttcatttggtttctcaactccctatgcctttttacacaaatgaacccgcgtgactttaggggaggtgaaagccagatcgatgaagacttgcttagtcttctctttaaataccatcgtctagttccttcaaccagctcttcttccaagggttttttgggtagcccctcgagtaatttcaaggttagcagcggttctctagaacctaaggtccaacactattgctattcagagcgaataggtggtgaattttacgatcgatttgtttagggaactaaactagggatggaggtagttcctccccagatcatggacttgttgggttttgtgccctannnaaaacccatttcaatataataagattnnnttattaataaagatcagaaatagcattttatcttgcatggttcacctgatttattt

SEQ ID NO: 111464 - DNA, 1504 bp, Cannabis sativa
ttatgtgtgtgcagccagatttaacagcacctgggtcgaacattttagctgggtggcccgcaacagcctcactctcaggttttgaattggacaaaagagtttccgcgtttaatataatctctgggacatcaatgtcttgtccacatgcttcggctgctgccgcctacgtcaagtcgtttcatccaacatggtcccctgctgctgttaagtcctctctaatgaccacaggtaatgacaaatttttattccttttctaatcatgtttgaactcattaatttccctactattgaattatgtcatatatacatccaaacaaatattcctatattaagtgaatattgattatttaacaacttaagtacacttatccaacacaaattgagatcatatatcggcacaaatttatatggcccgtgttccatatccatatttagtttaaaattaaatatgtgagatctctattaacttataattatgtatgtcacatcaatatcttcaaaagcattatattactcttttaaataatgattaactatagtaactgtggactaattaataacaaatataataaatttacttgtgtagctaatcccttgaatgccgaccttaatcctgatgctgagttttcctacggatctggacaaattaaccctagtaaggctgcattccctggattagtatacgacgtcgttgaagctgactacgtaaacttgctctgtggtgaaggttacacaaccaagttattgcaaattgttaccggaaacagtaaaagctcatgccctgcaaatcatggaacgagcccggacctaaactatcccgctttcgttacttcagcctcacctgcaaaatccatcaacaaagtttttaataggactgtcacaaacgttgggtcacccacatccacatatgaagccaaggtaattgccccaccaggatttaaagttgaagtgaatcctagtgttctttgttttacttcccttggggagaagcagtcctacactgtgacggtacaaggagtagcagataagaaaactgtggtctcaggttcacttatttgggatgatggtacctaccaagtgaagagccctattgttgtctatatcccaatgtaatgagctcgccattgtggaaaagaaaattcaaaggaagaagtcatgtcttggaagtgggccactaatcaattaattaattagttgtatggcatatatatggataccattatttaacgtattcataaataaaagaaaggaaaactccaaattttgttttggaaataacttgctgataaattgtgaccttgttaaatagatttcattttaaatattattattaattacaacatggtaataattattgagcatgcaatgttttataacttaaaggtagcataatactattacccgtgctcaacgccgcactgacattacaacaaaaaaactgtttttctttgacaactcagcatacggttggtgacttgtccaactgtcacaactatataaacct

SEQ ID NO: 111465 - DNA, 5055 bp, Cannabis sativa
  modified_base (3709)..(3714): a, c, t, g, unknown or other
cacttgacacaaaagatttgtatgctacttgttagtgcagcgtgatcgtcaactggtgcagctgattccaattcaaccacgctcggacagggatactttgtattggtccaatgatttatcgggcttgtacacggttaagagcgcttacaacctcctacaagagttaaatggtgaagttgttattgatgattcggttgtggatcgtttttgggggagattatggcaattaaaaatccctctgaagatgaagaacctgttatggagagctgccaaatgttgtctcccaactatgtctcagctgcaattgaagcgtgtggaggttgactttttatgtcttgtgtgtttgttagaagctaaaaccatttcccatgcgcttctcacttgctctgctgctatcctttgttggaaccgggtgggtattgggacaataatgcagcaagatatgtcctttttggattggtgtattaggcagtttctggtgctggatgtggagcgaaccagcttgcttgtggctctatgctgggccattggaatgcaagaaatgacaaggtatggcaaaacaagtcagtcggagcggatagtatcgtctcatcagcaaagaactatcttaattaatggcatattgctaaaaaatcaggtaacgatttattgttcattgggtatattccgggggacggggctgagcaatgggtcgctccaagtgcaaatagtattgagattaatgtcaatgcaactgtatttaatgagacccacaactatggtgttggtgttgtagcccgggactcaaatagtttattggtggaaggttgtaccaaattatttcaaggttcggtggactctatggtggctgaagcaattgggttcggaaagccttgagttggattaaagatcaccggtggccacatgtgatcttggaaactgactgtctctcggtgattcaagccattcgtagtactattgttatgattttcatgtttggtaaagtggttaatgattgtaaggctttattatgtatttagaaaaatgtttctatttattttgtaaagcgatcaactaatatggtgactcattcatttattaaagcctctatattacatcctgattgtcattttagtttggacaatatttctactgggttgttaccttgtttggtaactgagatcattgctaataaaatgatgaattttctctagaagaaaaaaacaagataatgaatttcattcaatattctcattcactaatcccataaataaacacattagtagggattataaggatatttaaaagtaattatttttgagtaactttcttatgaagtaatacaatcaaaggagtggtagtttctttataaagataatgattttgccttaaaaagtaatgtttcgactaatgattcctacaaagagaatagaaagtattgctaaaatggatcttcttcttcaaacatattcgagttacacaaaacagttttatgcggcaagtagttttgaagtaaataataaaataactttgtagtaacaaagcaaggtggttcaaacatcaacatctgtaattaattttgtaacgtgcttttcggcgtacaatcaagctaatgtgtttttatacgaatgaatcatcaataggcaagtggggtttgtacattttgtgctttcatgccaatatttatgataaaaaatgtggtcttcaacgtatttcgtaagcaaaaattatgaaccagcatattgtctttgcctagttatacttcaacttaaattaatctaaaataaatttacagttgattaattatgttatattttaagtaggaggatatacaacatagtgcatacatatatgagtcaaaaagaaagttattattattgatttagttatgcttaagataaagcatagaaggactaactccattaattttaactcatagtttcaatcacaaactcgttcatgatctcttctacaatggcgtctccaatttcccaacagatttctttattttccgagtcaaaaccattccactcttgagctgtgtcaaccaaatccaaacacaataagtaagtaatattgtttgtatcatctatactactttgtttactccaaaccttcattttctcccacagaagctcccctaactcctctggccccaacactacccctttagtaccataatccactttctccttttcctttgcgtgagtttctacaatctctctcacacagtcaaacaaaagctgctttgtcttgcttaaaactctcttggatttgagaaactgcgtcgatggtttcgtcttcagattgagaagccccttatttggatcagagattttagtactgaactttcttggcttctctgttatttcactttccataaggaggctgcttatttttgttttagtctctagcgattgtcttgttattatgaggttgattctctctgcttatttgaaacaacaaaacccaattacataacaagttcctttctttttcttttcatagaaacaaaatcaaaggaaaataaggcatatttttaccttgcgatagaggagtttcttcttttactattgaaactgaactgcgtttattgcttccaatgagttgtcgaaacgcaaaagttccacctgaaatagcctgtgctggctttgttaacagctttattcgtaaaatcaacaataccatacatattcatgactcgaaatattatatcttgtgcgtttttttgttcttttatttttaatatatacatatatatatatatatatatatatatgcagtacagataaatttaaggttttggagcaaattaagagatgaaaaaaggtgctaatgaaattgatcatgtaagagtagctagtttttctacctccttctctgctttgtagccgagtctagtggcttcaaatgactcatgttcatttttatccaatgaagttgaggattcatcttgagaataatcactgtcggagcatgaattatacaccgttctacagctagcagaagaaaatctatctggctcggaaacattttgaagaaaaagattcttcttcaatttctcattgaattttccttgtatttgatcatcagaagcagtagtattctggcttccatcacttttattgaaaccaaacttgccaagtatagctctcaatactctggaacagcttggaataccatttcttctttttcttgtcttatttgagtcactagtattcctatttccataacttctttcattcaagaaaacatcaagaacaaaagggtcttgctctttcagaagaagctctcccagttgttttcctggtttggttattgaggaagccatttggaaagaaaaaaaaaagaaaagaaaaaagtctaaaagctgagtgattcctgaatgaggaaatggggtattttaggaagtgtaaatgaattagatagatgggaatatatcatatatgattatgaatatgaggtatgggtgaataaaatgaagatcaaatatgatctgtcattttgggactaaacaaggaaaaggtaaagccaggaagaaagatcagagcatttaataaggcctcgaagtaactattactaataggctccagagtattgcatggacacaaaaaaaataaatcctactgtcgttgtgtatgttcttttgtataattgattctgtgtatatactctatttatttttctacatactatatctctctgtcacacttatatatatatatatatnnnnnnatatatattatatatatataagaacagtttttgaagttgattacaatggtcccaaaaaagtttgtcttgtctaggagaggtaccaaggcatattaaatgaaaggtttggttcagcctcataactaaacccgtagttattttattgagtttttttttctttttttttttttcaattaagtcatcttagttattattccacttgtatttaattttctaaactaaaattttattggtaaaactctctaaattattaactcttaaaaaatttaaggtgttatcaatttttcataaataacaacggtttatttgtatacttacacgtgacacgtttatattagtatatcttatattattatttaaaaattataaaaaattattttaaattttataatatttttattttttatatattttatattttatttctattattttatttaattttaaattaaaatttgaaaaaaaaattaaaataataatattaagtgtaccaatataaatgtgtcacatgtacaagaatatacacataagcagtccatagcgacagttaaccagatatcatcttaaatttgctaacagttcaataatttggaaagttttactaccaaaatttaaatttaaagaattaaatataagtaaaacgatagttagcaagatttaacacccacaaactctatcttatttatgttattcatatggttacattttctaaataaaaattcaaaaatattacttcaaaattgtgatgtaagcacttttaataacttctttattttattctttaaatatattattaaaattttattttttttattttaccttatacatacattaatttgtctatattttctttcacattatttaaatgtaaaagttaagaaaaaaaattaaagaataataaacaaatactaatggaagaaatgaagacaattaagtacaaaagaaaaaattaaaaaaataaatagaaaaagctttaaaggttagctacatttagctaaaaaagatttaggaggagatgaattttaaccaattagctgtttttttagctcttagctattaaaatgaaaaagcatccattgagatgcaaaatattttttcatacggatattctggctcctgcacctcccaccaaaggtacaactttcatcttttcctttttgtttctttacattcgaataaacaagaaactaaataaacaaaaagagataaagatctattatgttatgcgctaaaagtgaagtctaagagcatctccaaagagacaccaaatttggtgttacactatcaccaaatttggtgtcaaaaattatttctactccaaccacaacaccaaaaattaca

SEQ ID NO: 111466 - DNA, 9744 bp, Cannabis sativa
ttacaataggggattccccgccccgtccccgatggggaataagcggggatggggcagggatggggattaaaatctttaatggggatgaggacgggagagcactccccgttagttctccgctccgtgtgcatccctaattaagggagatgtttcgataaatcttctatctattttgacactaaataaatttttaaaaaattccaagtacgggatcataaaattaaaatcttaacaaaatgaacggtggagatcaagcgagttatatttgattagaaagaatagaaaataaacggcggagatcaaatgaagaccacgataagcttacagtggtggtgcaaccatggaagaaggggtataatataaagcgtgttttaaaatttcatttgcagtaaaagagaaaggagaagaagagtgtttgactctattgaaagaaaaaaaaaatggttattaagagaaataatccattttaattttaattaatcataattaatcttttgggattattggagggaatggttgagcggttaatttaactctctctctttctctctctatattctttctctctctaaagtggtgtgttagcttgaagaagaagaaggtgtgcgcaggttaagcgaatctgctttagtcagtagtggcgtaggttaaggagtttggttttggtggtggtggtggtcgacggaggaggaagaagaggagagaatctttgaattgattgattgatgatcgatgtcgaaaatgaagcatctactgaggaagctccacatcggaggcggtggtatcaatgagcagcaacaccaaagattgggtgagactacgagacctgttactactccgatttcgaatcagagttctagttcggcttcgattccttcgacttctagttcggctacaatggtggggagaatcggagtcgttgattcttcgattggtgatcgtacggttgttgatggtggtagtggtagtggtagcggtggcggtggtggtggtggtggtgagtgtgtggattttaatttcttggaggaggagtttcaggtgcagttggctttagcgattagtgcttccgatcccgattcgcgtgaggatcctgagtcggctcagatcgatgctgcgaagcggattagtttgggttgttcggctgcggtttctgataataaaggccgcgtcgatattctttcgcttcattattgggtaattttctctttctcaattattgtttttgaagaaattgtgttgcaattgtacttggaaatgggctagctaagtatgaatcggtctatgagaatggagaatttatgagtagaattgtatcattttcttaaatcaatgctgttaattatctggttcattcatatgtctatgtgtaagtaatgtcggagttgaaacctagtgatgaatagaataattattctggatattggcatcaagtttgattctttaggcaattctaattatacaaaattgggtatttaattcactttagattaagattgactttgagaatcgtctttctagtccaggttacatgtttggggtcatcttatttagtatactagtattgagtgactagtagttgcttttgtcctgagctgtttattattattatggatattggtatcaattttgattctttaggcaatttaatttacttgaatgtgtacttactcccttctcaagacctgaagttagattaagattgactttgagaaatgagaattgcctttctagtccaggttccatgtttggatcatcttatttagtatactagtactgatgccgtgctatattggtctgcaattgactagctgcatgttttttgataatatttcctttcttaactgattttccatgtttatctaatgcagagctataatgttgtaaattacactgagaaagtggtggatgggttttatgacgtatatactgtttcttcaaactcacttgcccaaggaaggatgccattattggctgatctccaagtactatctgtttcagataatgttgattatgaagtaattttggttaaccgaatgttggattctgaactacgacagcttgagaaaagggcatctgatatatcattggagtgtcaaggttctgaccatggtctaatttttagtggattgatacagaaaattgctgacattgttgtggatagaatgggtggtccggttggtgatgctgatgatatgactagaaaatggaccatgcggaggaatgagttacggaatactttaaaaactattatacttcccattggacgtcttgattttggactatcacgccacagggccttgctctttaaggttgtgccagatttcaacttagtctgtttataaatttatatcagtgtcaaaatagtttcaaattcttgttactttgttttaaatcttgcttgcccatttcctattttgtttgttatgaggtgcaataatttgtaattagttatatttctggtgccaggtcctagctgataggataaatcttccatgtatgctggtcaaaggaagttactacaccggtaccgatgatggagctgtgaacttgattaaaattgaagatggaaggtaaatgctactaacttgattaaagtttaaaatgacactttttgttgataacatgaatcaactggctttcttatttcgtttacattttgactagcatgttgtgcagcttatttaagcatatgattaagtgtgtgatctttcatgcacattttttttttctttctaagcaaagttagatatcagagatgttaaatattgtagagctatatgtgtagctgatttactattccatgcagtgaatacatcattgatcttatgggtgctccgggcaccctgatacctgcggaggtacccagtagtcagcttcctagttcgttccttgatataaggagcttagcagatgtcactgtaatgcccacgggtctgagaatgttgcatgatgaaggagttgaaacaccactgtcaaaagatgggagttcaagatcagatgaagcattatttttggacactcaggcaacagaggatgcaaggcgtttggttgaagaaaatcaaaatgagagatgtgaaaatgaatttgcaaagtactttccatcaccccagagatcaggtcagagttccttggttgctggtggaaaagcatcttctgcacaaaagaagagagttaagaatgtatcaaagtatgttatcagtgctgcaaaagacccagaatttgcacagaaactacatgctgtcttgttagaaagtggagcaacacctcctcccgatttgttttcggatataccacaggatgttgatgaagacagaatgggagatcgaagaattgtggttgatggggttcaatatcaccaggataacttgttttcataccaggaacagtctcttgtgcccatttctgaaggggattgcccaagctatattgatagcgatatagttcaaaaacaagctgctgaaggttttgctcagaaacaaaatgaactggatattatgtctaaacttcccctgacatccgatgccactgaccagggatacatgtttgctgctaataatattgacgaacctatccagactgattctttaagtgtagctatggttcctgttaacccaccaagacaatacccaagtgctctgcgagaggagcaagttaatgagcatgcctttcctttcgaagctaactcttttcgaagacatgttgatactgcctattttagtgatagaaagaagttctcccaggatacaaataaatttgatttgggaaaggtatctgcagctaaaggaatggaaatggccacaagtcgattgtgttctgactctgaaaatgagagaatcaatgctgttctcggggaagctccagagtgggaaattcagtgggaggatcttcggattggtgagcgaattggtattggtaaggattccttttctcgagactattaggattcattgataaattatgactaaagaaaagttttggctactgttatttgttgttgttgttgttgttgttgttcgtgtatgtttccttcttttcttttgacaagtgagttggggtattcaaactctcaacatcaacaatggaggcaggggttggtcactattcaggctaaagcctgtgaccgatctcttgatgctgttgtagtagagaactgacttttttccccctttctaccaatgtatataaaatataaatatttgtttggtatttcttggagaaattttatgccagtggtttctgtccagtatggttattcaagcagtccttggcatgcctagaaaattagaaattgtttttgattttgctgaataatgaaagatgaagaggcggctgaattattgggtagtattaaacatgaagtttttatttgcccaactgtttgtagttttattttgtaaaacaaagttgggttcggtccatttctgtcagtcactctttttgtttgtgagcagaatgtgtgattagaatgctatattgctgcttgctaaagttcatatgctttatccattaagagtcttatctcacatgataatattctatcatgtaggttcatatggagaggtttatcatggtgattggaatggcactgtaagtatcttttgactaagttagtcatcttttattactttgttcatgattgttttttttaactctagaagcaacatgagagtgttatattattgtagtacctccaaggagacagcaaatatcaatatattcagcaattgaacatgtttgtaagtctttggtggtctcagtgacaattttttgtttgtgttttcaaactttcattattcactactgtctttcatgctttcagcatctttcaaattttcgtttcgatttcctctgtcaaaatctactccttggggatacttctgctaaaatgttttgtcactctccttctaatagtgtgaactgtccacccattctcctaagaaaataattgtgaattgtcaagttctgatacagtactcattttgattgaatcggaatttaacttttcatggtgcttacattttgaaatcgtttatagcctgtcttgccttttcccatgacaggaagttgctgtgaagaagtttttaaatcaagatttttctggggaggcattacttcagtttagaagtgaagtaagtagtaattaacgttttattatgcaacttttttattttattttttattttcttttcctatgtttgtgtacacatatatacaaacacctcatcatgttaatcttacttgatgttggcaccataggttgaaatcatgttgagactcagacatccaaatgtagtccttttcatgggagcagttactcggtccccgcatttctctatactgactgagttccttcccaggtgattttccttgtcaagctttcatcttgtatgctttaaatttactatcagttagttaaatttaaatttcaaattaatctgccattctggcttagctttcgtttattagcacataggactataggtgaaagaaatcagtcaatatatggtgattttcgccgagatgattatctatataatattataattaaaattatctcttctcatgttatccattggtacacagggggagtttatttaaactactgcatcgtcctaacccgcaacttgacgaaaagagaagaatgaaaatggcgctggatgtggtaaataattttaattttaatttttctgtttatttatttatttctctatgtaaagttttctgatggatacctttggctttcattttgtaggccaagggaatgaattacttgcacaccagccatcctacaattgttcatcgagatttgaagtctccaaatctcctagttgataaaaattgggttgttaaggtgaccgaaattagcatttcatttcattatttagttggtacaatttccttattatttgggtatatttccttaaatctgttggtttctccttttcaggtttgtgattttggtttgtcgcgcatgaagcaccacacttttctgtcgtcaaagtccactgctggaacggtaatatacttctaaaatctcatgtaattcaaaccgataggtatattatcgtatctttctgaatattattgttgtggatttcagcctgaatggatggcaccagaggtgttaaggaacgaaccagccaatgaaaagtatgcccctttttaagatgttgtctttgtacccgaaattgttactcgatgtaggcttcttttataacatgcaagtgttatttgcttgcaggtgtgatgtgtacagttttggcgtgatattatgggaattgaccactgcttgtattccatggaaaggattgaacccgatgcaggttgttggagctgtcggattccagaataggcgtctagaaattccagaagaggttgatccagaattagcccagataatccgtgattgttgggaaaggtaagttattatttctaacttctacttatggttttgactagcaaattagtgtaataatagcatgatgttaggattccacaagtgagtagttgaaaccatctaatgggaccttgttttagaagtgtcgacaacctgggaaaaattcaggattacatagcaattgctatagttttctggtttccaaattttgtagggttaggcggggattctagttttcgaacaaaaaaaaaattactcggggcacataagctagtttgtttgttctataataaaccatgttctacaatgtttgtagtaaattgaactttgcttctttctttgtgcagagatccgaacttaagaccatcattctcacagctcatggttcgtctccggcgtctccaacatcttgttgagagaaaaaactctaataagtaaacaaccgaacaaccgataaataaaagtaaagaaaaaaaaaaaggatttgtccccctatgctcgaagagttaggggtttgattagttaattttccttcaatacaaaagaaaaagaaggaaaaaaaaagaagaaagaaagttgaattggattgggaagtgttaggctcattcaaagtgggggctgagcatagcctaatcccttctattgaagatttttagtctttactagaaagaaaactagtacaacttatcttagtagtgaggtaccaaggtagtatggtacatcaatccaagtgtaagaaaattttcttttgaaaaaaaggaaaaaaaaaaaaaagaaaaagaaaaaaagatgaaaagaaacaaacaataaatttgttattgtgtatctgtagagatctagttagggaattgtaaacatgtgatctctgcagattattgtgaagaattaaaaaaaaaataccccaaaaaaatgagaatttgaaacaaagaaattatgcaacaaaaaagcttccattgctgttttattctttttttatttattttttttttcattttttcaaatttattgatttttggttgcttaaatatttttgaagggctattcttaaaattgttggaagtcatgtatttttctgtgtgataatgatgagtatgctatgtttattttaggatgttactaaattgtttttttttttcttttttactggtataatcttattttttccaaaaggatagattagagaaaatatagaaattattaaatagttttaattctcatgggtgactgaaataatttatgatccttgataaaaaataaatgatgtcaattgttgaaacattgataaataaaaaccacataaagactagtattttaatttgacttaatatttttattaagtaaaacattatctctaatctattatatatttcacaaaagctgtcttgttaaagcaaataagaaaaaatcacaaaagttgtgatgaaaatgttagaacatactataaacatatactagatataaggtaatctttattctctagaatagttactgaactttcttatcaagaagagaagtatcattgaagctatgataacttggagaagaagaagtcttgtgttctgggcgaaaactcggccaaagaaaagcgcctatggcgaaatccctcttgtaagctaagtcgccgtgagttggcaagccatactcggtgagaaggcgatcgagcttccactcgggcatgtcttggtaatccttcttggtgtacctcgggtagtgaagtggcatctgaaaatagctaattccattacttgcatctttctttagactccccatcttatagtatagattgttatattctttctccttaacaatgtttttcttctcaaacatttatttactcaaactatatgagtagtattatgaggagtgaaaattatgtatgtagagagagattgaagaagtaaaaggggttattatatagtgtgtagtaggcattaggcaaagtaattaatcacaaggattagttggtttaccttctcaaaaggaaaacacaagaattggctgatttttagctacatgttgtttgtgtgcatatggataattcaccccaaattaattgattttcttatctcatagtcatagctcatatttatgaaaagataaatgctaaggtagccaaatattgcgagagatgacaagaacaagaacaaatattaatataaacccctattttgcaagcgcaagagcattgccattagttactctagatatctagacaatattacaattagtgctatctagcgggtttaacagtttcgccaaagaagacgtggtagatcaagacagagtatgttttttgtgaaatgcctgaataagagtttgacagtctgagtaaacatccccgtagagaatatcaagctactggacaaccttcactctatgtaataggacatgcaacatcaattttgagagcatacttagccttcagtcttcaacttacacattttgttttaataaataatatgagaaattactaaccaagtgtgaagcgcttagtgtagtgttaaaaactttaaggttttaaatagtaatactttagtaaagatatttaaatattaaaataatataaataggtttctgaattaaattaaaaaaaaaaaacaagtaaagataccttagtgcaaataattcctttttttttgaggtcatttttcattttgttatttattaaatttgactaatatatttaatttaactcattaaaacttttataataataagagttaatattattttggattttattttataaaagttattgattagaccatttattttattaaataataaaattttctaaaatagtatacataagatttcaagtttaatttttgacagtttttttttttttaaccaacttgaagataattcttagaaggaatatatacagaaaacataactaattttgttaacacttttagatcgagttattattaagttttattttgacaacaaattaatttaggggtactatttagtactattttagaaaatacagagtaatttctgtagtagaatcttggtagaccctctatttatttcggcatctagaaaattttgaatagttaacaatatcaaaaataatgtttaaataattacttattttcgttattgtaaactacttgaaatttttaaaaaatttatagacttagataactataacatccacgattataaaaaaattgaactaaagtgctttcttgaaaagattaagagtctaccgaaatacaaaattgtcctgtaaacttacccaataaataatattgggaaattctacaatgcacccccttaaaatggatacattgatgcacccttatctgttttagtacctgaaataattttttagtcaa

SEQ ID NO: 111467 - DNA, 2211 bp, Cannabis sativa
gctgggacaatggaaccagacttagtttgtatgtgtgtaactgaaacctaggcgtagacaaagctttagtgagcatgtcagctatttgatcttgggtaggagtatgcttgacttgaagttgattgttgaggatcctttccctaacaaagtagaggtctagttctatgtgcttggtctggttgtcacgccatattatagggatacgtagctcacttagaccaacttcaatcaataaggattgaagccaaaccatctctgctgtagcattggcaagacttttgtactctgcctctgtactggatcgggacattgtcctttgatacttagaactccatgaaaccatattggaaccaaggtaaatgcaaagccagaggttgacctgcgatcattgggatcagatacccaatctgcaccacaaaatcctgcgagaattaatttagagcatggttgtagatgcaaaccaatgtcaagtgtcctttttaaatatctcaaaatcttcttgaccactttgaaatgagataccttattcactgcataagcaatttctggtctggttattactgcatattgtaaagcacccactaaacttatgtagtgatgagaatcagcaatgggatcactattataggcaaataatttctcaccacctgtcataggtgttggtaatgagttagcaaattccatcttagctctacaaagaagatccataatgtacttcttttgacacaagtgtagacaaaattcaaggtgctgcacttgaatgcttaaaaagtagtcaatttttccaagatcctttaacgcaaaagggtcatttagagctgtaatatgagaggaaattacagtagtagagctctctgttaccagtacatcatccacataaacaaggacatataaggtgtgatacttagtgacccttctgaaaagagattggtcagctctagtagaggtaaagttgaaggttttgaatgctgatttgagcttatcaaactaggccctaggtgcctgtctcataccatatattgccttgtttaatttgcagactagtttaggagagtttgtgttaataataccaggaggttgagtcataaaaacctctttatgtaactcttcatttaagaatgcattattgacatcaagttaccttatttgccaaccattggataaggcaattgtcaatatgactcgaatggtagttcgcttgacaacaggactgaaagtctctatgaagtcatatcatatttgttgtagaaaacatttggccacaagtcttgccttgtcttgaggaactgtgccatcttgattttccttttctctgaaaatccatccacttgcattgctttgttccatttaggatctttaagagttgctgccagtgtgagagattcttcagaagccataagagccttaggtttgtaagttccaactttagctctttggatcctgggatgactgttagcaggagcttgggagcagttggatgacacatttgaatcagcagaagaagttgatgttgtattagaagtgcttgttaaagctcatgcagtattagttggagatacaaaatttgttgcagctggtattatcaattctagatctggtgcaaggatggatgatgatgatgttgtagcatttaaggtacctagtataggtgtttggacttggctagaagttgtcggaatgcaagcaaagagaccaaccatgattagagggtacatgagtagaagcagaatgcatagcaaaaggaaaatgaaactcatcaaaaattacatctcttgaaatgtaaattctaccaaatgatgcaaggcatttgtaccctttatgtttgagcctaaagccaagaaaagtacatttttcagacctaaactcaagtttatgtttgttataagatctgatattaggaaaacatgcacaaccaaacactttcaatgttgagtaattatgatttttgtcaaacaatttgtgaataggagtgtcattttgaacgacaggagggggaagttattgatgatataacaagcagttctaactacttcatcccagtaagataagggcatatgggcctaagcaagaagagttaaagcaatttcaatcaagtgtctgttttttcttccagcaacaccattctgttggtgagttgcggggcaagacactttatggttaatgccattttggataagaagtggttctaatgcttggtactcactttagatc

SEQ ID NO: 111468 - DNA, 2079 bp, Cannabis sativa
  modified_base (96)..(98): a, c, t, g, unknown or other
ttcaccccattggaataaacaacccagaaattcttattcactttctctttctctcttcatcttcttcttcttttttctcatctactttatattatnnnatattattttataacaatattttttatattaaacaatttattaaatccatgataataaatgatttttttaaatttataatgcaccctatataatttaataaatattataaagctacacacaaaagtaggtattataatttcattattaaaactaataaaaactttaaatcttcaaatactaaaaataaaggtgtaattttgtgtcatgtattttatatttatttcttgtttaatttatattaaaatattaacaataattttggtgtaatttatatttatttatttattattgttttattattattatttaaaaatgaaaaaaataattaatactcatatatatgttattgaaaagatattttatataagtacacctaattattttatcgacatatattattgtcacataaaaagcattgtgaagtttgcacgattattaaatataaacaccttatattgattaatcttttttttttttttttttggcagacaaattgacaaagtttagagaagccaaaagaagcttacaatcttggataacaagaccaaaaggggatggtaaattcaaagaactaaagacagcttgaactgaaactaaagaatcggttccaagctgtacacttccccaacctttcgaatcaatccaactcagtgcttttttaatccccaaagcctccacaaaggctgactctgcccatccatctaggcacaacgagccaacttcaatcaacaaacccgaactatcatgagccaccaacccaatctcatacttccttttgaagtaaaaatcgctccatgcattgacattaattcaccttaatcgtatttgattctgatttcatccaatgctctaactctctacctgatcccgaaggaacaaatagagaaccccctttatttgaatgagcatataaccattgattaaggaccacacgagccgaaagaataacatctaccgtagaagaagacttctcttgccaaaccaccgagtttcgggcattccacaccgcccaagccaccattgctgcctcttctctcaaaccaaatgcagaagagtgttgctgcaacaacttgccaaatcagtcacgaaaatcatgtccatttacgttaccataattcacgcttgaatgggaccaacaagatcttgcaaagtgacagctacccaacaagtggaaaattgattcagccgcctgattacacatagggcaagtcatatcaattagaacatgtttagacactaactgaaccttagttgcaaaaagcacgccataaaaattgatgaactttatgagaaattttcaaatcccaagaaattttccacaaaaatacctcatcattatttgaaagaaaagcatcatctttatgaagaaatttataagctttcttaacttgatactgcccatgaatattcatagaccagtaccaactgtcttcagcaacagtaaggctaagataaatgttgtagatgagttattgatctctctcattaaacaagtctgcaatgattttggaatcctaatatcttgaatctaccattgtaagatctaaaatcgagtagttatcaagaccaaagaagtggtaataaagagaaaagaggcatcaggaagctatggatcacttaaaacattaatgtttgatgacaagggccaaccgatcgacgagctccgacttttatcaaatcttgagttttaaagatgctcttccaaattaaacttgaattaatctcttcttaataatgagatattactaaaaaaaaatctaaataaatatgtaaaactaaaattatatttgaaagtaaaataaattaattgtcaaaaatcaataattgattatttttgaagtttgaattaatataattatttacttttttttttgaaattaaactcttatcaataagaaaagaagaataatcctcaatctaagctaattcaccatccaccctaagtgcatgtacaattaattcatgaaaaacgaacatgaa

SEQ ID NO: 111469 - DNA, 5841 bp, Cannabis sativa
atcctcaaaagcaagaaagaatacatagtatcagcttatacttctcttatccttctcttacttattttttgacttcacattaagtttataactaactacataaaggaaagtgaatgcacaacatttgaaaaactcaagttctttcttcttctttttttttttgtgtaattcaaaatgaaagcaaacctctgaagtagtgtccccatttgtgtgtttaagttgagcatctttatctacagctgctcttctacgtgcagcatttcttgtttggggtcctcttccctcctcttgagaaggtttcaaaactgctttaccctttcctttcgatgagcttgcactcttttcttgtggtggttcctttctagacccgtcacctatattgacagatgttctagagcgagtagtacgacgagtagtggaaacaggagtagaagtagatggagatgaagcaccagctcctaagggtgtagttccagattctgagttcccaccagatgctgaaggcttctgaccagattcacctcgttgaactcgaggccacaaaaactcttctacagcagctaagcttgccaatggatcaatcaacacaacatttgatgaataatcacgtaaggatttgtctccttgggaccgacaaagacgcaacttaaatggctgagacaatgcactaagcccagaggatagtcgtgcacttccagtggatgatcttgatgaatggctcagcacaacaggaaaacgttccaatgaagacaaagcattctgaagcttctgaattaaaacagtcataggagcagaactcccttcaatactaaaaggaagagcaacagcaacaaatgccttgaatcttctcagtgcttgctggcgaagctttggtaggttagcttctgaaacccgctccttagagaagtatccacaagaaaaatagttgagcaaggctgcaacagcaccactaccaatgaactcaaaagtggacacaccatcccctttgcttagttctgctagcatctcagaaattaccccaatcaagaattcttctttatttacagaacaatctgccaagcgagacccagaagctttggattttccctttgctttagtcttttggtcatcaacaccggaattcaacttcaagcaaagattctttaaaagcaaaagatcatcagtcactccaacctcaacatttccagaatctgactggaaatatttatctttaaaagctttggcacacgcacttactgccattcgaatattagtatttacggttggtatctccactgaacttgggggtgaaccaactactaaagaattcttagtatcctccaccgaattaccatcaagattagagttaccaccacgtcttctgtatcgcctagagcgtgatgatcccgtcacagaatcgttgtccttctctgcagaagatgcttgagcagtgactgtgttggggctaccagctacaataagttgatccaccgcatgaaccacaccttccctgacaaacatcttggagaaagttccaggaagtttttccataagaatctcagcaatttgaagtgcaggaactaatacatgtggatccttccatgccaaaacaccagctaagaagctacaagatcagaaagtaataaagcagcagtaagtgtgtgtacagcaacatagacatggacttgaatcatgcaacaataactagattgaggaataccttgatacgtttgtcacacttaacaaggactgaatcatctctgcaggactgaagtacatcaatttcccaataacagaaagacacttgtggcgaacaggaccatttacactagaaccataaatctgtttgacaagtgaaccaaatttaacgaaacaagaaagcaaaactagcaactggaagtgtagaaatactacataatatacgaaaacaagaaaatgacgccaaataaaagcaaacctgcactagaacaggaagaagatcaattccaaattgtcgaagaagctcaggctgatcattcaataatttctcacgagctgaaacttcactattgtttccatttaaatcttcttgtttcccagaactgccagcagaagacttctttgcaacaggtgccttcatgaatatgttgaagctagatgggagagaaattgttccttggggcagtgggggaagaagctcatttgccaagctaactatctcaaaaatcttccacaaaaacaaatgccagaagcatagaattttataaataagtactgacaaaataaaatttacaagtagctaaaatcatcaagaagcacagaaaggaatctccttattcataaacaacctaattgaaagcccatggagttaatatatatgcatataaatacctgctctggtggcctacttaaagcaggtgaaactgaagagttagcagaaatgccagaaccggatagtatatctttaagaataccactgatccccaagagaagtagtgttttagaacccaatggggacccacttgcacacgtggagagaagtcgaattaatccctgcattcaagggaatcaaaaataattgaaacctgaacatataaccaacaataattgaaagcataatatgaaaattaccgtatatgtaggtgtgctaagagaagattgtccacctccagaactgctggttgatatgagggaggcggcttgtgtcacaagtccatgattacataactcatctagtttatcaggagaggttgcaaatgcttcagcaatccgagtcaaacagacagaagcatgctccaacacctaaaaacgtcatatgcccacttaatgagagaaaagaaaacaatttcccgcaatgtagacaaaaagtagaaaatttacatttgaatcatgatattgaagtaggtttgtcaacagtggtacagcttccattacaaaatcggccgcatcagagggaagtttcttgcacatgtttgcagcagtagataaggccacacgctggaaatcagcaggtattcaataaggctctgagaatataataatgtcctcatttgaaaacattgtattcctatcagtaagagaaattgttaaaaaaatggattacctgaactcctgtagagaagaaatccagatatgaaagcactgccatgagagcaccagcgcgcaaacaggcagttgggtgctcctgggaaatttttttcagagcttgcagagactgtttcaagcaataaataaatgaacatcagaatgcaaaacttaagaagtgggattagctccagcacttcttttgaaaatatatatctaacaattttaaaaatacaagactacttgaagctactcactatgaagtaacacctaacatctcagtgagctaagaaaaattatacaacgaacctgttcagctaaatccatatactctatcgttagtaatcttgcacaaaagcacgagactgcaccataatggactaccgcagcacaagatgagggcagcacgtcacacagatgagtgagagccctggcagcaagaagcataatatcgggattgctttcgtgattaagcagtcccacgagaaccggaacaaatgaatccaccgaaaatgtgctgagcgattcctcagtcccaatagaaagcatttcacatagttgcgtcaaagcctccacttgctttccttcttccccatcagctcgcaacccagatagaatcttcttaagccgaccactctggtgcgatgaagatgctgatcccatggccgatgaaggtagtagatcatcaagcccagctccgatcttccgaagaagcccttgaagtgcactacttgcagaaaaggtcaaattttggtgcaaattattcataccaccttcactatcattatcatcgtcgtccccattacctccactctccatattcaaccccaaatttctttccacttccctctctctttctcgttctctttctctttctctctctctatccctaaccctaacctcatgttctttctcctttcctttatctgaaccatccttgtccgaattcttggagcgacgatcacggccacgcgaaccagatgattcattggtggaatccatgggagcagaagagggcaataactcgttgagagtcctagaggaacgagaacgggttgacacaacggcagaagcgatagcggtggcagcgttcgaggtcgaagaggcagtaacacgggcacgcttgctagaacgggtagcgggaccagaagacgaagatgaaggggcagctgaggaggcctccgcccgcttccggctccgagtttccatacaagaaccccaaccccctcaatttgttaactcgctcgccaagagcggcgatcaaaccgtccaagatccgattatcacttgcatctttctcaaaccgaatccaaactccaacaacccacacaagaaaagacacaatcttagtgagaaccagctagccaaacttgaaaccccagattcttcactccgctaaaatcaaattgaaatcccaacaaaagaattgacagaaattccaaaaccaaaagagctatacagagtcgaaatggagaataagaaagggacgggttcaattgaaaccctaaaaagtggcgaaagaataaaggtagaagaggagaaatttatataaatttctttttaattgtttattttatttcttattagttaattaatctcgactaaaaggaaaatgaaaaagtttagtgatattgaagagaataaaaagacgtagccatggcggtgagttactcaatagtccttcctagagggacaagtgtaacgaaattaagggctttactaagtacactagggcttcaaatgaaaacattacttttgctaccaaggatttaaaataatttgagtacttagatagaataatagaacagagaatatgattttatggaaatttataactaaaatattatttagttgaacaaaataattttaataaatttttataaatattaatatattaaattgtggtattaaaattgaaggatatttgatatgattgtctagaagcttataagtatgtgttaacacagatttttgttaactatcttaaagcttaaatcgtgatagatttgtacagaaaataatagcagtaaggaaaaaataaagaacacaaaactttttacgtggttttgcagttaaaattatgtgtagtccacgagtctatcttattagatatttctgatacaattttagggttttttctcttaaggataatctgtccatttttcaatgtaacctgctcctatttatagttacataggagagcagttaatgacaaattagactgatatcttacaacaataatcccccgaaattatgggatttgactacatcccacgtaaaataaatgtggttactttgaaaatcacacagttgtgattggtccacttttaccgagtcaatgcatacgtgtattaaatacgttgtaaagcgtatcgttctggaacatctcgttgggaacatagcaacaataaccctgatagcgagctagaccttttcccatgtctttccgaagttgataatgtaagtctcgtcgtttatgctattgaagacataacgctccatctgacaatcgtagttcttggtgacaaggcgaacttcagccgtcaacaacaatttaatatcagcttctgtctgagagagctgactcgacggagcagtggatctcattgaaagatgtttggagctgattagtgaaggtaccataagtgtacttccctatagcgagatggatgcctcactattcgttatttagattcgttcgactgttatgcttagtttgtataatgtatattatacggtaagtgtgacagtcagtagtcctgtgatccgtaagggaaaataccgggtaagttgtgcaat

SEQ ID NO: 111470 - DNA, 8134 bp, Cannabis sativa
ctaaataacaaaggctactacttaataataggttataagttataaccaccaatctaacttaattatgtttttcataaaaagaaaataatttatcatctagtgctttggtaccaaggtaaatatttaacagaatcagctaactgtgaatcacaaatgtaacaaataactagtgatctgtgttaaaaaaacaaaaaaggacaaaataattacctaaacactgcacaagggatatctcggtaatctgctttggtaggttccccaccaaaaacagttttctgtacacatcaagaaaagaatataataggttatcaaagaaaaagaagagaaatataataagaaagacacacatgatgaagataatttagaggaaaaggaataagaaaaggtggaaagggaacacatacagcaaaacatgtcccctccattaaggcgacaggggtaagatttactcggtttgtaacatcaccaatagcccatatgctaggaatatttgtctgtgagaactcatccacctagaagagaaaaaaaagaaacagagatcaatgttaatacattatcgttttcaagacaacatctagtcgagtatatgattgtgaacatttccttgtcacctttatagctccaactttatcaatttcgacgccaacggaacccaaattcagcctctttgtgttgggagcccgacctatagtcaacaaaataatactgtcatgaataacgacaaatatcacaagtatcggcctcatgtttgcaagtagtagctccttgttttgagaacaatggacaatttgcactatgttaaaactaaggtgacttaattaattattaactcccaccttaactttatgtctcggtgtttttgtgtgtaagagagagacataaagagagagcaactgatgtgaaaattacgagaaggaataatggggaagttgtgaagaagaatttcaaagtgaaaaggatcatacttcacaaaaaacaaaatgaagaccaaatataattaacaaatgtgcacacacagttatgtttaacaaaccaagaatcaccaacttctctgactaatccagcatagttacaacaaacccaaaagctaatataaaaccatcatatataggacagattcgttaaataccagtggcaaacaatacagcatcagctatcaactcttcaccatggtcagtaatagcttttataccgtcctctgtttttatcacctgaatttacaaagagaagtgttcacggaggtaagcgtttatcagaaagtaatgaaaagtcaatacacatgaaaataagaaacaatcaaattcaagacagctctgcacaaaccatacagaacataaaagttgtacctctgtcaaatttgtccttggatgtaaattaactcccctagattctagatttcttgcaactgcagccctcatttcatcatcgaaacctctatagaagaaaattttcaaaactcgcattagaaaccaaacttgaagctagttaaatgaatgtacgaagcagttataaacaattttcaaactgtaatacattaaatgtacatattatccacatttgcacaaactaagcacttggccgtataagagttagcactgccaaattaagtgattatagcagcactttacctctcccatttttattggttacacagcaggagacaataaggtccacagttaaattagacatttataacagttacagtttttaaagtctcatttattgaggttccaatatatgcaaatttaagttttggattcaaattaaaattatgactgagaagcttgagccttcacaaaggaccattgaatcattataaattcccctttcatctgaaaatcaacagccaagcaatccagatgcaaaaataatgacaacatcaatataccttagtggaagttccctcctgaagcaaaggtcgaccgcaacacccatcccacgccatattgaagcaaactcaactgcaatgtacctaaatagacaagaaaaaaaaaaaggcaagaggataattgtttgaggtgatgagtgcacatagcagttaataagaattgcttaaagaaagggattgaaacaaaccctcctccaagcaccacaacacgtttgggaagctcctctaaactcagtgcttcatctgaggttataccgaattcctggcaaaagaaagggaaaagagagttcaaataataaagataaatctccatactgcaaaaatttccaagaaaataagatagaatgtggactgagaattgaaaaaagatgaatccccaaaggaaaacccaaataagataaatattaaccgaaaaagatgtataagaaattcccttgttttcataatttccagtactttactacaatggaaataaacaccaggaatgaactattaccaataatactatattacaaataagagcttatagtgccctgttttgggctgggaacacgcactactaacaatataacattaacagatgtccctttcatgaaacattaacgttttaaatgaagttataacagatattttaaatgccaatataaaatcaaaaactgaataagaagttatcaatagcttatgaattattaaagggcacaccaaggataatttaaaaaaaaaaaaaagacttctccaaaaatgcagaattttacctggccaggaattggagggcgttgtgccctacctccagttgcaatcaagatatgttttgctgaataactcaattttgtgccatccagctgagtcacctcaacttcattaggtccaactagcttcccctctccctcaaacaattttactccagcattcgacaataacctcttgtatatcccattcagcctgtgtatttcctcagtctgcagtttccagaaattaaataacaaaaatgacagtaaaattacacaaactatggaaataaatatgatattgagaaggtatttgtttatttaaggtacaagattttaaggaatttatatttgttgatttagctagagattgaagttttttgttgtaaactactgcattctgatttcctattgtacttgcatatttttaccatttatacaagtttagttaattatcaaaaaaagaaaaagaaaaaaaaaaccaaccttcttatgcaaaagtttcttccagttaaagtctactttctcattcacctcccatccataattccttgcgtcctgtacattgaaacccaaacatttactaaggacgactaaaattaacagaacaataggtgcatatcatgtgcacatcatgctctctaaaatgcacaaaatttctctattgtgagaagcatctagaaatttcacatcacacttttgggcatgcaaactgtgtagttcaaagaaatgcatccttttcaggaatgtaatgttacttcagcttattaaaattaacagtcaccaatatttgaccaaaactagaatgagatagttaactaaattgacgtttactgatttgcatttagtaaagtgaccaccaactcccaatattcatacctgctattatatgttttctagtcacagcttgtaatctgttttgtggctaaaaccacttttctctttctattttacatcaaacaaaatttccaacactgtatctttaataacaacataactattgccaaagctttcttcgtcacagccaatactctgctcatgcgagaactgttgtatttacgggcttatgacattacacatcagtgactaaaatcttcaaatatcctttggtaggtgcttgaatgtcaattctataatttcataatttacactttactctttacactaacttaactaacgaaaacatgaattttatttttcagttacatttaatgaacgcttaaaatgataatgtattgactacagaaagagaagtttaaggagaccttctcacctcaatttcacctccaaaagttgctccatacaccaaaatcttcttgggaacacaaccacgaataacacatctacaaagctcaaaaaaaaaaaagagatatagatgtcatcattgtcatgagtatgagcttacattggtttcagaagtcacagtctctggtctatgatttaccaaaaggataaaataaacaaatgaaatgactgtttttatgtactcacgttccaccaactcctccaattacttctgaactgacgggatgaaatggaagctcacatataccaacctatagatttgaaaaaccattatcagtaagataacaatcaaatgctttttccagttaaggatacagtcatgattaaggaaatcaagcaaacttagacaacagctaagaaacaattaagtgtaccaattagataaataaaaataaatggaaagaagcagaaaatcaaccaaagattcctagatcctactaagcaaaaaacttgatgctgctttcttttattattttgttaacaaattatgaactaatacattaacctgcaaacaattagaagtccctcaaagcatcccacgcaaagaagctcttgaagaaaacatccaaatgaacagtggaaattaccaaaaacaagaagaagccataaaaagaagcacagattaggatttcatataccttagctccataattagctgaaaatctagaagcacgaacaccaccacttccagcaccaataacaaacaagtcaaaatcgtagtgtgcttcttcctcattaggttgacttacttctccatcgattagcatctttcttgccatctttatacagcaaatccacaagagcaaaaaagaaaaacattatagacgatccagaaaacaacaaattactctgttaggctggtaagaaacattaacagccaaataataacacaaagaatcattgcatcactacatctaaaatcaaatcagtctaattcaacaataaaaaccaccgtaaacgaatagtcaaatcaatcataaaccaaatatatatataattaaatatcaataacaaatgaatttcctaggatccaaataaccacttctatctcaacgtactgaaatacgtgtatcacaacgtactcaaatgacgcaatccacaaacaataataagaatcaccaaacatccgattacactcaaaaaaaaaaaacgttaaagaagcatttaacatcagctcatatgattaataaccagcggtacactacgatcctaaaaaatctccaataaaaaataataaacacggatttggcaatcgttcaagaaaacttgtcagcattttcctgatagataacgaaagagaaaagtaatcggagaccgtaccgttaccgagaaaggaggagagtgaagaaatcagcagcagcagcggcaataatagtattggttgaaggaaggtagagaagtgagaagctctgctagggttttgagagagaagaagaagaatatgaaaatggttggaaatgaattgtgtcgtaaatttctgagactctgtcttttatatcagatcatttttttggattttggcttttattatattacagatttgatttgatttttcttaagatataaaggtgtgaactgaagaagaaaatgtattgaggatgaaagacaaaacggtgcgttttaatctcgtgcgtgtcagaaagactctggtggtacgatctcttattttaaaggaataaaatgagaattgctaaaaaaaaataaaatcactactatgtttttggtatcctactatcatattattactgggtaattaagtattgagatttatatttttgaaaaataatttttaaagaatattactaattaattatggggtgctacttatggtgaaaaatatctttttgtaaaaattttataattgtacatttaaattaatttttttatatttttacggtattgtataaaaataatacgaaaataacaagaaaattatataaatgtaatagaaaaataacatacaaataatatcaaaacaataaatacaaataataaaaaattaataagagtataatataaaaatatattaaatgactgtatattttgtaaataaaactataaaaatcgtaaaaaaaaattaaaatttgtacaatttttttttttgtaattttttttgtgagtttgtgaaataatctttgttttaaaaatatttattaatttatatatattaaaaaagatgcgtagctattagtagagttggacatctgtgatctaatatttttctcgtaatctaattcaatcaaattagtaattaaatgtagaaaattatcgtctggtccaatttaattagatttcaaaaatctaattcaaatttaattttttataattagattggattgtatcatgtccactcttagttattggtgtcaagaggctcccaaatagttttttgcatttgaatctttgatatatggtggaataactctgtaattattaaggtagtaattatacttattttaaaatacaatgtgtatttagatattaagtaatatttacatatgaattcttatttttatgtttggcaaatgagttaagaatgtgtttgataataaattatgtaattactagctaggtagtgtaattacaatcctagtaattacatatcactctattttaaaatatagtaacatttaacggttagttatttacagagttctaaaaatataatttaggtattattactgccaaaaattaaatttaagtatttatttacactgagagttaaacttaagtatttatgccgcaaattattctaaaattaattgtaatttttttttaaaaaaaaaaaggttaataatctttatcataaaaagataaaaaaaaaacaaaataaaagtgataatgaatcaatctattctctaatcaaagtcagcatgcatggccattgagttttaatttaaaagcatattatctgtattaacaatgtggaaaatttcattttggttaaaacattacaaaatttgaactttaaccaaattaatgatagaaaagaataccaagtccaacttttttttttttgtttaaaactaatgccaattgccaagtccaagttaaacactagtatttaatgaagaaaaataaaatgaaaaggcaataaataataattgtgtggcccatcttgaatagggtatcttttgatatagaaaaatgctaaaaggtattagtggtccttagtactcatttatgtgttaatatcgttattggtctaattaagtatcagatctcgtatattataatataataacttttaaagaatatcgctaactaatcacaatacgacgtctttaaaagttttaagcatcactaatgctcaatagtaattttggtttgtataacattcttaactccataatagttcattctatgcaatcaagttttgatttttgttttgtttttttggtatatttaaacaataattgcttttactatgcaatcaagttttggtgaaaaaaatgaatgaaaaattaataccctatcttatctaccagctagcccaatatcatcatcaaatgcaaagattaaatatatattttttttaaaaaaaaaataatactttgttttgcactaaattcataactggtttaataaatataataattggtgtcatatttctttaataaatgtatagtaaggtattacacaagatgggattcaatcacatccccattccccacacatttaatagcctgttatatatatattggaaaatttgattaaatatgcttacattatcttaaatttatttctaggtaaggatagtgactaatttttactcattaatcttgaatggtttaattaaaattcttttgttcataatgtatcacaagtagtgttttttttttttttgtttatctctttggacttgcaacatttttggctcacaatgaatcacaagcggtttttttttttgtctttcttgacctggcacctttggctcactatccttgaatcgcaaacgactcttttagtttattttcttagactaattattggatttggatcgaatacacattaaaattatgtttatttttaatatcatgttagaatttaagattgtatgtcgagaaagttggaatagagtgtgcaagacaagatggataaagttctagagtagatagtattttggacaatttgttttacaaaagttatcaattggactatctgttttgttaaatgaaaaaatagacaatgtattttctaaatttgtacaaat

SEQ ID NO: 111471 - DNA, 9155 bp, Cannabis sativa
ttatactaaaatattatatatttaggtaccatatatagttttacatacaaaaatggcataaaatacaattcaattatataatataatacaatacgatttaatactacgttccaaacgagtccttagtgattatgatattgtattgtattgtttctctattgcccaattcatcattttcctttataagaaatttcatatgtttggcccgggacaaaatttcatgtttgtgtaaattttagaaacatgttacagatttgaatctatacacttttgtagtgaatgtcgctctaagcgcgaaatgccatctctgtataaggatgctagaggcatattgcaagcattcaaggaaaagggtgtcgatctcgcaattgcttctcggtcacctgctgcagacacagctaagacgtttcttgacaaactcaatatcacaaccatgtttgtagctaaggtgaggcatggtttttgtgtgtgtgtgagtttgttctataaatattattttctttgttagagaaatctggtggtgtccttggagttttacaatggtatagtgaccttttatcaattatgtatagcataactttttggttccatatttataatgtcaacatgaatggtttgccaggcctgaattatttgaggtgaaatcatccatcacaatttgatgaaatgatatacattgagaactattatcttcattatgcaggaaattttttctagttggactcataaaacagatcactttaagaaaattcattcaagaactggagtcccctacagctcaatgcttttctttgatgatgaagataggaacatcaaagaagtaagactgaatcaaaatgtttgagattaggcatcacatattgggtgaagtagattaattattttgtaatgctgattaattacaggtttccaaaatgggggtgacaagcattttggttggtaatggggtcaatcttggagcactaaggcaaggtctcactgagttttgtgaaaatgtgaacacttctgagaagaacaagcagagatggatcaaaaaattctctggaaattcaagttcatctgataaaaatgagaagaaatgaattaagatgatgatttaatgattgttgtactgatttctcaagatatgctttcttgaatactaatcttcaacatgttacaattattgatgtaatttataaaacattcaaactagtcaattctaaattctactattaattgtttgttgatactgcaatctcttttctatattcattattaaatttttaggttatttccccaaaaaaatctgcaatggttgaaccattttgttcacttgtactttttgacagatcacatgctcatttcttatctttctcacattattggggtttcttgttctaaatatatgtataattgtatataatacaatgtttcatgaagaccaaagaacataagattgaattacaatagttgttagtagtactgtaagttcgtgcgtgtcatgttggttcggtctgtatttatttatgctttttaaaaaataagtcatgccatacaaaaatatgggtcgtgtcaacatttttaaaggatagacccaacacggcacgtaagcccggcatattcgtgtcgtgttttgttcgggttggtatttcttaaacatgctagtttattttcatatttggacttaaattcgtgctttatttttttatatttattttataattattaaattatatatatttcaaaattttagttatatatttatgtaactttttgaacaatattttacatataatcatataaaaatattattaatattaaaatttaaatatttatctataaataatcaaattttatgacgcactataaataaattaatatgtaatattgatttttttatgttttaataatttaattatagaattataatatttaatattacatttaattattattattattttaacttatttataattaataaattcaaattttattattattgtaattattattaaattataaagtttttaatataccgtgccatacttttcaggcttatcatgtgtcatgcttttcaatatagtctattcgtgtttacgtatcggactttttaaactgatttatttatgcttacgtctcgtatctttcgtgcttctcgtaccatatcgtacttaaagatatattttttgtgtcatgtcgtgccaatttatagcatagtgtcatgtcatacctaaacccgtattttttcatgcctagtcgtgctcgtaccagtttcgtgtcatgtcaaaatacctagttcgtatttaaagcactagttattagtagcatgaccaaaagaaaatgctttataagggaatgttgtacatacatttaatgcacaatgaatacaacagagatttacaaaataatgaaacttccatttagccaagcaagcagctcagagtttgttgatgcaaatagaccaacccaaaaggtgtactcagaaccttgaggagtatccattattaaattagaatataaagaatccataaaggttaaattgacacatcttttccaaaacactagcaggtataattgtccaacatactactacaaggttgcttaggattcattcttctttcttatatctgtctctctatcagtggtgatctttcattgctacttgattcaagtttctttgttgtagctgaagaagaagtgatagtagcattctctccggtactatcgcaactttcatcagccacaatcgaatacatttctgttggatactctttctttcgacactggcaacatgttccccaagactttcatcatttctcaaagattaagggcttgaaagacataaaaagtttgttgaggaatgttctgtgtcccaacatcactgtattcagatggaaagttgtctcaacaatgacccacaaaatctttgtgaggcactaacaatggaaaatgctcagccaaatgcagacattgatgaagtaactcagacacttttggagaagaagaagaagtctatagacaaatgatgaattgccttcttgtacaagatgaaatgacagacatgtttaagaaagagagagagagagagagcgagaggcttacccgaatattccaagagaaagacatgaaacttaaagatctccaacagcaggttgaattactggaaaccaaattagcagcagaagcagaaaaaatggcagcctgcctacaagataacgagaatcaagcccaagttgcaaaagaagaaagtattggcagagaaaatctgttaaagcaagagttcagaagagaactagaagctgcaaccgttgcacggttagatgcagagagagtgcttttcaaggttaccaatgagaaagacgatgccataaaaaacctcaagttattggtagcttcactggagcaagacttcacaaatctagctgcatcctttttttcagatgttgtagaaaatcaggtaaagattgatgtgcttatggaggcattagagatggggaatgtcacaaatatcggtactgaagacaaggacaaagaaagtttgatggataaacagagtatgacaatatgttaataagaatatcgagaagtaaaacagaaaacaggtacttggtcattcaaatattacttgagagtaacatatttaaaaccattgaagacagttctcacgcttaaaattatagttgttccccaacactttttcaaaaaagaagaaaatgaagccaaaaattattaagtcactacaatgttttgaaaatatctgctgggggaaatagtactaataaaaaagagtacaagtttgagaatctgatcttttgagtaggtaaatagtcacttatgagtacaaatttaaagacgtcgtttgcaagagtgcctagaacttcagaagtatcaccacagtccaaaactaaatgattgatgcattaatgagagatctgcacaacgaatacgtaagcataaaaagactaatttcaaaaacaaaatagttacagtgggaagcagagtaaaagaataaaagattgtaattcaagctgataatccatactttcattaatgggaaaaaagaaatattattaagcttactcaactggaaaaagtattgtttttatacaaataagagcatctttattctttaatgaaaagacatttaacccttcttccatatgtcaaagcaacttaaggctacatgatatgaatgataaagatcctcttaaaaatttttagactcatcacccttcatttcactttcgaaacaagaaaaaaaaaaggaacaaaaatgttgtcgagcaaattccttacggaagagtaaaatgtattagtaagacaaacttcgaagatctagatgttaaaatacatataaacaacacacaaatattgacaggagcaagttctccagatacagatatacaagcacctgctatggatgagacttactctgcactagcaaatcaatagtgaaagtaaaaatagtactgttaatagaacaagaagactatgaaaatctaaatgcatgtgcatctattaggcagcaaagtactcaaaacatagatgccctcatgtaatctccagcaagtaataagagattactataaattatatttccaacttatctctttatgacacatcaaactaaagtgactaaatttaacagatggcttgaactgaaagatgggcctcttgctgtccttactacatttacccccacaaaactaaaagtttctaaggattctctgctaggaagagacattgacatttgtcaatcttagacatacacatattggccaattttatctcccattatataaacattgatgatgtagaaaagattgcaaactgcaatcaaaattatcagtaacatctaaagaatatgacaagaaagggtccttattggaacagacaacctttaccgctaaaattacttagattccctaaacaagtaggtagaaatgctccacaaacaattacaactgacaacaaataaaccaacaaaatcaaccaaatgagagaaaatgtcattcgcatctgctaccaacaaagtatagtttctctcatcgataaatttgatctaaaaattaacatcaagctaatgttctattgctaaatactgaatacaggtaaaaatcctgaagtttactgaaccaaatcacttcaactacagaggaaacctttcaaaacaatattaaacataaaattactgggtatttcttacaataacctattatacatttccaaaaacaaaaatagtctaaaatactttcaaatgaagaatagcctacttactttattacaaaaggttaatacaaatatcttaacaacatatgcacgtaaacaacaataataattgaaattattgtaaatagacatattaacatgaatctagataaaggttcttcccacttttacaagatggaacttagaagatcttcttaaacaaaaatattgagaggacgtatccaaaaagtccaaattctgatacaagcgttttgccagattactagagtgcaattgatagacaagtagaagatttagtataaattttagagcagaaccacatgtaaattttcaattttcaaaataaaagtaaagcattcaaacacccacgtaatgaattaataaagaatattaataggaacagaaaacttgaacatcgccggctcatctatatcaaccatatattttaccctcgccaatgaaatgaaaaatctcacgttaccttttagaaaaagaaaaactactttcttaatgagttatcgtttaaaaataagaaagggaggaaaaggttaaatgaaaaattaacactgctttcacattgaccaaattaaaatattagtaaaattgtacttaaaaaagttggcttatagtcgcacttaaaaaagacaaattgactgaatttaactaaaatgatattggatttcaacaataatatttgttaactcaaatactttatttcactaccaatggtgaaaatctcaatgttccctaaagtaaaccataaagcatgaggaacaaacaattaaaagtcaagcagattaacagttctgaaactgaaacctaaaccaaatgtagagacttccatataatataatttagttctgaaacctaaacaaagcaaaataactaataaatgattaaaacattttgtaattggtacaaaataaatcaaacactcacctaatgacccatgtaaggtgccccagggccaggatgaggcctaccactgccctgccccatttgtggattctggtacccaccctgcattacttgttggttcccatagcctccagctgcctgatttgcataccccccaggtggcccaggctgattaacaggcggtccaccaatacctccgagcaaatttccaatacctaaaccacctccctgggttgcaagcaatgcggataaggcttgtccaagagccgggttcagtgcttgttggcctgccactcccgggttgaaaccaactgcaggtgcaggtgccgaaggagccatcaaatggcctggtcccgtcccaccagttgaatacttattcttctctttcctggggtagtattgttgatgatgggggtgatgctgatgttgatgctgagtctgatgatgttgatgctgatgctgatgctgatgttgatgaaatggcttgccgctctgtttgggaccgtctatggccttctggcaatgtaaagtaagtccctcgaagttcttgtgaggctcctcgagagcccttttggcactctctaccgacctgtaaacgaaaagtgcaaatccctttggtttcccagtatgcctatcaagccccaatggcccttcctcaacatccccaaactgtttgaagtattcaagcagtttttggggatcaacatcggcagaaacattgctaacgaagattttcctctgagtgtactcagacacggacgagacaacgggaggtggggcagggacaggtcctgccgaggcgagctgacaagaagtggtccggctcccaatcttcttctggggttccttaagggccctcttggcaccaatccgacgcttgaagaggataaaagcataaccctttgattttccagagactctgtcggtcacagctttgcaatcttcgatctcaccgtacttgctaaactccgaaattagggtttccgcagtggtgtcccaaccaaggccatggacaaagatcttgcggtgggccgggtcggcatcggcgagatctcgaacacactcgatgaagtccgggtacttatcagcagcttgcttgacgagagaatggagttgctccttcgaaaatggttcaagaagcttctccaaaggctcatcatcatcatcatctaaccctgtttcatttcctcctccattagcttcattttcagctccttcatttccgactccttccgccgaaacgtcaccgtttagggtttcattctggccctcatcgtgttccctatcctcctcttcctcctcctctaccacctgttcttgtaattcttcatctacttcttcctcttcttcttgttgttcttcttggtcctccttcgactcgtctacaaccatttgttggggttcttcttcctcttggattggaacgcattgggttgggtcttcttcttcgggttggagctgcgggtcccgatgaggagggtccgtagatagaggctgttctggttggggctcaggtgctttggaggtttccggctctgaaggtcggagctttcgcttcttggccatggcggtccttcaggttagggttgtttttttttcttcttttgttttttctcagagaggaatcaatagatacccgttatttctagtaacatataattggactaaatttcttttgatatatataatttttttttgttaaaaaaaaaataaataataagaagtgttttacaaagtcaaacgacctttctaagtgtctatgagtttatgctaattgttgtgttggcatgtttttatagtttgtaacaatgacattagtgattagcgagtctatgtgtgtggcggcattggctagttaacatgttcaattttttggatttactaataggcgaagctacagcgtgtcgattagtgttggaatcagttatttcgataaaataccattttgtcttgattgagagtaattcgaaaaaggttatgaaagtgctaaaaggaatttcatatgtgcattttaagttttggccttgtagtttgacccgggacaaaatttcatatacttacacaattacacaattgtgaggaatgagaaaacatgtttgtgtaaattttagaaacatgttacaatttgaatctaaatttttgatgctagaggtatattgcaagcatttaaagaaaaggatgttgatcttagagatgcacattttttcacgggaatggggtcttacggggacccgcctttaatggggtgggaattccccgtctaaaaggaaaatggggtggggataggatcacactccccgttctgacggggatcacacttcgcgttctaatgaggacctatttaatattttattttatatttttagtaatattttataatttataatttatgtttacttttttttagtatattagtatttttttttttatgaactttaagttgtattttggatgataattagtttattaaataataatcaatgcataatattttaatttttatgtagtttatatttttgtatattataaattttatttgttttaggagatttcacgccccattcccgctctcattaggggatttcccgcctcatccccgatggggattaaaattcttaatggagataaggataggggagcactcctagcagtttctcgtcccgtgtgcattcctaattaatctcgtgattgtttctcagtcacccgctgcagacacaactaagacgtttcttgacaaattcaattttagtgtgtgttttataaacattattttctttattaaagaaatctagtgtccttgaagttttacaatggtatagtgaccttttatgaattatgtattgcataactttttacaaataagacattttgtcattagtgctctagggaatacaatatttgttaaatggaatatgagtttattcttgtgcttttctatttttttaattttaatgtattaatatcagattcagaagtttaggacacatggataagctgttggaaattattttaccagaatctta

SEQ ID NO: 111472 - DNA, 3338 bp, Cannabis sativa
ttctcccgaaggtagcactgttgttcttcttttttgtagacttgaatacagactcaagacaatacaaaatataaataaaaagagttagagtcaaacaagcttttctctacaaaacaaagactctcttttctaaagatgtgagtgaaatacaaagatacaaaagagatactagtcttagctgctataaggtgtatttataatcaatatgcaccttattggcagcttacatacggtctaaacaagaccacagtccactagaaaattccctaaaatgaaacttcaatcagcccaggaatttcaatttctgtacctacataatcgtaagcagtaagtacgacttcccttttatagaaaaggaaagtttagctcacacaagatcagaaaaacacatctggttagatagcaataaattgagtaatcaaacttaccctttttactttaatttccataaataggataactagacaactttccttccaaaattacatacacaaaataaggaaaccaatattaacaccacagtcgaaattaataatatataataacatatttttgtcaattaaatatgccaaaaattaaattaacatagtttattttgatttttggaaaatcttactaacttttttaataaagtcaattttttaaaaaaaataaaataatattagcataattaatagtatgcattgtatatttgctaactcgttataatttcatacacctttattatttgaccaatcaaatgtaacagaaaatattcttatgagtgagagcaaaagtagtgctctcacttaagaaaaatcctataaatatataaatttactaacgagtattctgtcatgtatagttttcaattagttttaatatattgatgataattattatttatacatgtatatatatacatttaaaattttactgttacatgagctctatattattaaaagaatataaataaataaaaaactttaaaaatagaaaaaagtagataatatataaagaagaaagattagaaggcgaaatcacctactctaacaacaacattatattcatatatatactgatattaatattgatttaatttgttacatttttaattgatttcttttagtttattgattgttaaatttattgataatagacaatatataaagattaatttaatatgatgacattttgtaatacttttgggtgcgtttgtaacactcttgaaatcattttttttttgtttttttttaaatagaaaagtaaaaatatttttaaaaaacatgttctacaaaactattttgacttgtcaatatttaattaagaatcaattttttttttaaaaaaaatcacttttaaaattttttaaacaacttatttttcttaaccaatattttagctccaaccccaacttggaccttatgatatggacccgaacctggacccaaaatcggatcccaactcagacccaaacctgtccctagacccgaacctcggacctgaaccccgtccccgtccccgcacccagcccaagacctggtctcggcctcggacccgaactcaaactccgaacccaaccccgacctcggtcccaaatctggaccccggactcgacccctgactcaaacccgggccccgaacctcgaccctcaacctcatccctagacccgtatctcggacctgtcctcttcgtcacacccgccctcatcctcagacctagacctggatgagaatcataaacctcggacgtggccctagacccggccccgacctcggcctcggcctcaaacacagacttggacttagatcccaaacccgaaccctggacctagacccaaacctcggaccctgactccaaactcaaacctggaccctggccctaacctcaaaagcaaatccaaccttgacctaggatgcaggcacgaacctcgaccccaacctcggacccaaaccttagccttgtatccgaccccaaaccctaacccagacccgaataaaataaattaaattggaaataaaaataaaatttacagaatacacttttgttttttatttttaaaattgaaaaacaaaggtggttataaaaacgaattttatttttaaaaattaaaattttctttcatttttgtgattaaaaatttaaaaataaaagtattaccaaacatcaccataattaatgtatgacatcaacaattttgagatatattgttcataaaagtttttttttgataagttattcttcataacatttgatactttaattgttattcatgaaaagtaataatattctattatcgagacccgactttgggtatagctaggttaggattgcgtttagggcccacctaattcaggggcccaaataatacatatattttcttctactaatttagaatatactatattttttgggaaatttacaaaaatattaaaatttaggttaatttttaaaaaaaatactgtcacacggaaaaattttcaaaaataattttttttcttaaactgtaaaatattaaacataacaattaaaaacaacagttgaacaactaaaaaataatagtggagcaacagaggaaacttaacacatagtatttttgaaaaaaaattcaatctacataaaaaataaaagaaaaatagaaaattttagtatgtagtgtaaaaattcctatttatttttaagtaggggcctaaattttatttttttatgacccactaaaatttatggtcggtcatgctaccctctatcattgatgttttaccaacattattgatgcaacatcaacaatattaaaaaataagtaatgtttcaccaaaaaagtttgattttcgtagtcaaaactgtgaagttgcgaaaaagggaaaaaaagaaaagaggttgatcttgtatattaatttcttctataattgaatagcatgcttttaatatttatttatttattacgtcatcattatgtttgtattctgtagttatataaattttattattagtaaatgctgtaggtgagttgtatccaattctaaaaaaggaaatgtgtgtctggtggataggcacattttcccatggggatggaccccgcttttaatgaggcagggattccggtctaaattgagaatgagttgggggcgggattattttttgtctacgaatgttaaatagggtggacaagcgattacacttcctgttctgatggggacccgtgtaatattttatttttatatttctagtaatcttttaccatttataatgtatgtttgtatttcttttagtatattattgttttttagataaatagcggcataagtatctaaagttttatgtttgtaagcggcataaacctaatgtttatttttagcgg

SEQ ID NO: 111473 - DNA, 4503 bp, Cannabis sativa
accatcttttttcccaaccaagttaccaaattttgttgtttcgcaacatgcacttgaaaagcttgacaagacagtgaagtgagttttacagaaactttatatcagagaacttacttcagagcggtaatctttctccacagctcctactgttgctcctggatgacgagctcccacaagcatgaatgctgaaatccatatcagcttctctagcatctgcttttggaattcttccttgccgagaacctaaaattcatcaaacagaagaatacatttacttggattatattactttctgtgaaaacacccatacaaaattaatttccagagctctataaataactagatttgttggatttccactacaaatttttttttttttcaaaactgttcaacacgtacactaaggttttttcatagaaaaaattaacagttccagctttttcacaatgtgaaaaataaaccaaaactcatccttaccttgcatgagagacctccagcttgcaatctttctgcaattgcagttgcccatttaccatatgccgctgtcagtccttcaggattagtatcagtctttccatcaacaggaggttccccaagcttggatacagcaaaatatgccaatacttgatcagcatcaacaagacctttactttcaaaccagggctccagcatcccattctggaagaaaaccaaatctgctagattgttaaaatccattggctgtccaacaaactcattaagtccaatccaaaaatatatttgccggtgcaggaaatctcaattcgagatccatattcccatttgacaaactaatatgagaattgttagagaaactatatattaaactagtaaatttgaaaatacatatccatccagtagtaataaatatcagataattaccatcaaaaaaaatttaattgtataagcaatgaactcaatgagtggtgccgcttgcatttcttgagcaagaaagggaaaaaaaaaaaaagaagaaagaaagaaggaacatttcagcacacttgtcatcaatcatcacatggatctgctctaaacattaaactgaaggccctccatttaaagcaagcttgttaatgtgtttatggctgtcatatcattaaaatacatatggagtaaaagtaaaccaagttcgaatacaagcacggtatagtagaacaaagataaaatgaattaaaaacaaagagaatgccaatggactacattattaatatcctgaatgatttacagcatagcaaattggaacttcagtttgattggttgatgaccaaaccagccactattgttgattttggtggcttcaacattgatggttaaactaaaactaatcttgaattcatcggccactgatgaacactgttacttcgaaagttcaacactcccccttaagttggtgtatgttttcatatatacgagttcactaagacagttaatgagttattacattgatcttaaattgaattacgaatgtgtgctttcaagggcacttcatgacttcagtcctgacaattgatgtcatctatagtctataatatatctagtaacagttcaccattggtgcatgtgatatcacctatgatctacagcctacggccattgatgcataaagtgatatgacattcgtactacatcacccttgggatagatagggtatgataactctatgttaacaaagtttttagcttcttttttcttttcttttttgcattaattagctttgttctaaagggttattaatttaatttagtttgattagctttaaataaacgaaaaacacattttgattgttttaaagagtatcaaggaaaattaaacatctaaaaacttcatacaccaacttgagagggagtattaaaatttggaactcacaatgacatcaactaagaccacttttgaccaccaactttcaagctattatatcacaatcaacaacaatggtgaatatatggtaatcaaccaattcaaccattatgcttttccaatcttcaacataattttatgttgaatttgctatctaattaacaatgcagttcaatgggcatattctcactgattttttgtttccaatttgtttacactgttccactctgttcatttatcgtgcttgcattcttacactgatttgactctaaaaacaagttgaaaacttcaaaagtactcgaaaccaacaatcaaacaattcaaccatatggtaatcaacaatcaacaacaacaatgattaacatggtaataaaccaattcaaccattatgctttaccaatctccaacataatctcatgtttaattagctattacattctaacactaatttgactctaaaaacaagttgaaaactataaacacaaatcaacattgcttcaaatcaagccaattgaggtaaagaagtagaaacacaccgttccatctggatcgaggagtgacctcaagaacagcttggagatcatcattcctggtacaaacaaagattggaccactaaaaccaagcggtacagggtctcctctcttgaccaacaaatcatctccgttgcccatatcttgcagggctcttccgacccttccaccgccaacgatcacagcaggagtaactttggccattattttgggtctgacaaaggtgagagtggaagtgagtggttttgagaggagggagcgagagaggagagaggagctagagagagtgattaggttggccatggatgagagcttgtaaggaaatggtaatgggggacatggtgagtgaatttgtttatggttgacaagtgtgggaacgaaggagagttgtcagaagaattggactaaaagcttagcttcgaaccactcattttgggcatttctctatctatccatgtccaatgcaaattgccatcgcatgatctagaattctagataccttttcatttttcaacgaggaatcacaaataaaattgtttgtaccttaaaaaaaatattttagtgctaattagtatttttgttgtccgaaatttaacatatactaaattatatcttttgaactattaagaatgtttaatttaaagatttttgttcaattttagtaagaaagttctaacatgaatgaaagttcaggacataatttgttacatatcaaagtttgaggagcatgatttgatagatatcaaagtctgtggagcatgatttaatacataaacattactcaatcaggaaaattgaataaaattagacaaaagtctttaatccaacaatctcaataattcagaagaatttttaatggccaaaaataatttggtacacgttaaaatttagggaacaaaaatcttaattagtctttttctttgaaattttatttgcacctaaaggtataactacacctattttaataattttaattttatattcaatatatatatatttttaatttgaataattttttttatttttatcttccttgtcatattattaaaaatatacctacaaaagaaaaataaaatatattttaaatattaagataataaattatataaaattttattaaaagaacaaagcatacctgattaaaaaaaaatgtgaaaataaaataaaccaaagaaaataatgtgaaaaaaaaatctaaaataatattaaaagtaatttttaaaaattaatttaagttaaatattttttaatattaaggtccacttataattttatatggtacaaatacaattttccttttcatttttctttctttctagtttttcctatacaatgcatctcaaaaaagatacactgatatattcttacttttttatcataaaaaaaaaaaaaaattactcaattttttttgtttatggtcatgtaggttatttaaattttgataaattcataataaattataatatagaaagtagtgtttaaatagtctattttccatgcgtataaaataaagtatcatacgtgcaacatattgtttgaacctcacttttagtgtgttcaatttttttaaatttcttaaaattttacatgatatcttaaataactacagtatacacaaccatgaaaaacatcaaactaaaaaattctcctaaatgtgaaaataaataggaagtgcatcgtacaagtttttcaaaacattataagtaatctaacaataaaaattaagtagtttattcttaaaagcaaaattaattttaatgaatttttaaaattcactcataataattttttaatgtaattttgtgctttttaacaatatatattatgttatttattttactctaataacattttgtttaattgtttttttaatgtatatgtatttttgtaagaatgtcataaaaaaaaagggtaatttgcagcaacaaaatcctcttatgtaactggattatcactgtatttgttttgagcttttagtgtcacatattttttttttttttgaagaaaagcgtacttatattagattaaaaactgttagacctcgcggtcattacaaaatataatatcaggcaaagaggaaatcggcacagagccaaa

SEQ ID NO: 111474 - DNA, 10054 bp, Cannabis sativa
ttttttttttttgataaattaatgttatttttagttattatagtatttttgtaatttattaataactttttaaatatttttatattatttcaaacaatattatatatttcaaattattaacatataaaatattttaatttatatacaatatattttttttatttataattttatttatttttaaataaatgaatccaacccgctccaacagtgattttggctccgatagaaaatatgcagggatgagtactaaaatgataaacacgatcggacagggaagacttcccctattacccacatcattttcatctttataaaaaaaaaaagaaaaaaaaaatcccctgtgcttttcttttaaacttttttcttaccaataaatgtttttttttaacaattctgaccaaaaaaatgttcaataaagatgtctttatcaaattcaaaaatcactgagctattcttctggaattcttctatattatcattacataccatgcattcaaaaaataatgcaatataatgataccactatacactgaacgcgtatttaattaagaaagtctcgttgtggcttgtaaattctatacccgacacttttcttaaaatgactatataattctagtatttactaatagcggcacttctaatcattgttttgcaccaaatgttaatcgaactttctttttttgtttttggaacaaaatgaatcacagactttggttgcagagcaatttagaactgttctaattaatctagtataaaacagaacatcgacaatgtaaatgtagtgtacaatctattaaattagttgttatggtttgtttgatcagggtgatcatcgtcccagagcaaggaaggagaacgatgagttggaacatgcaattgcactatctctagctgatgatttgagaagaccaacagcagcaggtatgtgttttgatgtctatacatgtgcgtatacatatatgtatgtttgtatcgtgtataggttatttaaaattaatattgtgattcagctgacccttttcataatttttttcaggacgtagatggcgaagagaccacgatgaagattttgcgagggcactacaagatagcttggcttcgccatattcttctccgcgttctcgtccacatccacacccacacccacatcctcatccacatgtaccttcacaccccactccttatgtccctgcagcacacccaccttctcatccccctcagcagtattacccttggggatataagtaagatttcctatataaacttacttctagtcaaacaactaattaatgcatggttttgtgtgtcaaatgtttaatgacgatgagtattgctataatgttggtattgattgatgcaattaagtatttaaattaaaaatatgtgaactcgataccaaattgcatagcattttaggcaccataggtgttctttgtgtattattgttgttctcagggccggtcctaaggtatatgagtggtctaaggcaaaattaaattttgggacacctatatatatagtttaactataataaaaatgttagttctagtgcttagcgtaatggtaaagtttttaagaactcttaagagctccaaggttcaatccctactaaacattaaatattttttaaaaacattaaaaagtagaggttgggaattgatcccatgacatgtaaaacttttaccactaaaccaaacaatttttgttatattttcttcttatttaatattttatcaatatattaatatatatttttcacaattttggggcctgagcgttcgggggcccgaagcgcacgcctagcccgccttccctcagggccggccctagttgtttttggtgcaatttaatttcatatcctatatattattttaaaataaaaaatacggcaccaacaaatactaagttggtgttcagcaccatggtgtcctatagcaatctcatcaattaaatttggatataaaatgagttcattactttttaagtgtattagtagaacattgtaaatctggttcaaccccatctgaatatttgatatgtattttgagtccaaagtagtgagattttattattattattttcttaatttgaaaaatgacatatcatcatttacagaatatgtggtggctgcaaacgtgaaatacgttatggaaattatcttggatgcatgggaacgtactaccaccctcagtgctttcgctgtcattcttgtgatcaaccaataactgagaatgaggtgccttttttgtccctgcctaactctcctaagcttatttatttatttatatagaatcctaatcttaatctccatatcaaagttttcttttgattaatattaatcaacttcaattttcttcctgagctagttttatattttcttttatctagctcttacagttgttttttttttcttgatccaagttttctctgtcaggaaaagatccatatcacaagacctgcttcaaagaactggctcaccccaaatgtgatgtctgccacaactttgtaaggaaaaaagttcactttagctcatttataattgttcatcatcaaaacttcagttgcttcccatatgattaaaattgacagtgaattatatattttgattgaaaaaaaaaaatcagattccgaccaatcgagctggtttgatagagtacaggtgccaccccttttggtctcaaaaatactgtccttcacatgagcatgacgacacagctcgctgctgcagttgtgagcgcttagaggtactaatctaagccactacagttgatcttctaatcaaacaatgttatatatttataaatttcttacttcttttttcctttttccccttgtgaagtcctgggatgcaagatatatttcattgggagatggacggagtttatgctttgagtgtatggaatctgctattatggatactggtgattgtcagcctctttaccatgccatcagagacttttatgaaggactgaacatgaaacttgatcagcaaatccctatgcttctggttgaaagacacgcacttaatgaagcaatagttggagagaaaggcgtaagtgatgtttcttcattagtttcttcttctttgatatgtcactaatagtggattttgttaatttcagggtatacatcacatgcctgagaccaggggtttatgcctttctgaagagcagactgtcactagtgtatgatatcattataacgtactgtttggtttttcttctttataagatctcaaatgattaaaagttttgttctgaatgatcagatacttagaaggccgaaaattggtggtcaccaatttataggaatgagaactcaacctcaaaaactgactcgaagatgtgaagtaacagctattcttgttctctatggtcttccaaggtgaattttatttggttttagcttgcagtttaccatataacaaaatacagccttcagttatgttgttatacatataggaataagagtttatgccagaatagattgcaatgatgctaggaaaaatgttgtaggtaggcaaaatgttttgtctaccttggaacatttaaaagtaaaactaaatatgattcaaaaggctgttattattatcattactatttctttttcaaataataaagtcgagagactcgagatcaaaatgttccttttaactttggagctaaaaacaatgctagacatatttgtgaattcgttctttctgttctttcttttcttttttttttaaaaaaaaaaatccttgctgaatgcagattactaactggtgctattcttgcccatgagttaatgcatggctggctacgccttaaaggtaaaaaaaagctacatataaagcttttcttccatgtttatttaggtgtatttttcttcattcaacttagcaatggtgcaggttttcgtaaccttaatccggaagtagaggaaggtatctgtcaggtgctttcccacatgtggcttgaatcagaagtaatgccagtctctcgaaatatgccttcaacgtcaacagcttcttcctcatccttttcatcatcgaagaaaggcggaaagtcgaactcagaaagcaaacttggagagtttttcatgcaccaaattgcgcacgatgcgtctccagcttatggaggaggattcagggcagcaaatgcagctgtcaacaagtacggtttacctcctactctcaaacacattcatctcactggaactttcccattgtaatgagaatttcaaatcattctgtatcattttacttcttagttgccttacacgtccattggagatattctatttatcgcccaccaaaaaagttaagctgcttattaaagcttcaagcagcacccccttcaaattccatggggtcctgccgggatacaagctgaaaaaaatgagcccctcaatttaataaagatttataaagctatttttcattgatctagaaacacaaattacttccgttcgattttatattttacatattaattgaatattcataaatttaaaggtgcctttaagcagcaatgtttttccctttgtagaagtagtaaggcaagtgttatagaatctgaaattaaggcgttgtatcagtaagaggtggacctggaaagtaccactcgcacatacatgtttcgggataaagcatcaaatgttatagcactataagttacttggagtaaacacaaaacctccagccttcaaattgaacaaatccaacacaggtttccttttcctattttataggataaagaccataaagccatctacaattaaaactaaaactaaaactaaaatgcaagtatgaaatatcaagaaaaggggagaacaagtttgctgccataaacttataatgtgtaatgttaagtatgaaatctatacatggaaaaatgttattcccacggtagtgtcacaatattatgatcaactactatgagaatccagataaagaaaatgagctctgttgttatgaaacagtcagttccgatagtctccccaccttagttgcagttcccagtgttattatcagctactatagattatcatcatcatctgctaagagcatctttagggtctcgtatgtcataaaacaaattccaacaccaggcaccaccttgtagtattctggcagaattccccggtacaggccacgcaaaccttcagtcctaaaaatgtgcttaaatgtacctagaagacctgttttgtagacacgagctcggccacctgctccctctaactgttttcttcttctaacaagatccaatggaaaagttgctgcacaattatagtaaagagcaaaatataatgacctgaagatagttctagtactgccaaatgggatcttccaatgcacttgttttgacaaggttaggaaaaagctttcatattctcaaggttagaatatagagaaaaagaaaaatccattaaaataaaaatctacaaaacaagagcttactatatacgtatctatataaatatatatatatacagctgatatcacaccattaaattaaagatatcataaagatcatttaatatcagcatgcgatagaaagtgcttagcagacttaaaagtccagctaatatttcagtaggtgagaagacagaggtgtaggtcattttcaagaagaggatactaccgtaatagagttttggttctacaaattaatagttagcaaaacgaagttcaaatgagagggtcaaaattagaacctatacgaacaatgaacccaacaatacaaagctatattcagctctcaagccactagacatgattgaggcatgaaagttcttttctctactgcacaatatccagcacatacatgcaaagggaccacttgattaaaattagattaacaatttttatgatgataatggattgtgccgtgtaatctatatattagcatatcactgaacaagagtgcttccatatgcggtggcaaggcttgcaaaatccaatacccgtaaattcattgggaaaggaaagccaagtgagaagcatacctcaaagaggacacctctcacatttataattgagatgacataggttcacctgaaagtagtgccacccaataaaggaacccactgcaaggctttggagacacgtcattgtataaatgtggaaagataggttaatttgagcaaagatctttatataaaattaatttggatgattgacaaagaaaaataaaatcaatttcttatcgtcatccttactaaaactttcaaatgccaagatctaaaaaaaccactccagtctggtctcaggttctaggggtcaatctggttagataattggtgcagagcctgcaccacaccttgtttctctgcaatcaaaagcatagtagacagctacatgtattaactatctattacaaaatatgtctaattatgaaaataaaagtaatccaaccaaaatctcatttgcacttagcagtgggtttggatgcacttgtttgaggctagtctaaaaattaaaaacaaagaaaggtcatcattaactagaacaaaaatttacccaaggaaacaagacagcaaagagacaacaaagctcgaaaattaaaacatctaacaatggaaatatggtactaacacgaagtttaagaataaaagctactgcacaataatttatacattaaagaaaatcccataaaagcttcaaactagatatcaatcaagctggttcagaaacaatcactcacctgttgatgatgcaattccagaaaggctgccacaagccaaactaactaggacaggagaatcatgaggcctgagaaaaaaaaatacggaattctaaagatattagcattgacgaaacaataagaatattacaaacgacaacaaggaaaagtcgtattaacacctcagaaactaaatcaaatatctgattacctatgcaactgccagtaagatctcaaactctcgtatactgaaaagctcagagctatgttggggccaacaccctgcattgatataaagcagcaatcagatgtttatttaaaggataattagcacaagtgaactggctgaaaatagagacaaaaaccattatgatttgtttgctcctgaaacgcttttagcccctagacgttgtatagaattgagaattctaatttgttataatcctagaaataaaaaaggtatgccgagaaatacagcattttgcaatgaaaataagataaagaaaaaagtgaaactacttccaaccataccaagagagttgccccaagtcctttatataatcccaaaataccctcctcactcgtaatagttcgcaaagcatgcccaatacctctgtaatagatcatatttgtctgcaagtttcaaaaccaagatcttaagaatgatgcaaataaacacaatgaattgaaagcagcaacaaagtaacttttcaaacaattatacatatatttatataagatgatgaagtcctcctgcagaagccttatcaaattctacaatcttttggagacagaaaaaaagtcccataaagagtcgaacctagacctcgcaggaagaaaccatgcgtctgatcactggacctaactcattggtactaaatttccaaatattttgtcaacccatcctttccgcccaaaaaagggaattagtaccggaaaatggtaaacgaaaacagtgactcaatgcaagccaaatttattacctgggcagcaaggcgtgttctcacaagatccaatggatatgtggctgttgcagctgttatccctgccatgccaccacctacaaaatgtacacagaggttcgtactcatactctctctatgattttttagacctggaaccatttgtagtaactgcaccaataaaccaaaaaagggaaacaaaatcaaaaccagctcaaacgggcaacgacatttggatatatatatatatatatatataaaggcaagataaactcttttctccaaaccttcttgtagtgttcataagcataaaagttaactgaagaatacggtagacgatgagctattgtaactaaatttcccttccagaaagctcgaaatccttcttcgccaacgattcgtgaagcctcacgccatatgcttggcttgctcaatgtagcaacatcagagtgcataccttgcacctgtattatttaattattacgacattcacataaaattcacaattttgattgattacaatcaaaattagaaaacaattactctctaccccaaacgcagagatgtagagatacatatagatatttaaatcccatcaaaataaaaaataagccaaacctgaaagagaatagtaagtctagcaagcggagccgtacaggttttacttagtgctcccgctacgcctccggcgagaagctgagatagagtaccgatctgcgattgttgaagcgactgcggtggcggcggcgttgactgcggcaccgccacgcttccatgtacagtatttaaagctctctgaccttcaaccaccatccccactctagcctccgtctgcatagtgaatcaaaaatccaaacctttcttctttccctctttcgaaattgtcaaaaagtcagagataagaaactccagaaaccttaaataacaaatactctcgtatgacgaaaccctaaagaagaagactcctcttctcaaaactccaaaattcttcttcttcttcaacctctaaacctccatcattcccaaagcaacagtctttggtttccctgttattgcgtacctttaaagcaacactatttcaacaaacgacgtcgttacgcctcgactcaaagtgaaaaaagcggtaaatggtttggactacggaataggactatacttaaaccgactacttggtttcgacacgctcagtcctattataataatcggaaaccctagttaaaatcttggtgagtacagccgttgatttttagtatgatatttatgattggtaatatgtgcttacgtggaacattataaatgaggtcttatattgtgtgaagtaggaacggatacatgtaaatataaacccagttacgggacatagtacatcacagttttggaatattcgagttggtgtgtgtgaagatgccagttgtgagattttatcgttgtgctgtactgtaacaaaaagtcggtcgagagagcgtcctttgtgatgttgccacgtggaaaaaacgttggaaaatggaaaggggaggtaaggtttctcaaaatatataatttgattttttatacttaagagaaaattgcggatagatttttttaaaaagttgataaattttaattttaaaaaaatatcaacaataattcttgaggttacctttttctagtcagttagtccttattttaattagtcttttaactcattcaaaaatgtcatgtattatttttttttgaaacattagcgaagtatttcattagaaagaaacaagtctagacttctcggtcattacaaagtagattctcggcaaatcggagactgaaatacaacccaatatctggtgggtaaacgcccacttaaccatattatgagtgtattctaaatatctggtggataaacgcccacttaaccacattataggtcgcatagttataatgtctactaatattcttaaagttacaactaataaaaggagtggatctcaaacaaaaggaggcatagttctcaagtacccaataggactccttcccattgagaacattgatagctagtctcgagtcactctcaataataataaactaaccctaagtcaatagccagagaaatggctgaacaacaagccgctgcttctccgcacaaagcatccgaaaagtccaactgagtcgtatggatccgaatcaccttacccagatgattcctagcaacaacagctgtacacatgcttgccaatcccactctaacatcacaatttagtttgatccaatcctcagggggtggattccatttttcctccaaaatcagagtcgaagacggcaccagagaagcatgtaattgtgcaaaagaagtgtaaacaaggtcaatacattttaaaacatccggggaaatattattgtgaactttttcatttcgcgccctccagttggtatcaactgcaatcgaagcat

SEQ ID NO: 111475 - DNA, 1619 bp, Cannabis sativa
atatatatatcattagtactcttcttaataataatcatgatcatgattcatatacatatataaatgtatatatatcctagctagaactaaattaaaactagtaattaattaactcttctctcatcatcatatacttttgcttaaatttgtcaaatgtttcagtaggactacattaatcaaaatgaactttatataatagtaataataattataataataagaggaagaaagataacaagaatgagtagctatatatatttatagctagggctaattaataagatgaagagaattatgatcatacataatcatcaatatcatcaccattaaatgattatgatgatgatgatgattaaaagatcaagatcttggaggtaggaagaattgcgtaccagctatgtaagtatttaaaggttgttgttgttgttgttgttgttgttggtatagagaagaaggatcaaaagctccaactgaaggagaagcttcggcagttgtggcagttgcagcaacggttataagatccaacggctgaactgattgattattccctccaccaccgcccgatgaagtttctccaaccatattgttgtaattcgtttcaagtccatgatcgtacagaattcccttgaacacgtgtcctcctatattaacagccgtttgatatgcatactgatcatcattatcttccattgaactcactttaacgcatcgaaataccgcttgtgaattcacttccgatggaaaattcccaacttctaaccctcctataatttaaaagtcccacatggattaaatttaaaaacactaaacaatttataaacaacattggtaataacacaaacaggagaactaaaaacccttacttacctgaatgggtggtttgtaatcgagaagaattggatgaaatgatcaaggcattattattactatctctgagtcgtttaggctgttgttgttgaagtgaagagagttgttgctgatgttgctgtctttcacggcgtttagaagctgggacccaagtactcttcacatgagtttgacagtcataaccacggcttttacaacaagttctacacctcatatgaacacaatctttcttagcttggttaccacaatcttgacagctcactccaccactactactacccaataatccaccactaccgccaccaacgcctcccgaagaattagaagatctcatcatcatgaatctggccgctgatgttgattcatgatgctgctcatcagaagaatcaacggtaatcgaaccaccaccaccaccagcagcagcaccagcgccaaggcttctgtaactgctaggccccacacctagagccgcggcggaagagtaaagatcttggtggtgatggtggctgtggtggtggtggtggggccgagtgggaatcgtttggagatggagtaaagctgcttgttgttcttgttgccaaagctcaaaagttgtgcttgtgttattattatttgtctgatgatcattattgttgttgtgtggtttaacgttgtaccagaaaaatgtttccggatgagcttgaatgttgttgttggtgttgttgttgttgttgttgttgtcgtcttcttcttcttgagctgcggcggcggct

SEQ ID NO: 111476 - DNA, 7342 bp, Cannabis sativa
  modified_base (37)..(38): a, c, t, g, unknown or other
  modified_base (7284)..(7304): a, c, t, g, unknown or other
tatttagtttatataagtttattattcaaaaaaaaannaaaaaaaaaaaaaaatttttaattacccataaacatttctcccttaaaaaaaaaaaaaaaaaaaaatcaatgcctttgggtttgggctttggtggcccccatggccccatccttaacagcacggcacatgtggatagaacatagaaggatcactttccacctctgcaactagattttttacatcaaacttcatggtttttttcttgagggatcaaattctcacttctgcgcaagaatctttttaaactagtataattcattattgcaatattattattgcgagacacatgtggatacatgaaaaaaaaaagggcctttgaaactatagataacaattataaatatcacacctaacttattagcgtactccttttactgttttttcttttcttataaacgcatcctttttcactttcaagcaaatgacttttacatatttcatcaatagttacgcaacacttgaaaaaaaaaaaaatcattattaaattatgtcactagcttagtctcttgcatctcttgcatatatggctcttaactcatttatgcacaccatatgtgtaccacagatcaaaaacactctcaatttaacatactgataacaattaaatatacatgtcattattatgataccttctagatttcgtagagatatttggggagccaagagagccaactgaaaatgaaaacaaatagccaaatggatggttatgctttaaccatatattatatattagtgtaaatcagattgtgatgccaaggaaaatggaaaaataacaaactagctatttgggtcacttcaaaataggggtgtttaatttatccaatttaatattcttttccgttttctaaccaaattacataaattcagctcatgtaaaaggaacaaaacaagtacactatatttgttggtgaatttttaagataaaagaatatatgtgaaatattattatcattatccagtaattttaagatatttaacaccatatatctttaattaatattatatgaggtggaatttccgctgcaatattctttttttaatagtagaaaatattctttcctattaaattgtaaataaatgtgtttcaaaaaagaagaccaatttaagttcaacttcgtcgcctgtgcctcatcatcatctttttgtaaaatttttattagtcaatagcttcattttttttatttttgttttgactcagtacaaatatttttcatattccctcaaaaaaataaaaaatatttattatgtatattaggttaaaaaaagaatcacataaaaaatgcagccgtcttgagaaagcgcgtgtcctcgacatcttcgtctgttttatacaaaattaattacaatgtttatgtttcattgagacataggaaatgcaataatcctttcccattatttatgctgtatgtacaatacatatgatataaatatatttatattaattaattaatttaagcccaccactcgctgcgcactcttcattaattttatttaataattaactattacgttgttacgcttgttccatttgaattttaaactctttattaccgcttatctctctctcattatttggttctctggtgagattcctgcgacttctggtggatttgtcatctcaagggttagtttttggatctgggatttgcattcttctcctttcgatattatgtttagattctttctactgttgtttcctccatgtttatcttctaatcctgataatttccgatgcatgttatgagcttcaagatgggttttgttttatgatcttctttcttgatctgttaggaaatcgttgtatgaaaaagttaattacttttgtagctaagatacccttaaagtttatttctttttcttaatcatgatattatttgaggttgtaggcacttcttctgatttcagtcttttccatttctaatttcttttgcatatggcaacgtttgaatctttgaattaaggctgttgtgaattcttggtgctttgtttactgacatatataattcatatttaatcagggaaactatggcagaaccaaaaccatatacccctttgctccaaccatcttcaacccgtaatctccctgactttaagaaatctattaaactcaaatatgtgaagcttggctaccattaccttattactcatgggatgtacctcttcctttcccctcttctggtggtaattgccgctcagatgtccactttttctatacaggacctttatgatatctgggagaatcttcaattcaacctgatttcagtgattatatgctcgaccctgctagtttttctgtgcaccctttattttgttacccgtcctcgccctgtttatcttgtcaacttctcctgctacaagccggatgagtccaggaagtgcacaaagaagattttcatggatcactctaggttggccggtacattcacagaacagagtttggaatttcagcgcaagatccttgaaagatcaggtcttggggaatctacttaccttcctgcggctgtgttccacattcctccaaaccccacaatggcagaagctaggaaagaagctgaagctgtgatgtttggtgcaattgatgagctgtttgctaaaactgcagtgaaacctaaagatattggaatcttggtggtgaattgcagcctgtttaatccaactccatctctttcagcaatgattgtcaaccactacaagcttagagggaatataactagctataatttaggcgggatgggttgcagtgcaggtcttctctcaattgatcttgctaaagatcttcttcaggttcatcctaactcttatgctttggttatcagcatggagaacattacattgaactggtacactggtaatgatcgatcaaagcttgtttcaaattgcttgtttcggatgggaggtgctgctatacttctttccaacaaaaggtctgacagaagaagatcaaaataccagttggtacatactgttcgcactcacaagggtgctgatgacaagtgctttgcttgtgttacccaagaagaagacgccaacggtaaggttggtgtttctctatcaaaggatctcatggcagtggcaggtgatgctttgaagaccaacatcacaacattagggcctattgttttgccaatgtccgagcagctgcttttctttgctactttagttgggaggaagcttctgaagatgaagatcaaaccttatatcccagattttaaactagcttttgagcacttctgcattcatgctggaggaagagctgtgttggacgaattggagaagaacttgcagctatccgattggcatatggaaccatcaaggatgacattgtatcgattcggaaacacttcaagcagctctctttggtatgaactggcttacactgaagccaagggaagaatcaagagaggagatagaacatggcagatagcttttggatcaggattcaagtgtaacagtgctgtatggaaggctttaaggacaataaatccagcaaaggaaaagagcccatggattgatgaaattcatcagttcccagttgaagttccaaaggtttcagccatataaacttaagtagaaaatgttacaaaatcggtggcactcgccttctatttagacgatataaagtatcattttttatttgagatgttgaaaaggttctaattgattttcatagtggtgatggtgagagcaggatgctttattttttattcatttgggttgtgggttttggttttggtctttcaccatgagatcttcagagaccatgtgtttggctgtgtagtctttagtgggcaacatttgttcaatataattagaaccattgacgattaattatgtatggctgtgtattctttactgaccaagtattttacatcactagcttttttatccttttgttgctttttatcgtttaattgttttgatatcactcgacaaatcgtggttgtttgttgtagttttttaagcatgaaaaccaattgaatttttggacttcgagtttgattgatttataagacaaaattttagtttttcaagcatggaaaccaattgaagactattgaattcggactaccagttccacgttgattaatttatctcataaaaatttttaataaaggattaagtcattgcgtgcaatttctacaaaatctaatacatatcgtgattaaatcaataacaaaggagactcggaacgtgaactcctgtaatttttctaaccggaaacatgaaaaagaaaaaggaaaccatcacaagataagctgattggtaaatggaaagtaaggttaactaaataatctcatataacattcattatccacaataaaatatccctaacagcaaattaagcacagtcattatcctgcccatagaagacagaataacttgtgtttttcagtagttggaagaaaaagtcgcgccaaaaaacctatggtcagctcagtccttggatgacttattaatgagcgacttgtggatgtgggggatcactcctccaccggcaatggttcccttgatcagagtatcaagttcttcatctccacgaatagcaagctgaagatgccttggagtgatacgcttcaccttcagatccttgcttgcattgccagccaactccaaaacctcagcagtcagatactccaggattgcagcagagtaaaccgccgcagtagctccaactctcccattggctgtggtcctcaatttcaagagacggtggatacgaccaacagggaactgaaaatcatacattgttaaaagttaaaacaaatcaagaatgggtacaaatcctaccactacatcacttccaatgataataaatactacaacaagctgaacatttcagtttcttaaaaaactacattatcaaaattgacgttccatatgttctcaagtttactaatatgtagctatccgagtaggaaatgatcaggcaactatacaaacattaaaacaagagaaaagatattacaaaattacagggagatatgaaagatgacaattactatttggactttgggataaatgaaaatcagtgattttgaaagatggcaagagttggcaaatatggactaaaagtgttagggtggagagagagagagagtagcaataaggtgcatgtgacactaatcacgcacaagttgattgtcaaacatgaagcagaaattagtgaattacctctcaaatataataacagtatgcatacaaaacatgaaacaaaagtcacaacaaaggttttactaaatttattcttcaagagtggttcgggtatttcaaactagaacacataaaaaattttatttagaaggaatgattataagttacactttttgatcattacatataaaaagcttagaagccctttaaatagcaacactaatacattattgtttagagaagcaagcacaaaccaatagtaattagacagaccaatgcagagattctggtgtgtatgaaaaggaaaaggctatttcttcattagtcacaaaaaataatacaattcagactattctgtaattgcacccaaaactatagattctaaaaagaatgcgatctaatagtggaatacagttctccaaaaaaaatatatagtggaatacagtaaagaaaaaatagccagtactgaatggtactattgtaacccacaatttagacacttcttaatcaggattcagactaagttttaacgaaaaactaaaaacatcccaattcaaatatcaacaacagtaattctaatgttaaccagaatttaaaaaaaaaaaacggaaaggcagacaatgagtgacaccgaatatcatactgtccctactccgtatcgagatccaggatcaaattatcaagatacaaacaatggtgagggtaatgtggttaatcaggtagcaagatctagctttgcataatatgtttcattttttaaaaaaaaaaaaagaaagaaagaaaaataataaatttttcatgctttaaactcgcaaatataatgaatataatctttcctccgaacattcaaatgaaaagcttcaaatttgattagaggaaaaaaagaattaagaaaaaccaagtagttttttctcgtttgtttcttcccaacatgttccgtaatattcactaaagtgaaaagacaacatcgtagggcccattatcaacataaacgaaagctactctgaaacaagaaaggaaaaatcccagaaattttccttctcaataatcgacaaaacaaaacaaatcgaaacccagaaagaaattagaaagaaaaggtaaacctgaagaccggctctagaagaacgagagatgggtttcttcttgtctttgtccttatccttgttggcgttgttggccgcagcggtcttgcccataatcagacccttggcgcctttgcccgacatctttgatttaccgccaaaaacaaactcaaaactgtgtttagatttatgagattgttcccgaacacaatcactcttcgacccactcaccaaaccgattggaatagagagatgagaaacaaaaccaaagacggtcgctaatggtcgagtcgaactgcaacttaggactatttgcctatttatgtgtcccttttgactaaaataaccctagtatccttcttaatttactaatatggtattccttaacttttgttttttttaagtggaaaagctggaggttttgagtcgttgactgactccttgaatttcgtaaaagaaaattaaataagagaattaccaccttctttattttttttttaagatctacttaatttacgaaaatgttaatcaccaataataagagcatcttaatgatactttaaaatatttgttcaacatactttctactatagttaatatttaattattttaataatatttataatataaatttaacaaatataaattaatttacaaaataatgtaaaaataaagaagtttaacaaaaaagtaggaactccttatatttagagagcttactatctattttttattatagagagtgattttttatatggttgaagcttattttttcaagtctcgcttcctatttcagctaagtattgtgtttcgagaacatggttggaaatactaagtatacaagacctgatacttaattatatcaactgtggtatgacactgatgatggtgatagacacgccaacagtgtgtaagtttgtgtgtgtcgtgctagctaggcccatatttatccgtgcttttaaaaaaatggatcgtgtcgtaccaatatttttaagggaaatttacaaaaatnnnnnnnnnnnnnnnnnnnnntacaaaaatactgtcacacgaattttttttcaaaaata

SEQ ID NO: 111477 - DNA, 2624 bp, Cannabis sativa
ctctctccttttattgtgtagatgactgcccaaacgacagttcttgagaaagcgacgacagaggaagaaggatcttggagcttggaggttagggatagaggacgacgaagacaaagaaagagaaaaataagagtggaatgggggttctcggacttggagatttctggtcttaggtaaccgaggtggggttttagctagccgggaggcaatttgtggcttttgtttggctcactgacatcgagcaatgaccattcatggtcgccgtagttactggttgagatctcctacctccattttttttttcaaatttattgatttttattatttttaaaaaagattttttatattgtttaaatagtttagatcatttggaccattaaatacatgtcacgtgcaaataagtgtaaaaatggcagtcttagttggcagttaacgtacaataaaatttaactgatatttcaaatgtgcaaataaaagtaaacttaaggtaatttacattagagaatttaaccacaaatttcttattgcacactatccaaacatgataaacaagagcaagcaacacaaataataaggtacacctctctgaaaggggatagtcctttgccacggcccaataaaaatgatacatttagttacaaaatatttatggttttttttttcttgggagagagaattcgaatttaagaccttaactttgtaacaaaaaatctatattatattatgattaaaagttatcattaggaaaatgatctatatcataaaaatctatcatgatattgtatcacgatgatatgtaaatttataattattattttattaatttatgttttaatattttaggtgttaatattgccacattattcaagatactaatttatgataatttatcaaaatgtatatagtattgctcttatcagtaaagatagtgttatttttttttttgaggaaagcataattttataatcaaaccaaattaactgttataagaacactaataaatctaaaacaagtattagtccaaatattaactcctatcgatctagtaacaaatttttggtagtacttacgtaggccacactatttgcattctcgcaaaataacataacacgtaccaccaccaacaaaagctaaaaaaaaaaacaatctcaacaataatttgttacctttacattatagtttagacaattcatactcaaaaatttcatgataatattttttttattataattattattgggaggtgccatattggcttgttgttgctcgtactcacaactactctttttcttttttgaaaaatttatttatttatttatttcaaaaaaatagtatccaatattattaaaagtgtactttcatcactatctataaactatcatgaatgataatttaaacccaatccatttattaattgtatcaaaaatcaaaactaaaactcaaatccaacccttttatgtaaatgggttcacctaatgcgatctgcgtgctactaattaactcgtttatataaagaattatgcttaattttaattaacttatcaactcatattaatatgtttataacaaagtttaacaagtttacaattttttttttttaaatggaacatgtttacaaccttataatgacacatttatgaacgtaatttaacatgtttatcatatttatctaaacaaatttaatttacatttatagatatataatatatttgtgtatactttacataggttattatcgtattatttttggattaaacgtgtcaacttgaaaatgaatcatttaataaacggattagtcgtattagcccgaaaataacctaaacctatttatttcgtgtagattttgagtcgtattatcgtgacctaaattaccactcataccaacaggtactcctaattgttaattaagaaattaaatcatgcatacaaattattttgataaagatattatgctgatattttaattcttagctaggatctgatctataatagcatgtatagaaccgtttttataaatatattttttgagttacacgtagggacgcacacgagtaggcttaaggtgggctaggtcgatacttagggtccacccaaactcagggcctaaaaactcaacagacatatatattacccttgtatttttttttttaaaaaaattataagaatttaggcccaatccaagtggcccaataccctatttatttagaaaaaattatattgtatagtcactttttattttttattttagtttttacctttattttattattcttaaatttatatccagttttttaggtcttattcccattatgtgcatactctaattttggtaaattatatgaggttatatttggtactttgattataaaagaaggtatttatcaattaatttttttttttggagttagatttgattaatgtgtaatataaaaaggtagttttcaacttatctcatttatttaccaaacttaaagcttcagccaaaaaaaattgaagaaattgcattgtatacccactttatttcatttgttttaaattttaccttcatttctatattcttttacccatttttatagatgatgtctccattatacctcttaggttaatgtaaatcatgtgctaca

SEQ ID NO: 111478 - DNA, 7165 bp, Cannabis sativa
tatatatatatatatattgagatggtgctgtcttaatttgcagtctgatattgaaaaatattgaaaataaaaagtattataaactattagttaaagaacatacattcctcaattaaaaaacatatcaaaacattatatatgtcttgacagtaactagctaccatataccaccatggagtttggaccttattcctgtctttcattgccatgaacctaagtttctctatctgtctttatcttcgtgttgggcctctctgtggcccagttctccaccagaagccaactattgccggcctgttgatctctttcttgtctttctctctactcactaattttactactatcatgacattagtgcaaatattgataataaatttcactatatagtacatttatatccactaacttgattttcctattgaagagaactaaatcataactgatcatggaggatgctaagaagttggaagagggtactcttggaagtgacacagaattagtcaaggaatatcataaacagtacagtaaagatattgttactactactactcattctcatgatcatgaagtggtcaataagattgaaagaggagatgtcattgagcaaaaagatcagaatgagcctaagaagacccaaggaggtattgttgaggaacaagctattaccatggttaagcaggcaaaaaagagcaagcgaattgctaccttagatgcctttagaggcctcaccatagtggtatatataataaacaatagttttttttttattattttttctgtattatgtgtgcatgtgtgtgtgtagatgtgtagtaatgtgtgtacatgtacatgtagttgatgatattggtagatgatggtggagaattctatccacgcattgatcactcaccatggaatggttgtactttggctgactttgttatgcccttctttctcttcattgttggggtggctatagcccttgctctcaaggtatacctcttacctcagttttaatttcactattttggttaccactaatgtcttatttttggctgttcagagggttccaaagatcaacgatgcagtgaaaaaaatcattctcaggacattaaagcttctcttttgggggattctcttgcaaggtctgttgttagtgtcaaagcttatattgttagtaaaaacacttgtgaatttttgctaatgttgttatgcaggcgggtactctcatgcaccgagtgatctaatttatggcgttgacatgaagcaaattagatggtgtggaatacttcaggtattcaaaaaccgaaaataattctattttgttcaaattctctataacaaagcttttaatgtttgtatgtgagcagagaatagctttagtgtacttggttgtagctttaatagagacattcacaaccaaaggcagaccaacagctatagactcaagaccagtatccattttcactgcatacagatggcaatggtaactactagtttgatcaaacaccttccatgattaaaaaaacatctttctaataattatatgctattgtcttcatcaaggatcggagggttcatctcgttcttaatttacatgataactacctttgcattgtatgttcctgactggagctttattgatgaaacagagagatacacggtttgtaataatgtcctataattagtaattttaatgaaagtgtcaccattattggtatgatgttcttttaacacattctactagtctttctttactttcttctttttcaggtaaagtgtggaatgagaggacattttggaccagcctgcaatgcagttggatatgtagatagacaagtttggggtgttaaccatctctattctcaacctgtttggatacgcttaaaggttttgatctaaacaactcaatatatattttatatgttcaaatcaattagttttgtttgctatacatgtaatatgttaactaacttgtctttccttttcaaaacttgtcaaggcttgcacgctgagttcaccaagcggaggtcccctaagggaaggcgctccaatttggtgtcgagctccatttgaacccgaaggcctcttgaggtaaagttcactcaaaaaccagagaaagagttttgtcaatactcaatatggattttgagcattgtgtgaaatattttccttctacagctcaatctcagctatcctttctgggacaataggaatccattatggacacattttggttcatttcaaggtttgactctactcaaatgaattaaatgatacagaaaattagtacagatgttttaagataaatttgtgtaccaaaatttgcagggtcactctgagaggctgaagcaatggatgtcaatggggtttggcttgcttatcatagctataatccttcactttactgatggtgagctttcttcacaaacaatcaacctcacacatacaaatacatgtatgaacatatcagatttttattcaatctgatactgaatttttttttataatgagattgcagctattcctataaacaaacaattatacagcttcagctacgtatgtttcacagctggggcagctggaatagtgttctctggtctttacatactggtacaaaaataacattaagaaatgtatttacttaacaattgaaacgtgaaataaaattctggtcaactaattctttttttttttttgttaatctttatttatgagtaaacagattgatgtttggggatttcgaacaccattcttattccttgaatggattggaatgaatgcaatgctagtgtttgtgttgggagctcagggcattttggctgctttcgttaatggatggtactatggaaccccagataaatctttagtaagtacttgcccaaaaataactagataaaacactatccataaggcataacccaatataacataacttttttttgtgacttaaaattgtaaagaataaaattattactaattgcaaactagtgtttattaaataaaataccaagtattggaacgttattaggtaagttatgtaaaaacaaaaatgagtatattaaaatgtctatttctctgaactagtctttttatattttattactgtttatcttttcatacataagaactaattgagggattaaaaatatgatgaacaggttaactggatacaagagcatgtctttatcaatgtttggcattcagagcgactaggatctcttttatatgtcatatttgcagaaatcacattttggggaatagttgctggaatcttgcacaaattgagaatttattggaagttgtagagaaaaaaaaaattaacactacaaaatgatcacggaaggctcaattctctacatgtatttcaattttttatttgtttattattattgttattattattaacaataatattacagaatttcttctttggtgaacttctattgattctatgttttatctttttatgtgataccaaatatagctaagtaaagaatttatatgtgataccaatcgtatatacatggaatctttggataaatgtcaaagtttaattacaatgttgaaattgaagcctgtcttcttttcatagtacaactgtctaaacttatcatcaaaataccaatgaaaaccgtttatcttcccataaatagacaaaccgaaaagacaaaagatcattaattaatgacatttaactttccttgcctccttggctcaaatatcttgctaaaatatctcctctataaaaacacatccatgattcattaattccttggggtacaaataaaccattgtatgtatataatatgccaatatatatatcatattcaaaacgcaattgtatttttacacaaccaaacaaaatacttgaggtttttcattaccaagaaaaaagggaaaacatatatctgatgttgaattttagtgagagtttttttaaaatattttgagaaaccctaaagggtaccggtggtgcctagcactctcttatgtgtcagtatcgctattggttcatcgggtctcatataatttaatataataacttttaagaggtatcgctagccaatcgcaacgcgacaagtcgagaaagtactagacaccactggtgcgctcaaatatttaccgagtagacttcaactataatagaagaggagactaaaaattaaatagtgaaaatattaaccgctttacaatatatatttagcatccaattacatgagaactcactctaccttttctatcttcttcttcttgttttttctcagtttatactaccaatagttagtatgagaaacagctcttccttttaatgacacataacatttatatgtgtatgtattaataatttacatctaaaatttaagcactaaggtagcagggataactatgctgtacaagagttcatatctgcaactggtatcattcccagcccatcaacgtcttccatacaccttcctggatcttacttcttggaacaatggagatgtctccttcatcaagcaagactctgtaaacctcccattcccgacctccaattatatgtctccgaatttctgcctggagaaacaatcagtcaaacttatcgagttaaccaaaattttcaataaaattaggagtgttaaacagtgttattttcaaatttatgctgaatgtaattcaacagtcaatagttaaatttagagaaaatgagagagattgggacatactgaaaagatgcctgtgttaagcattttaagagcacgggtaatgtcgaaaaacacaagaggccggcccttgccagataactccacagggtttgtaaccagcagctcggaatcaggaccccggctgacaatagctactttgatagggcggcgaagttctagttccaatcgagatgtcaatgatttctgcttacttgtgtcaactatcttctttccatcagcttgcacaataaacaggtcaatctcacaatgcctcttttgctttatagtaaatcgtccataggaaatctgctcgcaaaaaagttacaatcaactttcatattttcaaagttcacaaatacttgtatttgattcattgtggaggacaaggatgaagtaaaaaataacacactgatagattttaacaagatgcagagaaaaattgcagtgtataaaatttcaatatctttacctgaatgttataatccttaagagtcctcattatgtcatagacgagacccttgtgatattggcatataatttgaactagtgtgtgagctgggctcaaggagttatcaaatgcaatagaaacactattggacataagtgatccgcttggtagttgagtgggcatttcgagtaaaaatgaatcttctgtgacttcagaggggagaaacgaaggtgcttgtgaactcgcagtaatttcagaaccggccttttctatttcacagtctatcattgcatccccgagaacagtttctaagtatttgcgagtctcattcttcctttcactggtctgtagatgctccctgatgaagatacacataaacaataagtcaactctcattttacaaattgttcttaaaggttatcgtaaagccttagccttccataactaataagagatccaaataaaaaaaccatttcaaggaaatcagtcaagaatgtccaacctggtgtctgtgatgaaaaacatatcaaccactcttccatctggggttgtcgataccttcactttctctatagtcagctcaaggtcactaagaacccttgtcacatctgctcacataggaattaaagagaggattaaagcaaaaaaatagacaataaaatattcacagtaaatagaagacataaattatataacaagaacatgtaagaggatttggtggtagagcttatatcttggcaattactaaaacagcggatctaataagttacaaagcaacatgataatcatataagtctataccattaaatgaagagtcaatactttacttataagctagaaagagatttagatgagaaaattagctcaaagattttaccatgtaaaagcccttttcgatcatgacaacataacgtgagaagaaacacttcaggaggcttagttggcagtaatcctgagcagtaaaaggaaatcccagaagctgaagaacaagaaggacaagcctccactaatctcctcttcaacaagctccatcttgtctctgaatccccgatcacccagaacacgatgtagcaccatttcccatccgtggacacatcttcacccccataattatcaaaacaacaaacagttcaaaatttaaaaataacttaaaaacgttttggtttaacatatagtgagaaaaataatgacaaaattaagtcaaaaaaactcaagtacttaggaaactaaattcagaaggaaaaagaaaaatgattttgactctcaaccaccaattgggtggtgagaaaacactaaacagaaataaataaaatatttttagggcaacccaattgtcagaatcaaacagaaaactaataaaacttattaaaaaccaataatcagttgctatgagatgagactaacctcctttgacaatgctaagaccaaagaaaagaatgatacgacacaaatcacagcccagaccagttttatcagggcagtttatggtaatctcagttggttctccttctttctctgatctcctgatcatcaccacatcctcgtgtaaaatacccatctcttctactttttcttcttcttctagttttttttttttctttctcagttgttcatcactgagtttcgacaaaaggttcaaaagggtaatattaaaaggaaacacagagctctgaggctcactcactctctctctctctgtacaacttttggttggtgtttccttggctctcgttgtggttgtagttgttgtttttgagggcgtagagtagtagtttgcttgtatcgtttacttttgtttggtaatgcagtgcagtcttggaaatccacgacaaattaattctcctcctaactttctcgttttaacccttgttcttatataacattttcttttattggaacctaaaccctaatttataaacggaaatttcactttttgtccttaataatataccccatatcaaaatttatatgaaattggtaaaaactaaaattggtctttctctctctcttccctctctctcgtgcaccactctctctctagaaaaaa

SEQ ID NO: 111479 - DNA, 4056 bp, Cannabis sativa
aaatgtaaaacgtaccactttcggtacacaacacttcttcttcttcttcttctttttttctcttgcttttgttagtaaattaaaaatgggtaaaaaatatttaaaaaaaaaacccatagccctactttttttatagtttcgaacccaaaaggaaatcaattattcattctctgaaaaagagaaaaccaaaacgtttgaaaccgatcattgaaggttcagactctgattttgagcttgatgatggagattttgagatacccaaagtgctgaaggtattcatattatttttcagttgttttagcatttttttccttttttgttgtagatgttatgggtttttttcttctcttatctttgtcttctgctcattttaatttttttgttgttactatgtatttgatattttttatttcctattgtatgcatatttttttagtattttttaatggttgttttgttgttatatgactttttttttttcaaaaaaaaaaatagttgaatacatgttaccctaaacccattagttattgattttctcatctctaccatcttgaaaatgttcttcttcttcttaagcttttttttttcttcatttgtttgaaagattgatctatgctttttcaattgtgttttccattaattcttgctcttctcatctccatcatcttcaaaaaaaaaaaaatcagttttttaagcttcttttttcagtatttattttttattttttatttttttatttgtgcatgttcagtctcagatatcaatttaagattttgttcatcactccgtcattttgttaaaaatatggtttgtgttctgtatgtgttattcggtgtttagtattatatacttgattttttttatgtttttaacagttgttttttgttgtcctgaattattttttcatgtatttaaggtaaggggaaattttccaaggtaaaggttccctctcgtgatgttatgatagtctccactgggaaaagagttattgaagtataattttttttgttattttatttggttgttttattttgtagttttgctgttgttttacagttattttagtcattttttatgttattgttctaagattggaattttaaatatttacgttttgacagaaaaaatagttattttctggctgttatagtattgctctgatggttgtgttgaagatggaggctttgtatatgttttggggcatacacagtataaaagaaataaaaaaagtctagggcagtatatttgtaaaaaataccatgctgcagtatttttgtaaaacttaccgaaaattctagtatttttgtaaatcctcctaaaaaatataaggtgtttctacaatgtattcccttaaaacatgtaatgatgctctctctatctgttttagcatctagaaaaattttgtagtctatttttttttttttttatatatttgtgtacgttatagttatttaagatattctataaaattttgagaaattcagaatagtttacaatataaaaatagtgttcaaataatctattttatagatttataaagtaaaatagtcaagcgtgtaatattatttgaattttgcttttggcatgttaaatttttttaaatttattaaaattttataaaatatcttaaataattatataatatatataactaggagaaaaaatttaattaaaaattattttaaaataaattaaggtgccaaatctttttagcagaattaataattttattaaattataatatatgtatttatatattgaatgagtgcccgagtggggtttttttgctctgttgcagttagcagttttcaaccgttttcccccctgttcttccgtcgtcctcgcccatttctgccatgatctccgataacttcccttcccttcctccacattcgttccactttccccactctatcacaccccactgttgtttttcaccttctatttattcctctgatcaaagcattttctcattattcctccgtttctttttctctctttctgatttatctctgtttatggaatctctaattggtgatatgtcttccaaaattgttttatctgagaaggaaagggctgctcatgtccttactgagactgatcttcgagcttcaagcactcactctcaatttttccttgttgctcgatgtctttcaaatgatttcaaccccaaaacctttatgaaacgaatgggagaaatgtcgttttgaagtcactgtttctgagatgcattctgatctttacttacttactcttggctgtgcaggtgataaacttaggcttttggagggggaaccatggcattacaacaactatctaatagtcttacactcaccaactgttctgcacaatgtctctaaggaggatttaaacacagttcagatttgggtccaagttcatcgacttccatttcttagtaagtcccgtgctcttgcttgtaaagttggtgaatggattggtgaatacattgatgtccatgaagattcacttcatgagggctggggttcttttcttagagtccgtgtttgactggacatccatcagcctttgatgcgtggtaaattggtgaaacttccacacattcgtgatgaacattggttggagtttcgttatgaaaacctcccaactttctgtttccattgtggtcgtttgggtcatccttttgaaagatgtattggttttcttgagatggttgatgaaggaattgaaccagatttgccttatggtcctgatttgttgggtgacaaacttcccaaatctggttatgaaagatataggaatgatttttccaaagctaatgcatacccttttttaactcgattaacccgaaaatctattacctccatctatcctaaacacttatcccagaaaaacctctctattggctctactcctcacccgtcccttcttacaattgctgaatcttcatctcaatccaaccttgacaaacatctaaccagtaccccacctgaactcccttccccttttccatctttttttttcaaccttctatgcctttaaacccaaatggccctattgttgataacacattggattctgctactatgacatctgctactataaccactactaggccctttatccactccactcctatagccacgtaccccccaacttctccttctatcaaccttacacccacaaactcaccctcctctgccagcatccctgttactgctgccacatctttatctgcaaaagctaaaggcaaatcaattatggttgaagatgatctatcgggtgaggggtctccccaaagaattttcaaaagacaggttgaatctgacaaccttcgaagtgttcttaaacggtgtaggaacaatactcaacctcaaactcattctgaaggctctccaacacagtcggtttcgtctccactccaagattcctctgagttgaattcttcttttccagcgggtgttgttggcaaacaaccccgccagcagccatgaatctcataagttggaatgctcggggtttgggtaacccgagtgcattccgtcgcttatggctgttagtgcgtaagtacaaccctcagcttttgtttcttatggaaaccaaagctactactggttctcttgttcgatttaaacaatctttaaatttttgtaatggtttggaagtagctcgtgttggcttaaagggggggattatgttattatggaaggaaactgtaaatgtatcactgctttcaatgaatacaaaccattttgattgctttgggtcttatgaggatggcccaagatggcatttttctgctgtatatggatttcctgaatctgtcaacaaaaaattcacttgggaacttatcaatagacttgttgatgtatctcccatggacccgtggttattaattggtgatttaaatgaaattttctctctcacacacataagaatggaggtcctttaaggcatgataactgttagagtattagctgtatattaggtgtaaaagaattagggtaacttgtatttagtagtttcctattttgttggtagtttcctatttcctagtctcctagctttgtatataaa

SEQ ID NO: 111480 - DNA, 2341 bp, Cannabis sativa
tccattatcaaatctcagtttgccatcattagcatgttggtatggttatggatctcaaccacaaatataacagaaagactcaggtaaagctagaaatgttaacactagcaagtttgttgcttccacagctacagatataacagaaaaatttgggcaaggctagaaaaggagcacactaaacccagtatgccatcatcatcatgttggaatgaaataatctagtcacgcctaaacaacctattttcaagggaaatatattcctaaagaaaaggaaaccagtctccccacttattacgttatatattctatcatctctgcatatcagatgattacacatgtaataaagtggtgggggagatagaagaaatacctttaattcgtctgagttccttacataatgttatgaaatctccccatttcatgtgacaccgtctaataaatcgaagaatttgttcagtggtaaacatagacatgccttccaagtattctccattgacaccattttccttaaatacctgacggtaactacctagattgatctcttccaaccacaaaccaacatcctgtcaaggaaaaagaaccatgaagcatatcctttgtttctgacaaagagatggtacattcaatcatatgcttttcactaaatttccagaagaacacacacacacacacacacacaaggaaatttcataagtttttgttatcgtaacttttgcactgcgattatcaacttagtccttcaaaatacactgaaacatgtgaaaagtaagggctctagtgacaatagctttcaacatgcatttctacagattaaaatggctaatacaactcaatcctctgaaactatgtcctctaaaatccatcaagcagcaactctgcaaaaagcagcaactctgcaaagcatcacatgcataaacagtaccttccttcaactaagaaaactctaaggacttccaatattcacttgaaaacctcttctacaatcaaatatatcaattagaagatgatccaaactttcctctcgcaccagcagcatctttaatccataaaattttcaggcataaatttctactttatccagagtcttaccatataaaacaggtatttcatgatgctacaaagcatcctaatacaataaacacttgcaaacacacagcttcttaacttcttattggggttctttgttgacggacagtaactggttggaagcagtacaaaacagcaattttttttttctagttaaatacaaaaagtagcaaattcttaacctcaaaaactaagctggaaaaccatactcccaacttgctataaggccataaaaaattgcaatagtttctgtcaataaataaagactaatgaagttgatcctttctcgaagataaaatttgcaattacaaatattgttccattcaacaagaccattaaatatgaatctaattataccataacttctactaaattgtagaatactaaatagcaaaagacaaagatcaaatttccaatcagatatagaacctgaactataaaaaggatcagatgcaagtatcaagcaacaaatttagattttcatcaataattaagcagctcaaatactttaatcaaaagaacgaagaaacagtacagatgatgattgatgaaaagaagatcaagatccaaattaattaacgattataaatagtggaaggttggaagagctcacctcaacagtccaaatgaagaaatcaagaggctcaggtggtagttctttgctcatctccctaatcattctaaccctcattaaaaaaattgacctttacaattcacaaaagcaaagccgaaaaccaaaaccacaaaaaacaaaaaccaaatcttaatgaaacccacaaatatttttgagataagattaagagatgggcaaaaataaaaacgattcttactgaaaccccatcatgtcgtccaaaaaattattctatgaactggaaaagcaaggtggaaagtaggcaggaagaagaaaacaaatacagcaaaaacaagaaaccccctaaaattggactcaccgtgcgttgaaaatggattaaatgaaagtatattctctacatttgtttaggagaaaccgattgagaaagaaagaagggaagagagaagggctgagtctgagagagtagaggtgaggtgagtgaagctgagttattttgcctttttttgcccattctcctttttttctttcttctttttcatcttaatgcgtgtctctctctctcaaatctcaattcccttgcctgcctcaaataataatattaataaaataaataataatattgcaagaaaaaagaagatgtgtattttattttgctttagtaat

SEQ ID NO: 111481 - DNA, 4842 bp, Cannabis sativa
  modified_base (4596)..(4601): a, c, t, g, unknown or other
ctccttttcttaatattttcccgttgaagtgcagatttagttagttatcctcactcaagagtcatacttttacaaaattaatgtttatacttttttcttatattttaaagactgttatatcattcacttatgtaattatgatttgcatttcaagctccgttattcttcaatagcttttgaaatgatgcacttacgagacctttacctttactcttgcattcttattcaattcttaaatggtgttcctatttaatggggtattttgatgacttaagaaatggtgtacagctgagtggtgttgttttacccctcaatttattatattcctatttttctttttcaactgggtcattggttgctgttagattttcatattcatcgctaaaggtttgttctttattacgcttgcacatggcctgtcaattgtttctgtcttttctactaaatttggtacaacattgtgcagattaatttgggatatagaaaacttggttgtaattctattgcgttgaatatttctgtacgttaaacaatccaactcaggtgcaaagggatgaagtacttgcagaaaaaaactatagaccatagctttaagttcatcgtaacatatagctcaaatagaagatgtttgaaccgtaaaatgttctaagcactaatttgagaaacactagtactgtttctgtttatcaaaagcatgcatcttagtgcttcaacttatttctgaatagcatactaaaaaaaaaaactaaggaaacatagaaagttgggaagaaaagaattcaattgcaaatctctttcaagagcttcaatttccccatgagatgactcatttcaactcttaatactaagatttaattaaaaacaccaccagcagaacctcaatttaataaaaaatattgttattaggcactattggtgtctagcaccccttatgtgtcaatatggcttgatcttttatttcttagagaaaggaaataaaacaaacaaaaaatatatattttcaactattccaaaatcttaaaaaaagacagtactaccttaaagcgcagtaaacttccaccctttgttctagagcctaaacaaagcattaaaattcccataattgagtattgatgtgaaatatgaattactttctagaaatttaaataagaaaagcccaatcactatgagaacatttaccaccgtagaatataattatcatgtatagaattatatcagccaaattgcaagacaactcggtaggtaagaagggtaattgctacattccatctcttgctgcctttctttaatttccaatagtgttctacttaaacctctttcaacaatgctttgaagaaagattgtgaataattaattagattatttaatatttaatttttaattttaacgtcaaaattgataatggtgcagcaaaattgatgaaaatttcttatacttcaaatcaagccaaaggttattggtgttatatatcgtgctttaaaagtttcaaaattggtagtggggcaacacatcaaacaataaaaatgtaactggggcatatacaagatatcctgcttctgatgaagaagaaaggtgttggtgatgatattgcagaagacttaaacaaactgaatggaatcgttagaggtagagtccacgatggagagtggtaacgagttgacgagggagagtaaggaatttttttttaaaaaaaaaaacagaaaatgaaagttatatacatatatatatatagtcggcagagttgaaaactaaaagttaaacttaagaaaataagatagaaaaacaaaagaaagataaactttggtaaaaaaaaaaaatcttttgcatgatgcgcagatgcccatgtgtgctcaggtgcccacgtacctcagtgtgcaagcaacagaaactcgcagtttgtaaggccatatataatttatttagatgaaaactaaaagtcaaacttaagaaaataaaaaaaaaaacctatacaatacaaagacaaacttagtaaaaaaaaaattctgcatagtacgcatgtaggcgcccatggtgcattgggtcgtggaatccaccgagtgcacaagcaaagaaaaatcgtggtttgtatggccatatagaatttattttgatgaaaattaaaagttaaatttaagaaaacaaataaaataaaacaaaggcaaacttagtcaataaaaaatcttctgcatggtgtgtaggtactcatgtgtgcataggtgcccacgcatccgagtgcgcacaagcaacgaaaattcacggtttgtaaggccatatagaatttatttggatgaaaactaaaaattaaacttatgaaaacaagaaaacaaaacaatacaaagataaacttggttaaaaaaatatcttctgcatggtccgcaggcgcccatggtgcataggatcgtggcatccaccgagtgcacaaataacgaaaaatcgtgatttgtatggccatataggatttatttggatgaaaaccaaaagttaaacttaagaaaacaagaaaataaaacaaagggaacacaaacttggtcaaaacaaatcttccgcatggtgcgcaggcgcccatgtgtgtacaggtgcccacacacaccccgagtgtacaagcaacagaaactcgtagtttgtaaggccatataagatttatttggataaaaatcaaaacttaaacttaagaaaataagaaaataagaaaacaaaccaatacaaaggtaaacttggtcaaaaaaaatcttctgcatggtccgcaagcgcccatggtgcacagggtcgtggcatccaccgagtgcacaagtaacaaaaagttgtgatttgtgtggccaaataagacttatttggatgaaaaggaaagttaaatttaagaaaacaagaagaaaaaaaacaaaacaaaggtaaactcgataaaaaaaaaaattacgcatggtgcataaggtcgtggtattcaccaagtgcacaagcaacgaaaaatggtggtttgtatgaaaaaaataaagagaggagtataaaagaaggagaaatgctaaagggcaccagtagtgtctagtactttcttatgtgttaatatcactattagtctaattaagtatcgggtcttatatagttcgatgtaataattttttaaggaatatcgttagttaatcgtaaagcaacatatctaaaagtattaaacactagtggtatctaatagcaatgcgaaatggacgaaggattataaatccaatcaacctagatgcaagagacagagacatagagatccatcagattttactcttaccaatctgttgttttgacatgacacaatcactcataaatatatatatatatatataaataatctaagctagagctatagcctataggtagaggtagaggtacttgttgttgtttgatttgtaatatgtgatcaattaattgaactgaaagtaaattaatcaaattctctgtaactgagtaccttcatcattcttttcttttctttttttccttctacgttaataatcaaaaacattaatttcctagtagtactacaatctaatgcatcgtctttttcctatagcctaaaaaaagactagtttatacatatatatatatatatgatttttacgtgtgccattcattgaataatacatactattgactcccctcccacggtacactgcactggagtactggagaatctatatatatttttatatgtatatcttcataaatagatcgaaaacactgtactatatatataaacttctaaattaataacaagccttattttttataataattatatataatttttctattataaaacaaatgttgaaattatcaatgtttaactttagcataaatgttatcatgagatatcatcccaatcttcactctatgatgttatttaataccttcacaacaacatatatatatatatatatatatagatatcattattcatcgatctatcaatatatatatataatgatgtttaactaatatttattctaccaaaaatcatcatgcaattaattcaattaaaattatatttttttgtcacgatctcgactacagaaaaataatattcgattaaattaattaagcttgcttcacgatattgaatatgcatagctactaattggatatcatcaattaatatgatgaagggtacagacaaggtcccaaaaacaaattaaaatgaaaaagatcgaaaatccatattgtacaaatattatcaacatttacagcatattaatttaatttctatatatatagacttctagtgagagaaccaatctatatagatttatttgatcgatgaacaaatttaattgagtaatctcagtataaataagtttaactttcagttgtaaataaataattaagtttaattttttgtggtaataatacttaagttatatttctaaaatttcgtaaatatctggtcgtggtcgttaaatgtcaagtcattattcacgtgtcatatttttcattagtatatttaaactaatttttaaaaaaaattaaaaatttgagaacttgaatcaattagagattgccacgcagggtgaccctaagcataggtgggctaggctcgcgcctagggcccactcattnnnnnngcccaaataaaaaaaaataccttttaaaaaatatgtatatttttttaataatttttaaaaatgtcatttatctttatagtaaggcctaaaaaaaaattttgcctatggcccatttcaactcaaaaccggccttgttgccaagtagcaatttatttagggaaatttacacagtttactgtgttttcccattttctttcttttatactgttacatgcccaaaataacttttatactgtttttt

SEQ ID NO: 111482 - DNA, 5677 bp, Cannabis sativa
  modified_base (36)..(40): a, c, t, g, unknown or other
  modified_base (4548)..(4562): a, c, t, g, unknown or other
taataagtaaatctgattattttgaaatgagttttnnnnngggcataaaacccaacagaaactgttgggggcattgaagtccaagaagtggaggaccaaggcgaggtccgtcctgatacttcttctgatgctggcgatgaggaagaaggggtagcccaggtgttgccatttggcggttacaataatgaaggagagccagtgtgtgaagcaggtgacgtcctggagactcgttaggactacatctttgaggagtatattaaggctcatcctttgagaaggaaaggtctgaagggaaatcgatggatttctttaccatctgtcctgactatgaagaaattgactaatcttctcgaggacggtctcttggggaatgtcgaatgcttccttccctccccgaaccaactagcgacagaccatggagagggttattgcgcttggtcgagggctcacaccaatcagggtgaatgctgcccgtgctcccacacttcaaaaagatagccaattattactacatcaatctgacccagttcactcctaagggcctcaagtatatgcctgtcctgttcgtactatacacctcatagggatggggtgagccgtccccccacgacaccaactggctattcaatctgaagttaagccccaatcagaacatgtcggggtacttttacttttctcagatcgagaagtcgtggttgacgggcactacggataccgaggtgacgaaggtaggaggcttcgtggaggactattattttttcaatgggatggacaccaattacaccagcttccagcacattttgtcctactttcgcccctgttcacactagaactcatgaagagggctcgaaaaattctccaactctcttcgatgaacggaacatctctctcctggccactaaagccaacttcgttaagtacaagctttatccggctaattttttaccaaaggctgaggaggcagcaagagaagctatgcacggacaggaggctccgagcaagaagaagaagaagaaaagaaaggttcctccaaaaagccaagtacctattgagcggtccatcaggataggatagctctaaaagggttgctcgatcatctgcctcagtggctagaaagggaaaagccattatggtggagcaggaacaggtggattcttcagatgatgatgctccatctttgcttgttcgagaaaatgctcttgcctacgtgtagggtacttttgcattcaaacttatttgcatttacttagattatacttgttttgaccttcttattttatttttgtgcatctatgtcttagaaggtcgtgcgtgctttaaagaagaggtcgggtgatgcttctggctagacatctctagccaaactttcaatggtggatgaagttccacccaaggagatagtcccaagcactcttaaggagaagagttcgactatgcctccaactgaggtttctgaggaaacactgtcggaggtgaaccctccagccaagaagcattcaaagtcttaggcgaaagccaccccgtccaaaggcaccaaaagcggaagcacagatgggtccagcattttatggtgacccaaacccatgtcaatggaaaaattcttggactctcctctggcatcttgctgaacgtttttcaaggccttgggtgtgtgtgggagaccccaattaaattatggatcccaatgagaaataggggtactaccaaagctccctatttgatgaaaaaaatttccaagctattgactattgttcttttcgagagattgagtttgatggtggtaattttacttggttcaatgggcaatcctcaaattttatctttgagtgcctagacatagtttttggaaataatgattggtttaatctttttgaagtttttgaggtggttcactttcagtgttggtgttccaaccactatcctttactccttaaattcaatgtcatcccttctagctcgaggcgtaagtctagctagggtcatcgcttccattacgaacaagcgtggtcagacaatgagaactattggcatattataactgaagtgtgggattatgggggtttgagtagcaccctatctaaattgggcatgcagtttcaggtttatggtagtcgcttaggaagttggaatagattgcaaaaagaaggcttgccaagagaaaacaaaggatcttaaagagaccttaatcaatagctcctcaaagataagattttttggaaacaacacagcagagcactttggcttacccatgaatacaaaaatactcgctactttcaccaacaacttcatctcagtggaaaaaaaattaaatcaagggcatctttgatccgaatctgatttggcatagctcgaacgtagatttggaaggtattatatgtggctactttgaaagtttatttcctctacctaggaccattcccacattttagagacggtccaacaatttgtgccttctcatctcagtcgttctcaaaatgaaaagcatctttaggtttttacagaagtgggtattaatatttctctttctcaaatcaactcccttaaagcctcgtgcttgattggttgccccgtctcttttatgatcaccatcaaaccattattggaaaggatgttactcgtatttgtttgcatgtggtcaactacaatatgaattgtagttccctgaagaaaaccttactatgtcttattcccaaggtgaacaagccaactacagtgtctaaatttagacctattagcctatctaatgtaagctataaaaccatagctaaatgtctagtcgaccgtatgaaagaaagttcacatgaggttatctctaagaatcatagttctttcatcaaggggtgtctaatataggataatgttattctcagttttgaaagtctccattgcatgaagaaaaagtagtttggaaatggtaggaaaatagctctcaaaatggatatgccgaaagcctatggccgagtggagtggcctttcttggaagctatgatgccttgtctcgattactatgaaagatgggtgcacaaagttatgaattgtgtttgcacaatctcttttccaatccttattgatggaaagatttgtgggagtattatacctcaatgtagcttatgacaaagaaatcctatctccccctacctcttcctattatgttcggaaggtctctcttgtttgattcaagaagcagaacaatcaaaccttcttcatgttatccagtttggtaggagtggtcttaaactctcccatctcttttttgtcggccattgctttattttccttaatgaaaacaatgaggatgggtgttgttttaaacatacattgaaccaatatactatgttatctggccatcaaattaactatgaaaacttagacctttgtgtgggtagaaatattactcaagtcgagggccaagttcttgcctcttatctggatgttaaacgggtggagtgtcatactaaatatctgaggatgcctgcctacattggaaaaaggaagtctttgagtccacccatattaagatttgaaataaactttgaggttggaaggcgagtttgttttgccaaatcggctgagaaatattacttaaggtgattatctaggctatatctttctatgtcatgacttgattctgattacctaaagagcttattcaagatatccattctgtgataggccaaatttggcgcgactcatcgaataccaaacacacaatttattgggatcgtaggcaccgattatgcgtacccaaggcagttgtgggtttgggcttttgggacggccaaatttaatcaagctcttttggccaaacaaggttgaaagtgttggaacttattttactaggatttagatttactaacaagtatgttgaattatattctataatctaacactctaaacatgaatttcctaaaacaataaaataaacacatataaagttctagaaaacctaacattggtggcagtgaaatgttatggctccttccgttcagatctctaactcttgttcttcgcagagtaataacaagatctaaacctggatctcctttaggtgttggaattcttcacaattttctatactatgattaagaactgacttgatatgagtgggcatgtactctttcactatggggttcgattttgatgaagagagagagggagatgtatttcaaaatcaatagaaggaggctctcaatttctagttgtctgacaaagaatgaaaactaggttattagagttatgagaatgagagtcatcttattatttttatagtatttcatctagggttaggatttgaattatatagaataaaaaagataaaataattgctaaaatatacttaagtggtcgaccatacatattggactccactagttacaattttgccattttattcaataatttatcttttctttcactaatgtcatatttcttaattttaatcctataaatgtcaaaaatatttatttcataattataattaattatcaaataaaattatcatttaacttatttactaattagaccctacaaagtctcttaattaataannnnnnnnnnnnnnntcttttcttcacaattaagcccatttatctctattaagccaagctcgaaggaaatcatcaatttacttctatgcatttatataagctatagattatgtatctatgattagtgctcctactcaattgaactaccatgttctcaagatgtaagtattgggaagatccaattggtcaactttaacgaacaaatcgaagaacacaaataatacaattgaactaaaacttaaccatctcaggattaagatcattgatctaaaatcaactaagtgatattgacttagaaagatattacagtatgtttgtgacgtcttatccaagttcaatatcggtccaatttgatgtataacaatacatccaatttaagcttactttaccaatgccttagaaaagacataacactaccccagtgtaagtaaactacattgtttattagcatatcaatggaaatcttatgtacttataaattgtgggactatatttaatcacataatcttgattactttccactatgtagacaacacagtaatcatgaataacaatgtgataagaatttagatgaatttataaatcaaacaaaatgatcatgagacaaacatgtgaaccaagcaatacattaaacaagtaatgaaataattttgtttctttattgataaatgaatattcaagattacattaaaataaaattttaattagggcacaaagcccaacaagaagatcatcaatagtcctcagacattgctagcccgtgttctaaaagaatgctactttataaacactatatatttttaggctaaaccagggattattgctcttttatgtagcgtggaattctttggggtcgaagtctaatgattaaaaccacctgttggcgcatcaaattggggagaactgttcaaattaatgaggaaaagtggttgcctcagcctgctactttctctcgtcgcctcccagtggtggttcctccaaactccgcccttgccactttgaaaaatgaggatggctcttggaatgtcaaggccattgagaattgtttccatgcagatgatatccctttagttattgtaacaccctaactatcttaggcgtattacgtgatatttaaacgtactgtgcag

SEQ ID NO: 111483 - DNA, 4055 bp, Cannabis sativa
  modified_base (197)..(198): a, c, t, g, unknown or other
tagaaacccctattgcaactagaatgcaactactttagaaacctaaaccgtaaatttgaaaaaaaaaaatagtatatggagtaattcttcaaaaaaatatacgcactaaatttaaatttgaactataatgtaaaaaaaaataggagaattttttgatatactatttttttttaactttttttttttaaatttacggnntgagtttctaaagtggttgcagcactagttgcaataggaatctctatacgatttttgttgcgatttaggttgcagcgctagttgcaatagggatttctatataaaattccataaaaatgcaaaaacaatatctagaagtgtaaaaataaaaaaagtccaaaaaaataatgttttctgttatataattacatttaatatatatatatatatacatttagatatatacatagatatttaactacatttaatataaattatagatatatttatttatatatattagcaacaaagtttcaatatttaaaatttagaaatttagaaggagaaaaaaaatgagttgcatactaaaattttcccacctcttctttataaattattctcacattatccattatgagtgctctggagaaaagcctcacaaaaaaacaaaagtgaaagcatcttgctctatccacttatccacatattggaataatatataaaaagacggggatggttgcttaatttagagttcaaacttgaaacatgatactaaattaatcatgcgctttaccctacaaagccaaatcacaaaactacacattatcctaaacaattctaccattttgtttaacaaaatcctttcttcactcaatgcttaaaataaaatctgaagataatcttgaatttatgtcacctgatttaagactggaataaaattaaccctcccattctatagactaacacaagccacaacaatacaaaacaaaggcacttcttcctttgcatgtaatcatgtcattattattttcattaagtttgtgcagctagccactaatctcatggaaaactagaaacgaagagagaattgcaggcattcaaatttcatttatttacatggttacgaaccatctactactgtgtaatgtaaaagagccaaaaaaaaaaaaagaaagaaaaaaacttttatctcatttaattaataaccaaagctgcgactagggctgcaactcgctcaattggccagtctttataaagatatagacaccaacagctagatgaaacccccaacatatttgtttcatataaactgcatcagctacatttattggcatgtgaaatctgaccgcctttcggcaaccacagcaaccaggaacgcctttgcaaggaccaaacttttataaatcattgtagaaaagaaatttgatcagatcaaaagtaagaagcctcattgatacaaagacttcgtaaaatcatgaggttattattactcttaccaaccagaatatcatcatcaatatagattggtaagatattgtagacagcaaccagcaaacaaattgacatctaccatctgtacaaccagtataaacagcaccaacagcaagtacatcatcttgtgattcagtcacattcgctctgctcgaacaaaactatataaggccagcatatggaccaatatgagtaaatgaagatagcattttcgactttcaagaataaaacgcacacaacttcaaacaagaaaaggaagaaaaaaaaacataggaaaatgcacagataccaaaagatctaatgatgttaaacaaaagaggaaaccggccataggcaggaattcctaacaccctagtaaaagtcactacaagtgcttaagatagtacccagtagtatcataatacaaaatctaccataaagcctaagcaaattaaaagactgtccatagaaatgtttaaccttcgaataactgcagggcagtcaaataacatttgatatggcaacaacatgcaactcaactatttctcctcaatacgggcaacgacacaataaatatgctcataacttgatatgctgctctccatcaatcctacggagcacaagacaaaatgtcaacattttacagggtaacaaacttcaaataaaaataatgcaacaaacaaatagcgcttaatattgtaaaaacttacatcaacgtctgatctacgaggagaagggcttcgagaatcaactggcctaccacgtggtgaagcatcttttgaagcaggagaacgttccttaaggtcgcgtatttcagggttttcaccttttgaaggtgtcctacgaggagatgggctcctgcgagatttaggactacgactacgactacgccgagcaggggaggcactgggaacacaaacacaattggcaatcagacaaacacaagcatttaataagaagaataatgaaactaacagtatcacacacctcccataggaatggctccgactgcgatgctcatcatcatcatatttggacctcccacgacctttgtggcgatctggactagcactgcggctcctgctacggtaacggtgttccctctcactcttatgggatctgtcccggtcatatctatccctacttcgactgcggcttctcctcctgtctctatccctatccctgtctctgtctcgattctcatcacgatgcctgaaattaatttctatcagttgctgcatatttactagcagtgctgaagactggactttgcaacttcaaagattacttggcaaaaagtatcacaaaagataataggtgttattattagtgataagcactgaataccaccacgaatataggacaggctaaaaaacattggaataaatcaatattgacagcttccatttctacataattatttgaagttgaacaataagacacttacccaaatacagttcaaaatgtgcaaagattatggtctgtccacatgccaaattgatggcagaacaaaaaaaatatacaagtgaaatacattcactcaccttggacgaggactacggcttcttgacctgcttccaagttttgattccgattcaattatcctccccttatgactgtaagttttatttttttaaggtggaatcaaaacttagaatacatgttcaatcaactaacagatacaaacaacatataaaataagcagaaaccaaagacccgccctcacaagataggaaatatattgataactataataaagatcatactaacgataagaatccacaaaaaaaaaaaagctttataaataaattcaactaagaacgccattagagacttacattctttcggcattggggccatacttggcaaattgaaccataatctctctaccatctacaactcttcctaaatatacaaaataagacacaaattaaacaataagaaaaaataaaaaaaaaataaaaaccataaacaatttatcactacaaatagaaataaagagaagtaaatgacgaaccatcgagcttctccacggctttctgagcctcatccgcatacttgtaccgaacaaacgcgaacccgcgcgattccccagtcctacatccattgattgatataaatattatttaatttatattgaaaaaaaaaaccaaaatttcgacaacaaaggagatagttaccttcggtctctggggataaagacgtcgacgaccttcccatagcggtcgaagagcgggaaaagatcgtctgcggtggtacctatgaaaggagcatgagaaagattaggaagaagaagaagaagaataagaaggagaatagaaagagagaaatgagtgtatacggaaagtgatgttgaggacgagaagggagtaggtgtctctgatgtccggtggaccagatctcccgaagtgcgacatggatattaccagcggcggtgttagggtttttggcttatcagtgagaatggaaagattttggccgatttggaatttggatgtctcactcaagagatgctaaaaatattgcccctatcttttacatgctaaaagatcgacctttatttgcggcaaaacccccttaactatcaatttacttgcaaaaaaccatccaacctcatattttggtgg

SEQ ID NO: 111484 - DNA, 1354 bp, Cannabis sativa
tttttttttttttttttcccttatagttcaagatggtcaaaatgtcatcccctagctatattattattccatggttaaaacttgttttggctgtggaaaattgtatctgtgtgtggatccttttagtgtaattaattaatggcactgaaatattcaacatctgccatgtggggttatttatttgattgaaatggtattatgtactattaactaggctcttatgtgtggtagaaatgcctaaaaactatatagcttaagctaaataataatgcttggtttcacaattttgtaaaaggatcacctagatttggtggtgttagttttgaagatttttacttaatagaatttccaatcatatatatgctaattaattagagacaagctaactcttaaacaaatcttataaataatggtttcttttcttaattaagctcatattgtttagttagacactactttaggtggaggactaaaagcatatgtagttgataatggtatagtcaaatttattaggtctgaaaattttgctcttagaaaagctcatattttagtctaccaactacctttttacatggtcctaacctagaatttaatgtgcactcctcttaactacttaatttttcaaacaatggtcaaacgacattatgagtctagtattacatcaaaccatatataatattgttgatattttctttaacctagtctatactagtttatatgcatgctaaaaggctttatttattagcttcttttttctttatgttggaatatttttttgttctagattcttaccttcttcccaacctttcttaattaacttgcacttaaaacaaaagaaaatttacacttaaaaaaagtatgattagaggtccgagttttctcgaagtcgcttttttcagatacctataagtaaagttaattagtattttttcttcccgaattttaacatgtatcaaatcatgccccttttaactttttagatcgttaaaaatgtctcctaaactattgagattgttggatttaaggagttttatctaattttaataaaaaaactctaatatggatgaaagttcagggggcatgatttagtatatatcaaaattcgagaggcatgatttcatgatttggtagataatgatttggtagatatctttggtagatatcaaattttggggaacatggtttagtacataaacaatcactgatagggctgaacaatttgagcgggtttgacccgaacccgaggaacccccccgaacccgaactggtgaacccgcaaaaaaaaaaatttaaaaaagtttcgggcgggttgagattttaggggtaccgagtttcgggttgaccccgcgaaccc

SEQ ID NO: 111485 - DNA, 5291 bp, Cannabis sativa
  modified_base (4293)..(4299): a, c, t, g, unknown or other
  modified_base (5226)..(5228): a, c, t, g, unknown or other
agcaaagaactatccaatcaacccaagttttaataaaaccaataaaatttaatgtaagcccaaataaaagtctaacacgtcacacatctattaataaaattagacgaattaatgttcttaaattcaaccatttgaataattttaaaatcacgatttaatattatcaaaattattggagtaaaaattataattaactttttttttcgaacaaaggattaaaattagctgaatttacttataaatttaattatgtattttagaaaaattcaagcccttatgagtattatttttttcttactttctttttgtaatttcttttaatatgcttaaaattgggtaaaacaattgatctttcttttttgtcaattttatatggttcgttccacagcggatttttgtgtttgctaccgttattgtcgttacctgcaaatgttgtcgtttgtttatttttcacgctcactgacgtcacccatgtaatatgggccgttcgattagaataatctcgctttgtgtgtcaaaaaaagatgttctaatttcttcaacttgagtcttcactctaagtctaaacttcagagagcttaaacccttgtcaatgcctgatatcatataatcgttcagtccatggcgtcgttggtcttcacaatcatcaaaaggtacggaagcattacagtaaacagaatttctttgagatcattttgcactgaaagtctctctgtcagcggcactggcattagaagaaatagaaaaaatctattctcgagaatcagccccttggggctgccttccatcagtgtcgtccctactcttgagcagtgggtcgaagaaggcaggactatccatcagaatgaccttcgcttcatactacgagagcttcgcaaccgcaggcgatacaatcaggcccttgaggtcagtgattttttttttccgacgattttgtttgattgctcagaaagtaaaagagaaaaatatagaataaaaagataatcaggctctaacttatattatgtatttggttgtgggtttgttgccatttctttaaatttggttatttcagctgatttttcttcttttaaatacctttgtcacttggtttggctgatgagtacttgttcacttaaaaacaaattaagttttgtttgaaaaaatatattttggagcttctctgttcaactttgtctaatagtaataagattagagctgttatttgaatccttggggcagctatcattttgtcctcttctgatcattatatttgagagtattagtttaaataataggcttgatctttggaaacaaaatggtggtctttatttacttcgtctatagaactctagaattctttttggagtaaaatggtaactaaaatggtaacacagtttatgtctccaagctcagttattatccaccaaatgttttggatggaacatatgcattagttacttacattagttttgtctagaaggttgatctgaaagaaagccacacattgctttttatagtttcatacttccataacataagaatcttaaaataagtactgtggatgttaccaaaaaaattgttaatggcatcaccagctcatattcaggaggagaaacacatacattgctttttatagcttcatactttgatcgctttgaaatcttaacacaagtattttggatgtcaccaaaataaatgacttgcttgcatcaacagcgcatactcaggaagggagttagggttttgttgtaccagcagagtgcattatttatttcacttacgtgttcgggaatggctttgaatcgaaatcagtgctgtttataatcacgatctatattttactaattttaactatgcatgccatgccataaacaaagcagtatagagtaaacttttgctagttcaaaaggttgaagcatcttgaatggcctcactcccttacctaatactatctatgtctgtttgttgaatttgggtccccttttgcattgggactatttcattagttcttggcactacgcttttcaagatcttgctcatggaaattgtcaatttatatttcactatcttttgtttatgttgcttgattattgcaggtgtctgaatggatgagtagcagggaactcagcccatttgcaccatctgactatgctgtacagttagatctgattggtaaagttcgtggtctggattctgctgagagttactttaatagcctaagtgatcaagtcaaagttgacaaactatatggtgctcttttgaattgttatgtaagagaaggcatgattgataaatctctctcacatatgaagaagatgaaagagctgggctttgcttcctctcctcttagttacaatgacattatgtgcctctatttacgcacaggtgaactcgaaaaagtccctgatgtgatgtctgagatggagaaggatggtgttaaacctgacatatttagctatagagtttgtatgaactcttattggttgagatccgatctaaatagcatggagaaagtttttgaagaaatgaagaagcaacctcacatctcacttgactggactacttatgctatggtggccaatttctatataaaagctggtgaccgtgataaagcattgttttcccttatgaaatgtgaagaactggttgataaagatgctcttggctacaaccatctgatttcactttatgccagtcttggtaataaagaacagatgatgagattgtgggggcttcaaaaagccaagtgtaagaaccaaatcaatagggactatagaaccatgatcagtttgcttgtgaagcttggggaatttgaagaagctgaagttttgctaaagacgtgggagtcatctcaacaattttatgatttccgagtcccgaatatcctcatccttggatattgtaataaaggattgattgaaaaagcagaggcaatgcttcatgaaattattgagaaaggaagaactccaactccgaatagctgggccatcattgcagcagcatatttggataggcagaacatggatacagcttttgaatgcatgaagaaagctttggcagtgcaagcagaaaataaattatggaggcccaaacctcaagtgatttcaaagcttttggaatggcttgcagataaaggagatgttgaagaagtaaaagcttttgtgatctcactgaaaactgtaattccagttaatagattgatgtaccatgctttgatcaaggcacatttaaatgttggtaaagaagtggattggattttgaagagtatgaaaacagataacatagaagtgaatgaggaaacagaggaaatcctaaactcaagccaaaagtaaaactgttatggtggcatgagaagctgtgttgagctttcatgtgttttatgattttcacttcagttcgtcatcatcaagaggagatagacgatgctccgtatgcgcttaattttggagcagaagaactggaaagtacaatttaaatctttccattgaggattttatacggaaaatacttgagaaagctttggaaattcactactgcaactctattttgtaataggagtggcctgaaatacatggcctgaagtaaagtctgatttttctttttgttaattttaataataatatttaagtgagttttctgaaccaaatatcataatataattaaataccgatgattcgttgtgaaagacttattacactgtacaagttaacaataactttgattaaacgagggaagaggctatattactactttaatgaatgacaatgtcaagacaaatgttaatgtaaataaataatagggtaaatgttattttggagttttgcaaaagttattgatataattttttattttgttaaatgataaattagattttgtattttttaaaattgtacaaataataccatgaactgatttttttgtcaaaataagaattaataagaactcaatttttaactaggtacatttttttgcatctgttcgagctaaaagttattttcaagttagttatatttaaaaaaaaaaattatcgaaaattgagttcagattattattttaaatcattttaaaaaatataaaattcaatttatcattttataaaatagaagcttcaaaatgatattaactctaaacgatatctttaatttataatatgtattttggctgatgtaagaatttagtttttatattccaataacttattcatcaaaatatatttatatatatgggtgcactcttaatgggtattatctatgaatgggtaatattagaaaattttgaatttttagaattaatttttctatttaattagannnnnnnctcatttttacattatatgggttgcgattgttccatcagctgaaaaaaattaatgaaaaagaaatttttcgacaaaaaaaaaatgataaaaaaaattgagtttaacttaaatattttcatataaatatatttttgatatagtgtaaaaagaggtatttttttaatatttttttaaattaagcatagaaattcaaaattttcttttattattcgctatcggaccaaaatctaatggtttaatatttttaaaattaatattcatagttaaatttgtttagtagccaacaatgcgtaatacgcattaagaagtaataacttcatcgagcaaaaagataatgatgcatgagaaatgcataaccaaaaagttgtagagcattgctacgagttagcatggtacctagcatcttagcatctttatgatattaaaataaataaaattcgatattaaaattatactagtagtgatatgatatttttataaatgtgacagtcatagtcccatgattcgcaaggaaaaaaatcaggagatgtgcaatcccaaattgcttgaggaaggttaagtgtgatgacactcaaactatgtaggtatgagactatacaattgaagaaagcttaaatcggtactagctatatcaacaaggagtattcttattttctggtagccatcacaaaagaactttacagttaaacactcgtgttggtctatagggaaagatgtaccttattttttgatagtaatttcagaataaatgacctcttgagaaattttttaaaaaacgtatcaataacaataaagcatgctgaaaatactcgtataggcaccataaatatttttagcatttctcaaaactatgaaaggtaaacataaacaataaagttgtaaaaactaaaagggatcatttcacaaatgcacaaaaataacaaaannnaaaaaaaaaacaaaaatacggtttcacgtaattttaaatatttttacgattttttttttattt

SEQ ID NO: 111486 - DNA, 895 bp, Cannabis sativa
ttaaaaaaaaagggagttccactatacttatcagaaatggcgccggctcatctgagaggagggttgaatatgatgtttcaactggcaacgacgctcggaatcttcacagcaaacatggtgaactacggcacacaaaatctccacgattggggctggaggctctctctagggttagcagcagtaccggcattcatgatgaccgtcggaggaatcttcctaccggaaaccccaaacagcttggtggagcgaaaatccaaagacaaaggacgagaagtgctggagaggattcgagggacctctaacgtggacgctgagtttcaagacatcgtagacgcgagtgagattgccaattcgattaagaatccgttccggaatatatttgagaagaggaatcgacctcagttggttatggccatcttcttacccatgtttcagatcttgacggggattaactcgatcctgttctatgctccggttctgtttcagactatggggttcggtggagaagcttcgctgtatgcttcggccatcactggagctgttcttgcttcttctacgttgatttcaatggcgaccgttgatcgattgggacgtagggttttgctcatcagtggcggaataatgatggtcgtttgtcaggtacttatcaaaaccaaaactgttttttttttttaactgaaaattcatgatgatgatgacgaaagaggtatcccataaatacatacaaataataaaaaaaattacaatttattaaattttatttagagaaaataaattttttgttatgttgtacacgtcttaatttattattgattttttattatctgttattttaatgttatttaaatattatttttatgtaattttttttattatttttgtatttatagaaaac

SEQ ID NO: 111487 - DNA, 5185 bp, Cannabis sativa
attggatccaaaatatgaaatccgcacttagtgcggattggatgttgtttgaccaaaaaagtgcagattggatcggatgaacacccctagctattataccgaattgcactaatatttctcaatatatagacctcatctaatgtacatattgctttttatttattacaaaaattaaaaaaaaaaattgtggtaaactcaatttaattattggggaaagatcagaacgtgagttttcagagggcgcgcagtactaggtaggacgtacttgattctgtaagaatcttttaccatgtctagcttttgtgcttttatttctaatgattagggcaaacaccctatagccttagttacgaagatattgaccaattcttaaaaaagagctttgtttgtttcactttcagatatatatagtgttcatttatatatatatttatttaatctcaggtggccttggtatctaacgttcaactttgactccaacccttcctagttccttccgagttccgaccttaattattataagttaaagctaccaccaataattagccatttatagattttatttatggtatatttatagcataaataaatatatatagtccgtaattccatatactagctatatgtatatatgttaagaaaatgaagcataatatatatattaggaaaaggaaaagttcgaattaaattctagctaaattaaaaaggctgccatagaggccaatatataagggtgttataataagcaatctgtgatttttgaactctaaccaattcaaacttaatcatttgagatcaaactaaataaatctgatgtaaataatttgttaaattcagaccctttaaataacattctctgattcaatcacaccgttttaaaactcttgaatgcgattcaaattaaacaattccgtatattaatacttaatatatatttttttaagatgaaatattttgtggataattttattaatattgctatgataataattttttattgttatttatgtattataaatttattaaaagtaaaaaaaattatcgaaaaaataaataattattataaaaagaatttagaacaacaaaatacaaatcatcatgacttttaatcaaactaatcattttgagtagattggtttgacttgattatttaatttatctagtttagttatgaatttttaaaaaactgtaatactaaaccaaagataccacgtatatggattgtggctggcttgtgtttaagctctaaatatcaatgtcaaaaaaactagaggtaactacgtttggatctagatgtatatatataagaagagcggtgagagatgcaactgagcctgtagtagactgccacgtgtccaagtaggtgttgtcattcatttctgtcaaccttgtcaagattggttggctgcgtcgactctcattattagtagtccctttctttttccgtccaagccctagggctggtgattagcaaaatcattgtaattaattaactatgttaattagtattaatagtgtgtttaccacttacccatcacgtttagaattaccacatttaaataccgtctttattttttaaatcatatcctacgtacactaaagaaaacaattaataagtaactggaaaagtaaaaatatcactgtcatggttacctgttaccaatacctagcacgtttagaatgtccagtatgcttttttttcttacttggtaattaaaatatatgtaaatatctttgttgagctggatacatatactgaaataaaagcctgtgcaataatttagaaattaataaacatgagagagatgagacctatataggggttttcacgtactatcaaatataataatttaattgtaattatatagagtcaaaaggtggtagagaagatgtttttcctggtctctaattttatgtggtatccccactacaatagctttcagctgtgtactgtccaactttgtatttaataagaaactttgaaaattcgtagttttcgactcccaagtcaaattgtcttcggttcaccaattaacctacattattagctcatcaccatattagatttgtattctgcaatatatttatatattaagtcgtttaaagtaattatgttaacgagttaagactatttttcttaaaaaaaaaaattatacttttacttttaattttttttttatatttttacagtattctataaaaataatactttacagtattctataaaaataatacgaaaataacaaaaacaatatccaaataaagtaacatcaaaataattaacaacaaaaaataacaaaaaattaataacaaatcaataagaatacaacataaaagtacatcaaaatactgtatttttttttgtaaataaaatcataaaaaacttaaaaaaatttcatattccatacaactataattttgtaatttttttttgttgttacgtgtattttttaaataattcgaataattaaactacttggcccaagccaagtacatgtttggtattaaaaattacaaaattacatctatatatatatagaaataaagagtaaagcaaattacaaaattacatctatatatatagaaataaagagtaaagcatatatatatatatggaaatagtttgttcacactagctaagtgattattaagtattattctatattaattaatcatgtttatgtttagaaagaaaagaaaatataagtattttgattatatatgtaattataattgatttattagataagaattaaatctattatatttcgtgtgtaatcatccatgaaacacttgatcttgaaacagagtaaaagagaatagaggaaatgaataaaaagcctcatactaagaatgctagcttagcagtttttagtaaggaacgatttattatatagagtttgagaattaacaaaatacagcagaattctgttacaacagaattagttacaatctgacacacaaagaaaatattaactaacaaagctaactaatctttattagttatcatcccccctcaaacgaaaaggtgtaaaagtcactttgagtttgcttttcagatagtataaaccttcctttggtagaggttttgtaagaatgtcagcaacttgatcaatgcttgggacatgtcgaactgaaattttatttctcagaatttgttctcggacaaagtgtaagtctatctcaatatgtttgcagcgagcatggaaaatcggattggcagcaagagcagcggctccttagttatcaacccaaataactggaatatcttggagttgaaaatgaagttcagagagcagggagagaatccacttgatttcagctgctgcattagcgagagctcgaaattcagattcagtagaagatcgggcaaccacttgtcgctttttagctgaccatgaaatgagatttggaccaagaaaggctgcatatccacctgttgaccgtctatcatcaaggcaagatgcccaatctgcatcagaatagacttgtaaagaaagccgaggggcaggcttgattaataagccttcatgtaaagtgcctttcaaatatcgtagaagccgcttgcaggcatcccagtgaacactcgtaggagcatgaataaactgggatagtttgttgataatgtatgcaacattcggtcgagtaagtgtgagatattgtaatgcacctaaagtactcctgtataatgttttatcatcaaatggggtcccttcatgtagagaaagcttgtgagcagtactggtgggattggaacatggtttagctccctcaagatgaactttcataagtaaatctgttatatatttgctttgagataagtagagaccttctgttgttctatgaacttcaactccaaggaaatagtgaatgaggtcgaggtctttgagctcgaaagagtgattgagatctgtaataagtttgtgaatcagagtgttgttggggcctgtaactagaatgtcgtcgacatagaccatgaggataatcaaattcgaaccagagccaaaaacaaagagtgaagaatcagcctttgaggcagtgaaaccccagtgaagtaaagtggtttttagtttgtcattccaagctcgtggaacttgttttaaaccataaatggctttatataggtgacaaacatggtctggttttgtagggtcttcaaagcctttcggttgcaccatatcaacagtttcttgaagaacaccattcaagaaagcattcgtgacatccagctgctttatgtcccagttaaaagtgacagccaaggttaacaccattcgaactgagacaggttttatgacaggactaaatgtctcagcataatctatgccaggagcttggagaaaaccttttgctacaagcctcgattttaatcgatcaatgcttccatctgagttgagtttaatccgatgtacccatttattgtcaattagatgcatgtgagactgataaggcaccaatgtccatgttccatttgttttgagggctgtaaattctttgttcattgcagcattccagccaggatcattaagagcaaccttgacagatgtaggttctcttggaaggagagattcaggtagtttgtgctttgtggctatataggcctttggtttgtagataccaagttgagatctagtaaccatgggatgtgttctgtgaacagcagcaggatgagtaactggtgctgaaacaacagtagcagcatcatctcagagacaatagcagtaacagattgattcgctgcaacaggtggagaaatatgaggactgctatcagtaggagcaatggactgagatgctgcagagaggtttctgttgttggaatctgaggatgcaacaggagcttgagcagaagtagcaggctcaggtataacagatggataggcattagtatgagcaaaagttgaatcaaaatgagtagaaaattgtgctgtaggaacaggagttgtagtttgagaatgtacctgagaagagccatgttgattgaaggcagggaagtgagactcattgaacacaacattccgagccacaaagattcgaccaacagaattttcacacaaatagcctttgtgtttaggtgaatacccaagcaaaatacattcctcagatcggtagtccatcttatggtgagtgtagggcctcaaatgagggaaacaagcacatccaaaggttctttgaatcttgtaatc

SEQ ID NO: 111488 - DNA, 5179 bp, Cannabis sativa
ggttgcagcgctagttgtaataggcgtttctatgtacaattctgtaaaaatacaaaaaaaaaattgttttgaagtgtaaaaataaaaaattctcaataatcaacgtctgattcacaaattatttcacaaaaaagaaaaaaatagattaaaaaaattacaatatcacaattaaccttaagaatacttatatttaatttaataccacttagaaaacacaacagtagaaattgttgcagtaagttcattcaacctcataacttgagcactcaattattgtgcaagatacgtaactgaactactaacaactctttcagttgcaaaaaacttgttattcctatctattaacaacaatttgatgacgagtcatcgaagaataaagaaaaaccaacaacgaaataaaataaagcaaaatcatatcacatagataaaactcaaacactcaaaaccatatcaaagagataaaattaaaaaacttaaaatcatgtcatagagacaagactaatcgcaataacaaaacataactctaaccaagccgcaccaatgcttagaaaaagtcggcgggcttgatcggaaaattaaacaacctcctataactatagatttaagaataaaaaccctataaattatttgtattggtacatattatttgattgaaataattatacattatttgatgatttcaaagattgtcttactagattgatcggtataccgacactaacagacagtaacgtttgatatgtgaccattccataatattggtgcttattggagttttctataatggcaatgatgcatttccatttcaattaatggacttctttttagtcacagaatgagtctgtgtgtgtgggatggggaggacctgcttttatattattacctatataaatagttttgtcatcattctctttatggcaatatcattcattatttttatatacatatatcaaaatatcaataccaataataatcaaccatgtatatatatagcatgttcacccacttattattacctcatctttgagtttactacttatatgccacacacatatatctcccatttttcagaagctttttacaaagtttagagacgatattgcaacaagagccaattggtcaaagttttatctactattacttttgttgttgatttatttgtctatgactctctctccctttttgatttttaattactaattatatgtacatatgtatgtatattaaataatctaataaagttgttagaagtattataagatgtatttggaaagtaattaattatgcagtgattagaattaagtgtaattcaaaatacaaagtaaatttggtgtatttatttagccaaataattaatttgtgtaaccataaaattagacataaacaatattataattaaatatattttgatctcaacaaagtactaactctactataactaaactaatatttctttttaactaaaagtagttgaagtgatggcacttccaaatattttggtccagtattgtttatttgggtgggataatcttcaatttaaaatggatcatcataatgttgttctctgattaaagatattgttatattgtcacatatttaccatgtaattatgagttgatataagatcattttagaatttttaatttctttggattcctataatttcagccaataaagataagaatgaatatttttttgttatacatattttagatagcttgtactatatatacaccctatttatcactgtaccaattcattcaaaaatcaatacatcaatacacattctattttctctgttctttttcttttccttttctcgctattttcctttttgatttggtatcagagccgatggcttccacaacttcacaaggagactcctcagtcaataatgacagaccttaggccattgatgctcctctcctagcttcggtccaagctgtgcctattcctacctctacacctgctctgccgactcctctacattaacctttagctcttattgccatttgtcttgacagagataactatccttactggcagacacaagtggttcctgccgtgcgtgctcataatctcgatggctttttatttggtacaagaccatgccctcctcagtttgtcaaaatatctcctggtccaaaccaagaaatacaaaggtaggtaaaccctctttatactatttgaattagaacactgaccaagccatattaagttgacttctcaactctatttctgaggctatgttaggtcatgtttagcaatgccatttttctcatgaactttggtctctcttagagaacctcttcactactcagtctcgaggacgcctccttcagctgcgacttcagcttcaatctcttaaaaagagatctatgtttacccatgactatatcctcaaaatgaaggccatagcagctggtcttaactctgcaaggcaagttttcagtggcgataatctcatcctttacattctcattggtcttggatctgaatacgactctattgtcatcaatcttacctctagagcaaattagctcacactcaaaagtgcagtaccttattcagagtcaagaaatgcgaatagatcaagctaactctgctcctaacacagatcttgccaatcccactacgaactttgcagctcgcaattaaaaactgtttgtggcttccaattctggcagatctcctactttctacaatcgtggacgtgaaagaggtagagaaaatcaagggtgtgttatttgtcaactgtgccacaaaccatgtcatcatgttgccaagtgctactatcgctttgatgttggcttcaatccaaccaagggtatccaaaatcatacttagggctctacttgtgctcctccgcaaggtaacaacaacaagcattcttggctaactctgctcagtagcctcacccatgacaccaactggtatgtggacagtggtgcaccaaaccacataatagacaatagaatcctactgaatacaatggtaagacaaggctcacagtcgataatggtcaatcccttactatctctcatattggcagttcacttcttaaacctctcaacatttctaaatatgttaaattgaatactattctgtgtgcccctagtactgctaaaaatttgctaagtgtttctcagctcaccaaagataacaatgcttatgccaaattttatgccgactctaatgttttgaaggacattgattcgaagagggttcttctttaagggaaggttagcaacaaactatatcacctcacattaactacatcatgttcttcaagtcacacactagctagttcctttattcagtcgtcaaccaataatagtcacaatgtatgtcctagtttcgagtctgaccaattttttttcaagtgtctgtcaatgaatcaagtttgtggcatcttaagctaggccatccttcccttaatgtactcaaacatattttaattaatgaaaaaaaatatttatcctctactttacagttttgctctagctgtcaacttggtaaagttcatcacaaagtctatccctccactctcaaggaatcaaaacaacccttggaacttgttcactcacacatacggggaccatcccccaatatatctagacatggctatcgatactatatacacttcattgatgattttagccgttacacatggatatttcctctcaaactaaagacagtgctctaccagtttttaaaacattgtaaatccaagttgaaaaacaactcaacactcctatcaaaactgtccaaacagatttgggcagagaataccaaaaagtttgagccatatctcgagtctataggagtaaaatttaggcatccttgcccttatactcatcaacaaaatggaaaagttgagagtaaacatcgtcatattgtagaaatcagcctaacacttctagcacactccaatatgcctcaatgattttggtgggaagccttccaaaaaaccactttcctaatcaatcacctatacacacaccagtacttcattataaatgtcctatccagaaactttttggccttactcctaactataagttcttaaaaacttttggttgtgcctattaccctgaccttcgttcatataattctaacaaactccaatttcaatcaacaaagtgcgtctttatcgaatttagtcccagtcaaaaaggtaatctttgtgttcactcttcaggcagtgtttatgtcactagtagtgtctctttcgatgaaaacaaattcccctttgctgttggtttcacttatccttctgcacacacagattagtcactcaactccactcaataccctcaatggcttccttaccttcctcgtgtgacatcaactcttgctctggtgttgtgctgtgataattgatgcgattggctgctcaccctctcctcgagaagaatttgcttcacattcccataaatgtaggatatggtcctatggtggtccgatgcaggcccgatgtctttctatattgttgaaataagtaaaggttaagacataggtccgatggtggtccgatgctcctatttttatgtacaataatacaaaaataataaacaaaaataggtagcgtcaggccactatcagatctacattgggcctacatcagatctaagtcttcaacctttactcatttcaacaataaaaaggcatcagacctgcatcagacctagcataaaagccatttttccgcccaaaacatagatctgacaaaatccaactctaaatctaacataaactcacagattatagagattcatcatacattttaatcataaatcaataaacgcatacattttaatccaaaaatacaatgaaaaagagaggatccaaaatcttactttcgactttgcgatggtctggccgtggtggtcgtgggttagagagagagttcgagatgctgtaatcaggggcggaggcactttaaagggtgggatggccctggcccccccttaaattttgaaataatgaatttatagttattttttaattaactattataaacatatatataaagatatttggatatataataaaataagattatatatacatacgtatatttagcaacttaattactacttttgaatgtgatgaaagtatatttatggaaatatagttaagataaatactagtgtttctttatttaaatataattaca

SEQ ID NO: 111489 - DNA, 7922 bp, Cannabis sativa
gaacaactaaaaaataaccgtggagtaaccgtaaaaatttaacacaatacatagtataaaacatacagtatttttgaaaaaaattcctccccatagtaaataagtaaaaaagttagaaatttcagtatgtggtataaaaattaaaaaaaaaatggcctggttcgcaagcaggtacatgtccaacctgagcccccacattagcaaaaattagacctgaatttgcttgaaagagttgaccgggttggagccgacccgctcgcaaggaacaggatttcccaaacaaatgggttggctgggtgaggtccgagtcaaatctaactaaaatgttcaatcctagtgacaggcatgactcgtaggtagatgtagcgtaaaaatgagtgatcgaatattagttataaaatagtgccccaacctcctattataaacattttagtcaatttctgtgttagaaaatatatactaaaatattttattttaattttttttatagaggtgttctttatacttacaacatcatttttataaatttttagaaaaatttgaatagtttagagtgtcgaaaataagtttgaattttttttaaatgtgtgtgataaattaaaatatcaagatttttatttttaatattgtaaactattcgaaaaattttaaaaatttataaaaattatataataactataattagaggtgttcattggaccacatttaatgtttttaggcctattcagatctgatccaattatatattagatattagattttaccatttgatgtgatccaattaatttcagtcatccagtcgattggatgttggattggatcgattctatccgttgaatatatttgatatatatttattggtttaatttaggtttattcaatattttaaacctaacatttttatatatatattttacgtataacaatatataatctaattacttatttaaactaaatgaaaatactaattagttcgattagttgtggatgtaatttttgagcaccccattcaacatcaaatccgatccaattagatattcaaaaataacattcaatctgatctgatcacaattaaatatcaaatgtttaactatcgattgtaattgcatcagtaaattattattagattagatcaatttatatacacccctaactataatgaatagcgttaaaacaatttaattttttttattagatatgatttcgagcttaaaaattgtaatatttgattatgattaacactattatttatattattccatttttaaaaaaaatggagatttattaaagaaatgtccaatcagatctcttttattattattttacgtatatatttcatttttcatataagacactgcactttagcagagcacgcaatccaacccttccacgaagctacggcggagactcagaacgtcaccgccaagatcgccatcgccttcgtctctcttattctctccctcccacctttccgggtatcttcgatctccctctctaaaaatctttctgttctacctatcagaatgagctttctagggttttagtgttctgaatcaatttttagattttggcgtcatttacatgctgttttcttcctttgctctttaatcgattcagttttggtgctaatgtatcttatttcatttaggatttgtttttcatttttagcatcgcatttctagttaactgtactaaactcgatgctttctagttatttttctgtattttctgtatacaagctatgtttatgcttgtgcatgtccttcctgtgtgtatctaacctattttcgatattgttgatgcaattatttaaaaactgctgagttaaacaaagataatatatatcaaatcaaatcgggtggatttgatgtattttaaatttgaacttgagattataatccttttataaacaagtagcttctgtaaatttattggtggctatttttagtgtcaagaattacatgtaacccggtcttaccaaagacttaattgatcactcattttgtagaaatttcaaatttcatggatttgagtaactgcccattagttctggacatccattgccataaaattccacttgattcttctatctttattttaatttccccatttctagtctctattatcccttttttccaaaatgcaggtttggtttttgtttacttttgtaattttttttccgaagaattgtatatatctatgcattatgcataaattgtctgtgattctcacttctcacttggtttcattgtatacttgtttttgttttaaagtgatctgcaaaatatgtatcactgttcttgttggtaatttgagttaagctcatcagctcccaagacttttaattagctcattttaggtgctaaaacctcttattgtcttatagtttcaattttgataaaactaagcttcacaaattgttccaaatgtcgggtgcactgagatcaaatctgatctcatttctttgtatttttcacattattaacagtttgtataaaatgttagcatattttgtgttgtaaatccttaatgattctgttttgttacatttataccacaaattttcttggagtatgtaattttatcattcttctatggccatacatacctaatttgtaactctcgacttgtttggtctgctgcaccacttgattggtctatgcataaaataaaaataaaaattgtctgaaattatatttcaaatcttaatttcttcatatctagtctggtagctgactctcttttcttgcgaatagaaatctagttggaacagaaataatataagattcttcatcctattttgtatacatttagaaaagaacccttgacattctttttcttataagaaatttcattgtgcattgatatgcgattcattgtgttttgatgaaaatgatgaaggaaaacgagagagaaaaggagaggaagagggagagggaggggagatgtttgttaggagaaatggtaaagagaaaaagaataaaatgaaggaagaagaaatattgcaaagaagaagaaaaggaatcattttttttattgaatgagagaaagtagtgaattttaggcttgagaaatctagctgtgttgattataagcaactagcaaattgtaattcttgatcgtaaatcaaatgataggctctcatagttttttgaggacaagcatagaaaaattaaataaagttttatagcaatagttgttgcattcattgtgtttacatgatcaatatcttaccatataattgactatcattaacaagagaattcagtctgggttttttctttgatcattctttttctcttatattgtagatggccaaagctaacaagttacgacgtaagtctgaatcaaaatgttccagggctagtcgacatttattgccatctgatacttggacagcttgcaagctaaagaagaaatgccatgaagtgtcagggaagaaagagtggcttgatgcatcgtgttcagtatgtatggagtttcctcacaatgctgtacttcttctttgttcatcatataacaagggctgtcgtccgtacatgtgtgccactagtaatcgcttttccaactgtcttgaacaatacaagaaagcctacacaaaggtagccgcctctactactcaactttcagaacagacgggtgagtcggtcggtaatataggttcgagttcagatgcaagacagcccaatgaaaatgtagaagcaccagagcttttatgcccactttgtcgaggccaggtgaaaggttggacagttgtggaaccagcaaggaagtatctaaatgccaagaagagaagctgcatgcaggacaagtgcccatttgttggaagttataaagagctcagaaagcatgttaaggcgaagcatcctctggcaagacctcgagcagtggatcctatccttgaagagaaatggaagaggcttgaatgtgaaagagagcggagtgatgtcatcagcacaattatatcatcaacaccaggggcagtggtgcttggtgattatgttcttgagccaaaccagactaacttttacagtgattatgattctgaactggatgattacttggaggattttaatttaggttcattcaatttagggctgaatggtggtaatttctcacgtggtagattccacagggagtttgcctctattggtgaagacaactttggggggcctcgttctgcattctccagttatggggctgcttctggacgtggtttccagagagcaaggatactggtttcaaggaggcgccgaagacgcagcggaggaaacaacaatcattaagttgtgaatttgtgaaatcaattttaatagaaggtaggatttctgcttcagcttttctaaaagggtttatggactaatttactttttatttttttgaaaaaaaagggtttatggactaattttggattgtaggagttgcaatttagaagggatgttgtcttttcatttaggtatttagttttgatttatgaaccattcagaggtgattgtccatatactgtggtgtatggagtggttctctcttgatcgtacatactcaattctcagtttgccagcttaaggagtcatccttttctaaaccccatttcagacattgttctttttactgcactgattattcattcaacatattttacttttggaagttggatagagttgatgggggcttctcatccctccatttttcatatagagttggatagagctttctttcattcttgtatcaaccaggcttgttgtttttggatgagcatgagcaggggtcatgtttctggtcaaagcttttttttttctttctttttttgcttaacctatgtatggtgtttaaacatgttttttaatcaatcaatttccatggacagattgtatattttatttccattttctttcgcactatatgctaatgcttgaatgaatctttcgagcttaacctttatgttagaatgaatgtcttcttcttcttcttccttttttcgtttctctctctataaaaacataaaaacagtagcaaaaatacttttcttagcgtatctttaactaggaactaatgataaattcacgttttatttttttggtatcccctgattataattgggaaatttgacaatttatacgtaaaaaattgtattttttagaatgccacattaaaatgcatagaaatttaatactctaaaattaattaaatctcaaaataccctcttcatacctttcctctttctcttggccctctctccctctctctctaaccctcaccaaacccaaccaataactacgaccacaaaaccataccgaaccaaacccaaaccaaactcacggccaccgcaccacctccggcgaaatccacatcgaagatgaaacgtaggacaaaatcaagaaggatatcgtgaaattacaaagagaaatcgtaaaacccaaagctccaaaatctatgagttttcaactcgcttgttttctgcaatttttttttttagtttttgacaatatcgtgaaatatcgctaaatgtcgcgaaacaacgctaaatgtcgcgaaacatcgcgaaatcataaaacatgttaaatgtctcaaattcacaacatcacgaaacacattgcgaaacacatcgctaatatcattgctaaatatcgtaaatcatcgctaaacatcgctaaacttcatccctaacctcaaatttgttatattattacaaatacatcgctaaatatcacaaaaaattggtaaaccaaaagaaaaaacgcaaaaaaacaagagaggctgtgagagaagatgacgtcgagaccttgcgatcggggttttgggtcgggattaacgttagagagtgagagagagaagtttttttgaaatgtaaggatatttttgggaggataaaaatattaaaagtatatatatactatttctaattttgtagtatattaaaacaatatattttacatttaagcataataaaccaaatttttcttataatatgtaaggatatttttgggaggaaaaaaatattaaaagtatatataatatatactatttctaatttggtagtatattaaaacaatatattttacatttaagcataataaaccaaatttctctaacgagtaactgatccaaattcaaaaatcggtccaaaaagacgagctaaaagagccgcttgtgatttggggataatgagctaaaaagagctgctatgagctaaaagaaccacttgtgatcgagtcatgtaagattagtgagcgaaaaaaaatagccaccatcttgaggggaatgttagagaatcccacattgataatatgttaaaactaaataccatatatataagatgcatgcgctactcctcttattaccaattgattttgagatggaacttcatgcatcttatcatgcactcacctattctactacttgaactgtacactttcacattctaacacagaaacaatgtcttacataaatttgactcggcataacaaataaatgggatgaaattggatctcaaactcacctccttaacaaaaattgtattaaaaaagtgggtcagatgcactagacctgttcccaaacacatggcatccaaacaaattttatactgacataaaattttccatcaatcttatttcaatctctacaaaaccctctcaaaattcctctgacttttccctgcaaaaaagaaagaaataaaaaatgggggcaacgagatacctaatcacacttgagtagaactgtagaagtgaattggaaagagaaaataaaagatttaaacaggaagtgggatttattacaaagggtgaatccgtgtgtttgttgctggctttcttctttctgcaaattacagattttggtttacatgatatgtctacctctggcactaatcgctgatattgctttcgggttcttattctctgcaatcctacccgaacgttcatctgcgtaacacggaattcagattcaagaattcataccagtcttcatacattataacataagaaacagatcaacgaaaacaagacataaaatgctattctactcaccttgtactttggcttggaaccatttttaggccgttgtagctgttctgaatcagattttctaagttgctgcgcataagcaaggagttgagcccggcgatcaaagcttcgtgtttttgttttttgttggtttggtggaaaaatcatttttgatttagcaccagctctcttatgaggccatggccatggtttttcgatgaatactgtgattatgacttcgtttgttctgttgggtaccattgttgtttccttgacaatcctctgattttcctcctcatctttccattttttccccattgatatgctctgttcttaagaagattcttctcttgtggctctatttgagtgcatattgctttaacaaattgataaacaaagatatgaatgaggatttcttggagatgtaaccaaatcaaaatacttataagggtcgggaatgtattatgtcaagaatttttttgatgcgtttttgccaaaaaagattacttttagtacatacgttgcatgccaaaaaaagaaacatacaaatagtgctttgattgtcatttatgatttaaattttaaatcttaattcttaaggcctaaaccattcaatctattgatgtggctagaaaagcatgttaatctacgtgggcgaaagagtaaaatcctagcacaataaagtaaaaattacatcaaatatagtatttttttattgtttactgttttggcataatcaaatagtgcttttggtatatgacttttgtgttttatttacttttttatggatttttttaaagggataattatataagggtgcgtttgaaaatactgtgtaattactaggtaaggtaattactagggtggtaattacacaatgtagtaattacactatattttaaaatgcaaggtgtgtttgga

SEQ ID NO: 111490 - DNA, 5127 bp, Cannabis sativa
  modified_base (4541)..(4543): a, c, t, g, unknown or other
  modified_base (5081)..(5096): a, c, t, g, unknown or other
ctgctgctgctgctgctgctgagcaatctgaccattccaggcaggaccaccactttgtgtgtagagtgattggtcgtactgagaagttgccatattttggaccattccattgggatataatccaccttgtggtggtgcaaaattttgctggtgttgggctggagagctggtttgtccttggggattagcaggctgtgtatctgcagaatttgtggtggtgttattgtcagagaacatgtcgaacagaacaagagcattctgctgagatactggagtactttgttgttgtccccccacaggaacaagagccagagaagcctctgcctttggtgaactaaaatcatctccacttagcaggtccattttaggatcaaccattgttgttggagctggaccattagttgcaggagcaggaagagctagttgattcagtggattagcccctgcaccagcacttgaggtggatctgcaaaagatcaagtccgaagcgagatcattaatttcatatggcatacaagagctacatatttgtatatatttactatataagtatatatttcttcagctaggcaaaatatcaggagacagaattctaacagtgcagtgcctacagctctcaaaaccaccacacactcatgattgctgagatcaaattccagaaagatggcaggaaatatgggcatagccgcataggtagatttaaaattacaaaattaaacttaagttgcaaattgcttctacattcatatattagccacttaagtaattacactatgcagtcaagtagaatttttcattaactagttacctcctatcaggctgtttgctgctatctccagtgtcaactagagggctatcaacatctacaagtgcaccagaagattcagatttaggttttattattagaccaggtgttcctgaagaaatggcttcatgcttggctagtacacgctgcaaatcatcattcagtgctagtccttgacataaaagtgattcatccctgaaatagaaaatcaaacacaatttaaagaaaccatggtgagtgtagaaaacataaatgtttaaaatggtccatgcagccctttccaaaaaagcaaagaggttcagtgaaaacaaaatcttaataaacaactacattgttaaacaaatgataaaatgatatacaaacaaatacacacgtgtatcgtgcttgtttaataataccaaataaaaagccaatatgaactggtgtgaaattccatcatctcaagccacttaacaacaataacagcacacgtaagaactctcaaaacttctacaacatgaattgacaacagctatattcttgcttataaacagggagagaaacacaataacacatatatattagtgtcatactgctattagcaaacagttaaagagattagatgatgcatcttgtcttgatgctcttataaaaattacaattaaaatatcttaaaaacatgattaatggagcaaagatgattgtatacttacgaggtggagttaacaaggtgcacaactctctgcttatacgtccggcactgttctaccaaatcaacaataacctcttgcctaaggccctgaaattcataagaaacaaaagattgcaaaaagtaggattaagtaattaaatataaatttccagttagtacgaaaagttgtttgacaaattgcagacactgaattacaagctagagaattataaagtgcttgtagcagacaaggtttaatacacacataaaaattctagtcagataagtacctctttattctctggatcaattgcactaagcatttctgtaagaacatccattatgccacgtgcattctgaatttctgacaagctaacaaaagcaattctatttaaccaataaattcatgataacatcaaccctttaaaagaataacgtgattgaccaaacattcaattttcccttgattattatacatacagacaatatctcaaaataaagctcaagaaccttgcctatacggacagaaattagcagataaatcatctggttgtttaaaattctaggatgcagtataagcttgtcaccaactgactactttctaatattagagtaacagattaatgcagtgtcttgccatgcagttgtaaggtataataaatatttcaaaaccatttattcataatgactaagagcaagtgccatcaagaagattaacgtagattttccctcaattcatatagcaatataaggatccatgtatgcacctcaaggtaggaaactcagactctgcagatggcgcagctgtggctgtatcttgatgaacgtcagaattccgcagattctgaggatatgaagacaatggttgggtttgtggaggggtaaagaccggtgcagctctctcagatctctgtggaaatactgctccagcacgctgaaggataatagaaaacagtaataaaattatatattgtaaaagtgagacaaaggtactcaaaaaaaaaagttctcgtgtcaatgaaacttcttatttagttgcaatggcaatagatccttgcaatgaactttaaaaaaaacataccaataattcctggtatgcagcatagtattgtggatatcttgctcttgctcctccaaaggcttcttgccaagtatcaaccaagattaatatcttctctttgacatgtaagtcaggctacaggccacataaaaataaaattaaaaaataaccatgaaaaatgtgcagaagaactaagtgcaaaatataggaccaaccaaaccattgaataaacatcaataccttcttctttactattttcaccatctcatgaagcacatctttctccgccacatgcatatggacaatgtccccacaattctttataatggtctccaaaagctaaaatatagcaatcatacaaaacagaaccattcagttctatgtgagataaactcgtataaaaaggacagatgaaactacacatatacaataatcaaaattaaacatatattcaagagtatgtccatctataatggtctcatagtacacggacctttcatcagtttaagacaatcaaaataagtgtttcagttcgcattcataattcataatacgacatacttctaaaactgaactacacacttaatttaaagactggaaaaagcaactatctatgagagatctgagaattttcctaagctagtcaaaactagtttctttcttcttcttaaaagaacggagatgtactgaagaaaacccaagaacgatgcaaaacgccaaaactcataaaagaataaaataaaatggggatattaacaataggaataggattacaaaaccatcagcttaactataagcaatcaacaagtaaatcattcaatcttgaacacaatctctcaagtgagcaaaactgtgagtgaaagagaagttaaaaccaaaattttagcaattaataagaaactgaagcacttgatattccggaagacatattataagagctccaagcaagttaccgtgagagcaagaagttgaactttcgggtttctacttccaatgcgtttctttatacctttaacaacatctttagcttgcctggtaatgatacttcagagttagaattccaaagttaccaaaaataaataaatatatcccataaaaaagataataataacaaagaaatatagaaacacacagttaaaccacaaaaacagaactaaatcttaaaacccagattcacacatgcattttattcattctggattctcctctcttattctatagttagagtgccaatcatccatcctggttcctcatccactaccttttttcttcatggtctaaactaggcattttcgaactcccaccacacaccactctacaaaaggaccacttcagtactgctccagtaccatagagcagcaaccttgagcccaggaaacctaatgaaatccaaatttatgatagcaagcttcgaattttccacacatcattaaagtagagtatagaatagttatcaaattaactcattcctaggtcttttcttacaatcaaaacaataacgagctaaaacaaggagaacccattaccataacagcctcaaatatctaaatctagacaatactttactcatcaaacatcataaaaaacgaaaataacggtagacacaatttcagctacaactctctctcaattctcaacaagctcgaaacccaatactccacaaaaattacgtgcatcaaatttttgactcacaattgaaccacttcaataaagcaaataataataaaaataagaaaaaggaaaggatccatggggacacgtacccaggatcgtgattgagcatatcgcaaatttcaatgttcatggcccaatcaggaccgatgagcatgtcgctcgtggcgcgttccaccatagaattcaccatctccgttcacccccaacaaacaaaacgcaccgatccgaataacaagtcctattaaaccaaatcgactcactttctccttaagatcgcgtatgattccggcaactcacacaaatatttcggcctctctctctctctctctctnnntctctctctctctctcttaaacttcttccctttgctcttttctctctcttcctctctgagatggttgttctccctcttggagaaataaacgatttctttgttgtcaattattttatttttcttgttcttttttaaagaactgaatttaaatctaccaactaatcacatgaagccacgtgtcgttatttgaacacatcgctcgcttggccgacttttttgatcggacggtaccgactgttttattgttcaattagtttatggtactttcattgttatgacccaccgagcgaacttccctaatgtacatttttgtaccctttttttaacaattttgtttggtaacaatgcccgtcacactcttttcaaatcaaagagaaaaaaaataattgtgtaaaaaatcctcaaaaatttagagtatatctaatgatgttttctatttttcacctaaattatttttgccccaactatgctccatgctttagttagaatttaattattttaatgatattttataatttaaagggtaaatactattttnnnnnnnnnnnnnnnnaaaagttactaattggaccctgtattttgtt

SEQ ID NO: 111491 - DNA, 7505 bp, Cannabis sativa
aatgtattttaatgctactgaacaaattcaggactttaacttaaaaaaggcactaatgtctcccaaatacaatttttaaacttataaattctcatataattggtaggttcttccataaatatcggaatcaaatttaggaaagtaatatgtatttggacataagaaacacatgagaactgaatcgaacaagaaataaaaatgagacaagagaggaagctgtctacatctttctgagcttccgagaatatatataaacaaaaacaactcattacatttacatgggtcaaattcagacagtcggaccacccaaaccacccttctctctctgtctatttaatttaaaagatagctttttttttttgacagaaaataaaataaaaagaaaaatctgaataaaaataatagttattttagttatatcagtccttccttctagaagaaatttgaataataagaagaagaagaagaagaagaaggacgatctcattctcattacatacaatcaatcaataatttgattttctaccttctacgtgggggagaggaaagtagacttttttattggattatttattgataattttgattttaagtttcgatctcgaatgggtttttattattgtcgccacccattatgacttcttcttctcctttttcttagttttcttgtagtagccgccctctctctcctgttcctttgtacttttctctctctctctctctctctctctctgtagcttctaacaatggctttgacctttagcgtttatcccttgttaacaacacgtttctttgatgaccagctcatttgtagccgaagagaaccaagcttagtcaccacaccacaattcatttcctcttcttcttcttcttcttcttcgtgttcatagttcttaactctctaaaatgctgccttggtcagcaagcgagtaagttcaaaaccagagacaaaaaggaaaaaaaaaaccaagctttgaataaaacgaaacagagttctttgttttacttctcaaagatttgatttttcttttcttgtacagcttattcgtttataattaattaagtagcgaactgggtttcttttctttagaacagttgtggtaaatttcattcgctatgattgatttcttcatcatggtatttcatgaatttgacgattattgactcagtttcctcagatcaagcctttagattcaaatctccccgccataactgtagtttctaaactttcaagaaaacccaactcaagttgggatggactccaaatcaccagctgaaaactctattcatatagagtcaactttcaatacttcatcatccagaagaagcatttcttcatatcagtccaggacctcagctgcaaattccattagagaagtgaattttggtgatctgggtccgaagcccgtgaggtatgggtccagagcagcagattccgaggcgttcagcatgtcattaaaggagattaacgacgaggacgcgaggttggtatacattgatgatccagggaaaaccaatgagagatttgaattcgcttcgaacacaattaagacagcaaagtattcaatatttacattcttgccaagaaatttatttgagcaatttcacagagtcgcatacatatattttcttgttatagctgtgctcaatcagcttcctcaactggctgtttttggtagaacagcttccattttacctttggcttttgttctcttagttactgctgttaaagatgcttatgaagattacaggcgccatcggtctgaccgaattgaaaacaacagattggcttcaattctggtcaacaatgagttccagccaaaaagatggaaggatattcaagttggtgaaatcatcaaaattcatgcaaatgaaactattccttgtgatatggtgttgctctcgaccagtgatccaactggggttgcttatgttcagactatcaatttagatggagagtctaatttgaagactcggtatgctaagcaagaaactctgtcaaagttgcctgagaaagaaaagattagtgggattattaagtgtgagaaacccaataggaatatttatggattccaggcaaatcttgatattgatgggaagaaactgtctttggggccctctaacattattattcgaggttgtgagctcaagaatactggatgggctattggggttgcagtgtatgctgggagggagacaaaagctatgctcaacaattctggtgccccttctaagaggagccggcttgaaacccgtatgaacttagagatcatcattctttctgtgtttctaattcttttgtgtagtgttgtgtctgtatgtgctggtgtttggttgaggcgccgcagggatgaattggattacctcccattttatcggagaaaggacttttctaagggggatgaggagaattatgagtactatgggtggggaatggagatatttttcactttcctcatgtctgtcattgtcttccagattatgatccctatttctctgtacatttcaatggagcttgttcgagttggacaggcttattttatgatccgagatgcacaaatgtatgatgaagcctcaaattcaagatttcagtgcagggctctaaatataaatgaagatttaggacagataaagtatgtattttcagataaaaccggtactcttaccgagaacaagatggagtttaagtgtgctagcatttggggggtggattacaatggcagcaaagagagttcagaaactgagctcccaggttactcagttcaaggtgaacaatttatgtttttgagattattttctttgattagagcttattatcattgtttggtctcattgcattatcagcatcatcattgtcatttcaacctttgttttggtatatgctgtttttttactactaaatttacttattgaaggtttgaaatttgaattctttataccttatctgtattcagttgatggaaatactttgaggccgaagatgaaggtgaatgttgatccagagctcctaaaacttgcaaagagtggacgggatactagtagaggcgcacaagtgcatgatttcttactttccttggcagcttgcaatacaattgttcctcttgtgacagatacatcagatcctaatgtgaagttgatggattaccaaggggagtcaccagatgaacaggcattggtttatgctgctgcagcctatggatttatgcttattgaaagaacctcagggcatataattatcgatattcatggacaaaggcaaaggtaattttaactggtgtcatccttccatacttacctggttgctttttgtcttaatactgttgaagccttactgatattgcaatgcttattaatcttgaaccatgcaggttcaatgttttgggtttgcatgagtttgatagtgatcgtaagagaatgtcggtcatactagggtgccctgacaattctgtgaaagtttttgtaaaaggtgctgatacgacgatgtttaatgtgattgataaatctgtaaacttaagcatagtacgtgcaacagaaggccatcttcatgcttactcctcaattggtttaagaacacttgttgttgggatgcgggatctaagttcttcagaattcgatcagtggcactcttcgtttgaggcagcaagcactgctttgctgggtcgggctgctcagcttcgcaaggttgctagcaacatagagaaaaatcttagaatacttggcgcctcaggaattgaagataagctgcaactaggggtgcctgaagccatagaatgtctaagagcagctggaattaaggtttgggttttgacaggggacaagcaagaaacggccatatcaattggttactcttcgaggctcctaacgtctaggatgacccaaattattattaacagcaactctaaagattcttgtagaagaagtttacaagatgcaatactcatggctaaaaagcttgtgacggtgtctggggtcacatacaatactgaaggaacctctcgagatggtccaactccagttgccttgatcattgatggtactagccttgtttatattcttgacagtgaacttgaggaagaggtaattgattcttgatcaagttttcttaagcaagccttgaatgatattttaaattatagctaacttatgcatttcaaaatttcagctctttgagttggcaagtaaatgttctgtagtgctatgttgccgtgtggctccattgcaaaaagctggaattgttgcccttgtaaagaagagaacttctgacatgacactggccattggagatggtaaatttcaaactatttattttatcttatgctcccaaaaataattatttgcactcatagctgatgttagaaatttctgtgggattgtctcaggtgctaatgacgtttcaatgattcaaatggctgatgttggagttggtatcagtggccaagagggtcgacaagctgtaatggcatcagattttgcaatgggccaattcagattcttggttccccttttgttggtccatggacattggaattaccagcgaatgggttacatgattttgtacaatttttataggaatgcagtatttgttcttgttttattttggtgagtaatcattctctctctctctgctcactaaagttttactgtgctagagaaagattgagagtttaatatgtctagagagctttctcttgcttattatctatcttatacgtctcacaatttcttgtaggtatgtcctcttcacaagtttcactttgacaactgcaatcaacgaatggagcagcgtgttgtattctgtgatctatacttcggtgcctactataattgttggaattcttgacaaagatttaagtagaagaactcttttacagtatcctcaactttatggtgctggtcacagacaagaaagctacaactcaaaactgttttggctaacagtaattgatacattgtggcaaagtctagtcatcttttttgtccctctttttgcatactgggaaagcaacgttgatggatccagcttgggggatctttggactgttgccgtggttattttggttaatttgcacttggctatggatgttattcgttggacttgggttactcatgctgctatttggggatcaatcattgcaacctggatttgtgtcatgatcattgatgctgtaccatccttagttggttattggtacattctcttatctaataatatcaagtcttacatctttatttcttcagacaaccatttttcatgtcttcgatttaattcataacatttgttcaattgtgtgtggagactgatgtttgcaattataacattttttgctgacagggcaatctttgagatcggaaagaccaggttgttttggtcctgtttacttggaatcattgttgcggcacttctacctcgatttgttgtgaagtgtcttcatcagtattatagcccttgtgatgttcaaattgccagtgaagctgagaagtttgggaatccaagagagttaggtgctgcacaaatagaaatgaatccaatcttggaccatccacagagatgacaaggtgattttgttcctttcttgtataccgttctatttcattcatatatagttttacttattctttaggctgctctagagtctctttttctttctcttggttgcccgattttcatttggtgctatccgaaggatagagtttccgatagcagtagatttatattccacttctcttgtagtttgcatacataagttaatgtaaatcagcggtgtgtacaatgtaaatgagttccaattagtcaattgtaaaatgaaattcacattattgaaagagttaaaacaagattttttccctcgtaccattctaatcttttctaaagatttggtgtcacctttcttgtagagtaaagtgatgtgtttctctgtgttgtagtacctatagttgactagctgagtggaaactctactctaactcaatcattttctcattgcacacacaacacaacaatctcatgttaaccccattagtttcttaagagacaagaaaaacaaagctatctcaaagggctaaacacaagggtggttgttctgtcctgactaataccaaaatggctgttttgtttgtcttataccaatgatagtagatactataaatataactatggatgcagtttcactcacatgcaatactaacagaacacgaaaactgatgtaaaaaaatatcagcatagataggtatagcctattgtcagtgacttttctcatatctttagatgatgtaaagtaaaacactgccttttttctgggctgagggtcagcgtcctctctccactatgcttgtccttttgtctatttgatatcattttgtttgttgctttgttttcttttgtttttcttctactgttttgttcttttgttcaccaattttgtttttcctttgaagaaaaacaggtttgagttgagttgctttttaatttggacataaccatttgtctcagttgacgggtgcaattgcaaaattgtttttatttcagggtgctaattgtcaaagcacaaaaatttaagcacttctttgaaatttttgttaactaattaatatggaaacttaatgactacacaatatcaaaagcaataaattatcaaataatttttttgaaaagtctatccattttgtggacagattttgtaaatagataaaaaaggaaaagcttaaaggtattacaattattgtttcaaatgtgaataatttgtaattttcatttatttaattttgggaccaccaattaaagacatggggttcttcaatgcagcacaaaatgtgaatcaaaagccattagagtcagatccaactcaactattgatttgtcacattagacaaatgtaccaattatgtattcggtgcccattatgaaaaaatgaaatgaaaattacacttttccccaaaaatcagagcatgtcgcataaaatacgagtaatattaatatatcatcaaaatttacataataataatttcaatataactcagttcatactcacgtgtcattgtcttttttggcctatatagtcaaattattgtacaaactacaaactcctagacatgtaaaaaaaaacctgaattaggtggaaaactgaaaacatcaccacttaattacctttacttttattttgcagtttaatccctatattagtgattattataatactttgcatgtaaaagtaaaaaaattactcatggcttctgtgtataatgtagatagacataaatgtggattagatttagattttatttatttattttactttttgtaaattaaattttggagaggttttggtaacatattattgaaatggttaaagcttgttttgccgtctaaaaatttcaccgtcgaattcgccatccattacacgcttcgtcgttccgttaacccatcaacccaaccaaagctttcttttgccatcgacaccacaccatacccattttcacaacaaagacttctctctctctctctctct

SEQ ID NO: 111492 - DNA, 1408 bp, Cannabis sativa
aaaatgtgatttctgatctttattaattggtaaatctgattatattaaaatgggttttatttagggcaaaaaacccaacaaattgggtagcatgaagaaaaatattcatgacataacttggaagagcttgagcaatagacttgaggagaatcctttcctaccctcgaaagtcatttccaattccaactctccaccatctttttgattttctccttcacaaaacccaaatgagtcattttatttcttcccatagtgctaggcaagccatgatatttactatcttcatccgccacttgcatgcctaacacttcttgaacccagcgccaattatatttagaggtattagtgctagaaaaatagagaagattttgcaacattcaccttctgactcgagattctttcaaaaataggcaatagttccagaacagtattggcttctctatcatttgctttgtagtaaagataactatcatctgcaaacaacatataagaaatactcggcccctcctagcaattttacacccatgtaaccatgttcttatttcatattttttgatcaaactagatagaaattcgacaaaaataataaaaagatatgtagatataggatcaccttcaatctatcttatcataagccttactcatagttagttatagtgccataaaaccatctcgcccccactgttttcttttaagataatgcgacacctctaagcataccaaaatgttatctgttattaatcacctctaattaaaggcactttgaccctcagagataacaagatcaagaaaaactttaatacggttagccaaaacctttgtgataacattacaaagtgagattggccttatatcccccatccaagcaggatattgtttcttagggataagagaacttgatttgtagcattgagattacctgacataacaccccaaagaaaaatagtcccaaaaagtttagaccacatcacctcccataacaacctaaaatttctaatagaaagtcggagtcatcccattaggtccctgagatttgtctggatgcatctaaaacagagttgtcttaacctcacccagcgtgacaagcttcaacaactcaacgttattcattgaaatgatagattttttctttttttttttaattcaaaaagtaaaataccaaaaaaaaaaaaaaagttcggtaaaactttttgcatttttttttctttgttttagtttaaaatcaaaatttaaattttcaaaacacaattatatagcttttaaaaattaatttttcatttctctcttccctaagcacttgtaaattcttcttttctattccatgaccgactgatctctgatttattcatcatgtggggcttttacttattttactctctttctctctccctctctctctttctctctc

SEQ ID NO: 111493 - DNA, 3591 bp, Cannabis sativa
  modified_base (3230)..(3232): a, c, t, g, unknown or other
aaaaaaaaaaaaaacttaaaatatttaagtgttataaacggaaaaacttaaatatttttgacgtcaattaataattcaattatatcatatattataatgatttaataaattgaaaatatacaaaaccaaacaggtaaatatccaacaaacaagaactgaaaaatttatatttctaataataatatgttcaagaagaaaagtattatgatatattgaaattattcatttttctttttttgacttttctataaaatgttgtaatatcccatcatataatttatatatcatgttcatgtgtgtgttgaataataagaccacaaaagtcactgaactcacatcacatcgtcgattaatttatttattttattggattaggttaatttataggaagttttagatgcatgttttctaataatatatttttcatagtatcaaaattgtacatatttataatgtaattaaggattaacacaaagtcaacatggtcactgttcatcgtactattgcaacagtatgcagttacggtcacagttgctctgatctttaggaatttattgtttcaactttaattttttaattaaaaaaagaaaaatgagtcacaacgcctgtggaggcaatcaatattatctagttattcatgtacatgagctaccctacccatattatcaactttttttttttttaataactaataatatagacacatatatttatagggatatgattttatccggtgatatatttttatggaatatattccgtgttacattagatgggtctcaaagtatattaaatgagtgtcagatacgtttatactttttaactttaattaggcctagatcaatctcagccatcatatcaaataactcactcatctaacaggtggcgtacatcacggattacaatccgtgaaagtatacaataaggggacaaaattatgtccccatatttatatcccaataatgtgatgagagtactgagtacgtagtactggtatataaatatgtgtatattattggttatatggaaaaaaaaatggttatattatgatatgatcaacttataggctatagcttcatgcaaactgaaatcgtcatgatgataaccgtttattagtgatgaatgaaggcctttgattatgtaataaacctaaccatcataggttataaagccgttatatttcgatagatatatcagttgggatttggaatataaggaggggtagttacaacctccttagatttttaattaaaattataaataataattaataagaaaaataaacagcactagtttttaatcaataaaaactcccccaaagatcatgcagagagaaaagttgagggtacatattatcataaataataataataataataataagaacagaatcaaacgcgttgtgtaaccagaaaagagagtcgttatagaaaatagcggttttgcggttcatgccaacgaccctctcctccaatatttttataagttagttcataattaatcgaatgcaagtactacttgtactaatatatatatacaaattaaaaaccacttcctcccaatatgtaagaagaagaagaagaaaaaaaagaacactagtgatttaagttttgttattattattattattttgtgatgtttttatatctaattatttaagaagagtgttggtatatgaagggtggggatcgaattaagggttcgtggagcccacaagaagatgagactctgaaaaagctagtggaacaacatggcccacgaaactggtccgtaataagcacaggcataattggtcgctccggtaaatcttgccgattgaggtggtgtaatcagctgtgcccgagtgtacagcaccgtccttttacgccagaagaagattccatgatcatccaggcccacgcagcccacggaaacaagtgggccaccatagccagactcctcccaggccgtacagacaacgccatcaagaaccactggaattccactctccgccgaggccgccgcgccggagataagttctcctcctcctcctttacgtctgattctgattccgttttcccgaagcccctgtcagttggaggatcggaatcttctgagtcggaacctgagccggcgatgaagcggcagtgcttgttgcgatcttcgccgttggagagcaataatgttattaatagcgaaggagtgggtgaaatcgtgacctctcttacgctatcgccgccgggggagagctcggtgtcggcgacggaggttaagttaaacaacgttgttttgaagagggaggaggagtcgctgatgttcgcggcgagtggtggtcatcgggagaggtgtacggcgaagatcggagaaacgtgttgtattacagatattcagcgaatgatttctaaagaggtgaagaattacattgatactttacgggcccaagatgggcttgcaattgggcttcaggcctcggttgaaaaaaggtcctctctataattaattaagtaaagaatttaggttactattaattaatttgtttctccagagtcattagtttatctgtcaatatcacttttttttttcctttcagtttgtcagtttctgatgcgtgtaatgataattggccatttaatttagtcgagtttttatgatcattttccgatcagttttttctttttttccatcaaatatatctttatggtctgacctaaaaaaaataaagtaggcattacacttgcaccaatttccaagtgtatcaatagcatagcatagtgtcatgaaccggttatttggacatttccaagtaggggacgtgcggcactttgagctagcaggtgagtctaaatgtgcttgcacatgtacagtgcaaccatgaagtatgagcaatcacaacataaatcattctaaaggataatctcacacaattcacaagtaaacacataaacaaatgacttttaatgaccaataaagataacaaataggcactggatagacaaaatagaagcatacatttggaagtacagataaatatcatttttattaatatattgagttgatttggcaagggagtacacaattggagccctatcatgctagtgacaaggtgcttcataagtcaccagatcactccccctaaagagcttgatggggtttcaagagatttccagtttcaaatatgattttagctttacttacaagtgaaagaaaatacaaacaaaaagcaagactgactaatgatcaagcaccaaggnnngctcatgttacaaaatggccccttgtgggtacgacatgggccagtacgacacattctcccccacataatttcgtcgtgtccctgacgaacctactacatgaccttcattcttctgaaaaaactaatgcaattctatcgccttctcctgactgatctcatcctcagtgagacccttccatttgatcatgtactcttttctcttctttctcttcacatgaatagttctttcttctggttctctgctgttgtgtcgtcgtatgctgatgtcattcctggtacactggttgcaagttggatatttaggatcttcatgatacggcttgaggttgctgacgtgaaggaccgggtgtatcttcatc

SEQ ID NO: 111494 - DNA, 6158 bp, Cannabis sativa
gtatatatattattatttttaaaaggaaagccttttctttataatataatatatgtataatttaagaatcatatatatacatagttataattagtcactgaattataaatatgctatatgtatatatattagagaaaaggaaaaagaaaggaacgagagagtttgaaattgagtgagttgttatagtctttagagataactctttctttgggaataattcgcgcgaaaaaaaaaaaaaactaagtgggagaagaaataacgcaattttttttttttttttgctttggtggatagctgtggcaaatgtattaatctcattttcaaacagaagtaaaaacaattagcctcacttttccacaaagcaaaatgtaatagacaaattttaaaaatttcacttttttcctcgatccttcttttagtaacgggaaatgagctgacgctaattgatattttttagcttcagttatactatgaagcataaatttctgcctattttttgcctctaaaaattattttggtgagacgcgttgactaacgcaaatagcgccttttgtagtagtgctctctctctctctctacccacacaccaatttctctctctagagattggtgtgttttctctcatctcagttcatagtgtctcatgaattaagtaacattgtgatagaaaattcatccattgaattaatcttataagctcactcttattctgagtgttgaggattaatttggaagaccctagggtgaaatcttcatcaagttcatagcaactagattggatgatcgatattaaatacgaaaagaatttaggataccttgataggtattaagaggtaaaaaaatctcgtagtttagatttaatttatataatcatgttgagatccaggggcttatgattcaaatcagattcatctaaaatattttttttttataaagattggcttccattttctactctaatttggaccataaaaaccaataatgacgaccaattggcatttaaagaggcattggctattcttgattggaggttatggttagacgcgatgaaccatgcaagaaatggactttacgagtccaggtccaggtttaatgtctgagtatgggacgagatccggggatgggttttgggtctgagttcagggtctggggctgggtccagggaccagggctaggttcggggttctggtccgggtttgggtccgggttcggtgtttggggctgaggtcgagttcggggtctaatgtcggggctagggccgagttcgaagccgtgtccaaggccagggcccgtgacgaggctaggttcgagctaggaccgaggtccaatttcaggtcttggtttggggttcgggatcgggactaggtctaagatcagggtacccaaccctagaccctttctaaattttataatataagttaatatagattatttgttatatattaaattatatgattcatattatattaaaatttatggtcataataattaatacaatacaatattttatctaaacttagtgttacttgttatttaatacaatatatgactcttacacggactatcaaatgagccttaaaattttaacaaccctagccttttaatttcaataaaattctcatcatgcaacaaataaactagagaaaaataaaattaaaagtctcgactttctaagtagcagttgaaccaaagttacataaccattcgataactagcttacatgatacggtcagacaatgaaggaagtcttttgaagaaattcaatgctggagatggcttcctatcacgaaagattggatgacgaaaataatagaatccaaatgtcatggcaaccattttagaggggatcaagtacaacatcattgcaactacaaaacacaatcctataaaaattcctgtggcccgtggatcacaccacgtaaccaatgcttgcaaacgttcaccttgtgttgccaaatctcctaaaccattttgcacttttgcccctaatattcgaagtttatcatacctggcttgaattgcttcgggttgtttacaacttggcagtgtgtcaaattcctcatctagctcatcacggtccacactctccaccaatgaaagttttggatcaaaatgaggaagtgggtatcgagatcgaaatctataattccaagctccaaccgcaaagacatagaatgcaagagtggggacgattagttcaggaaaccacaccaacatcacgagtaatgcatgcacaagtactgtagctgttggatttttccacgttcgtgtattgtcaacccaattaacaacatcaatcacattaccaattacattaataattctcaagtaattcactcgaacttttctcatactgaacacgttcgagtcagcatcaagcatataaagcacaacttcacgccgaagtggtggctcatgtcgcgaaaagtgtgaggcaatgatcttcatagtggtgcttctcaacacatcttgttgagctagcccgagaggcttaatatggtgcatcaacggcaacaaaggttgagaatacacgtggagcaaatctaaagtaggactcaccttcacaaaccgaatagcaatatctacctcacccattttcttcataccacccggagtcaatactaacaaaggatatgtatttttgtacactttgccagtagccaacgtggatatacgaatccgaacctttccaattcggtaatcgggatgtgttgcatcatcagtaacctcaattaatgctgaagtttcccagctatcaaacaccccaatcgtcaaaactgtacaaggatcaaacaccttgaaggtgtactgttcgttccacttagggtccaaactatccgaaatagtgcgagttcgcatccacttcgaaccgtactttgccacacagtaagcgtccgtacaccctttaccgtcgatggtcttgaccggaacaagattctttgcccgaatgataccgagttccactgtgccaacaggaggcttccagagttgcctagccgtggggcggtagtcgctgctcatgtgtgcaacctcatccatcacgtgatatccgccatcaaaacagagccttaggtgaacacgtccgttataagttcttcttttctcatcctgaatattttcaaggctgagccaccgtgacgctacttttctgtcatccactctcctctctacaacagtaagaggaattattgccgttcccaatgtagtttgtcccttttgatgtcgtatctcaagagtgattacaatgtgttcagagaaaggttcagcagcaacgaaaataagatcttcattccacaggggagtgctattgcgcgtaagagaagctttagtcttttgaatttggggacccaattgagctttgacttggaagcttaactccttaaacgacttcattatggggagaacatcttgggcttcaatgactgtgatacgaagataccaaagtttgggagattgataaattttggcacgagcgtgtggatttccagaaatatctgatttccacgcgtcagcaaatgattcatctgcctgggtgcctacccatgttgctagcatgaggtccccacagtgagctccgcccccttccaatcgataccactgtggggccaatgggctgtccggtgggtcccgcaatggaatttctgtcgcgtcaaaacaaattccacccaagaagtttttgctaattgccacgtcggatgtgggcttagagttgggtatgtcccacacggagacctctagtgttgaggaagattccggtgagtcacgggaaaaagcgaaggtctgatcccaatcaaagaacgtcgttttcctcgctggtttcgatctgacgtggtaattggatattgatatctccacgattgggttgccttctgtggggagtgatctggctttcacgattcgtacgaacacgtagtgcatcttctccactagatcgaatgaagatcgttcgatcgaggtgaccatatcggacatatcagaactaaatgattctaaggaaggaaatggtctcgtcataggcctcggaccgttaatattaatcccagctgttcttattttaggcaacggccttgagacggaggaggccatcatgtctagttcagcttcacgttgcatggttttaggagttgttggttgaggcggaggcggaggcaagctattctccggtggaatttcttgtggcggagcaacttcttccactttctcttccttaggtggttcagttctcggtggtgactcagtagacggagccggaggctgatcaaccttttcagcctgatcagcagcattattttctgttgtgtttgacttgggagctggtggctcgggggtaggctcgggagttggagtcggcgctggttggggctccggcttcttttcctcatccgttagtggaggttggatgatctggtcggcgtagtagactttcaagccgatatcaccttgaacccaactaaacaagtgtttcttttcaagagtaaaatatatgagagcctcttctcctttcttaacgaactgagccgtactgagtcgaagtctgccgaggaagttggttctagtggtgggcccgtgagatttatcgtggaacacattgagctccaaaatgtcctcgaacacttcagatggttttccggcattgaactccagcacttcattccacgtcggattcaggtcccgtaagatagtctgggttcgctttcgttgaccgtaataatcaaccgttacgtacggactcgacgtgccgtgaccatctttgggcaagaggttacgtgcgtccactacttccactatgagcttctgtactgcggtcgccattattattaatggaattttacaataataataatatataagctcctacgggtgtttgttattatggctctgttttcttaatagtgtcatttacttggagttttcttttcttactgagatcagtctagtatgtgggaaagttaataagggagaaaaaagaaagagtaatggtggaaatattagttgtatttgtgtagataaagaagaaaatgatgtaaaaggaaaggtacatatgagaaggtatgcttaacttgagtaagaagaagctttttttagaccaaaataatattattataaacaaactatattctcttgatttctctttatcattttaatacatttatctttatactttgttatacatatatacttttctttaattcacactctgaacaagattctcacctcacagtcacagtgcgcctttgctttatttttttgtcctttattttgtagtccatataatatgataatattattatgatagctagcaaggtatgattcccaaagagtgatgacttttaaatcaccgaccgacctttgatttatttgtcacaaatttaatgctttcaaacactgcaagtttgacaaagatataacacgcggtatctagtcatgatcccatttcacgcatttcaataaatctatatatctaagtttagttcatacttctacttcatacttcataatttccatttattatttatttatttattttttccaaatcgcatgtaattgtaatggaatagctctttatgcatcctagttggctgggcgcaaaggctttatcaaaaattattgatcttaaaccccttttcccatcacagtggaaactgatttttttttttagaggaaatggccttttaaaaaattacaaagaacagaggaagggctcacttccatttcaaacccaagcgatatctaacccgagtataaattgagcaatgttttgggctgttgtattccccgttttatggacatgggataggaaaatagttgagaaggaatataatattggacactataacagtgaaaaacgtaattattttagttattgaaaaagtaattacactaagacttgaatacttttattagaccagaatacatcaaacacttactcttttattttatcactagacacctttactacacatttgtgtataactcacactttgggacactttgtctttagacacttactaagaactcacacacttagactctttttctcacacttgaactctcttgcataaacttgcatcttaagcacacacctcacttttatttactatttataggctacaaaagatgtatctaaagatttctagatttttctaatttactaacta

SEQ ID NO: 111495 - DNA, 10025 bp, Cannabis sativa
aacggccaaaaaaatttaggggcatgatttgatacatgtaaagttcagggaaaaaaattactaattagccaaaaaataattagcattagaacttgaatatttacttgtaaatactcagatttctatacataaattaatatataattttttttttatgttttaatagttttaattatagaattataatattaagtattatatttaaattttcttattattttaacttatatataattgataaattcatatctcattattattattattatgattaaattgtaagattttttaatatgttgtgtcgtgtttttcgagtttgttgcatagcgtgcatttcgggatagtctatttgtgcttatgtgccatgtctttcgtccttctcgtgccgtgtcgtgtcaatttgtagcatcgtgccgtgttgtgtctaagtccgtattttttcgtgcctagccgtgctcgtgtcgatttcgtgccgtgttaaaaagcccggcttatatttacaacactaaatttgcaataagtattttaattctgcagtatagttttatagttttatatacatgtatattttgatagtcgtatatttcagtaattacagtaattactgagtttgagtttatattgggtgattctgaaactaaatataaacgttttattagctttagttttggtaggatgaagatgtctgcaatttggattctcttgtagtcgtacacataactatggagagcccggctgtttcaagtgtaattttgcacgagggaaattttaatgattttctgtgctttatcctacctgaccaatgtgttttttttaattcaatgtttgtgatgatatgcggatgctttatatgttcagttttattttatatgttccaaacttggtgttgttgtatggtttaattgtcctttttggtaatcttgttgctgatgatatactgtatgaattgggagctttgtagaggttaggttgttatgcttttccatttctcatcttgtggtttgtcatatttgtttcattcattaatcatttgcttatatgttttcaggtaatatattactgtcattgtattgaattcagagaaatggttagctttagcctttcaataagaaaagatcggtggcattatgttttacttaccaatggttctttcaacctggctttctttggttcttcatcagtgcaacatgaatgtatccctcaagctattctaggtatggatgttatatgtcaagctaaatctggaatgggaaaaactgctgtttttgttctgtcaagtctgcagcagattgatcccgtggctggccaagtttctgcccttgttctctgtcatacaagagagttggcttatcaggtatattgaagttgtgactgctttgtatacaactcttctcttatttatgtttagttggctcacttgtttagcctatgttatggtagatatgtcatgagtttgagaggtttagtacctacttgcctgatctcaaggttgcggtcttttacggaggtgtcaacatcaaactccacaaagatctactgaaaaatgagtgcccccatattgttgttggaactcctggaagaatattagcactgaccagagataaagatctttccctgaagaatgtgaggcattttattctagatgaatgtgacaagatgcttgaatcacttggtatgagagtgttttcttattatatcatccagtctttggatactttctggtgtcatatattttgagagtttctcattccatgtgttttgcagatatgaggagagatgtgcaagagattttcaagatgacacctcatgataagcaagtcatgatgttttctgcaacacttagcaaagaaatccgccctgtttgcaagaaatttatgcaagatgtaatgttccatggccagtactactcaattttgacgtctttttcataatcctgcttcctcgctattttcttgtggtcggtgtttaattccgtcataacaagtgctggttcttaggctgtacaatggggagtgagaaggaaggaagtaggtctaccttttaggagtttccatggttgtgggattagtattccatgttctacttctgtttttcttcaaattgttttctcttcatccttttgtttagcattgtgtttggtgtgggtttagttttgagtcatgggtactttgtggttgcctggggtatatggggagggatgggagtgtatgctgtcaccacaccatctgctgttcattgcttaatagagtggttaagcgccagtggtgcttgcttgatgtaacatagaaaagtatcttcgaggagacaagaggtggaccaggttcttgattcaagggatgtgcgtcatcattcatttcgttctggattcaattagcctgtggaaggcccctaatttgatttaatgtgacattttgttcctttcagcctatggaaatctacgttgatgacgaggccaagttaaccctacatgggcttgtacaggtatatatataaatatatgtatcttaatgtattttaactgtctttagatatgaatcttattcacgtatggtaaatgcagcactacatcaagttgagcgagtcggagaaaaaccgcaagttgaacgacctccttgatgctttggatttcaatcaagttgttatttttgttaaaagtgtgagcagagctgctgagctgaacaagttgcttgcagagtgcaactttccttctatatgtatccattcaggcatgtcccaggaggaaaggttaggattctaactcacttcttacttcccttgctcttttggttgttactgttttgttctattatgaatctcattttgtgtagcatacgattactagaacagttataatatatgtatggcttcaatgtagtaaaccagtgatcactctctgttcagtaatttcttaatctaacaaatgctttgccttgccattttgttcagttgatgttttaatagtgtcatgtgactgatgttcttttaccaaaataaaaaattagtgatttttgtttacacatgtatgtcatctgacatcacgtagcacctttcaattgtaatatgttgcttttattggagtgtttacttattcaagttaagtatatgtttaggttgaagcgctataaaggtttcaaggaggggcagaataggattctcgtggctacagatttggttggtagaggaattgacattgagcgtgttaacattgtcattaactatgacatgcctgattctgccgacacctatctacacagggtaggtttagtagtgcatatcattttataatattttttttattggagcatttccattggagtccaaattggtgatgcagtcctaaaatataacacacttttgaaggaaaaaaaagtggttactccaattgtgtgccaaaagctctgctaaattttacacacaatatagcatgcatgcttttttattatttttaattgaaagcaaatgaagactttttactttttatttttttagtggggatgataaaatagaaaagagaattactttcttcctcgtattttcaaaaatattcaataagctttttaacggatgattttcttttttttccttttttttatcaacttttaaaattttgcattggatcaaagctgtaaaagctgtgccaaatatgttaattgtttaatttttgtaccaaatataatcttatgttacaagttgagtagtgctttttacatgaaattctggccaggttggtagagctggtagattcggcacgaaagggcttgccatcacatttgtttcttctgctgctgattctgatgttctcaatgatgtaaaggatttaattttccgttcggcatctcttctttactctctatgtggtactgctatcgatcattaacgaaattttgttgtatgaaatgcaggttcaggagaggtttgaggtggatataaaggagcttccagagcagattgatacttctacatacagtatgttctctctcattactctttattttgggtttatgtcattttcattttcatattacgtctagggctcttcctttcaggtatgtgttgttaggctgatattaggcttctgctattttaattgtgatgcacaatactccaaaatttacaagacgataatcctgacctgaacaccattggtttggtaatccgaaaatagttattatattatcctaactgttttgagttgatattatttacagtgccatcgtaaaaggagggagtttgctcacttggcacggaaagcttcatccaccacccggagcaaagtgccttcgtccttcattcatctccaaactaatgtccagctgaagacttcagatactcttctattgtgtacacttatttttttagttcttctcgatcttattctaggtcttttacacatagcatctatttattaatgtatcctgatagatccaatcttaaaagtcctactctcctgtttgtgtgtttgatcaaaattaattttggttgatttttatctttatgttgtaggaaggtgagttatttgataacaccaggtggtttaatcgatactgaagtttataattagtcttgttttttatgattttggtgagttgtgagccttaattttaggtggtagattagatgcagcagatcattaatcaacgcacttgtaaacttttgaatattttcagttttttttttctattcattttagggtgcataatgcatataaacagtaataaaaacagaaagctaaggaattgatctacgcacacttacgggctagcagaattttttcagatttcaaaactgttcacatgtttaattttcttcctcaaattaatatttgtatgggtcttttcctaattaaattgtgagcgttatatcaatacatcttaatataatttttagatagtacataataatataatacaatattcttggctctatcaaattgcagaaaccaaactacaatattcttctgataattacagtttcgactctggcaagattcagtgatacacgaatattgccaaccctacaaaacgttcatcttattgcatcaagaaagccagagacaaaaaaatagtgagggaaacaaaaacaaaataataataatattaataaaatgaacatatttctgtaaaacataaaattattccattccatctagttaactatgttgaatatagatattaaaaggaagacgtatgctacaaatgaagaagaaaaaagcaatgttatgtgtatgtggccctactctagtctaatatctaatgaaactctattattatgtgtaataagaaaaaataaagagttggtttgggttgactgtgttacgttagtaggtttttttttttgcatatatttatttataaatagatataatggtacggaaatactggaccacgttacgtcgacgacgttaatgacagacaaatgtgtggggtccccactaccaatcccgcgtcaaaattaccaatataccatgcaaaagagagaagaaatgatcttgaaggaggggcattatagtaaaaatagtataaatgaagaaatatgagtagaaactagaaagtaatggcggcccgcttcgaccagtaagtatgtatgtatttgcggtgttcttctacggtgtcgtttttgagtaaataaaaatatgtgtatgtttgtgttgtgttttgtgttttgtgttttgttattctttctttgctcaactaggtagacaaaatgattatattacatgtcattatgtcattggcaaacctggaatttgacaaaaacaaatctctcaagatttttactttatttatattttgtcatttgtatttaaattaggctaaaggtggttaaacttactagagtagaagacaacacgaacattcacaaaagacaaaactcaaagctcaaaacctataacctatgtgcacatgcccaaatcctgtaaagggtaataactaataactaatgtatataagaataatccccaactatatataacaatatcctataacttttatatatacatatatatagagagagggagagtaagaagtaagaacactctaatccaaagtcttacagttctcctcccaccgttgaaataagccaaagcatttaatactctttaccaatatagttggcgatttttttttctttattatgaattgaatttcgtaattcacatctgaaatttattgtagtcccatctctcttgcctctttccttacctactctatttcttttttcttcttcttcttcttatttttcttttgttttatcataccaaaaaaaaaaattaaaagaaagttgattacagactgttttgaaacataggatgctggtctacttcattgctaccatatcatttttttcttgattttcttcctcttacaatcaaatttccccaaaaaagatttctgggttttctggctaaaacgattctagacgatgggtaatcgttttatttgcatgtcaaagaaggaaatcaaagataatggatccagaagtaagcgaatgaatcggtcacagaggaaattattagctgatgaagagttcttgcacaaacaagccctttccatggctcttcatcaacaccagttgtctcagagattcgatggttcgatgtcaaggaggattgggtctacaagctctcggagacataatctatcagaatcagtaacaaatggaaaactcgtatgttcttcttttttttattatttcatttttcctttgtgtaatcataatttgattggagttttttcaatgattagatctgtgattagaaaataagtaaatgaaatagaaaagtggggtttgaaaattaagatctgatatgggctaaaaataagctaaagccataataaagttttcagtatcttttttgttcaagcaaattttgtattttggctatgaagttggaaaagttaaagaatataagaataagataaaataaaatagtacctgaaagaacaagaattcagaattgctcttctaaagatgtactattttaaagtattatcatttccttgatctttagtttacgttttttctttatgtaaagagagaaagaaaaaataaaaagtggtatcaaaaagtccctttttttttttttaaaaaaaaaaaggcccacgcaaatgattatgtccctttgtttgagtatttttataattgaatcgttattgattgtaatgtggatcatggagtacgtactttggtcaagagataagataagagtgactctacttttatggtattttcctttcaagaaaaaaaaaacagaatatgttgtttatttagatggattaatatgagaaaaggggaagcactatcatattcttttgctagaatattgaaaaagctatagttatgctattccatttcaattggaaccatatgtggaattccttatacttgtaaaacaattatcttcaatgaatgcgtgtatttgtttcaaatttgagtacccttttggcataaaatgaaacttcattgtatatttctttttttgtttttcggtataggcacctgaagttcttgagaatcttacaacgaagaaatttgttttaatacatggagaaggatttggagcatggtgttggtacaaaacaatttctctgttggaagaaacaggattggttcccactgcatttgatctcacggggtctggaatcgaactaacagatactaatgctgtttgtacactggcagagtactcgaaaccattgattaattttctacaaaaccttccagaggatgaaaaggttagaagagtgttgagttttttaatttatggaaatgtctatttatttagtcaaataccgtaatgtattgagttctgttgtaggttattttggttggtcacagtagtggaggtgcgtgtgtttcatatgcaatggagcatttcccacataagatctcgaaagcaattttcctctgtgcgacaatggtatctgatggccagcgaccgtttgatgtgtttgcagaagaggtaagcaataaatttttgtgtaactaagatttttttggtcttggaattagaaagtaaacagagataggtaaattccaaatgatttcatatgaattatgtcattacaagtttcatcagatgttttaaactataagtatacaaatatggtattgaaactgcttcagcttttccatatgtttcggtgtatgaacatttcttttttaatttttcatgccaaggttttgtttcaaattcacatacttccctattgtcaaactctttttcttgttttagcttggctccgcggaacaattcatggaaggatccaagtttttgattcatgggaatggaaaagatcaacctcctaccggattcatgtttgagaaagagcagatgaaaggattatatttcaatcactcgccaacaaaggtatgtataatgtatgttatatacacaaaagcatatatcattatcactttttcatctcggggaacacagatttttcataagcatactactaaaaatataacgttgcttatcataagcaagatcatgttaatacttttgagctcgtcatcaaatatatccagcatgattttgatgcagaaacatgtgtcatgtttacatcggtgtcattctttgattaaaattatagctagtgtgaccttgaaattggtttctatctcataaaaaagtaatgtattcgggcattcatcaaatgtgttcttcctagttctgtatgtatgtatgtatgtcacaatcgagtttgattttgttgcaggacattgccttggctatggtttcaatgagacctgtcccactaggccccatcatggagaaactgtcactttcccccgaaaattatggaaagggtcggcggttctttatccagacattggatgaccatgctctttctccagacattcaagagaagctggtgagggaaaatccaccagagggtgtattcaagataaaaaccagtgaccattgcccatttttctcaaagccacaagccctgcacaaaattttggtggaaattgctcaaattccatagtccaaaacaccaaattaagaatatgctttttctttatttatcattttcttcaccatatttatagaagaaccaccaaagatagttgagttattgaaagtaaggccagggttgtatgtaagaacatggtgtcccaggtgtgtgtgtgtgtagtcagattgattttctttgaagacaatgcaagtatcacactcaatgtggttaatcagaggttgaagaaatgaaatttgttgtaaatttcatctaaatagaacactcccagtagacaactagcttaatcatctttcaataaagattttattgatcgggaaatctgagcatacattaaaaaatatggactttacaaatcattggtaaaatgtgctttctaagaaaaattaacaaaaaatccctttatctctcctctcttctttctcactgcgcggggtggacatttcatccaattcaaatattttccatttaatccgatctaatttaattagtaattagatttaaaaaattatcattcgatccaattcaattaaggaatattttaaaaaaacacaaaaacaaaaaaatattattattataaaaatacggtctgtagaaaatttttaatatttttacaattttttagattttatctacataaaatacagtctttttatgttatactcttgttattttattgttgattttttattattatatattgttttggtgttgtttgttgttgttttgataattttttgttattttcttgtatgttttatagaatactgtaaaaatatatatataaaaaaaactttgaacgtaaatatatatatttttcttataaaaattaatattttatgtaattatcctttcaattaaactttaaaatccaatctaattagtaattgggttctattggttttttttaattaaatttcaattctaacacttttttttatattaactaaaaaataaaaaaaaattacataaaaactaaagggttaatttcacaaatgcacaaaaaaaaaaaataacaaaaatacggtttcacgaaatttt

SEQ ID NO: 111496 - DNA, 1053 bp, Cannabis sativa
cggatactaaaacagatagagatgtatcggtgtatcccttttaagggggatgcattatagaatttccctattatatttattattattattcgagatttcagaaagacgatatgtggaccctcgtagaggcccattacggatatcagatccatcccttggcacaatgaagataacttactcggtccatccactaagaataggcaaaaacaaacatatggtttgattcccgcatcatttattcctgacggatccagacaatgagtctcggatactaattctacacttagcatgcaaacacgtgaactcaaggaggatgcccctaggtgtaatccaggaacagaatatgaaaggtcgttcgggttcacatagtttctcaagagttgtctacgtggcacatctctaatagcatgatcctgagaatcaggcagccagtcccctgtgttaggccttggaaaggcacacaataaaaaggaaatcacttttttgggcgaacacccactattctaacattctttcctccccatgaaggcgcacacctcccctatcaatgtcaacagtatgaccgtatggaaggcaactcaatctaactttggccttacctacccgcctattacctcaaattatatttatattttaccctattagtgatctttttgcactacaataaccccaatgtttccagatcagtctgacccttcaaagatatatgcctataaatatggcattttccttccacacaaagggttggaatttctagtgtccaaaaactaaaaaatacattgtaaacaccatagcaagagcataataatagtgactcatgaactaagacttgttaaataatgtttcaatcgtgtaatatttttatcttattttctttctaatcttcctttctttagcctaaattttattatatttggtttttttaaaaacttgataaactgttataccactacaaaaaagactacttttagtaacaactttttagtcacaacaaaaaaaatttgtgactaaatgtgacttttagtcacaacaaaaaagttacttgtgactaaa

SEQ ID NO: 111497 - DNA, 5104 bp, Cannabis sativa
cagtttaggaaaaatttaaaccgcatcgcaaagaatttcaaaccgcattttttttgcggtgcgggcggtttgagcggtttgatgaatacccctacacccatctaagcacattgatgcaatttttttttatctattttggtattctgaaaaattataaatataatcgtacacgttataaatgaatgatataattatttaacatatgttatgaaattttaaaaaatttataataatttacaaaaaaaaaaaaaattaatattcaatgtataatttatttcacacataaaataaaacaatataggtgcaataaactgtttgaagtatgtctttagggaattaattttttatttttatttttcaaaattttacaaaaatatctaaaataattacaatatatacatctattaaaaatattaaactagttgtttcaaaaaataaatattaaactagtttatttctaatacttgtgcattgtgaaatatgtttcttgacggtttgactgggtaattgaaatcccatacaacacaacacagtacacaacaccgaaaagcccaaagatcaatattaccacaaaattatacttttcaaagtgttaataagaaaagaactattgtggaacattttgtacacaatatcaccattatttcgggtaaaaagagtaattatttgagaagagaatccgaggcttagaattccaaattctagggaagaatagattttttatttatttaaattaataaaacaagatgccatttatttttattttctaaacaaaacttaggaaagtgtatgattaaaaaaaaagtgtttagtgggatcaaagaaacgaaaattggggtggagaatgacgtattgagagaaaaataggagaccaccacgtttcaaaatattataaaaaaaatcagttaccaaggaatattcttaaatcttttatccatacttctatattcatatatcttactcttgtttcgattcaatgtcaatagattaatatcatttatttttattcgagatgcttgacttatttgtataataaaaacagaaagcaactgcatgcatttatatttactgattataggtatttgtaaatgtgtatttgtatgatgggagaaatagagatgaagaagtgttttaagttgaattaagagaacaattataattcagacaaaatttaatttaaaacttgctaatatctatccttcatttaattatttatgtcatatgttagtcagtaagtaagggcaggttgataaattacatcaaacataacataaaaagaataaaagcttaattaaataaatgatataatttatcaaagaaaaagtaaagacaagtttggtatagaaaattagattgaattaatttgaattggattgaactgcattagattatattagtactcttgtctcgatttttttgaggacatgttttaccactaaaagaaagaattgggtaatgatgtggctacacgtggcatatatgacctaggccattgacgtaattaagagattatcgaagccaagaggcaaactttacctttagcttctttaagaaaaatattgtgaagggttgacaagagaaatgaaagaatgtcatgtcccgaacattctccttgagaaagtcgaaggccttgtacaagaaagatagggatgacgtttagggcaaaagggttcatttcctcctaaatgtgattggcgctaaaaaggttgcaaagcttcttagagacgtttctaatgtgtcaaaggggtattgtagaccactccccttcgtacatcttataaaggttgtgagcgaaaacagaaataaattgtgcataatttagaacttgatacaagagaattatatgtggtattagagttctttcaaacactactaatctacgggattacgcccagagaataaaatcaattagtaaagcaacaaaaattataaatacaaagtttagactccctctaaagctttgtcgtaatcctttgtaatttactttactaatctgatttctgaaccacaccaaccagtgaactccctttagcttttgatgtgagtgtgttcacttcttctcaaagtaagtcttggacaagtcttctcccgaagacttcttctcttggtgaatgaagctcttcaccctattctaagaacaatgaaagtacaatagtacaaagactaaaacctagtagaacactctaggttttcacacaagaaactctttactcacaaagttgaaaatgtaaaacaataagactagaagagatgaattcgtttggctactctctaggtcctatttacagcacaaagaaatcctatagatagccataacacgtttttacaattgtatgatactttcctaaaataaaccctaatttgcaatgacaaaatcgcactctacagtgatagcgcaaacagaattagcaaacttttcttataaagtcaaaatgaagaatttaactttatttcatgccataaaaggattattgttgacctcgcttttaaccaacgacagtgagtcaattaataagcgataagaaatgaattaagacagagcaaaaagtagtaagcaataaggaacacaagattttaaagaggttttagttcggtaataacataatccccttagattgtattgacttgagaacaaagaatacaatgtttcctctctcaaagctctcacaataaaatttcttagatctctctaaagcaattctttcggccccttttacagtgagaatagatcactatttacagggctaaatgcatgagggaaggttttccttttgcttacaatatctataattggtaagaatatacattacatatttagaatatatgaaatgagggattcagacagcttgacatatccctttgatacgatcccatgattgtagggattgtttttgtgttgggcttcacgatatcaatcttgaagtagttaagtcttgatgcactgctcggagaaatgacttcatttgttgttcgcatcatctgcctttgctctactcggtctggcaaactttgtctgtgcagatgtattactcgaagtctgttcgaaacatttctattatcaagtgcagagaataacatacacgtgtcactagtacgcattgccacgtcatggtgtgaaaaaaaggataacaattacaaaatcttatagataatagaaatacaaaaattatcaatcacaatcaattaaaaataattataccatgaaaaatcatttattcacactttccatgaagagaattccttctctcttaagaaaatagttcttaaaaatataccagccataaagcgcaatatactacaagaaaaataatatttaattcatattaaatattcacaataaattatataatattttgacaactaaattgttaaaaaaagactttacaagttgaacctttacctaaaagtctgacccttacaaagaaaggatgtaccttgggatacgcactctcactcccattttgacattccttttttccacgtaaaaagtattgcactactaaaaaattggttttaccaaatagttttaacagtcggttaaaatattcctgttggtttctataattgttgcctattttatcgtcccaaaataggtagaataggtgattgttcgaaactatcgccaatttagcattcccagcagttgaaaactatcatctatgcttgggtatgggtggcaacagttataaactgtcacttatactatagatcatattagctttcacctaccaccccaattaggcccaatggtaggatgcattttatttaacattctcgcaactctatttaaagggtaaaagcttatttattacattccttaattaaatgggttcttgctaattaaggcccatgggtgcattttcctataaatagagtaacaatctcattgtaaagggatccctaatttctcctcttaagccaaaacgctacaaaaattatgagaaaatcaccattattgtgatcataaaacaatccctaataatattaactcgtggactaaaatttgttaatatctaaaccacgttaaaatctctatttattttccattaagctctggaatatttctttttctatattgtatttaagttatccaaaatctcagtcaacaattactgtagtatatttggtgtagaacatgattaaatggtgtataatatttttaataaatttatatgaaacaatcaatttatttgctgataaaaaaattaattttaaataatatttaatatctgatacttgacatccctttgctgcggggccaagatcgagacaacataacatggaagggtaaaatttctggactacatacagtaaggagtgcatataaaattgtccaagaaattaatggggaagaagatcaaggttctgctgctgttgaacaattttggaagaaattttgggctttaaaattacctccgaaaatgaaaaacttggcttggagagcttgtcaaggttgtcttccaaccatgattcagttgagaactaagcgtgtggaggtgtcttcggtctgccctatttgtaacagccaggaagaatcgattttccatgctcttgttggctgtccagctgctacactttgttggaacagagtgggaatcggcacagcagcaccacaacaaaacagtttttttcgactggtgtgctttgaagtttctggtgtgtgatgcagataaaaaaaaaatcatggttgctctttgttggtcaatttggaatgcacggaatgacaaggttttgaacaacaaaacatcaagtgtggaaagtatagtattttcggctcaatcttaccttaatcaatggctaactgctcatagttctaatgtcattttcccgagtcctggtcttattccaggtgacggagctgagcagtgaccacacttgatgctcaattgagttagccattaatcaatgtcgatagcattaaggttaatgtcgatgctgctttattttccaacacaactcaatttggaattggctttgtgattcgtaatgcacaaggagttctcattgaaggagttaccaagctttttaatggctcggccacaccagaattagtggaagcaatgggtgtaaaggaagctttgagttggattaaaagaaatcaacc

SEQ ID NO: 111498 - DNA, 2943 bp, Cannabis sativa
cggagaagaataatcgggataagtcattggaggaagcggaagagcatcatcatcatcagccagatagctttctccactacgtgaccacttcttctccttggcattcaccttaatcccgccattaaaacctcctcgcttctgcacgccgtccatggacgcacctccgtcggagccgataaaaccaattccagctccggcgacgtcggcgacgaatggatactggaccaatctcgggaacgagggggcagttggaaatctccggcgagaggtcggcatcggcgcgggagtggtcagaggagtggaaggcgattgggtcgaaaaatgaaatttgtatgtctttttctttgttttcacttttctccatggatttaattacatataattattatctattgttctcgtcgctttaattaactcagtgtcgttggctaaaaataagatcaatattttggtgctttcattgagagcaaaaagaacactgtttatcactttgatcctctccaaagatggttgtaactaccagaagttcccaaaccactaaaacaactgatcagatgactacgaatcttaatgtgcaaaatcatgttaataggagtgaactaatggtggcaaatcctgatccaagaacttgtctgcctccacaagttccaccaacagcaggataaggagtgataacccttctggctgggttcacttcgggcacataggaaattggaaccacttgtgttatctcaatttttgcccacatgacgtggcatgtctacatgggcaagatcattaccacgtgaagtataagttgtcaacaagaatgccaagtcatcgtacataacacctcaattgatgagaagtttgagtgcttaagcgggacgaagagacaaccaactggccaccctgaggggtctggccagccagccttcagctagtgaagggccacccagcctgcacctggcaggtacttggtgtgcagccttcatctgggacaacaagtcaaggtgcgatttggacttcaacaacccacaaaataggggagaaaattcagttgttctcctattgttgggggataattaacccatttaatatttattatttaattatgttacaaatacttaatatttcctattttttaaaggatagttggttattaatctcttgtaagctctcctatataaagagcatgaacctaaccctaatccttctaagtctttacgctccctaaagttctaaagctctaagtctaaaatccttactctctctttcgttctctcttacacgcccatggcttctctctcacttgagatttgcctacttgattctcatattgtaatcttaagagagccacttcagattgcacaacccttgtgatctaagtgttattatctctaggattaatataaccaaaatgggagtaggtcattacccactaactacgggggtaaaacctctataaaaatcttgtgtctcttttactttcttgttcttattgtgtacgcaaaggatgatattaggtgagtcattgtctgacgaaaccaccaaaggctcttcctcgaccacattttcccctttactctcaacaacaggtttgagggggggggggggggggggaacaacttcagccattgctctagctatacttattgaagtgcgagttgggtagactggaggtattgtattagattaaacgaactttctcttatccaaagaggtccgaccagaggaagacttgtcctttgtcttcttggttttctactttccaacttggacggatagagtctgtacattaaaaaattctctgatgtagccagcttggagaggtttcgagcatcattggacagcataacgatttggtgagccctcctccttaattctgaagtgaaagtaggatggtggaaaggcccaacactctagaaggatatgtgatctgccttgatgccatgagcgataaaataatctcgagcggacacaccaatcttcgtgagggttttagtgtcggtcacccacgggtaactcataagtgagaagtggaaatagccatacccgttctgaagaggatttgacttgaggttaaaaaatcagttgatgtcgtggggtgatggttcccctaactttgttgtgcgtacaatacgtacacccttatttctagtatggttcacagaacaacaaataaagaattgtaaaagtgcaaggaagaggaacttactcactgctttgctggttggctgaaacttcttagcgaaaatggtacaatcagagatgaacaaggcagattacttaagaatagttgtgcttccttactccaaaaatctttgaatggctaaaaatttcaaatgtgtgtttttgatcctatttataggactagcgaggggtataatggtaattaaattcaaagtatcagccccaccaaatggaaagtaatcattaaagagatttgtgtaactgtcagtgcgcgatccacaaggtgcagtttccaagggaaagcaactaatgcaaagatttgaaacgacagagagacatttgaacacctcaggctgggataacttcctatccatgcaagcatgtgagtataaatgcgtgtcaactagccatgaaatgtgtaagcctaggaagtcgccgtacaaccaaaagttctcatgctgactttagggcaaatgttatctcaaaattgtactaaagacatggcatcatgctagttgacatgtggcaaggaaaatcaaccttgggcataatataactctagtttctaccgaccacgggagatgatgccaaaatccaccgacacgagttcaagactccacctcatgccaagcaaagtgagctacttgcgtagcacggggttgccgaccaaaagtgtaatgaccgctttagtaatttggattagtaaaggcaattagcactaatttctgttacttttatgattatttatgaaattaattatttgtggacccc

SEQ ID NO: 111499 - DNA, 3318 bp, Cannabis sativa
catttaaactcaatgaagtacactaagtcattaagctgagataaattcatttcaaaagcctgccccctctgttttcatttcttcattccttatatcaaaaaagttaacttgcccgagtatggagctaaataagttggagtaaaactttggcaacaaactagtatgcagctacaaaatcatcaatgcttttattgaactatacaaaccagttccttataactcatcatacacaatggccaaatatgaaaagtagagtaataaccttactgtcatccttctgctcaaaatatgcatccactagagcacggtagttctcctctgcaataaattccaaattatccccatacactttcaacagatttttataaacaggtatgacctcttgatcaggaattcctaaacctcttgtcacagtcaaggcttcattcatgtgattgtgagccatttataggggtcagtaactatcaatcagcttggaatttgagcagtacgtgattcttaagattccatgaccctgcaactgcctgcatttactggggtttgtaagaatgatatacaaatctccaaacatgattcaaaatagcccaactaaactcattgaagctcgtgtgttagaacccaaaaataaaaagcttaaacagaaggtaagttcatgtccggtattcgatttaaatccaatttcatgatttgaaacacaacataacaaaacaggctataaggaaagtgtttagtggccattttttgaaccaaatatctgaaaaactcactctaaaacaactttaaaatttgaaaacgtaaatttcacgttctctaaccgttattatcttttcgacttcctcctccataattcctttctccaattcaaaatctattcattgctctcacccgcactggagtagctccattcatgaacagcgactagagagggaaagcaaattcagtacaagctcccacggcgatgactgaattagggagattcgagagcctgagtttcagtatttgggccgcctattggttgctcacggcggccggcgagtggagaatggcgttggccgtgagcgagaaaaagggaaagatagaataaacgggaggagtgggtgtttttgtgatttttataacttccgagggttaaaaacaagtttctaaaattctaatttggccacaatatcttaaatatcatttcatctttgcccttccttacccctaatattttattgaataaaaggattttccatattcaaatgaattgattttccaattccagtcaaccaaggagagaaaatatagcttaaaaaccaactcaacaaagcagtatcatttttcagttttcaaatatatattttcaatcacacctttcagattctcagcttaaatacattctattcaaatcaattatctttaatttcagatcttaaaaaactattatttgctttgatggagaatcatcaacattatattttcaaaccgaaacacattttagctgaatttttctgttttacgaaaatcactccaaaaaataaaaataaaatttaagtgaacccatatctgaaaaaaaaaaaaaaatgaagcgaccttaagaataaagaaaacagaaaatactattcaactccaataatgtctcatgcaataataaacaataaaaaaaataactgtagaacagagctcgataaaagcagaaaagtaatagttttaaattcatagcatgaataaaagaataaagacaaatgatcaatcaatcattgtcatacaacaccaactcataagactacacacaaacatatatatatatttatatataaaatcttgaacatactaccatgtaaaaccatgtttggttggcgagaaaaaacaaacgcatgcctaagaaacgatcaaaatttcacgcaagaaaaaccaaatacaatacaatgaaaacaagaaagaaaataacctagaaacatcgctgagaaccgaatgaaattattaatcgtcgcgattaaatttgtttggttgcaaagaaaatgtgggaaaatcctattttccctgcattgcattttcccaccaaaaaggggaaaaaaacgtaatgaggtttaaggaaagagaacgtacactttaccagaatgacgtttgagcgatgaaggagaaggaatatgaggaggtgattttccgtattggccgttgcagagagagtgtactctccgtctcacccagatattttcaattggtacctctgttttccaatttcataatttattttcttttttctttaattgtttttaagggaagtttttacaatattctcattattcggcttatttgtacgcatatccttaaactatataagttttggtaagttgatccttaaattttattttttaacaaattaatccccaaaatatatactttttggtaaatttattctcaaactttattttttagtaaattagttcttaaatttttattttattaataatattaaatcactcttagatattgatatttttattatttttttttattctacttactttaatttatttttttgttaaattcaaataatttcatttttttttacaaataagatgcatcttattcgtaaccggacaatcatctattaatgtagttttctggtaattcaaataaagaaacaggtagttataatcagctctaagtttcttagacaattagttttcacttatgttcacacactcttaagcttgggtagttaagtttgttactcttctagtttattgtttttctatgtaagcctacatataaaggcattttaggctctcattttatagtaagagagagtaagatcaatttggttggagagtgaagaaacagagtggaagagagtgaatagtaccgtcgaaggtgtgttcttagagtactcgagtgagagagttgggtttctcttgtattactccagagttgtgttcatcattatgtgtttgtaaccttgatcatggaataaatacaatggatacctgagggggtagcaggaagtaagtaattggtcgaacctggataaaaattgtgttcttattctttgctttaatttcttgttttctgttgattattaatgtgatgttttgtcgaattatgtgttgttgatttacaacagtggtatcagagctttggttttgtaggaaggagaataagctttcaaattcgacactttaagaacatcaaaggttcaagaattcaagaagcaaacagcaatggcttcatcatcaacaagattcgaccttaagaggtttgtgttggaattattttactaggatcttggatttactaacaagtatgttattaatatcctaaatatgaacttctaaa

SEQ ID NO: 111500 - DNA, 2380 bp, Cannabis sativa
atggtcctcttaggtaaaaaacagccgtatcgtaagctcgagccgccgccacagcggttgagtaagaacctaaccaaatcctcgaacgtttgttgggttctctaatctcagcgacccacttcccccactttctcatccttatacccttgtactgcctctctcctactcctcctcctccgccgccaccaccacctccgccgcctccggctgcagttcttttccgtgtggtttctctcggcggcggtccagctgtctccatctccggctccacctcaagattcttcctttaatacctttgttgtctcgtttctcttgttaatatttcttgattctgagaccgacccagttcgaatttgggtctaagaaatagtgggcagtggttgaatcttcataagaaagtaaaaaaatctaaaccagtagaggcagagccaggttagggaagagaagaataaaaagtttggtttttaaaaaaccaaacaaaactgaaaagaagaagaagaggagacctctcatgctacttggccactatgtttgtcatctgggttagcctccacgttgattatttcttccgacccaattttatttaaaaatgaaataaaataaataataataatattaatcagaaaatccaaattcaccgacacaatctcacaaatatgtaatttataaatatgtggaaaaaaataaatatttggatttcctaattagtaataggtattgaggacttcgtccgagaaacacaggttgtaaaaacttattagatatatatattatgaggtctctgttttgcccaagtgaaaaaggaattcgatttatttatttatttattaaaacaaataatattaattttttttttgtttattattaattaccgagtggtggtggtagggttatgggtggtgtcttatgtgggcaggtgaggtggaattcaaaggttgagaaaaaagaaatgtcaattttcacggtaagcaattaattttttatttttattttttaaaaattatttagattaattatttaaaatttttatttctgaaataatttttgttctaatttgttagagagaggtggcaaagggtaggtcggtggtcggtggatagataccgttagaaattgactttccctctacgcaataacgatttgagtggatgggcatttttgtccttttaatacaatgttatttttgggatcaattaggggtaatatggtcaattcgtattctaattggcctaattaatattgaaaatgaaatcttattattaatatttcagggggcggcttaatatatttataatgtcaacatcattgttgcttgttagcatctatttataaataaattattaattattaattcttaattattgttctatacaaaaaaaaaaaaaaaaatacaaataaaaataaaactaaaaataaattcttaattattgtatttcttgacatttttttttaacttttcagatttaccaggttgaaaagtgattggttctgttgaaggtggaataaaaattttttactgtaaaaagtcttagggcagacgtgaattaatagtatgattttgggaattgcatatttaaaaatatctctttttctttctttgggtaattaaaaagtgaaatcaacatatatcaatattggaagatgagatttaaacttgaacaatttaaagggataattttcttacgaaaataagtgttttatagataggttatcagggtttagggcaaatattatatttaataaaagttattgatttaactttttgttttattaaatgacaatttagactttgaattcttttgttatttgttttattataaccaacatgaaaccacgaatatatataaaatataattaatttgatcataatactttcagattattattattttttaattagataaaaattaaactcgatatttattttatattattttaaaaaatacaagatttgaattgtcatttaacaaaacagaaagtctaatcattatcttttataaaacacgacgtccaaaattgtatttacctcttagtccattgtccttttttcaattaaaactatacaaatacaatattttatatctacttatgggaatgacaaaatcacaacaaagattatgaagaagagtactacgagacaaatcctgaagtagtacaactccagcaagaaatggaagacacccaaaggagattagctgaagaagaggaggtctgacgtcaaatgtaggaggctcttgcatgcttgtaagctcacactaatctccccgatgaaaatccctcagctgagaagatcaacaaccctgcagctggaccgtctattctagtgaacgataaaggaaaaggtgtcatgggtgatcactaggggtgttcgcggtgcggg

SEQ ID NO: 111501 - DNA, 3275 bp, Cannabis sativa
taaacttcttcattaacatcttctaataaagaagagaataaagggatgtctttagaagtatccaaacccctgaacagctaacacttttaaaattacgaattattaatgtcttttcctttcttatcaaaaaggcctttatctaactatgaaaatataagagggaaatcttcattttgaaatccatgaagcaagaaaataatagagaggactatctgaaaaccccctccctctccttattatcttcatgattaaagtatttgaagctcaacatattcctttgtacacttttacaaccttcacatgaagcataataagaacaacttttgcatacaattaacaaggagccaattccaaaacttccatgaaattcttatatggtgaacaaaaaagcattattttaaataaaaactagagtaaaatccaattccccatgaaaccaatgttgaatcattggttgaaaaacaaaataaatacaagcacacacacacagaacaaaaaacaaaaaatcacactcaaataaaagggatccaaaatccaaaatacaaaatccaaaacaaaagatttgtatgaaatctgcaaaattaaaaaccaaatacagtcttaccgatgaaagtacgtgcaagggatccaaaaatacaagaattgaaaccgaagaaagccctcctcgatcagaaaacgaaatctacaaaaacccaaatgagtttaaaacacaaaaaagtagtcttgagaaagcaaaattgaaagagatggaaaaattaccagaaagcgatggactttgcaatgcgagaatgaaaagaaaggtgtttggtgagtgttaataatggtgtttttattatttattttttttataaattatataatttattttttccttgggaaagaaagggaatctgagagaaacaaacaaaaagggtaattgaatattcaataaaaatgaaagaatagaattgggaagagagtgtttgggtagaaggaaaattagtgaccaagcaaagagatatggtggattggtgagttttatacgtagtaaaagacacagagagagagatgtgggtggctgttatatgagtgagtgtagatgaagaagacacaatgattggaaaactcaatctcagccactcttctttctgtgaatcgtatatacttccaactttggaagatggtggtttcctagtatttatagatattaagaaatttataaatattattattattattgttgtacctaataaactgactctgctcttacaaatagaaaaaggaaagtagaaagaactctgactgtgtttccatttatatatgaaaacaatctatattatttaaggtctatttaataggtttttaaaattttaaaaatattaaaaaattacttcatatattattttttaattttttttaatttacagtttgagtttctaaaataatttttactgtgatttttatgtaatttgctatacaaattttagtttcgattttgattgctccactaattgcaatagaaatttctatctaaaatttcgtaaaaatacaaaaaaaaaaaaagaaaattattttaaaatataaaaataaaaaaactccaagaatatatattaattaatgagtttaaatttaaattattatgttaaaaaaaattatagccaccctaaaatatctttaaataatattttttgttctctattttttaatttttttttaatttttattagatttatagatattagaaaaatttgcggcgaaattcttttatgttttaatttttatacacttagccctcttatatttttctggtagcaaaacctttttatgttttaatttttatacacttaaccccttattttttttagtggtaaaaccccttatgttttaatttttatacatttaaccctcttttttttttggtagtaaaatctccttatgtttatttttctttacaaatttgacacgccagttaaatattaccgttaattatcaactggatgaccactgtatacatctgtgtatatgtaacagtaaaatctcgaagtcgatacagtagtaatccagttagtatttaacggtaatatttaattaaaattttaaatttataataaaaaaattcttacccataataaaaaaattaaaaatttcagtatgttgtgtaaataatatgtgttgggtgaggcctttgctcttgaaactgcaactcacttgtgtgttgtgttgggtcatcttccaatgtaacaatatatccaggttgtgggagggttcaacttctctgatatgaaccacatcaacattaatctatcagagcttgtagttttggtatgtgtacttagttcttgagactctttcttggttgtgtctgtgtttggattgttgcttaaaaatataagaatggtggcttctgctcgacaatgtttccttctatatttttgtgtgctatctcttctttgattcgttagcttctagtaaattaaatgaaaataaaaagtttacccatccttgcaattatacatgttgcttgcattgttgatgactttaaataactttaaaagggcaactcattttggtgttcactgtttaggtaaccttgttaacaatccttaaccaattaagatttttttggtgctcaatttaatattcgccacatcatcaccaagtaagtattattagtgtttagcaccctactcagtgtaatataaatattagtataattaactatttggtctcatataatttaaaaaaatagcttttaaaaaatattgctaactaatcgtaagacacaacctataaaaagtattgggcactactggcccaatagcaatgctcgaaaaataaaatctgatgtgcctaaattggtgtgttctctttgttctactaattattttagcacacattatttatacttatttaacatataataaatttgttaacaaactctaaactaaattaatacatataaaataagtatagatgaaacaattagtaaaaacagaaaagacaaaataatttaaggatagcaaattctttttacttaaagaagcctttggacaacctcattggaattggccttagagtatctaaattgcggatgcccgcattgtcaaaaattcaattactactttggagagtagcttatacattgaagaagaatcatgaggcaatttcttaccaggccgaacggtagtatttgttcttttttttcttataaaaaagttataagttaatatttaaataaattatatattaaatagtagttgttgtcgagtgaatttcgcaacaccaaattatattat

SEQ ID NO: 111502 - DNA, 3353 bp, Cannabis sativa
  modified_base (1942)..(1947): a, c, t, g, unknown or other
  modified_base (2101)..(2102): a, c, t, g, unknown or other
aaaaaaaaaattataattttgaagttcgttaatcaaaataagtaaccaaatatgtatgagataagaaaaattaggttgattttttttaataaaaagtaaccagttgatatattatttacataaaaagaaatcaaaagattgtttttttaaaacttacaaaaaattgaaatttctagaagcaagactttttttagttttttcattttcaataattagtttagattttggtattttaagttaatgtggtacaacgttatttctgtaaataattttattaaaaatatttttgtaaataaaattaaaaaaactcttttaattttaattaatattaggtgggaagcatatttatttgggcctacccaaaatacataaaactacttttgtttaaaaagtttatatattagtttttgaatttgggtttgggtggaacctaaatacaggcttagtatgccttcgctcagagtcaaggttatttgaaccatgatcgcagacctaaatccagtctcagaccaaatataagttgatgaatattttataaaatatttcattagaattttcgaaaacaaagttatccttacatctgatatttaactaaaacaaatctaattattaaaaattttaaatgcaatttttattgtactaaagcatcaaaccatacaaacaatactcttattttatcttaaaatttgggtaaaatagtaaaaatccaaaaagataacaacaatgataactaattattttcattattcattttttttttttgtaaggatttttattattcatttttgaaattgcatgtgttgggtttttctttagaatatatttctcgagggtgcatgataagaatatgattctcgacacatggaatccaaatgttaaaaacatgaataaaaatacaacctcaatataaggaacaaaagtcttttaatggaacatacagatttggatcataaaatattggacatccttttttttgccttaatttataataataataataaatttgtaaaaaatgtgatattccaacaacaacaactatactagaaaactttggaatccaatggtcaaattgcattgaaaaagttatatctattaactcacttgtcctggtgataccaaagttagatatatttgcttctctttctcatcattcaatgatatatattactattattatttttgatatatattggtcactatatataaagtgtagggattagtacctaaatagattttgttcaagaatactagtatgaataggtgcaagcatatatactaattttatcttttgagatcgatatcatctctcaccaagaaaatttagaacaatatttaactttatgtgagagaatatatatttttatatataataacggtgtgtaaattatacaaaaaaaaaaatggtaatacttgtataaaaactgttttttttttttttttttgagatatgtataaaaactgttagttaaatatatttaggagaaattgtctagttttattaatatagttagaatcaagccattttaatacttatcaattatcatcgctaattgaaattgggtaatataaaggatatcttcataaaaaaagtaatataatatatataaatatattacagactagattttttttattattatttaaaaaaaaacaaattataggttaatgttttcaatctcaattttaataaaatgtactatttatgtaacgttcccgctttaagcctccattggctccttacacctactgtatgaatgactcttatacacgagtacgtcactctggatgcttcatagactgacgactgaccctacagaccaacatgagtgtttccagcatgctttgtcctcactagttttcccagaaggtcacccattctgaaattgccccaggccaagcacgcttaactgtagagttttttcatgatgggctaccgaaaaannnnnngcaccttgttgatatatgtagtaccaattaattcatttaagccctcttcaactgtgtagtcacatacctacacagcctcagaatcatcccacttgaccttccccaggcgatgtgggattgcacagcttgcccagtatttccccttacggatcannggactactgactgtcacaatttagaaccatatcaattattatttattacaccacttggatgttataaatattgattgttatatcatgttattaaaactcttcactttgccgctactaaaatttctaggagttatgtttaattttttatttttatttcatactattaagattatctaacgtcttacggatgttcctctagtttcaaaggaatattaataagatttattcccttattatatatgctaaaaagagtgagaaagaaagattaattgctaatgttgagaagtatggagttctatcttaaaattaattagtaataagagtagtaactgtatcaaagtgtgtggctctgataccatgttgaaaagcaaaatgtttcatgttatagctaattggtgataagtagaataacccatgttcttatatgactcaatattttaccatttattccatataggacaatgtctacaatagttaaccctaaattaaacccaaaaataatttaataccaaaacgaaaaattatgaaaatatttttattttttaaaaaatagtgttaatagaactctttgcattactaaatactaattaaaaattaaaataattcattaaaaaacctcataaatcaaatcaaatcaaacaatcgaccaaaaaattcaaatcaaacctcataaacatgccatagagctaaattgacaagcgcatgcatgagcgatactatttagagcactcacaagaatttctctactctatataattcaaaataccttatcaaaatcttaatttttttttttttattttagctcaaatttttacattacaccatacatcaatttctctatattaactttacattactaaaatattatatattcatttatttaaattaataaaaacttagtcaaagaataaaaactaaataaaaaagaataaaaattatttaaaaagattgaagcactctagctatcgccacacgtagtgatatactgtagcatatgtaaaatgtatatgtataatagagagactgatggatgaccacttttatactcttagctatttttcttttacatatttagctactttaaaatagttgttgtggatgctcttagtcgatttagtgaaatatagtagtaatagtaagtgtttggtataaggtattcaaaataatttgattaattggaataatattatggcatgtttactaataagtaatgggaatcaatagtaaggtaatcattcccttacatttgtt

SEQ ID NO: 111503 - DNA, 2049 bp, Cannabis sativa
aatgaccacatgatctaaaatcaatggtcaaaaaagcttccttaccggtagggaacttaccatagtcttgctctatatatcttcgtcttgttattgatttctcacatatttttggaaataattaaatttcacatttttcttttttataatatttatgatttgatataaatatgtacactatggaatttttttattactattacttgaataaatagttatgaaacattaatttatttacctataagaagaaggatttttgggccaaaattcatgatgaactttggacaaaggagccataacatgaaaaaagtagtcaatccattccaacttctcttcacggttcttagtcatcttagtaccatacccttcaaacctcccaaccgttggatcattagcataggattccttttctatttgaggcaacttgaaaaacatctcaccaacctctttcaaccgttggatcaactcagttggtatcccgtgatcaatgatcacaaagaatccccactcagtcgcagcagtgtcaatctctttaaccactgatgcatgtggttgagtgagagatacaacgggtactgtcacaccttctattgccttactgttctccggccgctcgtttaaaggtcggatgaacttttctggtatctccttttcttcaaaggatgataaagtttgaactctcactacttccattgtaactattttttttgtttgtgtgtaaataaagtaacaaaatatttatgttatgttcctatgataaaactaaactatcaaagccagtccactatttatacaagtaaaatatttattatttacgaattacacgattaattaataataaataccaatcaaccattcatagactcatagtaggaacaacagctagaatataatttcacgtgacaattctataccaatattttttgttggaagaaaaatccaaatttattataatttatatatatatatatatttattatatgaataggactaatattataatattatgataaatgaaaatgaaaaaggcaatggtcacactcacacaccacacatttcatgaaaaaatcttaaatattttgcatttttccaaattccttcattaaaatgttatcttattcccttattcattatcttaattcttcaatgttttatttggtgttttcttttggcttggagtgtaagtgaaaataaagtgtgttgggggaaatggaatattatcattgttgttgtaggggtaggttttctaatctaaatttttaaggttaagggtttttgaggttcttttaaaatcaaaattaggaatttttcatggatttggaaaatggttttgaaaatttcaaggttaaaaattaaaatctttgaggtgtgcttctggtattgagcatttctcattattggatctagattttttatgagaaactataaccatgttctttaaacacattctttagttgaaatagagagagtgagaccaaaaaaaaaacctccaactatacaaaaaaattctctataatagagatagagaatggatagatttttgctaaatttttttaagggataattacataatgcattatattttgtaaaatttttacatttttacgttcatttttttttaatatatatttttatagtatttcataaaaacaataagaaaactacataaaaataataggaacatctaagcaacaataaaaaataacatacaaataacaaaatattaacaacaaatgaataagagtacaacataaaacgtattttctataaataaaatcataaaaatagtatgtttaaaattccgtacaaccgcatttttgtaatttttttgctatttttgtgtatttgtaaacctttttttaatggtattttaatcaaaagtactattactttttcattattttataaaattaatttatatttaataaattcaaattgtaaaacattattaaaataattaaatactaactaaataaagagtatgattagagcaacaacaataaaaatagctttctattttaactttttaactattttagcttaaaaaaa

SEQ ID NO: 111504 - DNA, 3668 bp, Cannabis sativa
taattttccatcgttttagaagtttatatttaggttgttaaatcaacatactgtgagtagatctaagatcctggtaaaataattccaacaatatcatagattgggtttgacattgcttgctcaagctgcaatgccacaaaaatactagtctaatgcatttctgacggctatattcctcataaatagattactaacacctctacttcaacataagtctccttttgaaattatacaataaaaaaactaaattacaagtttctcagattgtttaggactgcttattttccatgtctaagagcctgtcaaacacataaattttaatagcactccattaagtatgttaatctaggctatagtgaggtgtataaaggatataagtgtcttattccatatggaagaatatatatatcgatgcatgttgtttttaatgaaaaggaattcccatttaagaatgcctttctcaataactaaaaactagaacaaacaatcacagttaccatacctcattccttgttcgacctaccagtctcttctccttcaccttagacctctttagattcaccaatccaagcacctcacacatcagattaggtattgcaaaaatcttagcttgtatgtcctacttttgttgtttcttttaaccacttagatatgtactttgagcactcaccaattcaccctgctagtagttcaacacctactgctgaacctgctattcaagttgcagcttcaggttcagatcatactcaacaaccctcttcacctcaagcatcaatacatagcatacctgaacccctgcttagacctgcaacatatattcactatatggtaactaggggtaaggcatgtatttttaaaccaagagtcttgcttagcacaactcatttgcctctagcttccctaatactactttctctccaggatgctcttcaccataaggggtggaacagtgccatgaactctgaaatcgtggctttaaaatgaaacaaaacctggtatttagtgccaccatcacctaactataatgtggttgggtgtaagtgggtatacaaagagaaactcaacgcagatggtagttttaaaagttttaaagcgagactcgtggccaagtgcttccatcaaagacctgtgatagattttggagaaacatttagccctgtcattaaagcttccacagtaagagttgttctcactatagcagtagctcacaactgggaaattagacaacttgacatcatcaatgccttcctcaatgacacattggatgaggatgtttacatggttcaatcctcaggatttgaagatcccttgaaaccccactatgtatgcaagctcactaaatctatttatggtcttaaacaggcaccgagggcctggtacggccagcttaaaataactctactgcagtgtcactttgtcaactcaaaagtaaattcctcattctttatgctaaagtattctaagtatgtgaccatgatactgatttatgtagatgatatcatcatcatagggagcaattccaaggagctagaataatttattagcaagctacacaagactttctcaatcaaagacatgggagctttaaactttttcctagggatcaaagtttttagagatgaaactaggctttaattatctcaagggaagtacatattagaattactaaacaaaattaacatgaccaacctgaagccaagtcctacccccatgactgcaagcaaacctatgtctattcatgatggagagcttatggcaaaaccttcacactacagaagcgtaataggagctcttcaatatctaagtcacacaaggccagatatctcttttgcagtcaaaaaacttagtcaaatcctaaaaagcccaacaacagtccattggaatgccaccaaaagggtcctgagatatctcaaagggacattagatcatggaatacacatctctctaagtgataggcttttcttaactggtttcttagatgttgattggacttgttgcccagatgatcgacgctctatagttggatactgtatgatcttaagagattccctcatttcttggtcatctataaagcaaatttttatggctatatcaagtaatgaatttgagtacaaggccttgacacaactagctactgagattgcttggttagaagaactactcaaagaaatgagattcaaactccctgatgtccctgtgatttggtgtgacaacatgagtgcaagtgcaatggctgctaatccaatgtatcatgcaagaactaaacacaatgaactagatgtgcactttgtaagtgataaggtactcagtaaagagcttgaaatcagatatgtcccttctcacaatcaattgttgattggcttaccaaaggtctcacacacactcgattccagttcttggttgacaagcttggtgtgttgaaaacaccctctcgcttgagggtggtgttacagaagaaaatacacagtttatgcagggcattatggtcagagctatgtgtgtgtcaagtttattggagattttggtaatctcgagagaatcaatccagttgtccttttacattctgttattgcattgttattagcatattctcttttttgtaatgattgcttgtaccacatgtaaggctatgattgttttcatcttttctatttgtacctctgtattgactatataatgaagatcttactatcaacatcgtttgagctgatcaaattcatttattgaatctttaaaaacttcactagtttatgcataacttattgggggagtatctctttagttaaatttcttttgatattgggttattttatacttatttaggaccatttgtaaatttttaaacaatttcgaataaattataatattaaaaataaagttcaaacattttattgcacacgtgaatattttttcttataaagtttagatctcatttttggcatttgaaactattcataattttctgaaaaatttacaggtttttttaaataattataattggcaacattataaaaaatagactaattaaatttttttcatgaatgtcaaaatatgtaaaagttgtactgaaatatctcattaagagtgtgtacagaactttcgtaacttatttttgagtggaagggtctatttatgcattaccatacatttttttccatgttttccctcaactctccagtcagcctcacaatctcaaaccattcaaatatttttagaatgacacttattattttaggtagtatttgatcaaagataatggaatggaatgtaaaaactctattttcattccattactttgtttggttgcaaactattgtattaccattctaaaagaatgactttttcaccattttagtgcaacgacttctattttaaaatgaaagtaaagactattctaatgcaagattatgaaaaacttaataatttttatcaattatttttttctaaaatttaaatttgattacatttcattgtattcctattcctactctcatccccattttattttatttttcttgtattttcactacaataaatatgacttttaggggcgatcaattttgaggcaacagaaagttgcatctaatagtaaggggattagggtatggctgtgcatcggtcggtttgggcagtttatcctatatattttctaacccaatctaaagttc

SEQ ID NO: 111505 - DNA, 2831 bp, Cannabis sativa
ggcctagtcgttgaggactttgactgacgctcattaatatttgaaacatttttgtaacactataatttgctaagcaagaaaaataaaagaattgatatatgcttgcacggtgcctaccatcttatgagaccaacctagtaatagagttattgtgttagataaactctattgaaccaaaattctatttactcaatctatatgtcacaatagcttcacaattacatatttatataattcactctttaaaaattactaataaatccctatactattttatagtgtaacactttcccacccttcaaaatcaccttgtcctcaaggtggtaaaattaaaagaaaactaaaaacatgcacaaacataaaagataaaaaaatctaattatagcccaattattactttgttggtgtagtagagttttcaacaagcccaagcccaaagtacctagggcaatcaaccttcttcctttccatgattcaagccgtcagtttttttttagttggaagcagtgagttcatgacctccttgatttgaagcttcatcttcagcatactcattatttgaaccccataatatgtatataatatttgcagaaaatagccagtaacgacatctacatatatatgtttcttctgcaaaccagtgaataccaagcaagggatcgtcctcaactccacctctccaatgtaattctgcgatccggcgcgaccaagcttccgatcgtcctccggtgaccacttcatcccgtccatcatcgtcaaagatccatagtcgtcgccgatcaaatatccaccgtcgttcccgatcaagtatccaccgtcgtccccgataaaaaatcctcctccgatcttgtgcgcgaagatccaatgccatctctgtcttctccgatgttggagttcttcgagctgccttcgttggtgcagatcgagaatccacaacatccgatgaagccacaccgatctccttccctttcggtgttcttcgagctgccttcttcgtcgtagatcgaaccggaattgattgcgatcttcctggatcgaatacattagaaatgttgccgcagacgagatcaagaggcttcttcaatgacttcgtgttgatcactggttcaacagagccatctatgttgtcctcgaccttcggcgaagtagatgacacctgagatgtcaaaacgaaaggtgtctccgttgatgtgagataactcttaaacttggcatctagtttctccaattgagcatcaacaagctctctgaaatacagtttcattgccttcatttgagcatcaaaacgctgctccatacgcaactccatagctttgaagagttgaacaatctcttcatcttccatggctaagagttgttacagtgaatctctcactgtaatttctctcaatgaaagcaccaatgttagataatagtcctcttcgagattggacaaatctctgaaatgcactcttcgagtcagtgccaaactcccaattgaaccaaagttctatttaatcaatccatatctcacaatagcctcacaattacatatttatagtaattcacactctttgaaaattactaataaatccctatactattttatagtgtaacatattgtacctaattacatcgattgtttcaaatgactattgtatgttggaactcgttatgaatccacgcgtcttatgttttcattacatatgtgatcggtataattgcagacattttataatattaaacctattaggtaagttcacgcatctataaaaaccctgagaggtttatatgtggtaattccagtgaactcgcgagtttacatgttattgagaatatgaacagccaaacgtgtgattagagtagtcgcacccatttgagtaaataagaacggtcgaaaatattcttacatttattttgtaaacggttttgtaactgaataatcacttccaatctatataaaggagtcatcagatacgaataaagagatcacaatctatcttctaaaattggaagaagcaaactaaactctagttgaactaccataattattttgagtattttatatacttgttgtttatattttattaatcgctattttattttgagtattctccaatttaagtgaatactcccaattctatttataagtgttcttgtgtagcttaaatacttgtaatttttggatgtttttatttttcattcgacaataatttattcaattaaaaaatttatcttgtcaatagccagtttttatatatataattattttatggttacatttctattttttttttcaattttttttttttaatttttatgtattatagtgacataaaaaagagtaaaaaaaaatgaacataagttaaaaagtatatattttatgttaattgctttaggatttatgcgagtttggactttggaatccatgtttaaaaaaatcatttttagatttggtgtttggtaagatagttaaaacaaaatgcatttggaattggatctagtttttgtcaaaatatttgtatgatatttagctccttaacctatgttgatttatttatttttttccatcgacttctcatatttctgtgtagaaattacacaataagaaaattataagaatgtatttttttatgatataaataaataatactataaggttattgattttttttttttttttacatttatatggattaattttttatgccatatatatttttgtaaaaaaagatagaaatctcatatttttaaaatgatattaagtttctccgggaaagttatcggcaccggaaaagtcgtcggaaaagttaccgtcgccggaaaaatcaccagaaaagtcactgaaaaag

SEQ ID NO: 111506 - DNA, 10114 bp, Cannabis sativa
  modified_base (7139)..(7147): a, c, t, g, unknown or other
cctactgccaacacttccataaaccagtcaaaaaaattggtagctacagaatgcctaacacctaacgctgatcggagccaacaagaatgcgcaaacgagtattatttgaatattatttatatatgtttgtttatgttgtttttcaattttttttatatagttattttatttttttagtattatttttttataaaatatcgtaaaaataattaaaaaaaattaaggtaaaagtataaaatatttagcaagaataataatttatgtaaattttactctttttatattattattattgttttgttcaagtaatagaatatgctttttccaaaataaaaaaataaacaaataaagtatacgtcaaaaaaataaagtataacatgcacatctttctctttttattttattttttctgggaaagaggatggggagcaaattccttctccgccctttccatagcttagacaatcttgaaaaccgtgtgctaattataagagagacttatacttcatctttttttaattaggtcattaatatgtagttcgagggttctcatttcattaaggatataccgccacaataaattagcttcccaaacatgaacgaagccaaattattctaggtggggcgattgcctcatctcaaattctacaaaaaaaaatgtgtatatatatatatgcatatatataatatattaatacacataacaatatcatattatataaaataattgtttttatattttttactaactaaaattaatatatatgtgtgtatgtgtgtatacattcccacttaatttaaagaataaatagattttttccgaactttaacacttataatttttcccttgaatcatttttttattttgtcccctagtccatagggagctcgtggcatacaaccgaaacgactcccactagatagccgcccctttctctatgaaaggagggactgaaacttcaactgatacctacgctaaacaagataacttagttggcttagaattcgtattgatttgaaatatcggttacagtcttctttaccgaaccgattcctttgaactttagaaataattacaaaatttcacatttaattgcatttcactcattttttttagacaatttattaatgggctacaagccactcatataattacaatctaagtgtctatttaaataacttaagctagctagaactaagtctaatgacattaaacattcaaatataaactctaaaattaggtatacaatcctaaattttaacgctagagtattatttatataattattttttacatggacactcgaattacagtaaattagtcatagatcaatattacacgaggaaattgtctcaaaaaatttagtgaaattcaatgaaaggaaaaaaattacaattattttcaaagtttgatgagaactttttacaaaaataaataaataaataattcaagaaggtaaattatataagcgtcaaagttggaagaacaaagatcttatttattcttatataaaattagttgattgataatgttgaaatttgaggtaatactatatcaaatgttttattattttaacaagtaataataaataacatataaaattaagtaatttttatttcttcttattccttttggcacccatttttgaataaatattgttaaaattatgtcaattgcacacaaacttaaaaatatttttgtaattctattcaaaaaaaataattataaaaattattattttctatataaaaaattgttttaaagagccatctaaaattatcctctagctttgtcgtccctgcttctaaagagctgagtataaactttctaatcaagggttgtggtgagattcgaatccttgattcaaacaaagaaggatgtcaacaaaaacatctttagttgtaattatgcatgtccttctcattagtatgactttggaccaaattaattggatgagaattaatatgttataagtggatagagaataatgtaatattattgttagatactagttgtaatttcttcttaattataccttgagaacgttttataaataactaataattttttataataattattaaattaaaatatgtaaaatttaatattaaattataacaatttatggtgctaaaacacatttttaaccacactaaactagttttagttatttgccttctttttctttaaacgatcttagtccaacacactttaaagtgttgcaatattccattttgaacttaaaatcaaataacaaatataaaacaagaggaatcccttgcaaatctccttaactttgactatatttccataattttcttggagatctatggaaacacaaaagtagtaaatttctttatcagtattattttatatcattgaatttgacttatgtgagtaatttgtagtatttatattattttccattaagacttcatcttaatataaaattttaataattagataaatgtaattttattttaaaaaaattaaataataaaaaggttgaatcaggaaaaaaggtgtcaaaataagatgccccgatgaaacgcgtaagcaatatgtttttttgcttaaccacgtagcaatatgttgttgcttgcataaactcattttttagtgcaagtattagaatgagtttggttatattaagcaacaccatctgcatcatcagcaacttaaaatgattatagagcacagtaataatcagtcgtctgcatataaaattgaaacataaaacattctcacttgagtttcatatataatctagattggagttcaccattactcaattcgctaattgtagtgtaaagaacagaaaagaagactagggaggagcatatttgaggttagccattatccatttcaatcctaaggagagtgcagaacctagttccacatgaggtgggttaaagggtatgtttaaaagagcttgcattacaataacgtaagaaaagaacaattagaaaaaggaagagctatcttgtatgataaatcaacccggggttgaagtaaggtaggtcgtaatatagtataatggcttccccattggttctcttttagtgagtcatgagtccatggcaatggcttctggcaggggatggagttgtaaagcaggaatgttggatttgtgtgcaactgggatatggggtgtaaccaccaacttcttctccttgggtattccactcccaactattccaagttccttcctcacttcgtttgcaagctctatcacatagtcatcctcatgatctgttcaatattatattgaaaaagcacaaggttaaaataggtcaaatgatatgattctgtttttaaattgaaaaaacaaaagcacacttactccctggtctctatctattttattatacatagtatcaatacaaatttattttcctcaactatacggaaagacactcaccaatatcaaacatagctttttctaacaagaaaaggtagtccctgttgtttccacatggtccccaggcagttgcaatttgcctgaaaagaaattaggatgagaagataagccacacatattttatcccaccagaatacataacaagataaccagcaaaacaagtataaaaagaaagataagattaattttaccttgccatgtcctccaatggagcaggccccaggtagtacttgtttgatactttgtccggagtggatgtgaaactgcaaaatcaaagaacgatatatgtgtgtctgtgagttctctatttgtctaatattccttccattgcctgtgcataagaaacattgaacataaataacttacactataactcctgttaacgtaggctccaaagagtcttcgtcctagttacattgaaaacattaccttaataaagttaatcaccagttcttaatttaaccttattacattaatgcaaagatgaagatgaagaaaaataaaattctgcctcaccttatagaagtttacaagagttttcgaatcatattcacattctcttcgctccaaatactatacaaaagggaaattaaaagaaaaaacaagattaaattctctaataacaaagcaaattacaaataatatcagcagaagtgcagattcgagttaaataagagagatttgagaagagattaacatgctactaattactggattttttaaaccaatggccccttaactatcattacagatacatacctccatggctttcctttccctttcagggccaccacgaacacaataagcagcaccccactaattgaaagaagaaaaaaaattataagtcaaacatttcaaatgaaaataaagttcactgtgttctgttcatcacaagaaaaacatcaattatcaatattaataggagcagagatcagtggtctgatgtgagtatacttacacataaagacccttctttctcctccagagtgcaagttcttgctgggtgttccggagtgcctctgtgatcgatgcatgctgtcatgaaaaatgaagagaacaaaaagagtcacaacaaagggatttataattacttacttgcgttttaactaacacagaaagaaacttaccaagatcaaatacacgcctgtaatccttgatgaacccaattattttctcatcgtaatcaaaaccggggttccatacaagtgaaccataaccgaaaacccagaaaaccatgattgaaagatacctgaaaagttacatttattagcaatgttaaaagaaaactcaaaacacaaaacattgaaacgtagaacaaaaccctctcattgaattaataacagattaaatgcaagcattcccaaatgaacaaaacgatcaaaaaagctcatttacagtttcaataatccacaaagatgaacttcgtattcaaatcaaaggcaagagaaaagaggggaatgaaaattcaccgacaggataattaattaactcagtaaataatagcaaaggcaataacggtataaggtttttcccaaaagagaaaagagaaaaacctaacaagcaaatcatcatacttttatcaagcaaaagaggaaaaagtcgcaaaataaaaacaaagagcaagtttatcaaatcaaaaacgcttttcattccatcttatatataaatcttattattgcttcagctcattttcccagcaaccaaacagatcaaaaggcacgagtgaagttaaaaccaccagcattgtcaagtttgaagccataaaaggaaacaaaactaacaaagtaaatataaaactccattaaaagaaatcgtatcattacaccgaatactcaccacgaacgcgacgacttttcccgaaaaacaaaaaaataggagagagagagataaggcttgcttcccgtgatctgaaagatcgatggggtgatgtatgtgaaagaagattaaagaaaaccaaccaacgacgacaacaaggaaggagagaaagtaagagagaaaaggttactaaacgcgattagggtttagcccaagaagagagaatattttctgtgtctctctttctctctctctgtatttctctgccttgcctttaggttgattcgtctctgactggttttaaggaggagttgtcaagttggagaagaaggcattacttatagtatataggatgtagtggaaccccctaactattccacgtatttattcaacttttgtttttattatttatattttttctatgttttcatgacatgttcatctatggatgccacatctagactctcatacatagtttttgttttatttgtctatttaattattcatttctgaaatgggaaaagccttttatttcattcattataagagtacgtttaatttgacatgtacaattttatttgtagtgtattcaatttggatgtagattttatattttaaatctaattttatttgcataataatttaaatttaatttaatttgattcataagtttagtgcgaattaaattcattatttttgattaattatattttaatatttattaaaaatatatatatttttttttacataactaacactaaaataaaataaattattattgttgtatgtctctaataacaaattataaaataaaagaacaaatttaaagaaataaaaaaaagttgtatgtaaaaaaatatttaattttattttaaattgtagataaaaaaaaaataaattatatttaagaaatgaatatatatttaatttattaaattttaaaatatatttgtatataaatttttaaatttttaaatttttattttttatattaaaatattaattgtatatacatttttaaaaaatttatataaagaagaagactccaacattatacatgaatgatagataggttaggaaacaaaagaaagaagatgacttaaatcccaaccataaattaacgcgcgatacaataatacaatatataatatcgcattttaaagatcttgcaacacaccactctaaactaaatccacatatcttgcatgcaatttcagtaatatttgtaatttttaatatataataacataattgggggaaaatatatctaattaatttgtaaaatttttaaattcttgtcttattaaagattattattattattattatttgaaaaacaaccgaggacaagtcctcccatttggcaaatggtaaattggggaaaagctcatggtcacataaatcaaactatcttatttggattggaaggaaatggtcaattgttgtggatttctctttttttttaatcagtcaaataattcttcttgtgtattttgacttaattggctaagaaaaaactccacacacaactcattcaggaaaaaaaaaaaaacaattaactttaactaatttctaagaaataaggggcgatctattggggtagtaatggctattatgattcttcaaaggtcaaattggaatgcccttaaacaaataattttatttatttatataaatatattagcatcttcaaaattccaatacggcctggcctggcctaagtttaaaacagtacaccaaattttaatatgtcatatattgaaagccctatatacaactttatttaattgtaataaatcaagatattttatgatcaattaatttcataagagtacgtgtcatattttataccttcatcatcgagacttgtcaaaatttaccaattattattattattattannnnnnnnnttattattattattattatacatgggattgtaatggtaatggaattattgttatattttttgttttaatttttaaaactttgtaatagttttacatataatgtaatgactattatattatgtgttgtaattcatattatattataaaattaatataatgatgattacatttattaaaaaatatctcttttgcctttctttgctacattacaattactatcctcattacattacattacatcatagatcacatttaattctgaataataattgttaggtaattatttgctttaattgtttatttcgtcatccttttttatgtatgcatgttacataataatcatctatatatatatatatatatatatatatttatggatgtgcaaaggcaaagcccaaatttgaagagaagaggtaagtaaatataataggaatatataagattcattgaatgtagacggtttgtggttttaacttttaactggaaccagttaactgggtttggtttggtttgatttggtgtggtgtggtaccatactcatattaatgagcgccacaaaaacgtggcgttaaagtcaaaacacaggaacttgaacacataccaaagttcattgaatctggacatggaatttatttataccaacaaacaaccaattaagccttatttttacccaaattacgtcttggttcattttctgaaaaaaaaaataatatgtatcaatttggccatcaatttattacattattattagtttacaccaaagaaaattccaaagcctctcttcacaaatagcttatatacagcttggactaattaattgttattataaattataatgatagtattaaagataacattttcttgtaaaatcattatgaggtacactaccaaaaacgacactttccacaccatgttttgctacctatgtcactaaattgattgcgatgagtttaagcgtcataagaaggcgccacttataaagtttgtagccaaaggtcttagaagatttgtcgcccatgttaaaatgtgttgcatataaagttaattttacgtcttaatgcgttgctaaaattttccctacttatcatttgtgacgatttttattttgaatgtctttaaaatttatattggaaaatttaatttcccactttcaggtacataatataatattgtaaaaatgacatatctaataaataaatagattaatcacattttgcgatgttaaattatctacgcatctttatatattgtgacccattttcatgagtcgtgtttcttataataataatcaatgcatattttaaaactagtaaataaaccgcgctttgcgagcttcacgagcagttgtttaaattttttactcacaaatgaaataaaaattaaataaaaaataataaatgaaaatcgttaccaatatatcaataatctattcatttataggaaaatgcttaggtagagtcatgaaaaacgtctaagcatacagacattttttttttcattatgtgtcactcttacatttaatactaatatataattaattccttttatattatttttttcaataattttgtgatgtcaatataagaaaagttacttgtttttttaaaaaataaataaataaagaaatttattaattaaatatatgattcaccctattaactttaaataggatttaaaaaaaataatataataataactgtcaaaaaataaaattaccctaataagaagaagtattatagatatcttttgtaagagattttggtgacagaatttttatcaaaaaataaaaaataaaaagatttggtgatagaccttgttaattgttcggtgactttcattgatgaagttaaaaggttttctctttcattagataattaacgattgaaatttagaaggaacataattttacaataaattcttcttgtcagatactagtttcaacgagaagataaactatctcggtgcaagctgtaagatatatctattaatgtaattgtgcattgtaatttatctttattttttatttattattaaaaaatttatttagagtttttctttagtttttttaagaggataaattactatgcattattattattttatttttttttaattatttttagagttattaagggtgtatcatatatataattagtaactttttttaaaacaagtaactttctttatattgatatcaagaaattattcaaaaaaaaaaaataatataagaggaattaattaaatattaatattaaatatgagagtgacacataatgaaaaaaaaattatatgaaaagacgttttttgtgactctacctaagcattttcctcgtttatattatgttattattaatttataatttttatttaacttattttcttattattaaatctctataaaaaaaacacattatatattatttcatttacaataatatattatttgagaattcttagaagtatataatgaataaaatattaaacaattgataaatctatagagttcactaaagaaatctaaaaacaatcaaaagtgattgataagcacttgcttataaaatcaaattattgttgtcaccgtatctcacttatagtcggcactatatttaaaacttatatcatcaccatatctcacttgtagtcgtcattacattcaaatcgatgtctacctcacttgtaattattttttttttaaaaaaagaaaatatatattattatatttatagtaattttttaacaataattttgttatagtataaatagatatttttatacttttaatttttatagtcactaattaataaattataatttaaaatggtgctagatatgaattaaaaaattataaatttaaaatgtatggtatggtatcttcaattaattaacattttttagtcgatgatattcactataaaaaactgttacttttagtgacaaccttttagttacaacataaattttttgtga

SEQ ID NO: 111507 - DNA, 5087 bp, Cannabis sativa
  modified_base (4764)..(4788): a, c, t, g, unknown or other
aaaaaaaaaaaaagaaagaaagaacgttgacccaactctttgacaaatgagacatgttgtaacaatgcaaaataaatctttgacaccaaattttaaaaaaaaaagaaaagaaaaaggtcaaatatttaaggggaaaatgcagactttaccgcggccgatgaaggcccccaaacaactcccgacttcaaaccccccgaaaacggctattggttgcccatggtaacagtattgtggcggggcaaggtggtttaatattttccatctcgttctccaaatcgttttctcctgttctatgtttgtcgattgtgtttctattttttctgccaaggtggcagaaaaaacacaacacggtcattgccatgccgcccaccgggcaatgccacgacaaacatagcggagaaaactataaaataaaaccccgagctgttgatcgaaaaaatttctgcgctcgcccaccaacaccccccaaatgtcattttcccaaaaatgtgatgacctgactcatggtatgcaatcccagactccaactctagacacccaatgcatgcaaagaaaagaaaaatatcccgagtatcagcagcctcaaaaggaaattgctcgactgatggccaacttggcccattcagcggattccttaatcaaatgatcatccgacgacaaacattcatttagaaagtctttgcttgaaagtgattgctgaatcaagataccagcattactacccagtgtatcagctaggtctccaaggaccccaatggctgtcttggtcaccacatcgtccctgaaaagaagtaagataaatcatgagtaacgaatcgattataaaaaagagtacagttaagagtcaaaaagtaaacaaattctatttgagcatacatgtccttctccataaatagactatccaagaactgtaggacatgaggtgcaaaaggcatcagtagttgtatcttcgctgagcctttgaatccctgaaaaatcccggagtaggcctccaaaattccatttcttaaagtattggtgtattctatcatgtcatcgtcagcaccggatgtgttgacagatagctctgcagcgccctgaagcatgggcattgcatagaccaagtacttctcgaaattctctccaattgccaaggcaatgtcgccaaagcatgaaaagatgggaggcttcacggaacggtgcaactggttgcttgacagattcttgaggagttgagtcattataccgtcacaataaggtaatatactaccttctaatgcccggcaaatatctcccaccacaccaactgtaatggcacagacctggtagtcctcgaaatcttgaagacccatttccaaatacttgtaaaactcttgcatgtactttgcgaagtcagagcctgtacaataggcaagagctccgatggcaagcatagcctcctcatgggctgtggcacttttactaccgaatactctcagaaacagggtcatcatctggtcggcaaactgcaaaaagctactcttcgttggttcagatgaacctagtttctgaatcatgacctgcaagcaaccacagagaagaccctgaagttcattgcgcttctctctctcttcagatgaactacatagtgccgtaaaagtctggtccagctccgtaataatggcaggaaccaaatgtatcactatcggagctgtatcatccgtagaacacctcacaacttcatttaaggtctcataggctgctgttcgaaggcgtgattctccagcatcagcacgatgagtcacattaagaagagcttgaataatatcttggaaaaatggagtcaatggtgaggatgattgttccacatcctcataaccctgggctaagaaatacagagcgccgcaagctttctcagcaacattaggtacatcattcatgctctgaagaagaactgtcataatctgttggcaattcgcttgggtaattatcggtgtctcaagagttgacccgtgcataaactcaaaaattcttccaagtgtccacgctgtggtatctttcacatgattatttggatcgttcatcagagcattgagcataaaggtcagagctacattaacaagaggcatgagcttttctggtgatggaccttctagaatagagccaaatgcatatgtggctgcttccctttgtctccaatctggtttcgctatgttctcttcaataaatggcattaccaatgggacaatgtcatcaccaacagtacgtgccaccaaacccaagcatgtgcctccagccattgcaatattccaagctccttcatcctgatcctgatcttcttcttgcttaagcaaagtttccaacaacaatggcacaagggccgggagagcctgctttacaaaataaaagcatggaatgtcagaatccccgctaaattctcctccatactcttctaagatatctatctcttcgtcacaaattgaactccaaaattcaacagcttgtagtgcaaccggttcttcatcttccttgatggcctttgctgtaatgttaaaaatgtcctgaatataagaagccaacctctcatagtacgttgaagatatagcaactaaacactcaaaggctgcctgtcgaatcctcaattcaggagaaagtgtggcctcacaaacaactctcataatataatctcgttccatgtcgttggaaaaatttgcttgagcaaaacccaaagcattatacaaagcacgagtagcagcaagcctgacatcattgttactctcagatgcattcatgccctgaacaacagctgtaagaatcttattcacctgggcctgctctatcgcatcaggagaaacttcctcgcatatgtacccaagagtttccaaagttgcttgccttgtgtgagccggaagctggtgagtatttgacaacaaagcttcaatcagttcaggccattgtttatgtggcaactcaatactagcaacctttgcaatgacttgcgatgcagttgaccgagcatcaagggcaggagaggtaagggtctttaacaagcaagctttaacatgggacttcacaggttggtccaatgacaaccatctttgtacaagttcgagcttcctgttgtgttctttggcatccaaagcattcttgaggatcaaaccagctaatttacgactctcagcaggcttctcatcattagctaactcgccagcaagagaaagcaaaaagcttggaagattttgctcctggaattgtttaaggttttcttctgcatgattacggacaccactatccacggcttgtgcatttaaaaggatttgtgtcacctccatcgccatttgaacctgatatataaatatttttaaaagggcatattattgtcagattagactataaaacatctacaattcttacaatttacaatcaggagacctgtaaaataggattttagagttaataactagatgaaattatgaaaataacaacagcgaaacagcaacctatagtaactagtaagattccacttgcagaaagaaatcaatcacagacacacccaagctgagatacaaacaataacacccaaagcacatgtggaagactttaacttaatataaaagtaacattagaaaacagaaaagtagggttgtctactaaaaagttgtagccttttccataccatgggttacgacctaataatggtagtttcttaagaaaatcttataaaagtaggatccaagttgtagaaaaataaagaactctgctcccaagttctaaccaattagaaaactaacccaaagattgaattgtcaaaggaatcaaatgatgacaacgatatatgacagtaagacactaaattctcttctcaccaaataattgagaaaaaaaacagatatcgaaatcaacaagtcagaatctttgcccatgaactttttaaccctatatcttttagagcagaaacttaatacatacacatatttattgaagtaaccaaaacttaatttatgatgggaagaattatcacaataaagataaattatcacagaataatatatttctcggttattttcttcttctactttagcaaatcctcccacaattgattttcctctcgcttaacaatccaaacagaacctaaagatctgtactgaaaagaaaatactacccaatcgattcaatctaagatattagtagcataatttagttcacaatatactcccattgctccaaaaacaaaacatttaataaaaaaaattaccaaaacgagtaagaaaacgaacaaccctaatcatataattttctcgcgctttccaaaaactgtcaaaaacacaaaaacctatcctccgaaagcaaaaccaaaaaaaccattaccgaatcagattttcacacaaaccaaataacgaacaatccttaatcaaacactctccatatttcacaattttccaatcaaccaaccaaacagtaaaaatcgaaacctcgaaaagattcacagagttcggatcaaaacacacagatccataatcaaattagatttaactgttagatagcatatgaaccaaaaaaaaacaccaaactcaaatacaatcaaatacttacttcgaacgagttgactcgggtaatagagcgagtgatgaatccaagtcagagagagagaaaaagtgtaacaggaaagagaagaagaagaagaagaaatgggttggcgactgtgtaaccctagcagagacagtggtaagggaacacacaagcagagacgccgatttacacagaaaattaaaattaaaataatttaattgaaaataataataatannnnnnnnnnnnnnnnnnnnnnnnntaataataataataataaagataactatattttttattttggtgaagccacgcgcggaggtggaggagcgtgagccaagagataaagaggaagcgtgttttggtggggcttgactgagtggatttggttagtgggttaatgggccttagggcttcgttttgataagaaaaaaatggattattttaaaagtatacaaaataaataaaaattataaagaggaaattacactctataccctttttatattatcctcttttatttttaccctcttttttaaattctatcatttttacctcttt

SEQ ID NO: 111508 - DNA, 2608 bp, Cannabis sativa
caacaactaagtattaatattattgaaacaatataataggatattgataagaaaatgatcataaaaacatggcaaaaggcacttacctgatagtgaaagagaaacaagttatgccttatatatatgtgagtgagacagagactgagagagaaataaaagctgaaatgcaaatgactgaaagggaaacaacttagatactaatgactgaacttaatccaggattaataaaaattaattaacttggaattcaactacctgctccaattccaaatccaaatccaaaactacaaattcttctttttttttttttttgaaatgattaatctgcaagcaagaattgacaaaatttggaaattattagaagtatactcatctagagtagaattagagagataagagaacatagataaatgaacaaaagataattgaagtacgtacctttggctttggtaatcatagatagagatcagacattagagattgctgaaacaaacactactattgcactaaactacaattttattttttttattttttttatgaaagaaattataacaagtgctttttctgagattttctttttcttttaactgaaagaaaattgaactgaaaaagaaagaagaatgggtgaaacagaactcaagtgcagaacatagtgaatgtttgatgaaaatgaaaaggaattaggaacacacaaaagttaagcagagagctttaacatgattttgaaagatttgccactgagttctataggtgtaatcagggctcagtcaagattacacttttaaaaaacaggaagtccaaaatctaaaatcaaaataaagagaaacataaaggcctttcataaccaaaaagacagcagaaaatagaaataaagaaaactaaaatacgatcattgatggagttgaattcagaagcaaattagaacaatcatttcatcctcgtcctctgactcactacttgatcaaacccttatgtttcttcaactccttgtccttatctgcatcctcgtaaaattgtttgaccatctcgttcacaaaagcttgatcataagacactgtccccacatagttgttcactgacacttgctcatttgccttaattctctttgctattgctgttaggtttggaaaccgggatttgtctaaaatcaatatagcataggtaggattaaacaccctgaaatattgaggatattcagatttgtttatctcctcaaaagcctcctgtagattaaacatttctaaagacaatcgtccgtgattcagaatcttagcatggctcactaggagagtatcatagataagcttaatggccgacattcccgtccactctgtcatttcctttatgtactcacagattttgccaaaagtgccttcatggctggcatttgaaattacagcatgcaatatgtttgacctcaatttgttacttgatcctaacatatgactgattacctcagcagtctcacatgtcaatattacatcaccatcttcatcctttactagtttgccattgtatcctgcacgagccttgatagcactagctctagccttcatgtagcgttcgtagccacgctcatttatattcttgaacagaatgaggatcagctgtccaatcattgcagctagtttgtcagcttctattggctgttcgagcttaattccactgtcttttgccataacctcatcgactgtgcttatcccatatcctttcaactctagaacatccttagcaactggatataaggtaggaatgaaattggtcaatgcgctaagatagtaagcgcacttttggatgctttctttctctacattcagcatagcaatacttgtcacagctaaggagttggcagatgttgcattcttatacttgaaatattccacattgtctataacaggaagatctattggggcaaatttctcatgtgggagctctggtagtttgtaattgcacttgaacatttccatgttaattgatccatgtgttgttttcctcttctttgctttttttgctttcttctgacgattagcctccattattagtttgtttgttgttgtttggcacctgcacaagaaactctactcactactctgctctaattaaaaagtacatatgaagtaatatctgtgcaacaaacaattcaaattaatagtgtgttgaggaagaagtggagaagacgggatgggggcaggcaggccattgatgtgacatcaattgtcgaggtggcatttaatgagattactttcgagtcccgaaagcagagcaggcgaagatgagaagttggaaaggtagaagaaggacatttaatttgttgggctgagattacaaatatcgagatatgttggaaaatccaaagagagagaatttatgaatgggaaggtagtgagtgactcttcagacaattttctgtgggataaagctccagattttgatgattctcttccaccctaacgacacctgggttaatgttgataatgtgacaatagggaaattagtaaatcatagaaatatgttagtttatgttcttatttcaaaaaaaatatagcagatgaccttaaattataaggctatgttagtaaatgtccttatttcaaaatcattaatt

SEQ ID NO: 111509 - DNA, 4812 bp, Cannabis sativa
aaaaattgttccacggtcaagttcctcctgctatagtcaaagtcatgggaatccgagaggcgttaagttggattaagatgcgacagtggacacatgtggttcttgaaacggattgtctttcggttgttcaagccttacgaagctcaattgatgcgatccatgtttggtcaagtggtgaatgtttgtaaggatatgcttaaggttttaaaaaatgttgttatttattttgttaaacgatcagctaatatgtcggctcacaactttgctagagcctctatattctatcttgattgtactttcagtttggaagttgttccaactaacttgttacctattttagtaacggagatggttatttaataaagtattatttccattaaaaaaaagtttgagaaattataattcaattgttacattaaaaaattgagttcatgcataatattaataaaaagcacgacaacaaatatttaaacttaatcattctccttaacgacaacaacaacaaatgctgtggacttaattaacaatctcttcttgtacaatacaacatttcaatttttataaaacaaaagctacttaaaaagtgtatgaattttttaagaaaattttctattttttttctttattttctgaaaaatcgtcgttatcaagaaaatcgttctcattgaagctgtcgtttcaatcaatgttgtcgtttgcataacatatgtcgttttcataaatactatcattttcacaaatactaattcattgtcattttttccagaataaagtcatctttctaaataaagagaaaagaaaggaaattaggtagagtacccactttgagtttgtttagaacaccgtattaagtcttattgtattatattatattgaattgtattttatacaatatttttatgtaaaactacatgtactattaatttttatatacacctaaatatataacattttagtataaattaaagtgtaacataatattatataaaaatataatatataatctaatttaatataatacggttacaaaacatttgacttgttgtcctacttctaatattatttgatttctacccacctaaacctttaaaattggattttccccatttctccagcccaaaacatacattattacgcttttttaactctgtgacgctacagtagccatcgtcttcttcttcacccccactaaatactaatcccatccatcggaggattctgagcttgtagtcggcagtgtattcatcatggttcatcccaacaatgtcagagtaaatatatacatatctcatatttctttactcttctttcatatatataaaacattttttgaataacttgtattagtttttttacttttgtttgttcaccttattttgttaacttcagcattgaaagattcaataatggttcggtttgatggtttgctttagttgattgtcatgcccttatgtgtttgatcaaattcctgaactaaacttcatgtgtttttgcttcttcaacactacgaaagatgggtacacaaatatatgtatgaacataatgttttcatgaatttgaattttggggtgaccttgatcgatggctgctattgattggtagcaagtttgttgagacaagtttctccttaaatatttctttttaggtaatggaatttgagtggcatttcagaagttactgcatgttttcgttgatatttttttttatcgagaataaattttctattaatcaaacaagccaattacatacaaatagagaacactccctcaaaactaattacaaatgcttacaaacacttagcatttctaagaacaatcccatccaaactagaaagcttcttatcttgaacaagactcaatctagttttgaggttctctttattgcttctatctgtatgcaatggagctaaacattttccctcaaatacacacaaatttcgatttagccaaatcacatagattgcacttgctagaatggcataggaaatttcaataaacaaaccgctcggccttttttcttgcagccagccaagaagtaattgaaatgaattaggtcaaagccactctcccaatcccttcttgatattttgcatcactctccaagagaaaggacagtcgaagaataaatgctcatgggattccaaatcccattcacaaaccaggcagtaggtacttacaacgagtacatgcatcttgacaagattgtctctggtaagaagattagagtgtaccatttgccacgtgatgaaacgatattttggtgtcgagagcttgcaccaaacagttgtcttactttcaaaacttgtcccatccaaaatcaggaattcataagcttgcccaatcgaaaatctgccattagttccagttttgatgatagcttcatgagagaaagtctcttagcctcaatattttcctccaataccaactaacatccgccttcagctcaagaaatcacacctcttgatcttttatctacaagttgttcacctattttacccaaagcacatcttgctttgtagtgctaaacccaaagatactttgccaaggtcgctttgttccatttatgaccttctcgaaatcgtaaaccaccaagctttctcgacaaataaaccagtttcaagtggccatgtgaagcctactccgattttctttttctccccaaagaaaattcttgcaaattcggtcgatctctttggctattttttgaggcttgaaatatgctcatccaataacatctgattccaattaagacagagtttattagaagagctctacctgtgaaggataagtgacggcttgcccaaatatgcaattttagctttagtttctttaagatggtatcacaatcttcatgtttccacttgataggtctaagaaaaatcccaaggtacttgaaaagaaatgtaccagtcttgaaaaaaacaacctgctgaataatagacactgtatcacctggtatccctgcaaagtagatgtttgacttctctatattagccttgagacctgaataggagctgaaatgagttaaagcctccaaaatacatttaaccgaatccctattccctttacaaaataggattaggtcattaactaaacataaactggaaagtttcaattttttgcacattgggtgaaaagagaaggctttgtctctgactttccattttagagttcgggtaaggtaatccatgactagtacaaagagaaggggagacatacgatccccttgtcttaagccttttgcaccttcaaactgttcttgtattctcccattcatcaccagtgaatagcatgagcttcgaacacaaaccattatccaatccacaaaaactcccgggaacttgtatgcttttagaagacttttcaaaaattgacaatcaattgtatcataggccttgctcaaatctattttcattaggcaccgaggagagatttattttcgatagtaccctttgattaaattctggagtatcaagacattgtgagcaagtgagggatttttgataaaagctccttgattattactaaatagacacaacaaaacctttaaaatcctattacaaatcagcttcgagatacatttatagattgtattacagtagactaccggttggtaacctacaaccttggaaggattctccactttaggaatgagcatgagtagagtttcatttaagtgctttggcaagacaccctccttaaagaaactcaaaatagcagtagagaaatcctagccaagcaagctcctgccagaaacttttaaaaaatctcgaaccaaaaccatccagaccagaactttataagttaggaattgaaaaaagcaattttttaatgtcttgaactgagaagggttgaattagttttacctgctactccatggaaacccgactgccttcttcaatacagtggggatggattgtctctgttgtagcacatgactttcccatgaagcttttgaaatgagataaaagaatggtgaacaacttttggataatcttcaactaacatcccctgctcattaatgaaagaagctattctgttagaatctcttctattcctaatgcatgcatggaagtaagcagaactttcgtctcgaaatttgagccaatcaactttgctcttttgtttcagcaagcttccatatagattactacatttcattttcttctctctagcttggtttaattccatttgtaaagactaggaatggggatctaagttggagagaaatgttagtctggttgtaagtatcccgatccaattcatagtccatcttgacatccccaaaatgagaagagttgaactttctcaaagctggctgcaatcttctcaacttgtaacacaaggttgccaagttactacccttagcatctttcctccaagattcaagcaccttctccttaaattggaaacaccacatgttgaaaaacttaaatggcatataccccaagtttctcgaattcagctgcttaatcacacaaaaacagtgatctgagacatcctcccactgaaagtaagcttctgtgttaggatggagatctaaccactcctcattcttaaagagcccatcaatcttcaaataaattttctcttctttacctagattattagtccaagtgaagtgagaaacacttcatttcatcagccaaaccttgagcaagccactggttcgcatcttttaattctccagcacttacagctttccctcctgttttgtcactgtagttcaagaccgaattaaaatcacaccactacaatgttagcctttagaggcagttttttcaaccccatttataaaaagggaagctaaagg

SEQ ID NO: 111510 - DNA, 1648 bp, Cannabis sativa
ttgcacattttttgtaattattttatttttgttgtacatttatgaaaaaagcccttaaaaaaataaaaataaaacatatataataaaataaatttgatgtacaataataacgctttaatgttataatttaatttttaacaatttcatcaacactaaaataaatgaactttttttttgtttcttgtctaatatcattatatctaggcttatggtaaaaacaagatttaaatgttgacaaacttaagagttgtaaagaaatttatgattacaagaagaatatatgataataaattatttaataaagttaattatgattaagcttcattttgtaatcttaaaaaatggaaagtgaaatctttattttctttttaaaatacttttcaactttaaatcattctataccaaagttgaagtgacttattgtgcatgttctagttgagtacataattattaaggtttgaatttattggttaactttcatattaagatcaaataaactacaaataattttaacaaaaatataaaattactaaatatatatgataatattaaaaattccaaaaagttttcattaattattaacattataattgcacattagcacatgatataaagaaactttcttttttatcttttaactatagaattatcatttttgttcctattgtagtagtgtcttttattttcaatgcatacataattaaattacatccctaattatgtttatatgacatcgtatattataattatattagaaatttatcttatttaaaaaataataataattttagcacataaaattaaatttagatataacccattataagtaggatcgatcttaagatatatgggatctaagacaaaattaaattttaagattccgatatatagtttaattattttcaaatcaataattttaatactttggtgtaattgtaaagttttttgactgtatttgttgtacattcttattatttaatattttatctacacactaacaattttctttagcacaatttcaaaattttgagtattcagggacctgagatgcacgtctagctcgctacctatagagtcagctatgattataactacaatataattatataaaaaaaaattaattattgttgaaaataaaaaatgtccctacaaaataaacaaaaatatgtctaatatatatacattatccaaagtaattaatgaaagaaaactaactattaattgacattgtatcaaaattgaagatttggtgacatggaccacatttaagaaaatattcgggccctttacgctttagctgataaatattggtcactttcacattttcaattttgtcaacttttttttgtaccaaaacaaaaaaaaattgtcataaattttaactaaatcaattgtaatatgtatcgttttacaacaattataatagtagaataaataggatttgtctcctttaaatatgactaattttttttttttttgaactttttttttgttgcaaaaattgttggtgaattataaaaaggttacttagtaatttttccctccgaactttgacatgtaccaaatgatgccccatgaataatttttgccattaaaaattcctcctaaactattgagattgtttgatttaaggacttttgtctaattt

SEQ ID NO: 111511 - DNA, 738 bp, Cannabis sativa
aagatccaccactaacaccagatcctaaccagccccaagcaagccgtcaaccaccacatttccaccatcccgcgtcatcgaaccctgccagtcacaccatgagttgctgtcagccactgcagacagacccactagcagacaaagccattcttccaccacaccaaacccacaaactccttctagtcacaccgccagttgcaccacccgtcagagccattctcagtaggtagtctctcactctcttttgtctcttttcttttattttcagatataatgaatgtattgtatatttgtaatttgtatgtatatatatttaatgtcaaatatagctatgagtttattaaatttattataaatatttttgttgatttattttgtagtctttgaatataaatgaatatattattgtgattatattattatattgactaccgagatcaatataacaaatttttattaatactttttcagattcctttacattgtatttattcttataattttttgttgtcttgatttcgtgtgtgagatgatataaaattttcactaattttgctactaattttcatatttatgtcaaaaaaaaaaataagttgctactaatttttttggctatttatgctattgattttttattttggctacatatttctattgtttttttatttattttatatattgttactaatattatttttgaattgtagataataaatttatggtcaaaggatccccatc

SEQ ID NO: 111512 - DNA, 7754 bp, Cannabis sativa
atatcatctaagaataataatactgtataacaaaatctatataccaacaacccacaacaactcataaaaaattaaataaaaaatataatcattaagtaatttacttataattctaaaaaaaatatggaaaaaaaatattaattttttatgtgacaaaaaatatataaataatcaaaaaaaaaaatgatattttcctacaaattttgaaatggagacatttactaacatcaccctataatttgagaccatttattataattttcctaacctcactataacctctaacagatgacctcaatagcagacttagcagtataccaaattactaaaatctctaacataaccctatagttcgaagttgaattttagtaggaaaaaaatgtaaccgaataattaagaaaagtaaatttttatgtttaatccaggaaaaagaaaatttgtattgaaaaaaaaaaaaacttaggtccaaccaaattttgcaaaggaaaaaaaatcttttagattgtagaacttagggaaccaaatccatacccaaggaaagaacggttacaaaaagtcaatcgccgtccagtctcaaagttccaaattttacgaaggcgtagagacagaagtcaactgtctctgccagtgttaaaaccctgctttatcttctaaacccatatatacaaaaaccctgctttctcttcattataccttgaaaatcccaggcattaatggaagtagtgtggtggaggccattgctttcgctaaccctggttttagctctcatcattcacgaagaatggatctcagctccgtcgtgcaagactgttctcaatcatgaatctgaatccgaattcggattcacccaagaaaatcaccccgatgacctcaaggtcatgatggtagctaatctactccttacgggttccgactctacttttctccatcgacttttctcagattattacatgtccaaatttttcagggtaaagtctctttctttcgtcttcttcttatcttcttttttagtttgttaagactgaaatttcaatttgttacttagtatagaagtcttatcaaagtttggcgcccgatatgctggtggttttgggagatgtttcggccaaaggttgggaattgaacaagcccaaatgggagtcagtgctccaccagtttgatcagctgttgggtccctttctggatcttcctcttcacgtcgttctcggcgaccgggatctcgggcgctgcggcgagcttaatcggaaatctgtcaattgggttgccgggaggtttccgggtctggattcggcaggttgtggcgcttttgaaatcaataacgtcagcttcgtttccctcaatgccgtggctctgctctgtggtaacgatgatttgaggtttagtgtggagaaggtcatcgagagggagaatgtggatctccgaactgaaagggagaattttgaggaagtggtgattgatgaatctgaccatggcagggaaagtgttggtggattacagtggaaggagaaggatatttcttctgggtctggtccagtactcttacttcatttcccattatgccaaataccatttccaaacattgtggatgatggcaggttagtgagttagtgaacttcttctttcattttcttgcaagctaaacacaaaccatttaataaattgattttctttgttaattgtttcatttattcttataaattagtatctgaaagaaagttaagttgacaagtttgaaattttaactatgttcaaatgtttttcttcattttgatatatgaacctataccacaatgattagcaaatagcatggtttgcaaaatttattaagtttgaacttgttaccatgtttagatggttccatttgatttagaattgttattagctttacttctttcttgtcttgtttattagttggtattatccatgttagtctatgaaatctaaataatgaaactaagcttgaacttttgtgtttaggggatctgttggggatgggccgtacgagttgctgcacaatctccctgcaaatgctactcaatacatatttcaagctcttaaaccaaggtaggactaatcttaaatgccatgatttgatcagcaccaggtctaacctctttctctcatatcgaaatgaccctactagtaggataaattgcctcctgttttgtacgttgaacttctcccgatccttcttatagtcattgatgattagttattggtcaattatttttgcaagttttcacgtgtctgcctacttaaattagaggttccacggaggtttgatcttctgcggttgattgtgtggtgcctccataaagtgcacaagtgataggattcaaatggaaaaccacttactaggctctctgttttatgcttgtggtacgtttccacatggctgatggccatttagtgaagaattatgaatttcatgcttcctaaagtttatagggtttggcgtgtctcggtattgagctcaaggtccctaatatttgtgtatgggatttttgggatattttgtaagagtaaaaaaggatttacaagaagaaaactagtgaataggaaaagagctggattatatttcctcacagtcgatggtagttcatatatattcatttaatcttctcaaggtgtgtcttcttcaaccacaagcttatgggttttgcatttgtgctttttacctctgattgcaggattatattcagtgcgcacagccatgaattttcttcttacactcatccagatgggacctatgaagtgtctgtaccagccatgtcatggaatgcaagagatgaccctggatttatttttgccattttccggagtaacaaaagagcagtaagtatcatttattgctctcttgctagggaatctcgagttgttatggcttatatatcaattctgattctattaatcttaactgtagttctaaatttaatgaagatacctcattttatatgttcaagacagtgatagaaataattcctttgtgatgccatgcgcaatgcattttttgtggcttaacatggaagccttttggttatatagaatacaaccagatagaagatttggaaggagaactattagatacaatgaattagtataattaaaatccttacaactcatatgatgtcttcttatcaatggctatttggaaaaaagcacaaaagaaaaggaaagaaagaaagaaaagaagaagatgaagatccctttttattttctttgtacttttttggtgttgttattattggtttgtgtttgtacaaaagagtttgataggttctttttatctctaatttcgagtttgtacttctgtaatcatcttcttcatattcatattggaaaaatagttctagggagagctttaacttgatcttagtgcattagtgcattacctgtgattttagatctttactatgttgtgatcttgctgagtttggtgtcgtaaaggaaaatttccaacagtggtactagagataggttgtggttgtttggatttgagctcattgaagaatgttttgtgatcaagaaattttcaagaacatcatttcttagaaaatagatgtaacaaagttccgatgggatatatttgattgcaccgatgattttagtttacggtggatgaagataagagagaattgcttaatcaacatgtatagcaaagacgttggaggatccaagcaagctaccagagaaagatgactgaagagcaagagattttgcatgttcgatagttatcctctaccttgcagataatattgtcaggcaagtaatttctgaagatatcgttgtggttgttaaaatgtggctacaattttacattacacacaacaagatctatctagaaaagaaaagctatttgagttcaagatgggttctacaaagacactaattagatcaaaacttagatgaactcaagaagattgtcataggctttgccgacatgggatgagagataaaattgatgaggacattgaggaggatcagggcattgtactactgaactccatacccaaaaaagctcgaaggatatcaaagtggtcataaaatgtggtagaggtgttgggatatgtcttcaaccatatattttttcgctattagttatccaaatatgtaactatacaatatggattgtgtaggcggatattaagataatagagactgtatattaccaataagttgactagttatataatatatttattgaccattttattatggtcacaattaaataataagcacacagcatacagatacaggtgcaattattcctacattgctactgtataagtgtatatcaacattcacacataagttaatacttctaacactccagtacaagtcctgtgtttagacttttggagcatgtgttctaatttcagttttatatcttttacaaacaaacaagaaacaatttgctcgtacattattattatttttcacaaattatagcataaatttaaaaacctagtatattactcatgtttacccaagtacttattttaattttttttgtttttttttcgatctacaagtgtacccaattactaaatttaaggtatacttgaaattccattcatcagattacggtatgaaaaaaaagcttccaacaaatttgaagctgataatgtttgatcatagtaagagagagtactcggtactgtatcatattatcccccaaaaaaaacaatcaaaatataatatgaattgggtactcttcttctcccacaagtaacacacgagagccttgttctaaaaccatcataccatcctcattggcattactcaagtggtcacaagggctcaacctgaactcaacttcacctctttcccctgctttcaacttcacactctcaaatcccaccagttgctttagtggattgcctccattatttgtgttattatttatttccctcttcatgaaaagcaacaccgaatgcttcccctccatttctccttcattctcaactccgactgaaactgaaaacgattttgtttcacagaattcttggcttagctcggaaacaataacagagtctggctgctgagcctcggctgccacagctatggaagaggacgacagattcaagtagagcttgttttgagtgggagaggagagtttgtaagaatatgtagagtaactaaggccataaccgaactcaaatactttggggcctttgtagaatcggtaagttcgacccggataaccagaagacggtgaagccctcatcctcatgtccgtcattgggatttttacataatcttttggataccaagtcactggcaatctccctcctgcgttatacaatacaaaaaagcaatagtcaaatatacacatctttatataacacattattggtacgagaatgatatattctataccttacttcaatcattttgttcaacttaatgcatgctgacgtactttttttaaataaaaatttagaataatttacaatactacaacaaaatgtgtgtgatatttcagtataaacattcaaatatgttaaaacagaataagcaacagtaccataagaataccaacctgggttatgatgaccaaatatgatttgggcaagagcaagtccaccggcttcgcctggataccctgcccacaagatgcttccaatgcggcggtcatacttagcgaaggacacatcaacagggccaccggaaagaagaacaagtacaaccggtttcttggcggctttggctactgcagagatgagctcctcttgtttacctggaagctccaagtgctcacggtcatgatcttctctctcttgtgattgatccaatccaacaaccaacactacatgatcagctcctttcgctacctcaactgccctcttgatatcgacagaggtacaattcacggcgtcagcgcagcccgggtgataagccgcgttcttaacgtacccccgaagagcttggagcagagaaatggatttgcatggaggaccgaagtagtttccttgaagggttttcggggagtctgcgttggggccaatgacggccaaggtgattgaatttgaatgtgaaaaagggaggagcttggctgaattcttcaataaaacgatgccgtttagagctgcttcaagggccagagcttggtggctttgtgaacacacttggtttggaccaatgttgccgtaaagggattttgtgggatcaccttcgaagaggcctagtctcattctaacggcgaataagttgtggagagctctgtctatttgggacactggaagctttctcttcagaacagctgattttgtgtggttctgtaagtaagaaccgcagttcacatccatacctgcactttcattaccattccatattatattatatgatttaattaattaattaattaaattgacacctacttaataagaatatgtatactaaaacgaaagtaaaaccatacaacatctaagggacacatttcactatttcagtagagggtggatctatacatttgatttaataaataatgcgaaaaattgctgattaattatagtgtgtactgtgtatacatcttaaattactaaacaacaatacttaaaattatatattttgttaaaaatatatggttaacttgacatttgtcacaatattaaatgtctaaaccaagatcacgtggtgggggtgccaattgaagattatacaattgtgtaggattattgcaatatatttacatatgtacaattatattattcctatggtgtttgatttcatctagaaaaactaaatggtattaatctacctaagctataataaggaatagttataagttcgtcggtggaaagtagagatcttatttgggtttttggacaaaagaaatcaattttggggatgagaaatcttttgcctaccctaaaactacaagtacaagtattatatattactattgttcaatttaacattaatccttattttaatttaattttaataaccaacctaaaagactagatcttttccaatcacaatattatattatgttatataataccaaatagggttacataaacaccacatttgtaaatatatatttttttcaaattcaagttcaacaccaaatattatactaaaaaatatttttttattactatatttattttttaaaatataatataacacaattaatatatatatatatatatatatattaatataaattaagacatgagaaaaaaatgtactcatggtatatactctgatattttaaatgcaataatatattagtagtgtctagtacttacctacatatgttatattgttattggtgtaattaagtatcatattacatgtaatttaatttaataactagtatagaatatcaatagacgccacctctagataatactaagcactaataatactttatagcaatgctcacacaacaacatgtatgctaaaatttacagttcaatagaacatattttagtactaaaaattgtgttttaaaaattctattaaagctaactattattattcataaggcgtctaattgtacattggtcggtttggtcgggttgtaacatatttttactaacccaatataaatattagattacaaatatttaattataatccgcccaattaaatttagaaaaagtttgacccgtttaataatttgttcaatttggtcgggttaacatgtccaaactgatcttcacttattttataattacagtagaacctctatttaagaatactcgattcaagaataacctctaatttgttataaaaaaatcaag

SEQ ID NO: 111513 - DNA, 5592 bp, Cannabis sativa
tggtaaaataattccaacagaatgccctcatgttagtcctttggttattaggtgactaatctcgagagttagcagtgctaatttttggggttaacacttgcccctagccttcaagaattctttttaagtgttcttgtcaactgagtaagttggggaattttccttgctgaagtgtgaatcttatcttctttgcgtttctctagaatgtgctcactatatatagagagcgtcccttgcttgaactacacttcataaaaacaccttggtgtagtggcaaatccttctcatcttgtctaagaggtcctgagtttgatcattcacaaggtcactatttcaaaacttatttatattatttagatgtatatatttatttttaaccacatatttaaatatacttggatattttccacacttttctccatcgtacatggcatgtgtcacccttgatcccagggtagcattataacgcttgcactttgatttatgcaacaggcttcctgctcacttcaaagaaagttacactttattctgcgaccttccttgttctaagaggtaccatgtttatctctcatttctatatttattgtctctacacttcctgtctagaatgcttgtggttgtggttcgtttgttgcctttatggtgccggttacatcacctgcacccttatcgggacatataccccatgtaatgtctagtgagctcaataccttgattttaactcttaggtgggggtgtcaaggcagtgcatctctttgaactattatgtcctaggtctcatttggaagcgaccctaaaaagagatgttttctacggccgatatcattgatattttgtcctctgatttggagggtactcaagagaacccacatgctagatatgatagattaatgtctgagaggagcaatattttgaacacattattaacgagagcgtgttgagaggtttcaagctgaaattcattcagttttgagtagagaacaagatgatttggttgccgactctaacatgtatctttctaggcttagggattatcttgttgagtctcaaaatcatataagatttcttgagagttcccttcctcctgagcctgatactccatcctattttgaggttgtcggatcttctttgggcaaggagtgtgggatcacatctgttctctccttagtcttagaggtacctaaggttagggctcaggctcataaaattcccaagagaaatagaaaatatgtggctcgtgcttatcattgcttttatgtgtctgcaggcatgactcttcccaaacaatcgatgtatcctgttgcaccccgtaggccctcttcaccttacttgcctaggcggtaggtccctccattgcctagcaaagtatccgttgtctatatagatgtcaagaacaccatgtcaacatatgggatttgtagggtaatggatactttaaacatatgtgccactaatgatttggcattgtgtaagctggggtaagatgaattcgccgtcgtaccttgccaagggagtagccttcagcaaacacattattgtggttgatgccactttacctctccatccattttttgttgacatacttgcttcctttggcattgcgcctctacaactcccctcgatggcttatgttatgctgacatgtttcgccatttccttcaagggggtgaatggctgtttctctttagccacagagttccactcaattttcaacatctatcacactaccaaatctcctagcactaacttagcactaactctttgaacgcgttacaaagatatttcaatctttatgaggatgcaagggcccctaagaatcttcttatgccaaattgtttgaaagtgtcttgcctgacaaatgtcttgcttcttgagggtgtccttgcgccgattacagagctacaacctcatagggattcctcttacgtccccaacccacttcatgatttccactcgcggtcctcaccatgaggaagatgaacctgaagaaattgtgaccccaacatcggttgcagttgttcaatgcaaatgaattgttcctgtggttggtacgaattcgagacgtcctgtcgagtcaaagaaatgtactcctcttacttccaacattctaacacttgaaacgggccgatcaatgttttctaaatgtaagaaaggcctttctttgaggcaacttcttgggaactatagctactaacgtaaggaagtcgaatcttgactggggatgttaggttcatcttcctttgagatccccactaatgtgtttgttcaccgcctatcttaacatacttcttccgtgactcatgacgagggaaaaagtcatgttacggttcctgaacctatcgatcctataggtctgattggggatgtcgagatgtaggagtcagatgggtatgccccatctacaggtgctagtctcaaaggtcaattatgtgatgagatgaatttgggaggttttggttatgcctccattgtttcctttgatgctttcaatgctcaacatcttttccaagattcattcgacccaaccaaagattttcctcaacagtcttttgatcttgatgagttttcctagtctcaatctcaaatgagccaattctctagtgagtacaacaagcatcttagtgagtaccctccctttaaatggatttggttgcataaatcttcagtagatgatcgataggaggcggctctcaaatgcagcatatgggttagtttatgctatctttgtattttaacattttgctaacgatttattgactttagtttttgccttgtaggcttctgtcttgcatcagtataacccaagctctagttcacttaaagaggggatatttatcgccttcaaaaagctctaaatgacttggccgagtataacaggcaacataatgcactccaagtgcatgtggatcatcttcagactgagttgaatgagaggcaatcctctgtgtcaagtcttacccaacaacttgaatactctctctgcatttgcgataagtattttgcaaagtcacagacctggtaggaaaaactccaggctaagattagcaaactacatcattgtctcctcatcttgaaaacaaagagcaaggaggaagaagaagacaagatcgagtgcttgttatacgttgcttgggtgaaaaattatggggtcagttatagcactctggcccccttcgcggttcacatggttgaggattttaaggctgaatgtggtgaatggagtgcagtacgctagggtaagcatcgtcgggatgctgatctttcgggtagtggcacctagcagcgtagaaaggcttcaaaattttctttaatttatggttttaaactcttggatgattgtaagactttatttttactttctgtacctttgacacttagaagctgatcttggccgagtaattctttaagttactccctgtttcgatgattcttcctactatggtaagtagattttttttgctttacttcttttgtttctttggtgtttgaaactgaagctagccgagtgactcttagggtcactatttagcagagtgacttttgtaactgatgttggtcgagtgactctgagggttactctttgaacaagtgactttggttcattttttggtcgagtgactttggtccccgcggggccgagtggcatctgttcactctctggacgagtaactttggtcactgagtgacatttgtaaccactgttagccgagtgactctgagggttactctttggcaaaatgacctttcgttcactttttggctgagtgactttggtcatcacggggctgagtggcatctgttcactctctggctgagtgactttggtcatcatgaggccgagtgacatttataactaatattggccgagtgactttgagggttactctttggccaaacaacctttgttcaatttttgaccgagtgactttggtcaccgcagggccgagtggcatctactctttggctgagtgactttggtcgccgtgaggcagagtgacatttgtaactgatgttggccgagtgactttgagggttactctatggcctaacgacctttcctactgtggtaagcaggttttcatttgagggagtattattctttgagcggtctcctcctcttatcatttattcatccttttacttggatgtgagggggtttattatacttgattgcgtcccctcttgatttatgagtgttttcttacacttgagaggtgtccatctcatttcaggccatgagtgtctttcaagatctctttgtcaatcaaaggtagctagtccttgtcggcttataatttttttaccacccccaagtgtatacattgaagcactaagaaaaggaaaaaggaaagaagtcataccaatggagttgcccaagggcttctccttgattcttatcaactaacataactaaaggatatctccattctctctctttttttcaaggattccccatgcttttctttatggcttgtctccgctatactttcttcaactcaacatggcccttcagatatcatcattgccatgggttccttggttttggtggcgaggcgcagcgaggtattgtagcattctctcgcctctttctgctcctcctttagcgtggctactcctctgggggtaggaaacttcatgaccaaatgatatatggaggttatggctttcaaacgattgaacaatggtcttcctatcaccgcattgaatgctgccaggcaattcaccactaaaaatgtggccatcaccgtggagtgcctggggctctctccaatggtaaatccataaattggtatcacacactactttcagtctttgaatctgttatcctaatttttatccatgttatgtggcatgtccacataggcaagattaatgccacatggaatgcagcgtgtcactaggtaagcaaaatcaccatacacaacaccacaattaacgagggatccaagtactcaaacaagatcaagttacaaggaaatggctagccagggggtctggctggaccacaccctggccagctaaggataatcatgtgctagcaagccctaggcaaaaggagggttggccaacataggtgaagatccttaagaagacccattcgagtggtgggcccacaatcatcctcctgcacggatcaacacacgagttcactcatgagacggctccaacaacccacagaagtagggtttcaacctcaaaatatctacctatctcttagggatattaattagttattttatatcttaaatatataataaaaagagtaatatcttctatttttgttgtgatatgttgcaacacacaagtatacgtttcgtttgaataagtattacttacaaagagtgaggtcgatcccaccaggattgtagttaagtacgttaaaattaaactcttacttctatttggctgaataaaatttgaggtaaaattaaactagaaaacaataagaataataaaactcataaagcaactaaattaataggtaaattaacaataaataaaagttagggctttcgatgtcaattgtatctattgattatgacctaatatgattatctacctattaccaattctatgcaataacaggtttac

SEQ ID NO: 111514 - DNA, 2636 bp, Cannabis sativa
tccttttctctgttttcttgttatatactgtgggctatatcttgtctagtacataccatgatatacattactgatccaacaacattagcatatggtacttttgcccattcctttttctcagtttcagtttcaaggcactgcttcattgtcacttggtactgagttatcatggattgtttggtcaactttgattatatcataaagaacttctcaataactttgttgatgtaatccttctggtttatgagtaaaattccttctttcctatttccattcagatccatccccagaatcctcttggctgctccaagatctttcgtgtcaaactatgtcccaaagccttctttaggttgttgattctaattttgtattttcttattaatagaatgttgcccacatagagtaaaagatattcatcattgtcaattgttgttcccctatattacaagcatgtgtcatgtaagctcttctgaaatccttgatttgtcatgcagttatcaaacctcctattttattacctaggagattgtttcagaccataaagagatttcctcaacttgcaaaccatctctgttccagatccttattcatacccatttggttgttccatgtaaatctcctcctctaactcgccatgtaaaatactgtcttgacatccattcgttccaattttaagtcaaattgtaccaccattgaaagcataattctaatggtcttatatttcacaattgaggaaaaaatctcattaaagtctgccccttctctctatgtgaatctttttgctactagcctagctttgtatctaggcttatccccatatgcaagtccttcctttgatcttaaagagccatttttttgagactacagattgtccttcatgtctaggaactactatccaagttttatttttcaccagggaatatatctcctcatccatagctcttgtccatttccttgagtctttttcattaatagcctcttcataagtttcaagttcatttctcatggcctctatgactgaatagaaggcatacactattatatcattccatgtgtttaaactcaatttgtcaactgatttgggatcttttaggtctatctatggctagcatgtaatccccgagctctctacttctcaactgttgttcagtgatggtaagttcagtctattaagttgagtctggttccacctgaaccaatcatcttattgattttgtctcatctagagtgcagccctctgttccacctgaacactactggtaggtgtggattgacccccctttcttgtatcagtgccacaacttgcttccttatctctgttaccgtgttagtcttgtaggaaaaatcatttttattaaagattacatctctgctaatgatgatttcgattccacctctacacttatcccataatctataatccttgaccccatgaagataatctaggaatatgcatttgtttgatctaagttctagcttgccaatactttgatgtgtaaaggctacacacccaaaaactttaatatgagataggttgggaaccttatcagaccataactctttaggggacttaagatcggttgcacttgagcttctattgatccgacaggttgttgtcatgattgcttctctccaaaatccctttagcaataatcctgaacttaacaacatgcatttgattttctctagcaaagttctcttcaacaactccattttgttgtggggtctttctaactgtcttatgcctatctatgccttattcaaaactcatcaaactcatgtttacaaaattcaaggctattatcagttttaagaatcttaattttatttctagtttcattctcctctaatttcttccactaccttttaaaagcatccaatgcatcatttttatttttaagcatatgaacccaaactttccttgaataatcatctactattgaaagaaagtaagcacatccaccaaaagtagaacccttttcaggcctctacagatcaacatgcatgttttaatttgtatgctagttttaaaacttactgttaacttaaattttcattaacaataaatgaagcttgtaaataaataattatacttataattaataaatatatgtagaacatattttgttacgtcgttttgtagttaaatctaaatactccacaaaatctttccatgtagaccatgaaagagagatgaatatatatagttagggttagttaggattagggttgtattgagctttttttgaattatgtttttctttttaaaatgagtgtgcagaactcacggaaatgacttgtagctaggttataaatcaacgaaaaaattcttccccaatcaattgtgttagttacaagaatcgatcgactcgcgtattaactgacgaaaacaatattttttggtagtagtgataaaaatataggaaaattctacaatgcaccaccttaaaatagatgtattgatgtatccctatctattttagaatctgaaataattttttaatcaaattttttctcatggtcatgtaagttgtagttatttaagacatcctgcaaaattttaagaaatctaaaaaagtttaacacgctgaaacctatgttcaaacagtgtgtgcgtgactattttattttatacg

SEQ ID NO: 111515 - DNA, 5796 bp, Cannabis sativa
  modified_base (355)..(356): a, c, t, g, unknown or other
tttttttaaaaaaaaaccatatttgtagtttggttggttagttaatgccatattttgtggcatttagttttcttgccatatttatcataagatggttcattttccccatatttttgaaactatccctatatttaattacaaaaataaattatatgttttaattttttatatataacgtgccacaagcccacaacatcaaaatgtaccaaaagttgaaaatatactagaaggagaattttctcaacttagcacaaaaaaagtaaataaataaataaggagaattatatttacagtatatacaatattaagtacacctcattattaaaagacaaaaattaaataatttttaaaaatnnctcttaatattttttttaaaatttttcctcacattattttatgttagtttcaatattttatttttatattttttttttctaaatcatgtatatatatatattttttttttctaagaaaatttcatatatttttttattttaatttttttgttataatatttaaaatttaattttttttaataggtatagtttttaagaatatgaattggaagaaaaaaattaacaaaacttaatacaattaaagatataaattttatataaaataaaaattattaatagagaaaagatttatataaaaaaatggagggttaattggaatcgtccacaaactgttgagttaagcatgttttgaagagatttaacagagaagtggttggagatgttgtgaatgattattggagatcgaaagaagattataatacagcccaaggggaccttgctaataacccaaatgattgaatgcttcaataggaggagatggttaaacaacaagagtatactattttatcgaagagctattttagttttctcaagcagtagagtaaaatcacctggttgaaatgtggagaaaaaactcgggatacttccatgcttttatgagaaaaagaaaagtagagaatcgaattattacgtacatatctaatgaagaagtggttgatgactacaataaagttgttgagcattttctaaactattttaaaaaatttatgaggagaaaaagttcagcaactagaaggattggtgttgaacgcattgagcagggaaatactctgaatgtacaatagcaagtcaatttattaagaccgttcaataacggtgatgtgaagaaggcaatgtttgggatccattcgaataagagcctggggtgagatggatttggttctagttttttcaagggcctttaggacgatattggtgatgaagttgcttaagccattctagaattttttcaagaaggtaagctttcaaagtctttgaatgaaactattatttctctaattcctaagactgagaacccaaaagatgctagtggctacaagcttattgcttgttgcaacactctctacaagtgtatatcgaaaatgctttgtgaaaggctttcaaaagtcttgccttatcttgtttagagcaatcagggggccttcattaagaatagattgcttgctcataacatcttaatcttccaagaccttctcaaagggtatacaaagaagaatatttcagctaggtgcatcatgaaaattgatttcagtaaggcatatgatactgctgattggaattttttagctgatttactaaagagcttttatttcccgtcgagatttgttaactggattctagtttgtctgaagggtactagctataagcttcttatgaatggaaggctccagggttccttcaaaggagaaaaaaggctttgtcagggagatcccatattccccattctctttattcttattatggagtatctaaccagattgctagctcagagctctaactgtaaagactttggttttcaccccctttgtaaatccctaaaactaacaaatctgtattttgcagatgatctaatcatcttttgcaaaggtaataccaagtcagtgaaaagtgtttttgatgctttcatgaaattttgtgaaaccccaggcctttcagcgaataaatccaagtctctcatttactttagaggagttaaataggatatcaaacaagaaatacttaagatgattcatatggaagaagattcctttcctctaaaatacttgggagttcatcttaggcctacaaaatggaaagcttcgaattgtggcataatcctaaataagttgaataaaaaattgaattgtaggctagcagaaacttgtcctttgctagtcgtgctcaattgattcactcagtacttcaggggatcaggaacttaggatgagcctcttcatttttccccacaaagtcacatttgctattgataaacctgtcgagactttcttcttcagggtgtaaaagataatagaagtaaaatccatctcttttcctagaaaaaggtacgcctcccaaagaagtttggtggaattgggtttcgagaaggtaaaaattggaacatagcaatgataactaagttcctttaggtgattgcgagcaaacaagacaatctttgggttaaatggattaatgtcatctatcttaaatattagaatttatggagtatcttggtcaaacatgatatgagctggtactttaaaaagattttgaagcttcgaagattaattgatgaggactgcttgtatcaagcgtgaaagaatggaaaatttaaagtgaaaaaaatttataactcgctgatcaatactcaggaagttgggtatgctaccacgatttgggacaagataattgtgcctaaacgtaaatttatttactggcatgctgttaacaatcatctcctcactagagatctcttaagaaaaattatgttagcttgccctgtgtgtgatagtgaaattgagaaccattgtcacttgttcatgcaatgtttatttactaagaaggttatggctgatgttgagatttggttaggccctcatcaatggcctcgtgacttatctgaatcacaacaatggtgtactacttcaacctctgatttgaagcatcaagtgatcaatgctgtgatttctacagtagtatactttctgtggtagaatagaaactgttgtgtgtttgagtctatttgaaacactgttagaaattagcagtgatattaaaacggttgttaagaatagggtgttgggaataggtagatgtaagattaaaataggaggtatgtatattttgaacgtaatagagagctggtagtttgttggttgtgtgttttcgtgagctgtagcttgttgctgcagtctagtttgtttttgcgagttgttgtttttgcttctggctccttgttgtaattgctctgttttttgaataaagtatattctcttgttcaaaaaaaattattaaaatagagtatctttgtgtgtaaataaaatttatcataaataaaaataaaaataaagtgcaaatctcatgctcaaatcttttttttatttgaactttcaacacaatcatttgcttatgatactacattttcataaaaaataaaattccgatttcgatcatattatttcgatacattttgatttctttttttcttgtttttttttttttgaaagaaagcctcaaagaacaccacccaaagacgcaaagaacttcaaagggggttgaggactagaatttattaaataatgacatcagtcaaaagaacgttctaaatacaagaaggatagcccgaccaccatacaatactaactatgtcagacaaatcatatttaactaaggtgtgaccaaccaaattaataattcaagaacaaaatgaaacaaaaacattctaaagcaaattacaatcaaattcaaagggtagggcctggctggtcgtgatgcttccttggctggctagacctgcattgggcagggtctggctgcccatgactccacggttgactggtgtttgttgtgtgttgattggcggtagatcaaaccaattgttagagtctggtggatctagatgcctaaagtgatcggtttcacttctcaaattatcgttttgggtgtttccacccactctcagtcctcgtcggtcgaagatcaacctctatgcaccttgctccccttggggtagaagtgatgtactctggtcggccatgggtactcctgttggtggttggtcagccagtggctgtacaatggatggtgttgctaagctagagatccctagccggcccccatgccgctagttgacgagatttggctattctcgtcatttgacctttgaggaaaggtctgtcctccctctggtaggggaagctctttcttagttcctaaagaacttggcggtagtcttccttaaagtggatccctaaggagatcttggcctcttctatcaattctttgattaaaccgtcctattagatcgctggcctcccgattgcggcgatctaattctgcttggtgagatcgaaggatgtactccaggtcatccatccatcttaggaatttgcgtctctactgagtgaaaacatcgcacttaggagcccgtggttcttcagttaggcctacacggcctgcaacttccatgagtctggccaactcaaggtcttctcttaggtccagttgaggcttgccaattgctagctcgcccactcccaagcctgtctcttcagtgaagaatcagagttgaggaccagttgttgttctagggggctgttgcccctgggtccttctttcagtgggaggcaccaatggtggatctactcttggaggcgtgggcctgccacttggatccaccggggtgctcgtgtcagtttggccagctatagtggccagacttgtagcactttttgtggtgacgggattcaccacatctgcggtattcatggggattccaattgtgactggaacctaagtgcctggatctgcgatctgtggatcttgaggaagacccaaaaatgtagatggtgtgacaggagtccttcttgtgttcaccatgacgtttgatcagatcacgatatccacaatctcaataaaagcaccaaacttttgacctcaaaaagtgatcaatcgatagtggggtcgtacatattcgatgcttaccacatatttgcacaaatgagaatgaaaagcaatagacaataagatttgttataaaggttcgacgcccttgtgatagcaggtaatgacctactctccttttagttgtatttataccgaggtaattactatccagatcgctatagctgggatttactatagtacccttaggattacaaggtatgaattaatactgacaacactaaagtgttgagaagtaccagtgtaggcgcgtgagagagaggaaatgagaaagaaagagagtttatcagacacttggagtttagaggtaggtttctagcttagaggcaacttaggttttaagcctaaggttaaggcctttatataagagacctaaaaccctatgtttacactcaaatcccttagtattcgtatagtttgttagatatttacaaaagaccaaagtgtccttgattctagatattatttagccattttgttgggcttttagggcccaattcatagcccatagctgttgtccacatgtagaagtgtccagcaaagcctgcagtgcactccttggctagccaagcccctatggaggccaggctggccagtcatggtgttgtcccaaggctgttctgccatagggccgcccaggggtggccgaccagctcttgagagggagctggttcgtcacttaatccccgtttgagtgctggggtgtttgtttgttcaggtgctgacttgaccttccttttagtgagctgttgtaacgccctgtccaacagggacgccacgt

SEQ ID NO: 111516 - DNA, 4614 bp, Cannabis sativa
ttaacaaaacacaaggtccaattagtaacttttgtaaaacagaggacccaaaatggtatttacccaaaataatatgattttgtaagtatggaaattcaaatttctctctataaatcttcaaaattatcaaaatcaccaaaggaataaaaaagagatatgcaccattagattccatttgttaatcaaaataaataaataaatataaatagataaataaataagaattaataaaacgtcgtcgtttgaagtttccctttctcccattggctggcactaacccatctcccacgaggtcttcattgcccaacggaatctctctctctctctctcttcagtactcctccattgccaaaccttcaactaaaactcaacaccaaaaacccatcacacaaaccaaccttccatattttcatctctcaactttctcatttcatccgattcataattcatttcatccaccatcacactccattgaattccattccattggagctcacactttgtgccccacccttccactcgcttgctttttcaggtatgtttccagatccaatgaattctgttttcggcattttcggactctgattttgtttagtttcacattgtcagatctgttcttatattgacttgaattctgtactcgtttttgtggtttctagattcgaattgtgatttggatctgattttgaattccttaacttttgcttgctgatccggatcttactggatttttaatttttatctgtgttgatgaaaattacggtttcaaattgttttttctgttgtgatcttttgcttttgattgatttgaaactaagcaaaagattcaaataaatttgagtaactgagtatcgtatcaatggtggatctacggtttgtacagtaataactaataataattaggtagggatgaagattcaaatgttaaatataattaatttttgctaaatttatatctgtattttcgattgcttgtatgtttacctctaatatatatttacatatacatatggtatatggaagttttactctacctaatgtggactgagcaattgaaagcgttatctgagcttgagaaggattaggtgtgaataggatgctaatttggtggcccctcttgatccctccaatgccgaaaactattatgttccctgatacctaaaattgaactaaaaattacataaccaaaagttattccataacaatagaatattctaaaatgtgaagcattgaaattgatcttgtacctaatattggactaaagatgtgaaatttttgttttctttagttatctacctatttgtatagtagttttcagttaccaccatgtttttattcctctaatttatttatttatttttgtttagaatattttgttgctgaagaagttttggacattgttggatgtgaatggatttgttagtgggggctgagggataaaagctacagtggtgaacagtgaggaacatacataatatatatatatatatttatataatcaaatatggctccagctaacaaggcggacaagaaggcaacgctagatgcagcggcatggtcgttcaatattgtcacttctgttggaataataattgtcaataaagctctaatggcttcttatggcttcagttttggtaagttggagttttgttaatacttattttttttttagtattatttgttttgatttctcttttgtagttacacattctcttatgtacatttaggctatgcgtattcatttattgattttgttcttcctggccttttcatcaagtaaaaaactttgcaaaacttctgcattttgtctttcattctctatattaacacatacaaaaccttagtataagcctcaaaatagtaattggaatcaatgctatgttttttattctctttttgactgtttttggtattgtttgttataaaattgtgttgacgaatgttgttggagtttgatattttcttgtaatctttcataactcacgagatataactttgctgcttatcctatcatttctttacagtattaaacataatcacattttgctgcagctacaacgttaaccggtatgcattttgctactacaactctgatgacacttgttcttagagggttaggatacatccaaccatctcatttaccccttccagagcttctgaaatttgttctctttgcaaacttctctattgttggaatgaatgttagtctgatgtggaattctgtgggattctatcaggtatgcttagaattttggtaaattatggttttagctattttggtatattatgcttttgtatgttacattttccattcaaatttaacttggcagattgcaaagctcagtatgatcccggtttcctgtttattggaagttcttcttgacaagatccgttattcaagagacacaaagctaagcatattaattgttctgttgggtgttggtgtttgtactgtcactgatgtgagtgtcaataccaaaggatttgttgctgcctttgttgcagtttggagtacttctctacaacagtatgtaagtagttattcttcaactattcttaaggacagagattaagtatacttctggataaaatggcttttgtagacaaaattagctatatgtgaagttatgcatgatttagccccaatagcctatgtaattttgctatatgaggacggcatatttaatttagcagggatctgacataacttgaattcaagttaatatgatgatcgattagcttataacaatgctctcctaccaaaagttgagatttttgggtggctgttgattttgggaaactaaatacccatgaattccaacagcgtaaacctttttagatctttccaaattggtgaatcttttgaccaccactttcttcaaagttctatactctacagcaatagatcattgcttcatagtcaatatggagttaggtttgtctcgagttttttaagatttagagtagtgattagagtcttcatgagatcaagtcaagtattgagtggctctgtggatgtttgatgcatatatatttatatatatatatataaaatgatctagtgagtggattatctaattgttcatgttaactcttgtctgcagtacgtacactaccttcaacggaaatattcactcggttctttcaacctcttgggacataccgccccagcccaggctgcatcacttttggtactaggccccttcctcgactattggttgacaggcaaaagagtcgatgcctataactataactttgcttctctggtacgtatttcattaatttacagtgtttttcattttggttataggtcaccacataacatgtgatcatatagttaaaagttttgattcattatatatgattaggttgacataatttcaactttggctttgtttttttttttttgtttgcagatgtttatatttatgtcttgcacaatagcagtaggaaccaacctcagccagttcatctgcattggaagatttacagcagtgtctttccaagttcttggtcacatgaaaacaatccttgttttgatcatgggattcttcttcttcggaaaagagggtctaaatctacaagttgttcttggcatggttatagctgtatgtggaatgatttggtatggtaatgcctcatccaaacccggtgggaaagaacgcaggagcctttctattcccataagcaaacaacaaaaacacggtatggattctactgaactcgacgggaaagtctaaagtgtgtgtgttcgtctaggatataaacatagaaattgttgattccaggaggaaatttctaagtgatccaaggttaggaaaaacaaaaaaacaaaattcaaaaaaaaaaaaaaaaaagaaaaacaaccccattactttgatttgtttcatccttgttttgtagtttccatatattagccaagggtatttaatcccttctttgggggattggatacatcacaggataggggaaattttcattattaaatttttaacatattttttggtcacatgatcataattatagtaattatttttcagccttttttgatttttgactgaaccacgttttatatataatttgtcatgcaattctgggctggcttctcagtattattatttacaattgtatgcaacttcatagaagtgactatccaacaagaattaatatatatttatttgccatatatttcttttagtaaagtttatttttttgataaatttaatcacaccaaaatagtatttatttaattaccaaaattcagggttatttttgatggaattgtagatatgagaaaattggtatcttaacttttttgttctttttttctcttaagaatatcatctgaaatgagataaatttacagtgagaaaccagaaaattatgatttatcattattatgtacgtatgcaagttttttttttttggttttatctttgaaatatgaaatatttttgttaattgtgaaagaatgggtaaaaaagaaaaaatacataaaagttttcgtgacattttaatgaagtgtttttttttttttttggaaaactgaatttataaagtattgattgataatttaaaaaaataaaaaataaaaggtttaattttaattttttg

SEQ ID NO: 111517 - DNA, 5293 bp, Cannabis sativa
ttttttttttttttttggtggggtcctttgtccctcctagctagctatatatatagttttaggtggttggctcaactagtggaccccacctctaagtacactaatggccatgataccttaagcttttcatgcaattttttggaccctagcttcaatcccattataaattatcatgaccttccttacccctttatgcacatctatcttttcattattttctccttcttcattctatctctctctctctacttgattattatgttcatttcttatatagaaaactaactttaatattcacaattggtggtggtgatcatcatcatcatcaaagtatattaattctaatttcttttatgtctgaagatatgaatctatctattaatggccagtctcaagtgcctcctggcttcagatttcatcccactgaggaagagcttcttcactattatttgagaaaaaaagttgcttttgaaaaaattgatcttgatgtaattcgcgaagttgatctcaacaaactcgaaccctgggatatccaaggtacgtacttaggttataagaaattgaaagatttcgttgaaattgtttgttttgaaatattttttctgaattatttttttgtgatgataatttttttagagaagtgtaagattggatctacaccgcaaaatgattggtatttctttagtcataaagacaagaaatacccaactggaacccgaaccaaccgagcaactgcggccgggttctggaaggccacgggtcgggataagatcatttatagtggttttaagagaattggactgaggaaaacacttgtgttctacaaaggaagagctccacatggtcaaaaatcagattggatcatgcatgaatatagattagatgagagtagtactactactcatgactcaactgttgtaagtacattcatatgccctagctaggcccatctaacatgttcttcaattatgatcatcatctcaaattattgattgattctcctaactttaatttaatttattatgtaaatctaattttttttttcttttttgtttcgaaaaaatagatttcaaacagtcagttatctggtgattctgtttcagaagatgggtgggtggtatgcagagtattcaagaaaaaaaattaccaaaaatcactagacagtccaaaaggcactacatcatcatccatgtcaagtgattcgaatattattatgaataataataataataacattcatcactcgatacatcagcaacaccagcaccaccaccaccagatgtcataccctaaaaacgacggcgttttggatcaaatacttcattacatgggaagaacatgtaagctagaaaatgattccttaaccaacaacatcgccaccaccgagcggtatcatcacatgagcaaaaacaccgccatgggaggtggcggcggtgaagcagttttcggccaccatcatcaaaacttcatgcatctcccaaggcttcaagagataataacaccaaccaataataataacaacaatactactaatactactactcttccttcaatgcctttattaaacgacaacgtttcaccatacaaagcttacaataataacaacaacaatagtactactactactactactaactatgatgatgagtcatacgacatgcttatggaaaccgaacccgcctccacttcagaccacccgaaacccggatccaacaacagagtaaatgactggattgcccttgacaggcttgtggcatctcagctaaatggtcatcatcataatcgtgaagaagagacaacaacagcttcaaaggcgcaattgagtaattgtttcggtgacattcaaaacgtcatgtcgttttgcactgaacaagatgaaaacgacgtcgtacaactgtcttcgtatccgtacttacgttctagaacgacgtcgtcatcgaatattattgttaataataataacaaccaaaactacaatgagaacgatcttatttggagtagtttcggaagatcatcatcttcaccttcttcttcctcagatcctttatgtcacttgtcggtataatccaagcattaattacaaatatatatatatatatatataatattttgatgaattgaagttgtactatatagggttacgtacgcatgtataagttacgtagaaatatattatatatatatatataattctataactaataagatccttttgttttggtgttacataaataaataaattaagagagaaatattattttgatttatattaataatattgttgtgtagatagataatatctttccttttgaatattaaatatttatttaaaattagtgtaattaagtaagaggtaaataatgaagtggtttattgatgtggtctttccatctgtaattatgtagctttatgttatggtcttggccttttttgttaactatattgaaaggtctcacaaaagttaattataacaggacgttgacttcttcatcccatttgataccacacactacacctaaaattaattaattatatataatatttctaaatatgaaaaatataaattgaaaatatatatataaatatattgttataatattggtgtcaactaaagagagtgaaataatcaaaccctagctcgatctctcccacctaacttacataaaccattaattaataatagataacaattaaaaggcgatcaccttttacaatatttatcttttttcttttcttttttgttgataagacaatttactaaattattggtgtatatatatatagagcacgagagaaaaaccatgaaccctataatattatatatgtaaatatagactaaaaaattacattttaattctaaataattttttgttgtaatttaaagtcacagttactcataaaaaaattatcattaaaaatattttttttaataatagtatttattgtcatcttcatcttcatgatcatcattatcatataatataatatctctttgtcacttttttttttttttttttctgtcttggctatcttgtctggggtgcaaactgctttttctttttcttcaagttgataataagagagagaagtttgcaataaatatatttgagatataaaagatatttaattttgaaatttatttgtttgttaaaatccgggcaagaataaagtttataatttttctctctttcattttgtttttttcacatatatatgtaaaaatattttctagatatatactagattggtagatctaatgatgatgaacttactaaatatatatatacaatgcatttaatcatgttacatagaaaaaaatatcagtactatacgtaactaatcatgaaggtaattaagtgtttattattcgataccactactatttatagttattatattttcacattattactatacacatatacatatataatatgtacgtgtttgtacgtatatatatacttaattatatatattctctatatatatatagtggggggacttaataatatcgtacttgcttgtgcatttatggacatgcgaaactgcgttgtgggaaagaatctattctctcaaattggtaaaagtaataattaaagattaatattctttttttttttttgaagggaaattaaagattaatattcaatgaacattaattatgtaataattatttacattagtattaatttataagggtaaatattaacttggtgtttgtgttttttttttttgtaaaaattattaattgaactatctgttttgtttaatgataaattagaatttattttgtctaaaatgatacaaatttaaatagaatatttttatcaaaataaaaattaataatataacatgatcttgaattgttatgataaaattagataaaatattatccgtttttgttagaaagtcaatttatattaaaaaaaaagttattaaaaattaaatttagagtactattttataatacaaagtcatcattttataaattagagagtctaatagtattttgcaatataaaagtcttaaatggtattagctaattaattaattactttagtttaattaattaattacgcatataaatcgtcatctaaacatggatttcagtgtggaaagttcattgtttattttcctttctttttccctaatgggatcaaaaaagggagtctagctaattaattttacctttacgttaattaatttttccccatgtcaaaaatattcacgtgtaactttcacgttaaatcaaactcggagacaaaaaaccaactgatatgataatataatttaattataaatatatagttcatgtccaattaataatcctataaataactataataaagatcaattaaccctatatgtttttttcttttcatatataatatataagataacaacattatttgaaaagtctatagctagctagaccttcatgatatacatatgtctataattcaatatatagaaatcatatgagatatatatatatatatacatatatatatatattaaggattggatttgatcatttttagttgcatggtctcgatgggatcttgtaataaattgatggggtcatatgcgctaattatggggggaaagcttatcttattatattatgattttttttaatttttggcttataataatttcttactttctctttagtgattttattttattattattttagttttctccattgatgacattgcagttttacgtgttttaatttttcttttttttattgtttttttaatgtttaagttcaattctccgttacagataaatgcttaagtttaatctttaataataataatatttaagttacatttctaaaatttttatagttgaacgttgtatcaaattattatcttattgatataattaaattaatttttaaataaaaaataaatatttcataacctagatcgaccaatcaaagactgtcatgtggccttaacttaacagttattattattgtcaaaatttaaacttaaatatttatttacaactaaaaattaaacttaaatatatatgtcacatttctttttatatatttaattttacataaagtaaaaatatttaggaactaaatttatcggtataatttataatttcatcaatattaataaattttaaaaatatatataaagaagaactactattatattcctcaacttattctattaatataattattttgcgacacatttcaaaacaatattattcactacaaaaaactgctacttttagtgacaattgtttagtcacaacataatttttt

SEQ ID NO: 111518 - DNA, 2616 bp, Cannabis sativa
  modified_base (1932)..(1933): a, c, t, g, unknown or other
catatcaaacattgtcacagggtcccaacaaccatagaactcagagtctctcgactattatttatgtagaaggaattattgaatactttaaaacatccaatataaataaataaagaaaatccgtggttaatttagatttttgtaattgtaaatagtacaaattattatttatttcttaaattttatttttagattatgaatttaagaatttatgtctaattttattaacgtgacaattgtcttgtatgatttcatttagtaaaattgaatgaaagtttttgaatcaaacaattttaataatttaaaaagaaaaaattaataacttaaaagaatttaaaaatatgatttgatacatatgaaagcttaaaaaaaaaaaatcttaattaatttattttactacatacttaattggaaaattttaatttatgtcttcctcatataaagagctatattataattaagtcatgtctataactatacaatgcctataatttactagaaatattattattattattattttaatgatttgagcttgatttctagtgttgttgtcaataatttttggtgtactctaagaaaaattaagtatagaaatttcttcataataagagagactggcaagaataataaataaaaaggtgtaataccactaactatctttatatgaacacattttttttgaaatatcactttagtaaaaatcatctaataaaatcacaataatacatgaatataagaacaaagaaataatattcgaataatattacgaatattatttctcttttctattattaagtggaggaatctctctcaattcctaaatatgtaaaagggtggttcacaaaaaaagttatgtaaaagtgaaattgtttaattctataagaaagtgaagtacttttcattcatttatttctttactaattaattaaaaaagtcataaactaatacggtaatacctacccaaaaggtggagtaaaataaagaaaaatcctagtcattaaactcactctacaagaatcttcttttaatttaatcaagtacttattccattcattagaaaaatacaaagtaatgtgttaattagggttattatgcttttttttttttttgcgtaagctactcaccaacactccactcccttcatagagtttagggaaattggttcattgactacaatttttttttttaatttaaaaaattgcatgaggcatgttccatgtcttgatgaagaggggttttatttatttattaaagaagagagaatgaaaaattatatgatgaaaatctaagttaaagtttgaaagttggacttttttgtttatgatcaattatatacagcaaatgggataattttatatttaaataataataatcattagtttatatttcccactatcaacattatgtgatcatcttaataatgatatcatccttttacaatccaaaccacaagatttagcaaaagtttcttatgtaatgaatgattggcttatcaatcttttaaatttgattttggttaaaagatatagtgagatttagtactttttttttatttctgtattatatcactattaatataattacatcaaatctcatattaattaattaaataacttttaaaaatataactgggtgtccaataataatgttctttaaatttatttttaaataatatatgaagattactttttcttaagggtgttcgcggtgcggtttttgactatttttttaaattaacctgcacatgcagttttttaatttctcaaaccgcacacgcaccgcgaaactaaaaaaccgcaaaaaatcataccgcaaaaaaggtgtggtgcggtttatgcagtttctgcagttttgactatcactaaataattaaactatcacaaatacaacaaagcttaagcaatacttgtcaaaaataccataagactnnaaaataaatatgaaaaaaaaaagtctcaagtttaaacaatacaataattagtgggtttaggttgagtcttcacatattggaccgaaataaatataaaaatttgtatttttataatatgtggtgcgatttgaaccgcatattaataattcaaaaccgcaaatcgcaccgcgcggtttaagaaaaattcaaaccgtgaccgcaccgcaaaaaattttaaaccgtatttttttttgcagtgcggtgtggtacggacggtttaagcggtttgatgaacacccctactttcttgtgaatatattttgcatgtcaatttagagtaataatttggaagtttacaaagactctcatagtcataatccaacaatgataatttgtacaagtcaaattaatttaattttaattacattatttttttatcacctacttaattataatccttctcataaatttatcattataatcatatgtcaaacaacaacaaaattaataaaactaaaaaatgattattggaaagaaaaaaaaatcaatttttatatgaaaatattcatttaatttttatcatatattttaataatttgtttgatgaatgattgatttcccaacttttctaatttatattaagctaattaggattttttcccccgaactttataacatgtactaaatcatgccctctgaatttt

SEQ ID NO: 111519 - DNA, 3622 bp, Cannabis sativa
  modified_base (340)..(352): a, c, t, g, unknown or other
  modified_base (422)..(430): a, c, t, g, unknown or other
  modified_base (484)..(487): a, c, t, g, unknown or other
  modified_base (576)..(590): a, c, t, g, unknown or other
  modified_base (1922)..(1927): a, c, t, g, unknown or other
aatttttaataaaaaaataaacgaacaaatttattattaattgcaacactttaggtggattaattatatttaggtttaactaactacatgatgctgacccttgctggccttatatatacgtgacaacatctaataatttgttattttttatttaaaaaaaaaagtcacccaataatttctgataaaccaagaactctattatataaccaatagatatattgtcaaatttaggttataagacattataaagttgatttttatttttttggaaaaggagttaattaaatatttaagtatattccactataaaaaattgtacttttagtgacaattttttagnnnnnnnnnnnnntttttgtgactaaatgtgacttaattgtgactaaaacatagtatttaattacaagttgtcactaatttannnnnnnnnacaacaaatattgtgattaaaaacacatttagtcacaataaattgtaatttttnnnnctaatacttttagccacagaccttttagtcacaacacaataataataatttatatttagccacaattttttttttatctttagtcacannnnnnnnnnnnnnnaaaagtaagattttttatagtgatcaaatattattgtttagactggacactaattaatctagctataacattatgtttctcgatccatctcatccaacacaatactatattatatgtatgtatatatatttttatgtaaaattaaaatgtgatattaatttttgtgaacatataattatacaatatattagtataaattaaaaattaacatagtacattatacaaaaatataatgtatagcacaatacaatataattaaatacaacatactactaaacaagtcttaaaagaaataagaatgttactgtatgatatatatattgttagttagcttgttaattagttgcataatattatatgattttttttttttaatttttacactttgaattttttttttttttgtatttttataaaaatctatgtaacaattaacgagcaacccacacataaaaactaccgtaataacctaaactgtaaataaaaaaatatatataaaataattctccatattatattatggtcttagttaaataatagctaccatatcatgtgattcaaaatatacagtactataattgacagtgttatataaaatataggacacgattttgttccgtgatgtactttcacgaaatgtatttcgtggtacattagataggtctcagggtacattagatgggtcttagggtacgttaccattttttaatccgaattacccttagatcaaccccagccctcagatcaaataactctcccatctaacggttatcgtacatctgaaatatattccgtgaaagtacatgatcacgggacaaaatcgtgtcccaataaaatatatagcgtagtatactactgttcccgttttgcccctttaacattactatatagtactatgtacaatattaattgtctggaaaatgagaaagattactgcttatacatagtactatatatataaatagaggagtgctaattgcaacctcatactacaacctcttagtcaacctttgcgtctgaaatcacatgccaaaatatttttttttcaaatttttttcatagtggtattcattatagttacagtatcattcctgtaaatttttaaaaaattccgaatagttttcaataccgaaaacagagttcctaatattccagtttactacgcgcgtttaaaaaacttcaaacgtattttcgacactataaagtattcaaaatttttcaaaaatttatagggatgatgttgtaagtataacgaacacccccgtaaaaaaaatttgaaaaaaaatatttcgacatatgttttcgggcgtagaggttgactaagaggttgtnnnnnnaggttgacggtagcactcctcatataaatatatttacatgcttttttttataaaaattatgattagattaggtacgtaacaatcattagggttaaggaataagaaatttgttgcgcaggttataggaaaaattcagaagtattgcttgttaaagtattacttttagttacaacgtaaaattacttgtaactaaatcatagtatttagaaataatcatacgagttatatctaatttacttttagtcacaataagtattgtaactaaatacacattcagtcataacaaattgtgatttttatgactaatatcttaacggatcttttattcacaacaaagataataatttataattagtcacaacttttttatttttttttagaaaatcagaaaagtttattaagctcaccaaaaacacttacaagataaagttacttacaaagcttttgttaaagcttccacccactctctatttgttttactcaaattcttagctttcaaagagttcactctagcacaaacactattagcaatacaattaaaaagtaaccttaacagtagggagttttttctcccaaagaaccttgtttctagcatgccaaatggaatatattgttgctgtaatgacactcaaaagaacttttctttttcctctagaaacaaatttttgccttctgaatccactttaggacatcatggagctcttttttccggttagtgataccaattttaaagccacacttgatgaatcgccaaactgctgtaaatacaattaaaaaagaggtgagaatgactctccactccacttccaaacaaacacaaggaagagttggtatgattaaatcgactaagtctgtccaaggtagacaaacaattctttaaggctagccaacttatgaacctgtgtttaggagtgcaaaatctatcacaaataccatcataacgccatctaacattccataaggcatcttggcatacaaattagcaatgaaaatctgatagtttgttaaagtcaatttgagagaagacttggtttatcctttccttggtttgaactattcatttttagtcacaaattttattgtgattaaaagtaaaaaaaaattgtagtgactttccatcatgcacattgaggccgagctattggagaggtcgacttagaaagtatgtgttgtgtcaaagatgcatgaggtatagtcaagctaatagttagctcctagccgagcaatgttgaggctagagtatggtgtgaagttctagtgctagttgagctatagtatggctctaacatggtgtataaaatgatgaacaatccaaagcattgcataatgagtgatggaggagattgcaagagcattgttacaaagtacaatattagtgcctagtactacgtacctatagaagtgacatcttataaatagttagtaacattttataatagttattaaattaaattatgtgacacgatacttaattaattacactataacaacatttttcttatgagtgtcttgagtagttgatctatgcaatccgagcttcaatgaattacaattacccttgaaaaggaaagcattggtcaattgagcttataaattaaagaactaataatggagccatatgcattatgatttgtgtatggctcaatttagtaacataatactagaaaataaaaatatcttttaaaaaatatatat

SEQ ID NO: 111520 - DNA, 3214 bp, Cannabis sativa
  modified_base (315)..(325): a, c, t, g, unknown or other
  modified_base (3062)..(3067): a, c, t, g, unknown or other
ttttactaaaatgtatcctactttacaaattatatctactattctattaggtttccaattttattacttattaagcatacaaattcaaatttccctatataaaagcaaaggatataatgtatatttttgagggaaatatattttagttctaattaaacatatatgtatagcaatatttatgatgagaaaaccccatggatcagacttctaattaatttgttactatcttctattataaattttataatttatttaggccgaggtgcatcatattcacacgactcatccagtcgattttatttatttatttatttnnnnnnnnnnntatatatatatatatacaaatttagtattatatataaatatactcattttttattgcacaattattttgagctaatggaataaaaggaaaagagattcttacacgcgctacgattaccatgacaattttaccttcatctaagttatttagaaaatttctgaaaaaaaaaattgtttaaaaaattaatatttttattatattaatattttaacctgaggcactttggaacctgtttggagaagtctctaaggcatttccctcatttatggccataatttagatacaagtgcttttgagaagtaaagaaagccatctaggccctagataaaaagctgggtgcccaggacactaagggttgatgccttgggcacccaaattgacataaccacaccgttcgtggttttgtcaatccaaatatgattccatctcgagcattattcttgttttgttcccaaaacaagatattagacttggaattaggagaaaatagcatccaagtggttgttcggcccctaaacaccactaggcaccacactgggtgcttaggtttccatttagcctggagcacagtgttcttttcatcaaacgataggtctattccaccgacacccatgtgtactagtgatcacccagtcatcactagtgattcactgggcatcactcgtgctcatcaagcaaagttgtgaagagaacttcacgagggtaaaagaataaactaaggatagttatcacatcattcaagcctctccaaatattcctaaagcccaacaaaccatgttttgggccctaagttaacattttatctcaacctaggcacccaaaggtcaactgaatctcgtagtcacttgttacagtgcacactgctcagtaaagtggccataagtcgttgaatttgtttccaaatgatgcgattcaattggcatatgaaatatattttcaaggcgaacctaagtgtgtctcacactcttgccacgattttgacatttaggcccttaaaattagcttgtgagattatgtaggctttcctaacgaatttagtgcgatttttctattattttattgtaatttaataggacctcatttccaataaatggagggctccctaacgcatcattccaacttttcattctctgtacaaggtaagagcttctccctcctcactctttctctctagaaattgtaaagtgaagctagacttagtcattttttctctagttctcttgtaaagcaattcgcttttgcgataataaatgctcaaagtagatgtagctccattaccatcgcgatatgaggaattaactactataaattgtagtgttctctatttaattattattttttctgtttgccatttttgcttattagacgataaagagttggcctttttttagcgtcaacattacccaatatatttttttaattactagttaaattaaaaatttgaaattaaatttgaaaagatttttaattttgtaatttatataattaaaatggttttaattatgttttatattaaaatttgtttaattaaaatatatattttttttcataatttgaattgttttaattataatatccattattaaaattattattaattttaataattgtaattaaattgtttatttattatggtaaattactataacccaattcgaaacttttttggtgttaaagcccaatgtttaattaatcagaatcaattaggcaggagaggatagaggcaaaaggaagcaaacaggtgtggacaatggaggagggggacgaggtcatcaattggcggggaacaaccgcgcttgggagggagagatggtatttgagagagagacaagagagacagagaaggatatacgagagtcttttttaggtttaaaactcattaaaactaagagacatgagagagaaaaaacaaagttgattttatttctttatttgcttggattttgggttatcctactcaataggttaatagtgtagacacctgaacctggacccgactgtgtgtattcagatgggtgtgcggaacttaaaattttttgtttttccatttttcttggttttttgggcgcacgttggtcgagggtagtttgttctagttttctgagtcaagatgttcaccccgaaattaaataaacatagaatattgtatataactaacgagaatagtaaaatgttgtaaagtccttttatggtaatttagatgccaaaatattttttatttatggtgagatttctttgcattcttaaccgattttctctacttaattatttggttttattgattttttctatcttagggaacaatcattttttagatggacttttccatgtttggaaacttcttgtaagagaagaaattctcttatgaaaagtttatttttatggaaactttgactattattattttccttaatgagtttgattgtgtcttgataagatcagatcaaacacactgtttatggcaagtatcaagaccaaatacatgatcgaacatgtttttggtaagttttcttttcttgtctgattcgctgcgacagaatctgtatttgatgctgcaaatcaggattttatttaggaaagttttgtacagctgtagattcaactttgtggctgtctctagggtttttatgttctataaacagatcctagagagcatccatttgaatcaactcttctagctttcattttttgcattttttcatttgtgaagagagagttctttttgtgagaacctagnnnnnnatctaggttctagtgttttcatatttattcttactttgtctaagggttggtaagaacacttgattgaacaaaagagagatcttcgggagaagacttgttcaagccttacttcgggaggaagtaagcacgcacacttcaaagacgaag

SEQ ID NO: 111521 - DNA, 3030 bp, Cannabis sativa
attcttttttccaattgaatttttcaaattattatacatcgatgatcgatccaatttatagtcatatattattaatatacaccaccacacatcttattcatatttattgtttttgcaacaccttatattaataagaattaattgtattatgacaagaattttgtactttttattgactttttggagaaaaaaacatatttaatttgaatgaaaatatacaagaagcaaataaaatcgcattttttatactattttttacaggcttttctttataaataaagtttagtaccaatcattgagtgattgagcagttcatttcattcatcttcactttattcatttctctttctctttcatttgtttccctgctcaaataactctgttaactcagagtttttacatggtattagagccatgtctaattaaagacccattccacctgaacaagaaagatcataatagcaacagaatgatccagctcgagtggctcttccaacaacaatcttcttcccctgaatcttcaacttaattgtatgaactttacaatctagagatctttaatcctggttattgtttgagcgtatgatttgacattttgaatcaactatctgagtggagttcaagagatctcttgtgtatttttgttatgttagagacaaagtgtcgccttctctaattactacaaaactaagaaaagtagctgacgggtccaaggacttttagagcgaaatatgtttgaagatcagagataacagtattgatttgagtgacatccttaccagtaattaggatattgtcaacatacaccaaaagtagcagttgtaaagaatagactagaatcaaccttgctattgttaaatccccacagtaatagagatgacttgagtgtgtcaaaccatgcccgaggagcttattttaaatcataaattgccttattcaatttgcagacatatataattgggaaattgaggatctacaaatccttgttgctgatgcatatatacttcttcctgtaactcaccattaaggaagacaatattgatgtcaatctgttgaatgtcccgcccatgtgttacagtcaaggtgaagatgatacgaattatacacgacttgacaatagggctataggtttcaaagaaatcaaactcttgggaatttgttgaaacctttggaagctaaccaagctttgaacctttccacagaacaactttattctatatacacccacttgttgtgtattatagtcatttctgataaaggaggcactaatgtttaggttctgtttttcttgagagcaacaaattcagtgttcatggctctattccagcttgggttagccaaagcttcttttatcgacctaggttcaaagtcagtagtcttgatggcaaggtacattttgggtttaaaaatacaaagtttttattgagtgatcattgtatggttgttatgagtgaaaggcaaactgtgagtacttgaattggaattaacagattcacttgatgaagttaagtgtggttgaagttctggactgtgatgtgattgagaactaaacacaggtgacaactgagaatcagacacttgaggtgagtgtatggagcttagagactcatcagagtgataggtagaattggtagctgagataattggatgtagaggattagatgtggggatttgaaaagcaaggctgattctagtctattctttacaagaaaaaatgggaaattgctactacttttggtgtatgttgatgatatcctaattgctagtgagggtgtcactcaaatcaacattatgatctctgatcttcaaacatattttgctctaaaagtctttggacttgtcagctattttcttggattttgttgtaattagacaaggcaatactttatctttaacacaatgaaaatacacaagagatctcttgaactccactcagtttgttgattcaaaatgtcaaactactccaatgtgctccaccacaaagatgtctcagcatattagcacaccaatgtagaactccacaatgtactaatacgtacttggtgctctttagtacctcaccatgacttgtccgaacattgcttttgctgtaactcgtttgagtcaatttcaacaagctcctacctcagaacactggagtgcctgtaagagaattcttaggtatctttctggcactcaagttactggtttacagtttaaagctttctcgagacttgacttacaagggttcactaatgtcgattgggcaggttgttatgatgatagaaaatctacatctagttattgcatatactttggaggcaatttagtcagttggtgttcaaggaataaactgtggtggctagatctagcactgagtttgaatattgtgctctaactttagccacaattgagattacatggcttcaatctctgttaacacaaataggagtttaacttctacaaattctaattttatggtgtgacaacttaggagcgggatctttggcatctaatccagtatttcacactcgcaggaaacacattgaagttgatcttcattttgtaaagaacaaagtcctagctcaacaattagatgttagatatgttgattcctcacatcaacaatatgtgaggaatacaagttaacacatagacatgtataacttgaggggacatcagaatacaagaagaagaaagttcgttaggcagttaggcttttagttattaacctttaattatgtttaataatttcatgtttaaattagttagttagctacattttttgtttacagctgtattttcctcttttcttgtattcagtcatcaatgtcttctataaataaagttcagtgccaattaaaactgaatattttgagcgggttcaactcgaactcgaacaacccacccgaacccaaactagtgaacctgcaaattttttttaaaaaaaatgttcagtcgggttgggttcaacccggtatccttcggacgggtttgcgggttgagtttttaggagtactgggtttcggttgaacccgaacccgcccgcca

SEQ ID NO: 111522 - DNA, 5193 bp, Cannabis sativa
  modified_base (591)..(614): a, c, t, g, unknown or other
ttattcaatgaagttgatatttcatctcaaaaaaaaaaaaaaaaaaatacttaatcaaaatattttatattttacagagccaaattgtctatcccattttagtgttttcttttaatataaaaaagaaatctaacaatttatgctttaatataggggtattcataaaatagccgattcaatccaatctgcaaagtgcggatatctgtggattgaattggattgaaaaatttaaaattcgcacttatgcggattgaatgttgattgacatgtaaaagtaatcgtttcaatccaatctacacatatttattaaaaaaaatttttaaaaaaattatatatacaaataacaatttaatgtaaaaaaaatagtaatttaaaagtctaatacatataatacaattatattttaaaacttaatagataatatgtatatttcattcttatatataattttttttctacatacaatttaaaataaaactaaacatttctttatacatataattttttttatcttcctttaaatttattatttattatttgttattttagttattttaatatatacttttgaagacataaaataacaataannnnnnnnnnnnnnnnnnnnnnnntgtgaaaaaaaaaatatttttcttataaatataaaataatttaatattaaaaagtaaccaatctaaaataacagatccaatccgcactttagcggattgaatttgagctattgtgcgaattgaatacaaaaaataaaatctgtacttagtgcggatcggatgcactatgagtaaaatagtgcggattagattggatgaacaccctacttaaatatattgcatggtctaataacatacttttctattaaatatcaaacaaaatatgctaccctttttttagtatcaaatataccccttaaataataaaactaaacctcttcccctctcttccctctcttattctcctctctctaaggtcatacacacactctttgtcggagtccatcaacttagcttgacaaccaagtgtgtactaggagcaacccaaactcccttgcccacataattcttaaaaaaaataatgggtatgtaatttaattagtaattattgttagatttttgttgtatttagttgtatttaggttgatatgaatggatctacacatattcttctttttatttacttgttttgttcctgaaacttgatctgctcgaattctatgtttttcgggttttttcgagttttaacgatgtcgttatcgatatctagcgacatgagagtgcgctggaggttaggggtgacttttaacgacatgtagcgatagaatttatgatactaggaaagatttgttatctacttataattttagcgatgtctatcaatattatttgcgatatgtgtcaatagtttatagaaatagtatttggtgaagtagagaatgaaatttagtaactagtagcgatttgttgcgatgcaattgtcgatatggttcacgacatattgcgacatctcttgcaatgtttctcgatatatttttttcttacctaatttttttctattttgtttgcagattcaactgtatttgtggttgtacgtattttttccttccccaaggcatatgtcgcaacatgtcgataaatgtgtcaccacatgttgttaaccacaacaaggtaaagagaaaacaatcaaaagacatcaatatcgcaaaatatatcgacaacaaattgctacattttgctaactacaacaaggaaaaaagaaaaacaatcaaaagatatcaaaaatgcaaatgatgttgataacatatagctacatttcgccaagggtttcaacttccaagaacttatataatgtcgcgagatgtcgtaaactatgtcgactaatgtcactaattgttagagcttcctagtctaacaaaactatgtcgataaaattcgctatgtcgagaaacgttgctaaaagacaaataactaccacatttcattctaatttgtatatgcttgaattctgacttcagatgtggctgaaaggaaaatgcattggccaggagtttgcttgatgtattgcaagactctatgtgctgcattgagatggctagcctttggtacaactaaaattgactcagtttattaactgagtatgaaatatcaggtctagttattgttaggtactgcaacttcccaacaattcttctatacagtgttagatcagccaattttcctttttcatcttggccaagtttaagattagcctccataggtgtactcattggtttgcacccaagttggccaaggtcttctagtaactgcaaagcatatggcctttgagagacataaattcctttgtctgattgagcaatctctaatcccaggaagtactttagctggcccaagtcttttagttgaaacttggcattcaatcttatttataaagcattaagctcttgtatgttgttgctggccaagatgacatcatccacatataccagcacaaaaataaaacctccatgaaagtgtttgatgaacaaatagtgatctgttgcagagtgagaaaatccttcatcatacaaagcactagaaaatttggcaaaccattgtctggatgcccattttaacccatacaagaattttcttaatttacaaacagggtttggtggcaactcccccttatgtctatacctaggagatagagacatatagacatcttcatggagatcaccatgcaaaaaggcattgttgacatctaattggtgaagataccaaccttggattgtagcaagtgcaagaattagtttgactgtgacaagcatagttacaggtgcaaaagtgtttatatagtctattccttcttgctggttgtaacccttgccaaccaatcttgctttgaacctttccacacttccatcaacattgaatttgattttatatacccatttacaaccaattacatgttggtctgcaggcaaggaaaccactatccaggtctcattcttttccagtgcatttatttcagtgtccatggcattgtcccactctggaatgccttgagcttgattgaaaaaatctggctcgaaatggctagatatggccagcacagcaactctgaaagtaacagatagccagtgatatgaaatgacttgtgagagaggatgtggagtgacaaaaacaccctgagacatgtgagtagaagcattagtggctaaatagcaatgataatcttgaagataggaaggtttagtaacttttcttcctattttggtttgaggattggaagcaggtggatcaggattaccaacatcagaactgatctcaggttgatcagaattgtcaatagattgattatgaataggaacacaatgatcattattggatggaccattgtcattaggatgtgtgttaagctgagagttataagaaaaattgggtggtgtttcagagaaaattttttcatagacagttggaagaccacctgaatgcacaaagggaaaaatgtgttcataaaaatacacatccatggaatgaaaaattgtgtttaaattgaggtcaagtgatctataggctttcatgcctgtagggtaaccaagaaaaacatatggagcagatcttggtgaaaacttggatctagattgactcaatgttgaagcataggttaagcagccaaatactttcaagtgttcataggctggtggcttaaaatatataatatcaaagggagatttgtgtttcaaattagtagtgggggtgggggttttgttaatcaaatatgcactagtagctttgcattctccccagtaacacaagggaatgtaggattggaaaagaagagctcgagcaacattaagaaggcgctgatgatttctctccactacaaaatttttttgtggtctttgaacacaggaatagtaatgcatgatgtcaaggtctttaaacagcacatcaaactgcaattccttagcattatcaaatctaaaggctttaattattcgattgaactgagtttgcaccaattttataaacagtagaatgacagtttgtgcctcaggtttgtgcttaataaggtggatccatgtgtacctagagcaatcatctataatggtgataaaatatttaaagccctcatgtgttatagtattgaaaggcctccatatatcaacatgtatcaaatcaaagcaatgctcagaaaaattgtgattggatatgaaaggcagtctcctttgtttggcataatggcatatggaacaatgaaataaagagttaaaatctgaatgaaaattcaaagttttatttaatggatgaatttcgatacaagagggatatctcaacctataatgccatacaatatctttattgatttttgaatcagaaatggaagaaaaaacagaaacaaaatgatccttattgaattgattacatttcagaaaatagagattgccatacttctcacccatcccaatcaccttgttcctcatagtgtcctggatgacacaacgaacataagaaaacatgaatgtgcaattagttgtagttgttaaagaattaacagataatagattgcatttgaatgaaggcacataaagcacattttcaagtagggtgtacatcggtcggattggtcaggttatagtgtatttttaccaacccaatataaatgtcaggttgcaaatatctaattgtaacccgtccaatgaaaaaaaaagaaaagtgtaacccgcccaatgatttttgtcagtttggtcaggttaagccgtttaaaccgatctttattattattattttttattattgttagtttttggtgttcaaataattgattttaaaaaataaatgtatagtatatgcctttcaaaattaaaatagttatagtttaaattaatgttaaaaaataaatatgaattgaataaacattaaagtattaaaatatttttcaaaaaatagaatacaaaaatatactcatatgtaaattctaaatttcaacttcaatattcatgtacaatcaaaattatcaactataaattcaaaatttcaaaatacacactataaaatacaaactttaaatgtaaaatagtttaactattaaacgtaatttatatatatgtaataaataattgggttaatttcacaaatgcacaaaaataacaaaaaaacaactaaaatacggtttcacgaaattttaaataattttatgatttttttgatttta

SEQ ID NO: 111523 - DNA, 4505 bp, Cannabis sativa
aggcgcattgaggcgtaagcctcgattattaattaaaataatatttttagagtaactaaaaataccaagaataaataatgtcttataaataccggaggaaaatgcggcttatcacttgactggtatttatggtgagcccaataaatctcttagagcacacacaacaacttttctaaaattgaaaagctttaaaaaatttaaaaaatcgtactaaaaacacgctatagcaaatgctctaaactccttcattttaaagtttatttaaaatacaccattcatactctacattaataaaatattattcattgatctaaatatattttatgaattgttttggattttaataattattttgtattggaatatgtgtatatattagtattatatatttgaaataaaaaaaatataataattttttaaaaaagtagagttttggtaatgtattttaaagaagttgatttatgatatgtaaaagtgtgctgtaaaatagagaaaatagagttttggtgatatattttaaagaataaagtagataagctattgggagtgcttttagaaagaatacttggaatctgattcacacttttaaaggggtcttcgtgatcataatgctaattttcttggggctatttccaagtgcggaagtaggacactacaacctgatttggcagaagctttgagggtcaaagaagctctaagttggatgaagattcattggtggaaaaatgtgatccttcaaacagattgccttgttgttgttcaagaaattcgaagtaatgtggctatggattcttattttgggcatatcattgggtagtgtcattccttgcgattagagcttggaagtgttttattactttttgttagatggtctactaatagtatggctcatttcttagcatgagctttttgctttcctgcagatcgtatttttactgagctgtctatttgttctgagttcaagaatgtattattgaacaatttgtattaataaagtcttttcttttattttgcacgtagcaatgaaaattaaataaattgaattaagtttacctgacactgaattaaatgaacagccaaccaaggtggaagccatgcaccatgaacctagttataaaccataaaataaattagtatgtcaagtggcataaaacagcagaggaaacaaagaataataatgaaaattcctgcttttggaggtggaagcagatgtaggatttggtggaagtacccaggtttgctttggccacatgtctggttggccaggaaaaggaattctcgcattttttgagacaaggtccaagaagaagattttatgttacagagagtgcatttctaggcatgtatctccttaggcctattctaaggaaacagttcaagagctctccttttttcaccatttattgcaatcagaatattaaaatctatgtttctgacttgtttaaaatttcttcttcattaataaagcttctaggtttcgtataataataatagcacaatttgcaattatggttgcagtagtaaatcaagattttctctaaaatacatatcaaagttagtatcacctataagggaaatgcgttcaacaaaacaacaccgcctatgattaatctaccaagacaaagagtataaaagcttaatcattctgaaaagttaaattcagacattggaaaaaggagctaagaaaagaaaaattaaagatgttggaaagcataaacataaaattaaaagaaaaaaaaaaagaaaaaggtcaatctaacaattacctctgttaactctttaatttttgcagtggcctcgtacttggccttcaccatttcctcctgaattaaggaaaataaactgcttataaaaataatcagagcaccaaaaacatggaacatttagcagcactcatcaactagccacattacctcagccactttaagagcacgttcaatcttccgaatttttgatttttgttcctcattaactttctggagctgcaatatgaagcaattcaagttgcatactacatatatctaactcatacagaagataaatacaactagtttcgaataatataactatcgtccagcacgtaataatccaactgaaaagatattcaaatttacattttagtattttacgttttactgaaatccatagaggaacaaacagaagaacatctctacatcctagtgtatctctagaaatccatgtgctgatgaaaagataaaacacacatctcaaagaggcataggagaatacacagatgcatacattctgtattgttgaactcaattcgttgaacttcttttcaacttcaattgccttagctttcaaagcctccttctcctttttttgtgtttccacttcctttctcagtttttccacctgcatggaagttagagtgttacaaggatgatataacagagtgacaatgaacataactcatttaccctctacatccaatatctaacctgcttctccaattcaccagcacgtgcataagcttttccgacctgctcttctgcatctacagtcccttttttctgagaataaataaaatagtttaaaaattgatgaaaatgagcagaagttctacaaaacttaaacttaactgtttatgccttcaaaagaaaattagcatcacaacatgtaaagtgaccgtgcaagtacgtataacaaacaagagacgatttaaaaacatgcaataagaatccaatctttggatgttagaaccataccaagtgtcacgtccacaaaagtgaaaggaagtataaacgaaatacagctaaaatgaagttggaaaacttgatataagcaccaacctgaagggaggcaacctcatcatgcaaggatgaaatgctatctgacttctcttgaatgattttttccttctctgctatcaaatcattcttccctttcagttccttggttttctcctcaacttgggattcttgataataaacatgtgtcagcaaaacagatcacccgcttaatcaagcaatgctcattgcatagaaattatttttataccaaaaaaaaatggagctatttaaatataacagggttctgcagtatagtctacgaaacagaattattcttattcaccttgtaattgaaaatgtctatacccattgcttaaattgagtatataaaactctattgtctactgctaattgcaaacttattttttaaaccaagatccctttgaccactgacatgtcaaaataaattcaattgacataaaaacaaaaaagcaataagtaaaaatatattgtggggaagcagatccgagtactaaaatacactttatttcctgtgaaggaaagacaaatcgtaataatttcattcaactttcgctaggttgctggtcaaaaaatagtaaagtacatgaataatataagtaccataaacttaaaaaatagcactacttctgcttggcgaccaataaaatcaaaaaaaaaaagtttacaggaataagattcaaatcgaatttaaagaccgctccacaatcaaaacgctatagaacgtagaatcttaccgagagcttggatcttagactttagttcatcgaactcgatcttgtgagtggacgaatcagaggcgacggatccatcaacctcgttttctccaccgacggaaacgtcagccctaacatgagtaaaaactagggctaagaagagtgatagaaggatgagcttcgtggcggccatggaacacgcagttacaggctccaaaactcaaaagagttagagagagagagagagagagaggaatgaattgtggtgaagagtttggttcttatagcagttgggtttaaatatcatttttatttatgagaaaccaaaccaaaccacacggcaacagtatcttattttctccaaaccttagagtatctccaatgggttgaatagttacgtgaagtgttaatgtacacaatggtaataagtcaattttttcactagaaaaaaagttgttttttatttaaaaaattattaatttaatgtaatgtggaattaactattaaagtatttttcaaaaaaataaaatgtgacaaattttatttagatgagagagaaaattaaaaaattaatattttaaaataatatgtgtattttaacaactataaatattatcttggatgcttataacataaaagggaaagaaaaaagaaaaagttttattttttatttttagggaaaaagattatgaatttttttggagaaagcaatgtttcctttcttctcaatacttttttttctaaaaataaaatgtccatatacacaaattttctacattttactaaatacattcaaacgtgtataactttgaatatgtaatctagattttgactctttgaaagaaagaaaagtataggatctaatatgacacttgattgacttatgtgtccaacttttaaatcttccaatcttatttttttccttattaataaacatcaaactttatataatatatacgcgggtaaataacggcataagtacccaaagtttaaagtt

SEQ ID NO: 111524 - DNA, 3598 bp, Cannabis sativa
  modified_base (51)..(55): a, c, t, g, unknown or other
  modified_base (3174)..(3181): a, c, t, g, unknown or other
  modified_base (3540)..(3543): a, c, t, g, unknown or other
tgtgaaccatgcaacataaaatcaatttctgatcttatattaattagtaannnnnattatattgaaatgcgttttatttagggcacaaaaccgaacactaatgacactaatgtcatgctaggccaactagccctatatgacttaaaagttgttacttctatataccgcctctgtgtgaaacttttgacaaggaatggagtgagttgtcttaagggaaatcaaaggattgcatagggatgctacgacctttctctaaccaaggccaaaaatgaaccaatattttgccagagttcagagaatggtcaaagcattgctaaattaggattcgccaaggagagtatgaagaaatggatccccaccttgggaagccaattagaaatgtaaggcaaatcaacaagatgttagcttatactactacaaagttatgccatttgtgctcaagaatattggggttacctaccgaaggctagtcaacaagatgttcaaagaccaaaatggacgtaacatgaaagtatatgtggatgacatgctcgtcaaattcagaaaggctaggtggcagatagaagacctagacaaatacttcaaaatcgtcacaaaatactacatcaaagacaatcccttaaagtgttcctttgggtcagctcaggtaagtttgttggtttcgctgttaatgctcaaggaatagaagcaaatttagaaaaattcaagtctttctggatatgaagtcgccaacaaaggtaaaagaagttcaaagtcttactggtcagatagccacactaagcaggttgtgtgaaagttgaaagaaaagtgtgttcctttcttcaacatccttcgaggtagcaagaaatttaagtggacagaggaatgctgaaatgcattccaatagctaaagaagtaactcacacaacctcctattttatcaaaacctctgaacggagaagagctaggaatctaccacgcactacaacatataagggtattaacgacattaaaaatatgtcgtgtgaatcagttgatgacattttttgtgatgttgttgaatgggggtgccgtagaaagtcttgcactttcaataacatttttttagtatcatgcttattgttgttataaatttttttaacaacactaatgtaatgacatatattgaatcttttattgacattttataaatgttatgtgttatatttttaactattagaaactaatgtggttataatattacacatgaatttgtgaaatgttatgttaaaattttatacaacatccaataaatgttattactgatggatatcagtgacacttaaataatgaagttaatatattaacatataacataaaaaaatgttatgtatataagtttgtacaacttctagaaagtatcgttaattatctgttaatgattttaaaattatgtcactgaaaatacaaaaaaattattattacatattttgggaaaattgattttgattaatgatttattttattttacagtatattaattcttattaaattaatgctctaaattttaattgttaattaaaattgttcttgtttacataaaaaagaaaaaataattgtaaagaaaaaatcagttatagaaatgataatagtactagatatatacaatgaaagttctttacaaaaatatataaataaaaaaaaacataaaataacatatgtattatttagtgcctaacacctaacgaaaattatagctaattacaatatacatattaacatttatatacattatgaagcatgtatgacaaaataaacaaattgatgaagcttaagtactataaaggcatgtttatgcaacttccaagtctttcaatataactagcaacctttctccatcagattttttatcagcacttccacacttaaaattatgatgtttgccatgtttgttccacccaagggctttgggactatccacaatcattgattacaatcatgtggatactcagtactccatgtgtttgcacctgtaacagattgaatccaatgagccaataagtattcaggagacctccaaagtgtaaattcaggtttgagtgacatcaatgacaatgatggttctctttctttctagtgacactaatgactactgaatagagtctccacgaaataacataaccaacgcaattatataactacaaaccaatgatcatcattccaacaaaaactggtaaagcctctcttaagtattaaaaaaattacccgcaatgataataaggtaaataaggacgagaatgaggcagaagaatccaactaaggacgagacagcagaacaaagctcagtagaaaccaatcaaaaaactaccaatgtgtgtaaaattaataaaaaggcaaaactccaatgccgtggttgacgacaatgatgaccaaaagagtaaacagaactccaacctaaacaaacgagcataagaatacttgattaatgatctttgtaataacagaaaatttagtgtactttcaatataaattagattaaatgagttatgagtatgttcaccttgttagtgtaagtaaatagtcctatttggtagaagttcagaaattattgctccaagaaatctcaaaagagcaccagaagcacccacagaagtattattttgaataaatagtgaaaaaaatatactccccccaaagcctgataagaggtgtatgattccaattcacactgccaaatgttacaccctcaaaacaaagacaattagaccacatttgcaagaggttcactacaatttcaagcttatgtaaaactagctttttaaaaataataaaaaaagaacataccaaagccgaattgcttctctaagcgaattccgatagagaccaaactaaacatgcatgttcacaagacaatgaatgacaccagcgtgcaaccataaacaagtgacaagactccatccttgatgattatgaaccaccaaaatattagctcaagtcaatagaagagaatcatggacaaaacatgttaaatattcaaagtcaaacagaaaatttctcgccaaagattacacaattgatgatcataaagacacctaagaacaccaatcataaattgagacgcaatattctaaaaattattacaaaataacaaattaactatagaataaataataaattaatttaccagaagtaacaattttttttttatatatatannnnnnnntatatatatatatatatgcacaaaccaaataattaccctcaccaatttttaccagtaataatcatatgaattgagaagtgcgtataaaaataaatttaatagggcagtatacattaattagcagtggagcgaaaaatagagtaccaaaaattgatagttatcataaatctagaaaataaagaagacaaagagaagttggagatattattgaattgcataaaaagagttatagtgaaatggtcctaggcaaagattactcaaatcatgcatattcataagtatctctttatcaccgctatatatattacccaataatatctaataggaataattatataaggcactattttttgtaaaannnntacatttttacgttcaaagaatgtatttttacatttttacggttttccaaaaaat

SEQ ID NO: 111525 - DNA, 3745 bp, Cannabis sativa
agagagagagagagagagatgcacttaacgttaaaaaagaattcatgcagaagtgataatttgtatttgataggaaaaagacgcaaagagaagagagtgtggtaccaaacattcgacctttatacaacacaacaagggcaaccctttaaaattcaacacagagaattggaagaggctgacaacataagccaaatacttgcccacgatatgtctccaaaccaaacaattcctctttaaaacacatctctctctagacaatcctccatgccatccattaatttcaaaagttgatcttacttgtataatattttaaattaattattgctcttttcaatattaaaattactatgtagcctccattactgctagtacttttgattggtttgacgtttgtgcatgtatatcaaacttattagatacagataatcactatatagtgcatgcaaattagtgagtttttttgtgtgtatatatatgtatgtttatgtcaaaaagtggaataaatattgctataggatgatttgactagcttgttgtgtggttttatcttggtgttttcttctagcttaacatatatatattggtgtttgttcttaaagagatgctgtctgcttatcaattattatatggtgagtctttgttattatgacatttataacttgaaggatggaagtacctttatttatttatttatttttaaattttcaaaattttagcaaattcaaaattaagaagctaaagttataaagatggtgataaaatatttgatgaacataaatatatatgtagtattggagtgagatcaaataatgatcaatcattgagagaaagcactaacttatttccttgtcccatcatgcatgctatgcacatggtattgttatatacataatatttatatatattaccttctatatattaaatttttgagataatattcaagcacaaaaacatcatgatgtgtagcatacatcgagttatatatttttatttttgcacgatatttaaaattaccaattctccaattttgtacaaattcaatagtgttttctataaagccttcaatatatattaatccctagctatcatgacaaagaacagaaatttgcagcttatttatagctgtcctaacgaatttaaatggtcagcccaaatttgatgtacgtacgtacgtaccaaaagattttatttgccatggataatatatgtatttgaattttatgtgatacgagatacatatatatggacctctatagggttggtacgtagttgtatcttttattttgacctggtttctcttggcatgtagctaagcactttgagtttggaatagactaatccttctgaaatgaacttccccaaatctgtggattcattcttcttatttgggcataggattcggatttggggatagcggcttgtgaaggtcttatcttagaagaacgaatgaatctgacaaggtggttgccagtgaatgggccttctgggctggattttgggacaattgggcccagtgcgagtaccacaacttggactatgcctgagtgggctgacatgtatgtgacgccccacacgattattattgtgttataaactgttgcttgtttctagacaatgaaagattgatgctgagaggagtggggaagacatgttgggggagaaggactgattatcgatccttcctaaaaaccatttgcaagagcaacaaatatgaatatatggaaagtaattctacttcttttatatttttgtaaaaaaaacattgagattttgattctttccgtgctctttttgtatttttgtttttgtcaacttttcttcttaaatttattttctttaacagtttactttattcacaacaattattggctaatgagtatagtcaccgtgaataaaagttgatgaacttttggtcattacaaaaacgttttaggaaggtctatttttttttttcatttagaaaagatcagactctctctttcttttatttcttttactgaatagaaaatagactccttattctttttgtttcctttcggagcaatgaacacatttatagaaaatataattaatatgttattcttcaacagagactaaagaagaatgtaaaaatcctaatctttataccgtttatgcaatcaattaatatcctcgaacaaacttacactacgttatttcacaactgggaaaaatattaaaaaaggatgaagagtttaaagaggaggagagggtgagggatggaatggattgttaattttgtttaatgttcgtgctaggagggaaaacataaagatgtatttaaaatttaaaggtaaaattgctaatatatattttatttttatgaaagtatatgtttatttatatatataatatactaaatggatgtttttttattttaggttttgatttgtttttttaattttctatcataaagaatgtatgaagttcaaatttaatttcacttaaattttgatattaagaatttaagattaatgaaattggcatgatattttacaggggataagctcttattaagtaatcaatgcaaaataaatttattttatttggtcacagtggaacaaaattatagcaaacagtaatttaaacatcataatgttaatagttctgtgtgggacttatcttgttgttgtgcagtaatgactggtggaaacaaaactctaacaataaatgttgtctttattcttaataaagctatatataactgacttatttatagttattgcaaaatttaaaatcttatagaaaactggaacaaaaaaccactattttaatttaaatttgacaagaatggtatctttggaatgagcttctttttcagtatggtagcattttacatgctcttcaagacattattaattaagaacattaattgtcaacatggcagcctttgcatacagtagaaaaaaaaataaaaaaaaatagcaatacaataatatatactttttaaaaaataaatataatatgatgaaaaaataacagtaataaataaatgaaaatatagtggaaaaataaataaatcacaacaacaatgaagtgttggttatgaaattttaggccatatacattttcaaaaatagataaataaataaagaagaaaatttcaaaaacatatataagctacttcaaaagcaatagtacatttcttttttctttttcaaaaaaaaataaataaataagcgtattcatgcattaaataaagaagtcgttagatctttcggtcattacaaaatagctcttccggtaaggaggagatcaaaatagagccgtacaattggtgggtgaaagtccacttagccaaattatgggcaacaaaattacaagtcttgctaacattagaaaaattacaactaataaaatagggagatgacttaatacaaaagtagacatagttatcaagagcccaatgtaactccttcctattgagagcattgatagctagtctcgagtcactctccacaataacatacttataccctaaatccaaagccaacaaaacaaccaaacagtaggccgcagcttctccgcataacgcgtccgagaagtctaaccgagacctgtgaacccaaatcaccctacccagatgattccttgctacaacaactatgcacatactctctaagcccactctaacatcacaattcatttttatctaatcctgaggaggtggtgttgggattttatgccctaaataaaacccattacaatctaatctgatttgttatca

SEQ ID NO: 111526 - DNA, 1011 bp, Cannabis sativa
ttttgttagttaaatttataattaataatattcaaagttaattataaataaataaatatattaattatggtgtagttttcaaaagttaatttgaatcattaggttataaattactatccctattaataagtattttatccaatggctactatagtagtccccatacatatatggttataacatacaacatcgtgttaaagaacaactaagctaaaagtatacataggaagaaggcttaatatttacatcaaatatataattaggttgattatattagttctaatcaccgaatatttattaaacagttacaattaatttaaaaattaactgaaaataattagtaaattatctataaggtaatactaatctgatttgaatgtatttattaatgtattttgtttacttataaaatattaattaaatttaaatataatttatgattagtttttgttaaatattttaattaaaaaattaaattatgtcaagtatgtggttaatagtaattaattcaattttgaaaatattttttttaataataatctggtgacaacatagcatacgttataaaaaatgtaattacatttttaaagtaattattaagtagtcacacattcccaacaaatttaaatggtgctttgaaatattttttatgacttactaaaatataatttattttattttttaaatgaaaaatgcaatttattaaaataaatccacttatataaaaacttaaaaatgtaatttattaaggcatattattttttgtattaaaattaatagactcagttatagtggtaaacaaatactccaatataccttatttatatatgtgaataagttaatattattatttttaggaattattttaaaaaaatccaaaaataataaaaaattatatttttaggtaatacttttttttttttacagacttcttatttttttttacatactattgttttaggttgttctaaaaatgatgttaatgttataaatattaataattatgtggat

SEQ ID NO: 111527 - DNA, 3638 bp, Cannabis sativa
aaaatgttttaagtatagtttccataatgtaaaaaatgctagcatagttttagtgtattatatatttttaagcatatattgtcaaatttccctataaaaaattatttaaactcgtttacactttcttttataaactatagaatagatgtgtttcaataattataactaattaattaattaagacaaataaaaaaataatttatttataatacatatgtgaagactcgcaattatgagattatcataaaaattaacttataaaagaatcatttaattgttttttttttaaaaaaaataactctctcacaaaattaaaaaaatagaatgaaaaaattatatatttttataataattataataatacaaattatagattatataaatttaaaaaattacaactaattaattgggtaagattgattattagcaaaactaagattagtgactaatcatgcttttcacattaacatgaaattctcacaaaattagaaaaatagaaagagaaaattataaagagccacctacacacttgtgtgttttcctttatataaatatatagatatagatagattgtataaaaaataataaataatgtaaaaatgaaatgacattctcacaaaatttaaaaataaataaaaaaaataaattattttttatcaaaaagaaaaatgcttcattaatcaataaacaaaccaaatacaatctaagccaccttaaatcaggcagctccaaaaataaacagtcagttaataattacattgtaatcttcaaaaaaaaaaaaactctctctatacaattaatcttcttattactaacaatttgcaatctatacattgtagtgttccttatatccgaaataatatgagctatagtgcttgaacatccatcaaacacacaacgattcatgttcagccatatattgtaagcagttgcagccaacacagtaacatgcataaaatgaatgaaaacttttgttcttgaagccaaccaaatgttccaactgatgtagtctaaaggccacactctaacacccaaccaattaaaaattttctccatcactctttgggaaaaatcataagaaaaaaaaataaatattcatgtgattccaaagacgcaccacaaactggacagtcaagaatttccaaaacaatctgaaaccttaacattttaccagaatttcacatatctcgaatttcctcctcaagttgcaaatcttgggccaataccagctagtgtcttgtttgagatcataggaccaaaacgaatcattctttaggtaaatggcattgatccatttaacccaaagtaagtctcttttagtgcaaatggcccacacatactttgcgagaataatatgattccatctaacactatcattaaaaccaagccctccatacgctttctgggagacaaaatactcatcaagtaatttctaagaccaaacaacactgagtgaatcaattgaactctctcagcaaaagataggtgtctactagtccaagtttgaatcctctgtttaatttttttgagcacaattccacagtcctccgctttccactttgttggtctcaaaggattacccagataagtcaggggataagagccttcagttaggcggatgatattgcataactcaattctaacttcaggatcaactccaccaaaatatatctgagatttggcattgtttacatgtaaccctgaagcactactaaactcatcaagaatcattttaggacttgtattgattgatttgatcccttactaaaaaaaatcaaatcatcaataaaataaaggttaataagcttcaagctcttgcataaaagatggagcctatactcactatttcgagcagccacttgcagacatcgagtgaggtattccatcacaaggacaaaatgcaatgcagataggggtcaccttgcctaagccccttctcttctttgaaattcccttgaattctcccattcatgacaatcgaataagaggttgatctaagacaacccattactcaagagacaaacctctgtggcagattatatgcatttagcaaagcttcaaggaagtcccaactcactatatcataggttttgcttatgtctattttgatagcacaccgggagaaacatttttccttttgtaattcttcaaaagatcttgaagaatcatgacattatgagctaaggatctcccttgaacaaatgctccctgattctcactcaccaaactcggaagcactttagcaagtcttgagcataaaaatttagaaacacacttgtaaattgttgaacagcaagctataggcctgtagtctactgcagttgttggattatcatgcttaggaatgagggatataagtgttgaatgaagttcttgaggcatggtacgtgttatgaaaaaatcagtaataacattgcaaaaatcggatcctatatcagaccagacatctttaaagaagcttgatctgaatccatcaggtccaggagattttgtctctggaaaactacacaacgccttcttgatttccctctttgtgaaaggcttaagcatcataacttgttgatccatgtcaagcatgttgtcattggatgaaccacccacaaatagcttccaaatttcctggtatgagttttttttcataacttcttcgaaatttatttcttccaccaagaaattagctaaggccttactcttattgtagcttgggggtgataagttattttatattgacccaactcaattgaccattttatcagtcttcatgatgcattagatttggatagaacttgtctcagtggttgattgattaataattaaataggtgcacttaaaaatatggtcgaagtttttgtgaggcatgtaataggtcaagacgagtttttcaagagggggatatttagatttttctccagtaaacgttcgctcacataatatactgatttttgggcctttccctcttctcggactaaagctgcacttatagcattttctgagataaccaagtgtatgtataatacttcacccattattgcttttgagaatacgagtgatgttattaaatgttgctttatttcttaaaaggcctggtcacattcctcgttccattctaatcttctattgtctcgcaatacattaaaaaatagaaaacatttgtcagtggatttccaaatgaatctattttaggtagccattttcccagctagagactggacttcttttatctttctgggtgaaagcatctcgagcaaagcttttatattttggggttagcctcgattcccctcgcaaatacaattataattgagaaatttctctaaagaaatcccaaatgaacatttctttagattcaacttcatcttaaactttttcaaaatcatgaagcattccacgaggtcctttacatggtcctcagtcttagctgactttaccaacatatcatcgaaataaacttccatgtttcgtcctatatgatttttaaacataccatttacgaagcattagtatgttttctcaacattttttaatccaaatggcattacctcgtagcaatagagccccatatttgtgacaaaaagtttatgctcctaatcagagatgtgcctttttatgtggttatatccagaatacgcatccataaa

SEQ ID NO: 111528 - DNA, 14003 bp, Cannabis sativa
  modified_base (182)..(185): a, c, t, g, unknown or other
  modified_base (2288)..(2297): a, c, t, g, unknown or other
aaaaaaaaaaaaaaaaagacaaccgtataaatattaaattctccacccaatagtaaaaatgcatacaaagtgctaatttaggtattctgtgtaaaaatcacaaaatattccttcaactatcacagtaacaacagcattatatctccaggttcagccagaaataaataataataataataatnnnnataataataatttaaaaaattaaagtacaaaatatccatatattttgtcaaagaggctacatcctacaaactacaacaatgggggaaaaatgtcaaaatgtacatgaattgaatctagaaggatactttaagtccattctgacacttggatgtgaacccccccctatcattccatatgatataaagaaaaaaggggaaaagagttgaaaacactattgaggagggggttggccatgagggggtggaccttgttgagattgtggcataccagattgattcccagactgcaaagaaaacttaacttgttatgatgtagagagtcccaaacatatataagtaaatgaagaaaatacagcccgagacaaaaatcccagacccagcagcaacaacaacaacagtgattcaaagtgacatctctcattactcataaacaaaaaaaaaatcaaaaaaacaccattatagacttgacttatttgtactctgttcatagaagtaaagtatgcaatggcttgtgcttgttatataccatataattaacgagccatgtatatatgcagttctgttctacacttcaaacactgcaaacaaagctttcctgaaagacagagccagctaccttttaagcgaacggatagcaaactagatcttttagtccagaaaaatttatgatttatgatcttataattaaattccaactctgaccaccttatgtcattggcatttaaaattcaaacgtatacctgaaatgcatgcatcaagagtagaaacgtaatcgattgtagttcttctcgtcaacagaagaactactgtccagaaacatattgatacgtaacagcaaaaagacacaagattaacacccaattgtataagtattaactctggttatgaaatacactgaaatttcagtatacttatgtgatgtaatatttgcacaaaccacaagtactagtatttgtatgatacatgattgtagtttcaatttgaaggaaactacaagaacatcataaatgtcaactagaaaggttataaaacaatgatgctaaaataagatctctaaagcaaacgataaattaaaaagcagaatcacaaaacagtgaacagattgtattacctggtaaggattatacccctgcatcatatgcatttgcccaccttgcgctcgattaaaagcaccaccctgtggatacattgggccgccacttgcatttgatgggccctgcatgtttggcatcccatttgggaagccaccaacctgttgaggaccatttgtaggcaaggatccagagtgcatctggttcatgcccatataatgcccttgtggcataggtaccatctgattcatcgtaccttgcattccctaaaatccattaaaaaatatcactaatatattagtgtcatgaaactggtgtttatctagttatagcaggattaacttcagctacaaaatatgaacgtcagcatttttagattgtatctctatgcagctttatgataggaatttcctatcaaattatctagaacagcaagaaagtaggacagaaatacgagtattgagagaaccagtggtaatgtcaagagctactgctcaatatgaattccttcgccccttttcccttccctactcactcatatatataatactaataccccttacaattacccatttgccccctatatttaatattctaaggcctaccacttcatcgcaaaattaatggcaatggaggggagtgctaatcacaatgtttcttgtataggacaagaaatggaaaaacttcattcatgtagaaacgaaaaatgagtagaaaagtaagaagaaccttttctttctttgacagtgtgttgaaatgagtagaaaagtgacaagaaaaacaggacaagcaatgggaagggaaaaaaaaacagctagaaccaattagatcagataaagagcttaagttgcgtttgattgggaggaatgaaaacataaaaataggaatgagaatgggaaaaagaataggaatggaataaaatttaaaatacataaaaaaaaaattgataaaaaaaactattaaattttttctcatcacacattgaaatagtctttccttccatttcaaaatnnnnnnnnnnttccaccaaaatggtagaaaggtcattctattggaataacattccaatactttaatatgcaaccaaacaaaagaatggaatgtaaattattctctttccatttcattacctccaactaaacgccaccttaattcttgaattctttgctttatttttatactacatacagatacatatatatatatatatatatattttatgtaagaatcaaacttttaatgtagagaaaacactgaattacacattggaaaacaaaaactaatcaaagaaagtggaaagttcattctcttctacactgaaggacagatgacttaattaaaaaggcaaaggcataaaaattgccctattatgcaatatcgatcataatgcaagagagaccatacataaatcaagattccactatattctctgcatatgaattcttattttcatgtttggcaaatgagttagtaatcatatagttaaataacattaattatctaaaaatggtaatagtgtaactacacccatttctcaaagggttatgagaattgaagagtgtaacgaggacccctcaattaccctccaattacatggctactgtgtacctaattaactaacacaccgaatcttgtaattactcggaattacactgaatcccaattacaaggtgactttccaaaagcgcccttagaaaactaaagcaaacaatattataaataacaaacttctttttgcacaaaaatgcttaccatgggaccaggcatcgaatgtgaggggaccgaggatggcattggcaaggatccaggtattgaggatgacataccatgagggggcatttgaggtggtggacgagttaaatggggatgtgggagtaaaggtaaatgagaaggaggttgcagttgttgcatattaggtggcatgggcatagggggcatttgctgagggagtgcttggtggtgttgctgatgttgttgttgaggcatatgttgaagattttgttggtacgattgttgctgatttgcagccataagggacggatgaggtccgggtggaagaggaggagccccaagaggcattgaaattgggtgatgcttttgatctccctgtgctgatggatcaagtgatggaatggataatggcatagcaactccaacacccggaatggttccctcatttctagtcaaccccggaggaaatggtccaggtgttgttggaccatcagaaactgggaagttaccaggaaagcgtccagcaagagcaggattttgctccccataacctgtaaaacacatgaaaaggtaaatattatatttgactggtccaaaatcagcagaccctttaaaaagccttcatctcccaattggttcagaatcttcagattattgcacaaattaaactcaagagtagttaaacatgaagaatttatgtatgacttggtagggtgtgcaaaaccttgattttgacccatattaaatttattatcacgagctgtatctcctggccgatttcggcaccagaactttgttgtatgatcattgctgccactgcacacaaccaaatatgttgacaattaaatacattaaaagttagtacatgataaattactagcgtgtataaagcatgtcaatgtaaggtgatagagtatttcaacagtgctgcagagatgggcaagcgacactaacagcgtattaaagcaaacaaaatgaaagacagaatttacctgcaaagaagatatccaataggatgccacgcaagatcccacacactgttatcatgtgcactaggaatttcaatctgtggggtttcatgcctgtggatcagaataagttttgagtcattacatgaaaaggccgcctaaatttgctacccaaaatgtgtcggactcattctcagaatatcacagtgaaaactttggatatctgatcatacaactagagggtataaactaaatgagtcaattaattattctgtctcaaacatattttagaatctcaaaaaaactgatagttcattaagcattcaccatcttttaatttatagtatttactgcttatctagcagttttaacattcaactagccaatgccacactaacacacatgcaagcacgcaccctaaaaaaatcacattcaactagctaaacgggtatataataccttataaggaaaccaatgcagacagtaggctgtttgttcaaatatattactcaggaaactactataaagtaacaaaaccatttttgaattaaaacgtttaacaatacagtgagatttctgaacaaattttgacaagaaaatgactttaccccacaagccaatgaaacatggatccatcgtaacttccactgacaaagtattcttcatgaaacggatgccaagccaaagctagaaatataacaaaacaaccacattaaatcatatatacacatataagaattagcagtatttcttcctaatggaaaattatgttaattttaacacctggggaagtattagcaaataaaggactgactatgttggtcaatgttcacccttagagaggctaagacattatgaaaatatgctatgaaaatccaatatgcaacttcaactttataaagataatttccattatgaaacatataatttttagagcaaatgggatgcttgatcctttgtccttactacacccaacaaggcttcctttaataaaggtcaaaactaatgctttgatgactgccatcacatgaactaaaataagttctttttcttaagttctcaaataatgcattgtgtggcgtgcttccgcatgacacacacacgggtctaaattgtagctgtgaccatgatggggtgattactagatcattagccaagtctagagcaccaagcatctcatttggcagtaggaaagtgggtagtaagtggtattctcataataatgctatataatgctcagaagaaaaatgtcactaactagtcacatcctttcgatgtccacggaaagattgaagctccttcatagcccttatgtcataaagctacaaaaagaggggagataaaagaacaagaaagtggtgtcaatacaaaaagatttaaaaatggaaagagaaagtataatcaagtcttttctaaagtcttgaatataagctagggtaaagataaattgtcacctttataatctgatccttcgaagcagtcagtacccagttaccattttggttccatttgacacaaaggacaacatttttatgaccgtgactgcaacaaaaattattcactgcttaagaaattcaacatcaaaatatctcatgctaaagtataaattgtttacttacaaagagcagagctccctccctgatttagcatcccatagtttgactagactgtctttcccacctgggtacaggaaagttaacaatgatgttatttggacttacagttagaacttagacctgtacatatactttcacaagaaaattgttgtacgcacctgagacgagtaaagacttcgtagggtgccagtcaacactcttcacatcccaaccatggcctgcctgagttcaaacccatagaatttctaaggttacttcatgcacagtgcacacttaacagagagaaaagcatagagaggaaaaaaaaaacttccttactctaaattgtgtccatgcaatcatgactcaaatatttaaagtggacatttacatactagtatcccagtcaaacaaaatgcagtaataacttctgatctattgtttgcttagtgtaaactagatagtgtttaaaggcatttaagatattttatttgattagtttttcatcattttcacaatagaaggtgcaacctttggacttgtggaaacagagtataatgagttaattgttggagaggatatgtttggtattatcgtagatatcaactgttaatatactgatagatatcaaagtgctcatttcatcataataactgttggaaattagaactatgatgattctagtaatcaaatccacagggatgattgagcagatttgtaacaccaagaaaagtcagattccctgatttaatttcatttgtgtttttatggtacatcattatcctgattagctctaaattttacacataaataatttagagattactcgtttcaatgtagaaaaaagaattagttcattcctaatttattctattcaataaaagtgtgacctgacacagtaaatcgtaatcacacaagtgcagagaccataagatacgagatcatttcctttaagaatcaaaagtagaacagtcaaacaagagcttttaataacttaaagatatatatatttataagtttttaataacttaaaaaatatatataaaaaatcttattagatcatgttttctaaataaaagacaccagtatcaataaccagcaaaccacagatataatcttacaatgaagtgattttcagaatgcacatttaaaattataatagtaataaatcaaaatcaaagtgattcgtgtaactcaataatttaatcttaaaatgtggcagaaataacatatagtggcaccagtaaaatattactcaaccatcttagaaaaaacacccgattccggttgacaatatcatggtcatgcatgttagtactctaagcactttaccagttaacgagcgttcttcttgacaccgagcaaagtcccacactttcacagtagtgtcatctgaacaggagcagaatttcaagtctgtcctacaaaagctgtttaaaaaaaggtcatcgtaaaatgatcatgaacaatgctcaaacagatataacatgtagaaatgtaccttaagtcccgaactgactctttatgagcagttttatttgccttcacattattcatgttgttctgccaatatctacaaggtaatccaatacaagagcattaaggatgttctttgtttcaggaaacagatgctaagaatgaaaaagaaattgatattactaactgtaaggctttagcatgaaaatacaattactttattgcgcctccatcatcacctgagaccatccagttatcattgtgactccataccattgatctgattgcttggtcatgggcctacattatttttaaaatgaagagtgaacaaaaaggccaacattttggtactcgatgaaaaatgtaatatcttaacactatgaagttgagtacctgaagaatcatttcaaaattaaatgactgtccattccaaagagtgaattccccactttgagatccagtgatcagccgccttcctgtaggagtccactttttgaaaagaaaagaaaaatatgaaagatcggcgaataccaagctcccgtgtacgtgtcacgtggatcaaaacaactcaacaactcaacaaatgaacaaaaaaatagaaacaacaataaagttatttcatgttcagagcatcttcaatgcagtgccagatctttgtggcaatgatatttagcataataagagaaaaacttgctccaatgcaatactaaaaggtgtgcaaaatttaacccaaagtataacatagtgccaaatttggcatatcaatacatagtacacttttaataaatgttcattaaagttgaccaatcaaatttcttcttttttctttattcactaattaaaactcattttcaatatattctatagtgcatttattgataattattccatttcaaaaaaaatagaaacattactgacttttatggcttttagtctcaaataatatttgcatattgcatctttcatctgagcataatgctaaatattgtgttaaatatagcatttaatctctttttattctaaatttggcattgtcattagctcttgcattggagatatgctctaaaagaccaaattatcactcaatagcacatacagcagtttaaacatgatatacaagtcaacgcaagctcaaatcatcataatcgagaaaacatacatcagctgaactactgcatacaagtccaacattttacaaagattacacaatgagacctattcagctaacatgatgtgagaaaaaatcttaatttaaacttacaagaacgcggttaatggagcaacgatttttgtttagagaagtatgtacaaactttgcagcgaaactagtagaaggattgtctgcataggcccccgttggcaacatctacaccacaggaaaaagtaagacatcgacaaaccatattagaataataattaaacaaagacaaacaaagaaaaagctgcttccaagttgttccaacgtttattccatccataacaaaaatgactaaacgttatataatatttataaagaggagaaagattgcagacatctatagccgctgctggagttggctgcaatattgtcctatctcttgaatcccgttgccacatacgaatctgcagaaatagtaacataaaaagttgaagtataaatcaaacaaccataaaagacatccgcacaggatctccaatcatttaaaacacaatgttgatttagaaaggttatgagataaatctaaagatgttgcattatgggttcataaatcataatgcgatggaatttaaaaaagttcctttctcagattggttaagaaactgaagttttgttaatgaaattttttgtgtatcttcaggagttatttttggggatattttttctaccctttcttgttttacttaacttttatttcataacacaagaagctttgtttcaaaaaaaggaaaaatgttctgttttctgatttaagtaaagattggagttccacaaaataattcaggatgatagctcctcatcttttataatgttcaattatatccaaaatatgacccacatttcttaaaacgctatatttccacccagaattgcagatactccatgatgttattaaatataaccctatgtttaggcatttcctatcaaaacaaaattacgaccggactagcagatactccatgatgttatccataaatatcataataacaactaaggcatcctctagggtaataatctttgtattaatcaactgaataaaatacaaagtatgaggttccttgttaacatcatattgatgaaaactttgagacatagaaacagctacaaatcataccaataaaacagaagaaaaggtagcaaccgtacaaaaaattgttcaaatctctaactaaatataagaaaacgggtccctcagaacctttaactttacaaccctatgtttccacccagaatgttttcttttcccaaggcatttcttccgttgcttctttttcttcaaaattatgctgttcttttctaaccacacagcccaaagtgccaacctagcactacggtggtgacagttttaattagaaccatcacataacagctgatccaagccaatcaatgatgggttaaagggagtatctagtattagttgtcatgagatctgatatagtacctttcaaagaatagagatagtaaacccacatgaattaacaaaatggaaactgtaatccacgcccgacttaccaccccctccaggaaaaaaaaaaagaaaaaaagaaagatatgcaagaagattatggaatggaggtatagaatcttttctttcaagtggtaagggtagtctatagaatcatagaatggagacaaaatttgtattttaaaattcaaacaaaatgtgacaatacatttaaatgaaacactggaaagagacaaaagggaaaaagtaaacgatgcatcatctgtccctcctccccaactttcacactatgtattacaaagatgaaatgattcaaagggtgtggtgcattacaagagaaagctaagaatctcaaaagaaaaagaagaaagaaaatgctgcttcacaaaagcttttaaaaaaagaaaatgaaactgccaattgtaaaggtatctaaacaaaaaacagaaccctgacataacaaaaaggaaaggattaaaagagcaaccaatacctgcatataccgaacgacagtgctagtgtagtccacggccctcctctgtgtaagttttctcatcctttttgcggcaaagccatcagcatgagctgcaaccaacagtttttgttttttttttataacagataaggaaaatatttttcaaaaataatgaaaaatgcttgtaatttacagtcgcttaatacaaacttattgtagttgaatgactgctaaagttattaacttattgcaaaaaaaaataaaattgttgaagaatttgttttaccaataaatagtttccatcacagtcagttttacaattgactcctgcctcatatggagttcaaacttcaaaaaattaacatgtcctccgagtaccatccttatgaaggaacgaattacaatcatagtcacaatcaatggaccaaggattcaagaggtttaacaaaaacaatttccaaccagttttgcctataaatttctacaattgcttacaaaaagaaaaacactttatttataatctctgtatgttgctcaatttttgctttcgattaacactctacttctaagttaccataaaaaaaaaaggaaaattaaagaggaataccgtcataagaaggcatgggaggaccaggggtagaaggatggtgatactcaggaggagcgagattagtagaagaagcagaaggctgacgcatcattgggtttggaggccccctgttaaaatctccaccaccaccatgttgttgttgttgctgttgctgctgctgctgaggatcgccatacatcattatcgcctagaaaaacgaaaccctaacggcaaccctaagtaagtgaggacaagggcgaagacaaagtcacagagtcagtcacagtcacaggatgtttgtaaaaccctattatactagaaatatagcctaaggagtaaggagtaatatattaaaatgcaaaatcaaaaggagaagcaaccacccattctcttatgatctatcaacaattttggaaattagattgatgattatttggtttgttttctaattctaattctaatatgatctatcatattaagcaacactttacataaaattgattttgaaaattagatcacattgtatgtgtagcaagactattctaatagaacaacatttatagttgtcaaaagtacacatatcatcttaaaatatattttttttattttatctctcatcccataagatttgtcacttcttcctaaaaaaaatatttcaatagttgaaagtctaaaagttgtctactatgatcccacatcatattaaattaatgattttttggtaaaaagtaatttttttcgtaaaaaaataaacagaaaaagaagaaaaaaaaaatgtcatgtgactatggtacatattaagcaacattttacataaaattatgagaccttttcatttatacacttcaaaacaatttttttgaatttttacggtctatataacaaccaacgaagcaacataaattgcaactaaaatccacatagcaactcacataaaaatcaccggagcaacctaaatcataaacttgaaaaaaaaaaatagtatatgaggtaactctactaaaattagtcataaaaattgaactacattacatatatagcattaccattctaatggataaccctcattagagatgttgttagaggcatactgataaatagtgtacttaattagttgtaacaactcaaggtttttagttgtgtcacttatattagatgtcttattttttgttattcttttcttgattgaaactttgtaactaactctgtaatcatctctctataaataatgagctccattcaagatttggtaacttttgcaaagtcttgtgatttattctctgtttgtgtccttttagatttgcatagataagttcctctaattttacatggtttcaggaagctcttgactaacgttgatcatggatcctcgtcaccctgaacccattactcaaacctctattgctgcaactcaggctgctttgccagttcagcaatggaatccatttcaaaattctctgaattcatctctcattgttcgattagatcaaacaaactttcttgcgtagaaatcgccagtaattcccactgtcatcggtcatggctttgatgacattcttctcactggtgttgcccctgttcgaactctcgtcaatggagctttcaatctagaattcaccacttggaaacgaaaagatcaactcttattgaattggctccgatcttcaatgaccgagacaattcttggatctctggctcaatacaactcctccttcgatgcttggcgtgccctagaacaaagatttgccagtcaatccaaggctagattgcttcaaattaaatctcagatctcgacaattaagaaatgtaatctttcaatcactgattactgtgacaaagtgaaacttcttgttgattctttgtccacggttggtcattctcttgatgacaatgatctcataatgcacatgcttaatggattaggacctgagtaggatcttgtggttgttcatgtcataagtcttgtggataatctttcgttagaatctatccaatctttattactaacccatgagagcaggcttgaaagacattactctgttggagactctaattctaacatttcaacaaatctcagcatacattatacttgctccaacactggtaatggatatcggacatatgccaatcaaggtcgtggctatccctccatcaatcgtgctcagggtcgtccctatggtagaggaaatccatccattccacgattactctgtcaagtttgccacaaagcagggcacatggctgttgtctgtcattacagattcgacaaagggtttgtcacacccaagatcaatgaatctaaggtctttcttgctaaaattgatgaccaagaagatcaacaggtttgctccaattcaacactaccagaatttgtggaagattatgactggtatgctgacataggtgcaaccaatcatatagcacaaggcatggaacatcttgaatctgaaattccatattcaagatttgatactcttgtagttagaaatggcaaaagacttgctatcagtcatattggtaactactctctcccctcttctagttcatctttacatctaaacaatgtctgtaaagctcataccataaccaaaaatcttattagtgtctctaagttaacaacaaataataataatttcttggaatttcattccaaatgttgttttgttaggaacaaaatcacagggagagtgctacttaaggggaggcttaaaaatgatctatacatgttgtctcacagttctttccttctaaggtccagcttgagtgtcatcttgtcaccaagcaatccaagtttgagtcaaattctactttttcctctgtaaacaatcaagagtctgtaaacaattctctttctctttcatctcaacgtaataagagtactgctaatacaacttctccaccttgtattgttattccaattgataaaaatgatgtttgcacattgcctattgttcataattctgcactatttcctgctaaaaaatctaatataaaattatagtactcaaaacttgggtatcctgctcctgaaatcttagctaagattttatctactttacatattccaagcaacctaagaaatctaaagttctgtgaagcatgcaaaaaaagcaaaagccataaactacaatattctctctctaagtctaaggcctcctaacctttagaatttgtaacgccctaatctatagggacgccacatgtgtgattttataaactagtttaatact

SEQ ID NO: 111529 - DNA, 4880 bp, Cannabis sativa
ggttcatatggtgcggatagtattatccccgcttccgttccattcccgttttaggtattgaaattgtcccctaccaccgccccattaactaccaagacgggaaattccctcccattaggggcggatccccgcggttactcatccccgcagtataaatttccatctatactgcgaacccagccagtctgcccatttcacggcaggtttgggtactattttttaaacttgaaactcgataaatttgcccgatattcagtgctgatagcaattaaggaacctcttaatatttttcaattttgaaacattttattagtaagtagagtagtagttgacaaagcaaaagaaacatgcaaattgtttaagttcaatgccgctctcttagatagaacgacatgtcgtaaaatacaaatcagaacgtatcgtctgtggtagtgataatagtacataaaacatttcactctcattaagttattcatcataccaaactaaaataccatgtaattatacattatctttccttcttatacttgcatcgtttttgatcttaaggagatttatgttggtgaatctctgcacctctcacaacgtcttctgttaagttttgactaattgtgtctgcttcaccagaggaaccagctgtttgctcacatatctcttcaagggtgttctcattcgttagaacactcacaacttgagacattgtgggtctaacaccaggggatatgctggtgcacttcactgctagctttagcaccgttattacttgtgtcgtttcataactgaacaaacttttgtccaccatacttaacagtcttccttttgcttctgctacccaaacctgtgtaaatattatgtcattaggaatgagcttaaatgcaaaaccctttatataatgttatattgcttacctcgtccacaagaatgccaacctcttggatggtttcactttcactgcttggacttggatgacgtacatttttctttccacaaacaatttcaagtagaactactccaaatccatagacatcatatttgtaactaattgattcatttccttttactgggtactctggtgccacatatccactatatatatatatatatatatacatatataaacaaagatggtcattaaaaaacgaaaaaaggaattgaataggagcttatataattaagactattacagcatttacttacttggatgcttccgttttcataattttaagtaattgagtagaatcattatcactctctgtatagccaattgccaatccaaagtcggatattttaggcttaaaattgccatctagaaggatattagaagctttaattcctctgtgaatcatcttatgatcatgtagatactccaaaccctttgctatccctaggcatatgttgaatctagaataccagttcagtgtgactttcttgttttggtctacaatcaattaaattgttatatgaaatgaaaattagataatccaaaaaaacaaaatgcacataagttaagaagcattaataattgagtgcttaccaaacaagacttctgccaaggatatattttccatgtattcgtaaattagaaagcacaagctttctttcaggtgaaaatcaaagagtcttacaagattgtcatgcctcaaattttggaaattacaaatttccttttttactttgtcaattccttcatctgaaagagttaaaagcttcttcacagccacaatatgattatgacgtggaagtatggcctgcataagcatcaatcaaaatattaggacaaaacagagatcactatgtatagtactttagctattctaagttagtagtaggaaattaatatacaattaccttataaactgctccgaaacatcctttaccaagtctccttgatttgcaaaatatttcagttgcatcaattaactctttcagggtgacactgctatcttcttcatcacttactttgacaatccctgtgatttcaagattaacatatttatatatatatatatatatgtataaatgcttcattttcaaagtcatttgtttttaatataaatatatatctatactatatatgcacctttaaattcgtcttccgaaaagtcttcatatctaaatatatgatcttcttcagaaatctcatcaagggttctctcattcattagaacactcactacttgagacattgtgggtctaacaccagaggatatattggtgcacattactgctagcttgaggacaataatgacttgctttgtatcataaatattgttcatactactgtctggcatatctttcaacatagttccttttttttctgctatgcgaacctgtattaatttattcaatcattaatgtcgttattaacttttagctaaataataatacggtattagagaaaattaaaagaaaaagccttctataaagttaaatcaattaattacctcgtctacaagaatttccatctcatgattgtttttcctgctttgacttacattttttttcccacagacaatctcaagtaggaccactccatatgcgtacacatcatatttgtcagttaattcctttcctttcgctgtgtactctggcgccatatatccactatatatatatatatatatataaatatatcaatgaacaaaaaaagaaaattagaagagctaattaggagcagctagttttagtagtataactatatttgtatataatatatatatatataaactaattattactttgatgcttcttccattatcctttggaattgaatagcattatcactctccgtagaggttctagccaatccaaagtctgatattttaggcttaaaattttcatcaagaagaatattagcagctttaattcccctgtgaaccatcttcagtcttggaagctcatgtagatactttaaacctttggcaattcctaggcaaatttcgaatcttgtttcccagtcaaggttgactttatttggagggtctaataatcatatccacaagctagccattgttactatatatatatatatactcatctatgattgttaactcaaatcaaaggaaaaaagtaattgtacgttagcactagaattaattatcatctaattagcaagaagtgaaaataaagcttaccaagcaaaacatcttcgagggatttatttttcatgtattcatatacaagaaaacacaagccctttcccacataaatatcaaacatccgaacaagattttcgtgcctcagattttggatgttagcaatttcattgttcaatttttgtattcctgcttctgaaagagtggaaagctttttcacagcaacagtgtcattatcaggtagttcagcctacgccatatatatatacatgtatatatatatatatatatatatatcccatgcatcagtagtgcatatcatgatgaaatctttcaaataaatattccacaaaaacagagttcagtcttggtttttaacattattatattaatgatataataacaggggttggccgaacaacataatagaataacagatatttttaattagagtaccttatatactgtaccggaagcacctttcccaatctccatttccttgctaaaattttgagttgcagctaataatttttgaaggggaacagttttattttcgcctacttttatatctgtttttcaaaccaaaaaaaaaaaaagaggagtacattcaattagtgtaattaaaaagacaaaaccttaaatatttatatatataaaattaattattgtaagagttaaagttgtagctagtctcactgggcaactcttcttttcccaaccatccaattgtccaagcgaaagccaataaaagtagcagagcaaatataatggatccaatcgtaatcaatactatttgccaaccagatagtcctctgttcttgtttgaatcatttgccttttctgttgatttcatttaaactgagattagagtaatcacaatacctaccaatagtccaatactattataccaatactaataggcgcgaattggtatgaaatctcgaaacaaatttatcattttgaaaatttaaaagcatgataatgatttttaagttaacataatttgattatttaaagattcccaaccaaccacaaagtataaaaacatctccattagaaatgcaaataattaagctaaatctcaaatatagcttggcaaaaatgtagctaaaattgtgatgcaaaacttgcatcaccacaaatacactaattaattatttatttttatgctcttttttattattttattaaaatatttagttatcttattaaattataaattatttatattcttttttaaattgtttcacataataaaataagaattaaattaatgataaatttattatttttaataaaatattaattaaatataaaatttgatacaaatatatcataaatttattttctgtaccaaatataatatatttttacattaaaaatgttataacattacaaccagataactttgtaaaaataattttccatgcaaataaagaattgaaatttaatattgtttaaaattttactgtttaattagaaaatatgattttgataagggctcataagcataaattttattataaatctatttaattatcctagagagattaaattaataagataatctctaatgaagatacaaattagtgatgtgttgttaaaatatagctcaccttataaatggtatgtcaaaagtgaattcaaatttgttacatatatagtaaaaattaatttaaagttaaatcacaattttacaattttgtatacattattttaattaattacaaaatatgtgcaaaaaaatttattatcattttttcatacatttttatatataactaa

SEQ ID NO: 111530 - DNA, 8613 bp, Cannabis sativa
  modified_base (8185)..(8185): a, c, t, g, unknown or other
  modified_base (8466)..(8472): a, c, t, g, unknown or other
tcattatattccactgcaatcaatgtaaggtttcttaaactttatatgtgtttatttaatttttttttttagaaattcataataggatattaaataacatacatggtagtaaatctagatcatggtgaaataattccaacagcactacattccactactgtactagtatgggtaggatttgtaccgtacctcaagtaccactaagtgttgttccacatacactacgtacttatccgtacaagtgttggtagcatacgaatcacaaatgacatgcatatattaaacatacacatattaatatatagttacattctatgctagtcttacctcgtttcaagttcaagtgagccggtcgacctgaactaaaaatcacgtgctgaatggatgtcctatgtcatattcacataaatgggtaaacaactcgctagaaccctttttcagggacctaaactccaaaccaaaagtttttctatcaataactagcatggccttaccctaatgatcgaggaaataccaaatctatgcctctgagactccttaaaatggtaaactggatttcccaaatggataacctgttttagggttctacccagtgaaacaattaattggttcaatagtactagtaggaccggttaaccggttcatagcaaaaatccccaaacattttcaaactctctctaaacaaacccaaactccaccaaactttctagaatacctataaaagcacccaacaaccgaattcaagcaataacagcaacattcatcacaaaaacaaaagccaccattattgagccaagttttagttctttgaactcaaaattgctcaacacaagtatcaagcttcaaaataaccccaaaccagctctaattaacctaaattaaacccagaaaacaaaccctaaatactatagattcggacaaagccaaaaattaaaaattgcatgctatcaccaattacaacttagagaattcaaggaataagggtttctaaggcttaccttggcttgagctacctcaaatccttattgaattctcagaaaacagatgaaaaataccaaggattaccctagattagcttcagccgaaagagagaaagaaaatgttcaagagttttggttttctaattgtcttttgtcttttctttgcatattactcaatataataagacctaggattatctaaataaatccaacagaaaagaatagtttcaattaattccactaaaagacaaatctcactaaaagagcaaaattactatttttccctagctgcatacttaagcaacttaaaggcataggggttaaatggtcaaatactaccgccccacctaaaaattgacattcaaaatatctcttacgtgtttgttccactaagaattagattctaaacttacccatgtgactctaatgacgatccattgcattttccattgtcgctgaggaaaaatcataaaaattactatttcatatttaacataaataatactcttaaagttaaataaaatctctggaattaagaaattataacttaaatgccaatttctaaatatggggctcacaataaatataaaatcaaatataataccaataattaatgctaatttcctttgctaatctataatctaatcatgttgtcattacacctttggtgctccaaccaaacagcaaagcataagctgagaagtaattaatggtccacaaaacaatagcatacattgtaaactcaataccattgtaagaatctcaagcttggacacttgactcccccaactctttctattcatcaatcaatggtctcatgaaaacatccatgcgccttgtacttaatagagataacgtcaatgtattcgctttcatgcacttccaatgaggtaagttatacgtgacttagataacatgccacttactgtaagagttacctatgttaccaaagggattaaacccatcagtggccaaacccaacctcacatttctgggttcaagtacaaaggatggatggcgcctatcaaactacttccactcctttgcaactgcagggtacctaagaactccatcctctttgggtctcttacagtgatgccactgcatgtcgtcgtccgagtgtcttcaactgtataacctcttcattctcaaagttagggaaaagtaccgcataacttttcgagcaacttttttttgtgtcccttttttccaacgactcttgccacaaataggacaaaaaatgtttttatcattctacttccaaaacaaggcacattgatacttgcatatatcaatggagtcataacctaaatcaaggttacacaacttcatctttgactcgtaatgggacttgggtaattttgtaccctctagaaataactcaatcaatatggagagtaacatatcaaaagaatggttattccacttattgagaacattttaatgcaccagcttcaccaaagcattgagcgctgattttttgtaattctagtacagttcactttccatattcttaaacaaattgtcgtacttactactaccattcagtgagggatcattgaaggaatcaatggtagtacttgtatcgtcaaaaccaggatcttctcttaaattatcagccatcacatccttcttttcttctttaccgttgtctactatttctatagccgattttgtgaatgactaattgttaaaatacttggtcatgtacgatcgctggatgccatgcataaataaatgtaccctaatactatttagattctgaaagttcacattcagacatctcatgcaagggcatcgagtaactctaccagaatttatttgcatttaagcatctccaataaactcatttacactcttacggaactctatcaactgtctatttaaagtcatccagcttttgtggctcaccgtatttctaaataatttatcaagaggaagtttaaaacaaagttaaaaatgtgcaactttcccataggaaatcctttacttttacaatgtcaaggctaatcccatgagaacagacagaacaaagctaagattcttccgtcaagataagtgcttggattcttactatcatgtatgtcaaatcaatcgcacccatgatctctgagaatattagttcttttcttctagatttcctactagctaggtgccatgtcttcggttaagctttcaacttccaagtatcctaatgatttaccttgagttttgtcttcttttttaaattttactaatttttgtactttgatttaacatatttgatttgtagaagagcttcctcctcaaagtattaggactgaggagataatcaagaaagaagcccaatatagggccttcttggaagagcaattgaaggttggagacttggtgataactgaactcctccgtaggtctggcttaattacaaagttccaaagtattgatacagtcaaccttcgaggatagggtcaaccccctagggaagtgaaagaggcgattgccactgatctggccattataatcaccaatgcgtcatagaatgataatgccctgagctatgattgggtgtcgtgccaccccaatcctctatttgaggaagaagagatctcaaagaggtttaccgctacttatcctgatgtggggacaccgggtgctagcacttcggaaagaggtaatggactcttccgcatccttcgtagccccagtctgagtcgcttgcccttgaggaaccagggaggacttgacaaatatttactaggccttaatcatcgtagataccccatgaattgattacatagacaaagtagacgaaatatttagaagccctataaatctgggaactccttcggacactgtcaaagttgatcatttgatggcatgtccccacccaaatttaaggagtatgaaagcttcattagtcataggggtattttagctttagctcacgggcaaccctatagcagttcactgaatggtttcacccacgaacaagtgtctttactagattcgttttcttgctgttactattttcgtcataattgtatgatcataagtgttccttttacttactcatgttgtttcttcatgcgcaaatacactagagtccgtgatgttaaagtcttagagtagctagatctctgccgctatggacaaggccaagaaatcccaagaaataggcaaggggaaaattaagacatggcttctaggactccaaaactgtgtcccactttaacttccttgtcaccagatgtccgagagattcctcctcccaccgagactggacctacaactccagcccttctgcttccgctagtggggagaaggactctatcacctcccgaaaggcctctaaagcttctgaagctcttgctactccaggggagcaggccttacaagacattcccctcccaaaagggacaatcctagacaccacatcaaacccacaaggtttttataacagcttggatggagttttctttccccccaaagggactcccattaagtctaagcacaagggatcaaatacttctctgtgtcccagcgtgaagaaggttatgtctttaatcatgaatctagggacatctggcgtactgttgaccaacccaccattgcaattgcagcagcaaaaacaataacagccacaacaccaacaacaatagaaaccacaacaatcacatctgcaacaacaaccaaaaacgcagaagcaatgacaactacaacaacaataatagctacaacaacaacgagaacaacaacaacgagaacaacaacaacaaccacaacaacaacaacaacactaacttggatgagtgccactactgcgagagcagcagactctatccccttaacatttgcagattgtgccatctcagtctgcctcacacccttctcagtgtcctacacttcaacaccttcctgggcacgcagcccctaggcatgcctctactgatccatctcagcatgctgtagggggtaagattccttcactgggtttctccttccccatgagacaacctattctcgaccatgactacgtcataaaggcatgtgagtgtgctgcatttttgaaaaggcgccatgagtgagaacaagtaaatcttcaaaaatgggctactcggctatcttccatcaagacagctgagattgcagggggtgtttgtcagcctgcctcccccaacccagtgtttgatcttgctgcaattagtgatatttggtacctaaggtgggtagagtcattggcccttatgctccagagatgctggatagcatgagccttagtgtgagtaagcttacacctgagaaatgggatgtaagcaacaatgttgatccatacacgttatcggtggccgctaagcaacatgaattaggggaagtcttaatttcctgaaccattagtccttttaatgcaattcttattatcaaagtgtgtgtaaccatttcacgttattttcctttctctagatggtgttgttcacagagaggactgctatagaagtgggtaacatgactattgaactgagccaactttgtgctaaagttcaatccttgtcaaccgagaatgaggccttacgcacaaaagtcgagtaggtggagacttaggctgcctctagcatccaaaagatttaagaagactgtaaggccaaactagcggttgtggagaagaacttagacgccaaatactaggaactatacttaaaacacgagacctaaggagagaaaaaggttgaggagaccatgcattcccttcaagaaaactttgataaggccagggaggaaaaggataaagccgaggccagggtggttcttcagtctaaaacgatatccaccctaatttgggagatcaactctctccaaagggatatccaacaaaaggaccaactcattcaggtccttaaggacgaatataaacaagagaaggagcgaatagagtcttggatgacacaacatagcaatctgagcacccttctccacgcagctcgtcataaaagcaaccttcgacaagacaccaataacatgttgcaaaggaaggccaaccataacccaacgaatggtgtgaaggcatatatttccctagcttccatgcgtagaatgagagaaaatgcccctgacctattcaggatgcagtcacagcagcagctaagggaaagaaatatcgcctttatttcttagagatgtcctatgccatggtcctttggaaggtagattctacaatactccagctcattaataaggaagatagggcagatgttagcaggagagtgctcgccataaagcaagatatgtatattgaggagtttcccctttctgtttgatagtcatagcaatgaggaaactagtgttgaggtctcaagctctcaagagtttgcagaagctgagtcatcttccagaaggattgagcaggagcttgtttgggacgttgggcctaattcgaatctaggggagcctattcaggatgcgactgggcctaatcacaatcctttaccagggccagtcaatgacacaactcggatcgactcggtagcaccttcccctaccaaaggttaataggagccatccttgtttcttgctgtctaacttttttcctaagaaaattttaattctgtttgccgcggagttgtgtttattttggcctggtctgcggggctgtatgtgacaatggccttcaggaacaacttggtttaccattctacaaggtaccatatttagattttaatatttcatgctgtttttcactcttagctttatgcattagcctgtgtgattattttaaggtttgtctccttaggctgtttagaagcgtgtggttacaacgaccaccacttcaaacctttgatgtcagtcagccttaaactcctctgctgacttaggaggtacttaaaaagtacttgcttcctattgctacgtaggatgcttttggtcttaaccccttataaaaaaatttaagcctgagccaactaaaagtttctgaaaacatgaatggttttttggttgttcccagtatactgtatgatcatggagccttgacattcttcgactgtttaagccttttttataatttaggcaggccaattttatacgctatagactttagacaatttttccagtcaggatgacattaaagtctataggagttcaagcgaggccttaataatttcaaattctaaacaactctttttgaaagtttttaagaagggattcacgcgagtattttgcttttctgggaactttggttgaaaacgcttcttctttaaaaatatgtgcttattttaactttaagaaagaattcaagcgatcttcctttttaagaaatttggttgaaaatgcatcaagttctaagaaaaaattaaaaatattaataaacaaaaccaacaaaataaaaatctatggaacacgacacgttttttgggggcacacacgactaggcatgataccccccaagtgagctgagaagtatggacgtgtccaacttcctggtcacttgttttaaatatagcttgtggcttaaaaacataaagtgtaaattcaaatgtaaaatgtttttgttttcatttcatgatgtccgagggccattcgtgcaaaagttaattacatagattcttacacaaaacattccggatgtcatcaaagcctaattttcctcgcgtattggtagtatacacgtaagtgatctgcgttccaagagtgagggacccttgttctatccatccttttcaactgaaaactacaatgacccaccttcttgagtatctcataggggccttcccagtttgtgccgagtacccctactcccgattcctgcagttaggaatattcttcacaaaacaagatcgccaacatcaaatgtacgactcttcacctttgaattgaagtgccaggtaatttttccttggtacattttaagttaaacttacgactattcacgaagctcttcaattaagtctaacgactcttggagtagggaatggttgcgagaagagtggtaagtctcttgtcgatgggaagggattgtagtctctaccacccataggccattccatacagtgtgtgccccattaaagttctttctgttgtctaataggcccagagaactcgagggagttcctctggtaattaggctttgcaagcttgaagcttcttctttaacatggtcttgaggattttgttgtcggcctccacttgtccattggcttgtggctgggatacacagatgaaagaagaatgtnaaatttacctgttacaaattattgtcatgacctattgacaattgaaccatgggttaaaatcagatcattggatctctcaacaagttaaccatgtcaatttagatcaagcaataataggttttataaaaacttacaaacaagctaaaacacatacacttgcaacaagttggatagttggatataggatttatttatttaattaatttatttaataatttttcgaattttttttttggttaaaaaaatatttaaataaataaataaaaatttaaaattaaacnnnnnnnttttgaaaaattaggtttcaacttacctaaatatcttttaaaaaaaatggtaactatctttcaaatttcaagttattttataaattaaatattcaataaaataaaaatgataatttaatatcctttttctgattttataat

SEQ ID NO: 111531 - DNA, 1958 bp, Cannabis sativa
gctgcttcatagactgatgactgaaacacgagtatttttagcgtactttgtcctcactcgcatgcttcctgagaaaacttcccaggagatcacccatcctgaaattactccaggtcaagcacgcttatacgtggagttctttcttgatggactaccaaaaaacaggatgcactttgttaatataggtagtaccaaaacaatccatttaagtcttcttcaactatgtagttctatacctacacagtctcagaataatcacacatgaccttttccaggcggtgtgggattgaataacttacccggtatttatccttacggatcacggaactactgactgtcacataaagttccattttaaattctaccacatataaaatgaaaagaaaggatatagtttggtgggagtctttgtaaaaggtttatagtttttgtatagtttttatctactccaggccattgattggtgctaatgggttgtatatgtgtttgttttggtgaaatacaatcttactgctaatttagcaaaaaaaaaatatatttatattaaattaactaatgaaacttcttactaaaaagaaaaatagagttatgaaatgctttatattaagaattacctgcaaattgcaatttttatatgcactttagaattaaattacatgcaaattgtcactaacaatttttataggtatttttagtgctataacgttgtgattacctttatttttattctacaattcttatgcaattgttttctttgactcccaacacttttttttcttccttttttttttcaacttttcacaattttaggcggtgtttacttgatattttaacatttttttagaataatttatgaacaatttgcaatgacataattattacgaaatcttcagcgtcatacaatttttttaagattaatatcactaacatattacattcactacttacaacaccatcatttaattgtattgaatatacatcaaaataaccacacaaaataattaatattaatatttcatgtcttaatcactttgcattaaaaaattcaattaaatcatgttaataatttaaattttatatgattatttcttgtattatttacaattaaattaaatagcacataatataaggcgtgcatgttctctcaagctcccttccatggcgaagaagcgtcgagtgatccgaaagccagcaaattgtgcaacgagtgtggaaccaggggcaaagagtaatgaggaatttcgatctgagatagactgtgtcttaactgagatagaaacggtgccagaggagaacgagggtggaaaaactgcaggattggagacatcagaggcggctgtcgaaggagataaggagaaacgtgaagagcaatcttgggcaaaaatggtggaaaatgatcatcaatctctctctcagagtcattggcggacattcaccacagctaagcctttggatcaagatgttcagttgaaatatgaggagccggtggtaaaggatggggttaggattgctcagattgatgttgaagaggtgaaattccaggcggctaattggagttcagctgtaatttgtatggttttgggggaaaaccctccatttgcagtgtttgaagggtttatccgaaggatgtggggaaatttgggaatagctcagatagtgtgtatgaatggaggatttaccatagtcaagttcaatgatgatgcaaccagggatcatgtgctggaacatggagtcattcaattcaatcgtaaaccggtaatcactagaccttggactactgatttggatgctataaaacttgttaaatctgtgcctctttggatccatttgaatgatttgggtctgcaatattgggggaaaaactgcttgagtgctttagttagcacaattgggaatcctattgtaatacccgaaattaagaaatggattagcaaaaccctaactagataattatgtat

SEQ ID NO: 111532 - DNA, 7874 bp, Cannabis sativa
  modified_base (2753)..(2753): a, c, t, g, unknown or other
tatatatatatatataaacctttggttaatgcaagacttagtggactagactacaaacgaagcaataatcatatgaaacagataagtagtgaaaagaaccatgatgtatatgatcaggttttggacggtgcttttacaaactgaattggattttttttttataaaaaaatctggaagaggttcgcagtatttggctgtactgtgcttattattgtttttgtatgcaaatctagtgactacaaaatactattaattaaatattaaatattatatgcacttcaactataattttcaaccgatcagagagtactactatactttgtagtcaagtcattccactacattaattggatattattacatttcattaatcattaatataaagtagtacactattgatcataaccacacaaaaaaattcctactaatggaaatggatatatatattgtaggagacagcttaatttggaagataggatagtgtcaaatgaagtggagatggaatggaatagatgggcggctaaagaaaacaaaagtaaaccaaggcgaacgtcgtagttgcaaagagcatattcataaatgaaaaaggagcttaatacttaggcatacggtcgtttgtttgtttttttttttcaattaaaaattacaaataataaaaagagtggcagcacatgaaggctactttggatttggagcaagcgagctctaattaactgacacaccaaaagcaagacaggatgcttagattctctctttcatgttcgtatatttaaggtttaaataacggcacaatatattgatatcgtttgcatgttagcctccactcatatatttttatgttcaaaaatttataagaatagatttggacttttgctaaagctcaagccctagctagacgaatactaaccgccaactatattaaaactaccaacaaaatgctaactaagtaaactgccccactacttctcatcacgtacgaatattctttctaaatctatatattaatatagtcctttttattcaaaaaaataaaaataaaaatatagtcctttgtttttaattactctgctggttttaattagagaccgtcatatatactttagtcatatgcccacttgcccagtcagtcagtctctttttaaaatacatgtttggataataagaaaagaaagaaagtaagcaaagataagacaccaattgtatggtacgtagctattaatttagcctacgtgatgaccgatttttaagcatcacatgcccagatacgaccttatatatatgaccttatatattaatccattaattaattaacttatacctcatttccatacactttggcctccattgatcagccgacgtacatatatatgttggcctacttcaatattaaaacagctactatatatatatacattgatcaatttttgtatatgttcaaaatgtttggaatataaggagagacattgattgagactgtttggctttataatttaaaaattgttttctgttttttaaaacataaaacagtttttaaaaactattaggagtcgtttggcaaaaaattttaaaaattgtttcttaaaaattgagttttaaaaaactagaaaacagaaaacatcaaaatgttattttcaattttcaaaaacaattttttttttgtctaacatactatattttatattttgctcacatactcggatcctagacccgaaattatacccgaacctagacccggatgggttaatgtcatggtatggtgctaaaatattggtttttttttcgtaagaaaaaatctaaaaacagtttttaaaaatttgtgtcaaacaccattaaatttttaaatgacaaaaaattgttttctattctcacttttaaaaacacaattttaaaaattgaaaactgaaaacacagccaaacaagcttattatttttcctaataatcctcttgaaagaaccctctccttcgagaatgcggacacatgtggaaaatttgagttaaggttaaaactactttcagtaataattaataagttatatttactttctaaaacttaagtagtagtgattcttttactagtgttaagtacgtgaagacataatagttgtctaataatgcttaatgaagacacttttgcatgtggtcgatagagccaaaccataattacgtattattaaattataataagtagatcagatgtgaacttataatcacacaaaacatctctttattatgtgtgtgtttttcagtagtcgtatacatgttaaagatattacaatttagtacaaatcgttaagttggcatatttcatgtatttatattcatgaataaatggctcataacacacaaagaaagggatctggattatacactcgagctaccaagcataaagtcacaacctcccgaatgcgatgaactcatttctagagtggaaaaccttaaaatatattttaatactaatcggtgtagtcatttgatgcaagtttatttatgttttcttttgagacaatctttccttgtgtaacttaattttcctttctttcaaaaaaaaaaaaaaaacttaattttctttccttataaataataatactaataataataataataatttatttacattacaaaaaaatgctacttttagtaacaatcttttagtcagaacataaattttttgtgactatatatgtgacttttagtcacaacaaaaattttcttgtgactaaaacatagtatttagtcacaacaaattataatntttgtgactaatacttttagtcaaagaccttttagtcacaagacaataatgataatttataattagctataattttcttatctttagttacaaattttgttgtgattaaaattaaaaaaaaaatttagtgttatagcatatattgcacactaatattagaattcgcacctgtacctcccatataacttttggactccctctctctccaccaaggtacgtgttagtttattattactccaaataaacaggcgctacttgatatatatatatggtaccatcctttcaatcttgtgagtattgctagatatgtctaacaccatataaaatgtgcaagtaatgagtgatttctaataattaaattataattattatgaattacacttatcaagaattacataatacaagaactaaatactaaaatagttgaattaaacaatgatataacacaataaaataaatttgcaaaataaactaaatgaaatagagataaagtttaatgagacttattatccttttgatggtgactaatctttgggaggaactgctctttggcaaagctttattcaatcttcaataatgaaggaatacaaaggagaatacagagattaatctcatcaacaagggtgtcttgcactttaacaatggttgtccctgggatcaacacccctaaaataaatatgtgacttctcagagttgatttgtaatcacgcagcattgctaaattcctctagaacctgaatgagagcagttaaggattgactggaacctttgctaaacgaaataagatcatcaacaaagcaaagattaatcaaccttaaagatttacagattgggtgaaatctatacttagttgtattggctgtcaaatgaagcaatatagtaagatattccattacaagaacaaagagtaaaggcgataaaagatcaccttgacgcaaccctttttcacctttgaagctcccttgaactcttccattcataataatggaataagatgtagaccttatacaaatcatcacccaacggacaaacttttgtggcatattataagcattgagtaaagcttcaaggcaatcccaattgattgtgtcatacgccctgcttaagtctatcttgatagcacatcgagggcatatgattttccttgaatagtttttcaaaagatcctggagaatcatcacattatgagctatagaccgacctttaataaaagccccgtggtaatgatttatcaccttaggtagcacctttgacagtcttgagcaaagaagcttagacacacatttgtaaagcactgagcaacaagcaatcaatctaaaatcgatagcttttgtcgaattgtcatgcttaggaactaaggatatcatagcagattgaagttcaagtggcatatgttacctgtctcaaagaaattattaacagccctgcaaatatgttttctaatatcagcccaaagcaccttgaaaaaacctgagctaaacccattcagtccaggagatttagaatcgggtatgctaaagagagctcttttgatttccttgtttgagaaaggttgcaccagtaaaagctactgatctaagtcaagtttttcagtctattcaaaataatgttgattcaagccctttgatccttcgtttttagttcccataaaacctataaagttgttcaaaaaatgttctgcaacttgggaaaatgatcaataacagtcccttgctcattagtataggttgctattctgctttcaaccttccttttcttaagaaaagcatgaagtactttgtattatcatctcctttttgtagccaacatattttgcttatctgtctcatgaagctaaagtacatcttctcatgaataaggaagttattgtaggcaaaattttcttgatcctggtactcttgatccttcagattctcttgagccctcattctagcttctactaacttgtctttagcttgctgaaaacttttccccacatctactaacttgtcttgaggctatgtttcaatctcatgagcttgagataaacaccctttagaccagtagcagatataggcttctcccaacttgataaaaccgattttttaaaatccaagtgaacaacccaaaaattatagtatctaaatggttttatcccaattttcacttcagctcttgtagtaacaacacatgagcaatgattgatatggtctcccaaccaaaatgagccatcgaattagtaaacatatcataccaatcctcattcgcaaaggcatgatcaatcttcgaataaattctactaactccatcttggttgttcgtccaagtatacctcgatcctgtgctcttgagagtttcaacataagccttagacatctaatcattagaatccaccaagtcaccaatacaaatgggattaactccagacctatcgtcaaagttgaacaccgcattaaaatcacctaatattaaccagggttttactgggtgtttcaaactagataggtccctccaaaggtttttcctatcttcgatggtattaaaaccataaagaaaggtaatgtagcaagctttaaattggctagacattttgacaaaacaatgaaccagttggggagtttcagctatgacaataaccttgacaaatgctttcctccaaacaataagaatgtgaccttcaatagtaggacaagagaagtgctcccaattaacgaacttattctccatcatctctttgattttattctcttttaactttatttcaactaatgcaccaacaccaattttattgatactacagaaatccaacacagtatcttaattctcctttttattaatacctaacgttccagtaggaaatattgcagctatccatgataaatagaataagtacctgtacctgctgttttgaagtgatcccttattctaagctgaccctgttccatctcttccaaagccttaaaacggttgctagcatcttgttcctctacccttgtaacaaatgtagatcgaatttgcttttgaggaattgttctcctgggcgtaacccatcttctgttattaggctctacctctgcttccttcttctgactatcttccttattcgacactgtaattatctcttctgccttctcaattcttgcctccatatccatcttatttctcgtagcagcttcagttttatccaccttggctctctgatttctcttttttatctcctcacgaaaatcagccatgatatggccataaccatgacaatttttacattttgactaagagccattcatagttgatgctctgttccattagctaatcatactcactaataaaatgaatagatttggggggagtatcatttatatccatctcgattaacagcctagcaaattgaacccttatgcgatccttagtatgttggtctaccataataggttttccaatcgtactaactaacacactcaggcatttgtttccccaatattgaagacccagatcttgaagacgaatccacaaaggaattgaatgaatctgtttaatggcattcaagtctgttgaccaaggtctcactataacatgttttttttatcaaattggagcacccctacttctaggacttgatccctcgtagcatcatcattaaatttgatcatagtcaaatccattgtcatcctgactatttgaggaattccaaagtgtccccaaattctcctgatgtagcctttaaagatagccatgggagggtttgctccaaggattatacaaatcactatcatattccaatttacagtttgttgtttcacttcatttggatctacacaagctattgtacagtcattttttattagagattcagtatataccaacatagggtcacgatacaccattttctcttctttaaacgatttctagtggttcctcgctgaattctaaaattgttccttatcgtcatcatgtccagtctcatattccacctccttggtccaattcatcttgctttgattcatattctctatttcaatcttcaacccagattgttcaccaacctggttcgtattctctttcaaaacctcaacaatcaaattcaatccataagctgaatttgaatctttgaattttgcagttccatcttgctgaatcgagcttaaatcgatcgtatcaatccaagtgactggcttgcgaatcaccctttatttctttgacatgaaagagagggaagtgggaaatgaagcttatctctttaatatcatgttaataattcttttttgatggaaacaaaaataaaataaaataaaaatatataggtacgtagcatattatagacattatagattatatgtcattttttagaattaaatataatatatattgataagttgatttcttaaaaattaataaattatatatacttacaaaattattatgcatatttcacattttttttgggtgtaaatatatatatatatatatataaatgaaaataccaatagattattagaaattatgaatagagatgttatattttttttattattcgataaaaaaaagttagagaacactacaaataaagaaaatagaaaaatagaagaagaaaataccacatcattcctttaatatttttctttatgtatagatagatgttatgaaatattatttatggatgttcaaatcatcaaattaattatcatcattaatgcttgcttgtattttcctttattacattgatttagtttctcattcttttagtcatatttttgtataaataggggttcactcaattaaaataaataactaagaaattctcattcagtttctctttctctcttcatcatcttcttcttttcttcttatctattatattataacacgttaccagcacgagtctctgcccaaatccaaatgtaaatatttgttaaagttcttgaatattgttttaaggtcatgatacactaaatatatatttatatatatactcatctgacttaaataattttaagaaccctttttttcttttttatttaatatatatattaaatatgcatgtatatattttatatgtttattattgagttcatatatatatatatatattatatttcttattgtttatttatgatatgatagagaaaatttatataaattata

SEQ ID NO: 111533 - DNA, 2142 bp, Cannabis sativa
  modified_base (2107)..(2111): a, c, t, g, unknown or other
ggtaaaatatttccaacaagttccacctttcctctcggtccatggtattttcctttagatcttctagaactccttcatcgggtcattaggtgaattccaaaaaatttgcaactacttgcccattgatggttgtttgtaggatgtatgatatgtcaaattggctaagtccaatcgtccactttaggagatgccctaatgtttctggcttgtgtaggacttgttgcaggggttgattagtcaacgcgactatggagtgggcgtggaagtagggctttagattcctcaaggctaccacaagtgcataggctaacttttccatctcagggtatctagtttcagcatctaccaatctcttacgtacgtactaaactagttgttattgttgtttgtcttctcctcttaccaaagctacattgagggtgttcctggacatagctaagtagagataaagcttttctccttttactggtttgtccagtagaggtggttgctcttggtgttccttgagttttttgaaagatctttcgcattctttgctccagaaaaactgcttgttccccttcagcacatcaaagaatgtgagacatttttcagctaagcacgaaataaacctgttaaaggcagccattctcctcgttaggcattgcactaccttctaattttgttgtggatccatatctatcaaggcttgtattttctctcggttctcctctatccccctcttgttgaccataaagcccaaaaacttccccaacgacactccaaaaacaaatttagcagggttaagcttcatcctgtattttctcaaggttgtgaacgttttatctaagttattgatcaagtttcctgccttcttggtctttacaagcatttcatcaacgtaaacctccatgttatgccctatcttgtcagcgaaaaacttgttgacaagcctctggtaggtggcagccgcatttaagtccaagtggcatgactcggtattagtaaagccccttgtctgtgatgaaataagtgtgttccttgtttgtcgggttcatgggaatttgattatatactcagtaggcatccatgaagcacaataactcatgccctgtcgtggcatatattaactggtctatttgagggagcgggaatctatcctttacgcatgcttaagttggtgaaatcaacgcagaccctccattttcaatttggctttgggaaaaaaatggggttcgacacccacactgggtaaaaagcttctcaaatgaactgaattacgctgaccctatccactgcttctttcaatgtcatgtatcttacagaatcaagagctgatctcttttgtgtcatgggtcttgcctggggatggtgagacatcaccgcgggacttattcttaccatatctccatgcccccatgcaaaacaatctatcatcctcttgaggtaatgtttcaactcattttttagggcttcgtggagtcctcttccgatcttgagtattttcaaagggtgctttgaaatcaccacttcttcaatttcttcatctcactctgtgcgggcttcttccttcaccctctcgtctatgtttgcatctaccctttatggtgagggtactccaatcgcacatgatcatctccatagactcacatggttgcgtggaaatcttgagggatgtgctgtagcattcccttgcttccttctgctctcctttcatcgtagtcactccacctagagtagggaatttcatggctaagtgattggtagacataatggctttcaagcggttgagtgatggtctcccgagtatcgcattgaaggctgttgaacagtctaccactatgaatgtggcattattgtcaccttttgagggtgctcccccatagtgagtggtagctcgatcatccctaggtgtggatggaatccccagtgaattcgtatatggacgtcgtgcatggcttcaggtcttttaagctcaacccatttgctcgagtgtgctccaatagaggatgtcaactgaactgtaattgtccactagtactcgatgcacacgagtattatctagttgtatcgctaacacaagagggtcattatggcgaaagtggaatcctgttgggttttatgcccnnnnnaaaactctatttcaatgtaatccagattatt

SEQ ID NO: 111534 - DNA, 6786 bp, Cannabis sativa
  modified_base (4456)..(4468): a, c, t, g, unknown or other
ttctttgtaattattcactgtgttgagttgtaatcttgggctcatataattgtgtactactgactattcctattcaataaagattcatcattcattcattattgagctaagttttcctgtctaattttaattaagttcaagttttgattttgtgattggttttagttttgtttatgcattcttgaacattgttactgccgcaacaacttattttgagggtgtgaattcaccacaaatactcataacataattgatcatttaattttgtatcacactttataatagcatatacattatacatatgtgcccacaataagattttaatccaacaattgaatctgccaggatgagccacttctactaaattctcttggaaaaagccagggacttctttgaatagccactttccaatgatgattaaaacttgtcatcaatttctttttcaactccaaaaaaactccacttggtgtcattatgaaagttatcatttcttgtcgaccaaagcaagtgatagagaatggcagtgcatagcgaaaattcttgtcttagctgtgaattgtcagagccatccaaaactagctatggcgaggcatcaccacacaattaatatgcatggcttggcaccaagtaatatgtcgtcctatatgtttctacaacacaccttcatttttttttttaatttaatctcctcttctagcattttaaagtgcaaaaatgtcttagaacttttcaaatgcaccttcgatcatttatatagattaatgatttgaattactgcataattatgtacgtcacttggtaccaaatgacacattacctggtgtttctatggtgatgcatcactacaattatgtgcgtcatctagcaatgactttctatggcgacacatcactatttttttttatttatttaaagaaattctcttcttttagcattataacgcacaaaactgtcacaaattttttaaaatgcacctttaatatataaattaaaatgacgtgtctccactgtaggtcacctgacacctgattacacattgccaagtagtgtttctatgcaaatgcatcaccacacaattatgtttctcttggaacctaatgacacaaaacattgacggagtgagaaaataaagtttaggggaacaaaatataaggaattaatttataaagtttctataaaataatatataatttttttacatagttaatttataataaattacataaaataaaaagttttggtacagctcccttatgtaggtctctcagtgtttctatatcgatgtatcacacacaattatacaccactggcaccaagtgacatcaactaatgtagtagtgttttcatggcaatgcatcgtcacttgccctaagttactttttttcttagcaatttgaagtgcaaaaatgtctcaaattttcaaataaaattcttatcatttaaatagatataaatgacacgatttctatgacaatatgagattacttggcatcgtggtttttctataatgacgcatcgccactgtgttttatggcaacgcatcgccacttgccctaagttacttttcttttttcttagcaatttgaagtgcataaatatctcaactttttcaaatgaaattcttatcatttaaatagatataaatgacgcgatttctatgacgatacgcatcaccacacaattatgtttctatgatgtctctgcctagcaccgtggtgtttcgatgacgcatcttcacttccttgtaactctttccgcgtgtcaaaaaaaaagcaaaaatgtcttaaaggtagcatacatacactttgaaatgtctctattggcatatatatgacacaattgtatacatcataactttgtgctacctgacttgtatctccactttgcaaattctccatttgattcatgtaaattaaataacgatatttgttgaaaagaatgcaacatttttttgctggaaaaaataatgtaacatttgaatgcccaaattgctagtccacaatatgggagaaagaacgacaaaaggcctattaggtatctcccaggactacacaaaaccagaaaagtaaaagaaaataaaacaaacaaagatgctctgttctgctcgaatggtaacttgtagctttgtagggaatggttggtaagagtcaataatcagtctagtaagcacaattaaggtttaatgacacgatttcatatgccatatacattgtacaccaaccaacttaacaaccaacgaagtgtctcacttgttattaaccttatagtggcagtaaagttcctctgtacttacatataatacatacatacacatacatacatatataaacatacatataatataaatattcacaagtttctaaatacatatggagcagagggaaaaggcactagtgatccccctgacacagcccggccaactctgaacaattgtctatgtacaatataatcttcgagcacagctgaaagaagtaagaaaaaaacatcacttagttaaatttgtttgtaataccaaaaatttagattcaattatgatataaatgatattttaacctgtcatgccaagttctttctagcacgaagttgacttagtttatccctccactgagctgtagaacaatgggaggtccataagaattccaattacataatatcaagattcaccaccatactttatgaattaggttgatatagagattttggatgcatgaaaaaaaaaaacccaaatgaaaacatgcaaaagaatgccgtagatcgcgagtgaaaactagtgcctgattaacttatagcttcatcacctgacatataaattatttgtagaatcctaccaagtaatgtactcacattttttctacagcatctttattaataaacaatgagtgcattatcaagtagacaaatagtaaacacccaaagtcaaaaaataaggtgatacagatctgaagtaaaagaaaagtcacaaaaccaatactagcagccttgccatttgacactcccagagaatgaaatcttaccagcatctctgtatcgctcctcaacagctgccaccagcatattgcgtacaagattaaattcctttgtttcaacgcatggctgaccgcttggtctgaaacaataaatcttcaaattaatactgtctttcaccagaatatgaaaagaatgcactctcaatctttccaaagacattgaacattattatttatctaatttagctataaaaagtgtctacttttaactcacgttccgatatcaatgttttcagttattaatttaatatttagaactatggacttgaggactaaactgaactgaatgactgatattacaagttcctcttcaagtcttacattttttgctggtatcagaggagactaacatcatcttaagaataataataaagtcaaatttaataaagaacacatgcacacacttacacaattatggtaaggaaatagaacctttagcatccaaccaagaaccagcattggagagcaaactataattgtacacacacgatgcataattttataaaaaaaaaaaaaaaaaactatagcgctaatttatctataacttaccgatctaattcagcaaataataagccatctgaagcaagggtctgggtcaagagcttcccagattcaattactctcattccatcactgtatgccaggtacttgttgacttgtattggcacctgtatataataccggaaaatgatattagtccagtcaatcaggaactgccattaagcatttcagtcctcattcaaaacttgtagattttaaagaatcaccacataaggtcatgcacagccacatttgtatcctttaaaaagaaagaattgtaggtatattcatttctattccgaaacaaggttcgtcggactcacaaatctgtgtggtacaggaattgagtaacacattattggatgtgtagaaaaatcagatcaccatatcccatcccaatttaacatcaaacagcggttcaaaaccattgggcccgtgaaattgatcttttggaaattacatatatgccttgaagcattttcaagactgagggtacagaacagaaaggaaaaacataattcagtaccttgcatctcactgctatgttgatagcatctgaaggtcgaaggtcaaggctgatgcactctgattcatcacccacctgcaaccacatgaatcagagtgagcagaaaactgaatcaccataaagggagatcgatgccaccttcaggggacaacaccgcccttcattcccattttttccgtctcttctccatatcccacaactcgagtggaatcaactcaaatcataatttatttttattcatttattccacaagtgtattaattatcattttaaatgagttggatgctcttaagtggtgggataggagatttgaatccccttgaggaatgagagacctcaaagggaaaatatatatatatatatnnnnnnnnnnnnngagagagagagagagggagagagcgcaactgaagcatgagtgtacatacctttgtaagatataactgagcaaaatatgcttcatgcactctcttagtcactctaacaagtttaacctgaaatggcaaaatagagaatatcacaattcacaaccaacattttaaacagaacgaagcatggtcaaacttttagcagaagaaataacagaaccctacctcgtatcccattttatcaatcatttctttcaccacttgataaagcgtaggcctagcctggaaaccaaaaaataatttaactatcaatatagattttgaagaacaaaataaatgtagcagcaaactagttcccacatgattatcagtcttccaaaacaaacaccagtaataatcatcaaaagatgcaagatgggttagaatgcaaacatacaatttgaacattacgcactgccgccatgagtaaaacactaggcatctccactgcaatcgaagcaaaccactatgttaacatttaaacaaaaattaatagaaaaggaatttcatatgaagtccacataagtagccctcttaaaggaactgcaaactattatgctgagggcaaacatacaaacgattattggaagaagaagaccagttccatcctccatcttcagcacaatagcagggtgcggagcataatccggcagatgaccaccctgtggattgttatggacacacctcaaatgcctaccatccctcattttaatcatgaaaccgtctacaccactcttcacctcaactacatcaaacaatcatcaattactaacatgtatatatgaacatgcatacatatagacacacacatagtatagttatatgataactcaaataacaaacacttaaatctagagaagaaataacatgatcagtccaaatcaccctcataaatcaacgaataaacaagtaaaatgaaatttaacttaaaactatgtctttcgaacataccagcttccagtacgctggatttgacatagtcttcgtcgttttcattgaaattttcagccatgctaccgtttccattagacgaagaactgaaagtacaattaattgtcttgaattttcgcccacttacttgacgagaaagataacctgcctgggtgatgctactattgttgatccctttgaatccccacaattcacttctgagacgactaccctttaccggaaaacccatcgtggctagagtgtaaaatcccccttgcttagcacgaacagagggacaaataactggtccttgcagagaccccatccccacctgcaaaagtctacaaaaaatcgtcagtctgcgtcagtagctaacaaaatataaaatggggataattttacattacatataccgtaatattatgcttgatcaccgataactgaaaattatgaatttataatattattttccaggaaaaataaattaatatcctgtccatgaatattagtttttaatgcagctttctttctgtcagaatttttattacaatagtttagtcattagctttctttctctgtttttttttcccttttaaatcagtaatcatgaaccctagatcgaacctcaagaccttcaaagagtctctaccttagaacagagatcgagaatcagaagcttagaatcaccgatcaaggccaggaaagaaaggaaatcctttgctttattttcagacaatgaatgcgaagcaagaaatccgaagaagagttgtgcgatcgaagtatcgaattttatgaataaaatttaaaatacctgaaagaatcagagtaaagaaaactctgaatcggacaactaggattgaaaatggagctggtagttgtagtagcagtagtagaagaagaagaatgaaaagaaaccctaaattggattcggatattaatgaagtgacccaaaacgaggatcagattagaaggaacgagagaggtgagaagataagagattcttctttatgtcagagaaataaaaagacattcaatgctcccgctactgagttattttctactgcaattacttatatgccctttttgtttttattttatatttctttttgccaaaaatattatatttgtttgataacgactggtgatctgttttattcttcatattttcccactggtgtgtaaataattacaatagatcacttgttgactacgtcataaaaattcaaaacaaatttaagttccaaaatatcaatttgattttctatacttatatatacctaatattttatttctaaactaatacatatcagcattgaaaatatatgaccactttatctaaaacccaaaaatatccctctca

SEQ ID NO: 111535 - DNA, 2085 bp, Cannabis sativa
ttattaattcaaataaaaaactaaaatattaaataaaactaacactacgtgacttggcacgtaacaatcacctagttatatatataagtaaataaaccttgaagagaaagaaagtcttgcattaaaatttaaacacaatcacaagtcacgttatgttatttcttattatttctaattttttttattaaatatatcacaaatcataaaatactattttgacaaaataattttctctaccatgtaaataactattatgagcatttttttttttttaaatatccttaaagaaaaaatattatcttgaagttttacttatctttcttctagaggaatgctagaaatattttcttttacattttttttagtctaatgagatttaataatagtagaaataaactagaatttcatcaatctatatgtcaattgtcaaacaataacatcaataatatgagtttttttttttcatttttaaataaataaataaataacataattttcccaattcatgtacaacaagcattttattcctagtataaaatatgagatgaatgaatatgaaccaaaacaagaacaaaattaattcataaaaagaaataaagagttccaatgggaatgaaacaaaataaattaaattatagggacctaaatgcaattaaagaaaaaagaaaactaattaggtgtgcgcgtcataaagagaaagaaaaaaatgcataaaatggtcgccgcgtagggttggaacgtggaataacccatttgttaggaataatgagttgaattaccaaatatgcccctcccttttttaagaaaattacataaagttggtgtcttttttggactttttgagatagctgaccggggcaggaaggcaggaacatctcccaatattgacttggaagagtaaaacgcctttctaatctagacagctgaccttatcaacggtccgagtctcattctttacacttccacatttttaatcataataactaattaaatgatttaatataagaatagtcacacatttaaatgtggcaattaatttattatggccactatattttgactattctattttctactctcactatttatttatttttaaattgatgtgttgctagtaggctagtagctattttcttttgggtaagagaatacttgataggttttaaattaaaaaatatatatttttattataaaataatacgttatagttataatattatttgtgaaaatttttaaataatttattgtgtcgaaaataaatttaaagcttttcaaacacgagtggtaaactagaactagggacgtatttttactcaacttaataacaatcagagtttaatatccattctaagtgagtgaatacgcaattaatttatgaatacctactaacgtgaactagaaaaagggctggtcatgaattaatttgggctaaaaaaacaattttttggagtttttttttttcataagaggacatttttaaaaattatttaaaatatatatatttattaatttttttttatctgagcccttaataggagtaggttttaagtgcgggccttagcttacggccgggactaggtacaccatagaaaaatgagaaagtgaaataacaatatcttttaataatgatcctaattcattagaagaagatgaatgcattgatgaagtataagagacaaatccaacacttttatagaaaaaaaaaaaactatttttgcttgaatgaatgactatgagactcccacatatgcctcaacatttacttaaataattaaataacatcctcttataagagcctaaactagctagcattatgtaccatcaattctcctacttcaacttgaatgattatgaaactccatataataacaataaaatcaactatgaatccttataatagaagtaatattcaccataaaaatattaattaaaatttaaaataaaaaaaaacttattgatttaaagtgactcttaatatagtacatgttagagattttataacaatggaagaaaatcaagatttattacaactctattgtaaaataatacaaggactaaaataagagattgattaaatatatgcta

SEQ ID NO: 111536 - DNA, 11841 bp, Cannabis sativa
  modified_base (11427)..(11430): a, c, t, g, unknown or other
tatttgaaatataatttatttttgtttgataagtatattttttaaaattataaattaaaaaaaattaaataactaatataattaaaaatatatattacataaaagtaaaaattattaaaatgaagtgcatttataagttttaggagtgcaaataaaactccccaaaaaaaattaggattgtcattaattattgatttctactcaagagtttacgtttattatgttgcctgtgattttgttattgtgttattgtaatggcactcaaattatgttttcttttttaaattatcattctgaaagacaagttgtcctcttcctgtaacaaatcagtcccaataaatacttgtttgctaaagatacaaaatcaataatatgtaacaaaaagaattacgtacctattcttgaaaaacttaataacttcaattgcagcattggcctcgtgctcgttataaagggacaaagccccagaattcttaccacgaagctctcgaccatcaacaatatcataaaaaacataaggcccaagggcctcggtctcatgaaatggtgctagtttgctagacatttcgccgttcagcaatttcctctcataaaaatgcaaagaaggaaaccagcagatctctgggtgcattctatactgtatatagtaaatatgttaaaagtaaagatactaaaaactcaaagaaaaacaagcaatcactgtcccaacccagataggacaaatggttggagctacattttaaagagcatcacaagctagaatttatttctaacaataagttgagagtgtagagtaatattatatttagtgaaagataatccagaggcaactgtaagagggtacctatgacttacagcaacaggaaaagtcatgtaatctttgaaaaacaattcaacatgacatatttaaaaactgtacatatgcatgagcattatatatatttctgcatacatgcagcatctcacacctcagtttgaatgaactttgtaacattaaatccttcactatgggccatggattgcgagaactaagtagataataaattcatcaaaaaacgtgcaggctataaagcgtggatgggcattgtctaaaacatgcttgaaatcattaaaaggccattttataaagtcaatcgggaagaactttgagaagtgacgcaactaaaaaacataatataatcacttaatagcaataagagattgcttttaatccagacaccaccaaagtcttggatttcaaagggaaaacagaggaaaagcatacaagtagcaaaagttattgaaaagaatctgaatccaatgttttgaatatagaaaaatactttcattcaaattactaggaccgatcttacacactacataatgaccttaggcctacataatgaccctaggcccatttgtcacttggaaaactaacacaaactacgtactactggtcgaggacataaaacaatataaattgaacaagataaactaaatggactcttcccaattgcacataaaaataaaaactaaaaaaaaattatctatttaacagacaatcacagataacaaggtggtctctgaaaaaattaaggaatatctatttaacaaataatgatctttgactctaaagataattaactcttctataaaatgatctttgactctaaacataagttgaatctgagaggtgacctacacacaacttctatataaaatagtcggaaaaaaaaaaatcaattactttacctgtttggtcagcataacaaccgggtgaccagccttttgcaaacgttcaaacatgctacattcaaagagaaatttacttgcaacatttgaaagtaccgttgcaggaagctgcttgggatcgccaaccttcaaaaatgaattcaaaattgaaaaaccttcctaacatgacaacagaaactttttatcttaattgtgactatttcataccatgatacatttgaccccatttgactttaacagctgaagaggtatcagtgttgcaggttccagagcctgcaggaaggacaaacagttagaaacagacactataacttaatcagtactcatgagattaaagccttgataaatttacttgagcagcttcgtcaatcacaacagcatcaaaaagagtgtgttcagatggactgccaaacttaggacctgatactgattcagaacatactgcatatagatctccgccacagccgcttaatgtagtcaccactatttcagcttctcttagaatagatttccgaagtttatatttaagtcccttaagttcttcattagttttcttttcctgggcctgagcaatgctaagatctttatagatttgcttcttttgctcatagagttttcttagcttcctctgtacttcggcatcagacattaccttcagatcatctttcttgtgactgtcatcttccaaagacttcttgaggtcaatattttcatcacttaagttagcacgcttggcttcgtaaaatcgtatacgatcaactattttctctaaattagaccgcagtgttattgaagaagagacattctcattattctttgcatcattcaacttaatcttctcatctgctagacgatgatccactagtgtatcaataaagaatggtaaagaatttggatgaactgttttcaaatttccaacccttacaagatacggcttatacatcttcccatcactgcgataaaggccttgactagatattctcgacaccaactcatcaactgcagcattagactgagcacaaataagcacccttcgtctgacataagcatcgctagattttgaattcctttgcatgtcctcgtttaattgcttagccaaggcagcatcctgccaagcccttgcaacagcagcagtctgactaatcttagttgataaagaactactttttctcacactaccagcaagaaaattatctgcttgatctgacttttctgagggcgatgcaagcaaaccactggcaatagccaaaatagttcgagtcttaccagtacctatatatttttaacaaaagcaaaaaataagaagattatgtaacaaatcaattcaaacaacagtttaaggaaatcacaaacctggaggaccctggattaatgataattcgacatttttccttgaattgcgtggtccaattgcaacactgatagcatgaagctgactatcattaaaggacgacttcaacattagctgcagtggttgagatagcttactcagatcaacttttgaaatctcattagagctaggaccatcatcatttataggtttcaagatagttggaagcaaggggatctcctttattgaagataatgcctgaaattctcgaagctgaggagtaatgctcataatgcgactcgcatgccatttactgcgttcaaggagattccttctagcttgatttaaacgtgaagtaccattttgcatatagaatctgataagcaagatagttaaccttcttttatagtctctctcgcgcctctccacctgagaaacagaaaggtctacagattactttagagcaatactactgtccatattttaataggtgataccccattttaaagttttctccaaagaaaaatagcattaactataataaaaagaaaattaaaagaaaaccagggtgggataccggcatcctccatatatgaatgtaaaacttgactgttggaaaaaacctaacagcatttaaatttaaccacaagccatccaccaaatggcacgtactctgtccatattaaattacaaagtgttccattatttacatgtgactctacttgtttgatattattacccctaaagaagtgctgccactaattttataacattcatatcctcaaaatggaaatactcttgagtttcaaacaaaaaaaaaatagaattactctgccaaagtcactgtgggaaaaaaaacagcaagcactgatattactaggaaaattcaaactataaagcagacaagaaaggacaactggccaatttcatctaaaaatttacttttaaataattacactgattgatgttgtagagatcaataagagaaattgcgtataaaacagataattgacatccacataatgttgctaggtttccctactttactaaaggtacttatgaaaaatacctttccaaccatatgaaaatcatgagatgatttttgcggatgctcttttgtaaacaaaacaaggtcattttctgagaagctttttgatgatgtagggtcatcgttatcatgcgcaaagcgaacaagatgaaaatcatcaactctttcaactgcaagcactgataaaacaccgaagcacatctcctcccatgaaggaatttcttgaaaagagctttgtaactgcgctttgaactcctccaaaaccaatggccgaaaaatgctgatatactcttcaggtgattgaaaacaaacaggaacttccttcaactttccaaatgtgcatcgactgtcttcacttgctgatgttaatcctattgttgcaaaataatctatctctagtataggcttataccattcatcaagtcttggtggcttaaatcttcttgctcgagcctccaacctctgaagatgacctgaattgtttttattaggagtactaagatgtataagttgcctttttggaacaaaaatgtttggttttgccaatgatgatggctgacgtttcacagaatctagagcagattccagtggatcatcttctgtatcacatactattttttgtaatatagtatcgttagtctttgcactctcacaagctttatttgacttgttgaagctaacagcaccatctgatgacttcttcaaattaactcttccgtgagattctaaagaattgtctatattacatgtcgagattctctctttctgcttattatctacacctaattttgggatggcaacagatcctagcttccccgtgcgtttactagagtttatcttagatgccgaaccatcggtaacatctgcacgctggctatccttcaacatatcctttgaagtgtcattgccacaaactctgtcactaattaggccaacatttgaagtggtttcatgaacatgactagttactgttttgtagtccaacttgcactgacctgtactagtatcagataacatgaactcactcggtgaatcttctttttcatcatcagaaagaacaatcaaatcatatctgtcctttttatcatttattgtagatgagtctaggagttgaagctctgtatccttgattggccaaggttggacatctacagtaggctctttcatccttagaaataatctttcagaactgtagctctttttaatattatctgaagcctccttagataaagaaactgagaggcgggatacttgctcagttaactcatccatggaaacactttctgaattgaaaaaacatagcatgttggtaaaagatgtaaatgaaggtaatgaaaaattgccattttttgtttatgtttaaaacaaaataagagtgctcaccacatgatatgagttcttcaatggtcttgattgtcaatgcaataccattatgacatgaacccttcagcaacttcagcaaggaagcaactgctcgtttccagtatacaactacaactttaagtgatgactttccccaatccacaagatcatgaagccaagagaagtcaactgcacttttcaatattccacaggagccagactgctctatgagtgaaggccaaagcctttcaaagacaacagggaggatttcaagtaagcgaacacaagtcatctgaaattacagagagctaataatcataagaataactccataataggattaacactaaaccctttataaaataaaacacaagttctatatcaattgtctgcacaaacctatatgaatcgtatgcacgtaagagagacaaatgcactactatgaagctattatttttctcaatcagataaactagaaattgcatgtcatatcagtttaataaaagctgaagaaaaaaatcgataataagtgcaaaagcagcactaatacctgacaaatactgtaaccaatagatgccttcccttcaatcaagcacctcttaatacatggccaggccatttccgatagtaagcaacaaaacttttcttgtaaccttttctccttttcaatcaatttttcatccacacttgccggaaaagaattgaacactggctgcctgagaaatccaccgtgagtcgaaaattttgtcttactcatgcagtcagatgatttgtccggcatatctatattaagtaattcgccttgatctagtaatttgcgaagaacaaataaaaagtgttgtaacatctgaaactttagtatgacagcatccacttggacctgaaaaacattaaacaaaactgtaaataaaatccagacaagatgaaactaaagtaacatcccttgagaattacattcttcctaaaatagaagggatacgtggcttcattcccaataagagacaaagagccatccgaaaagttgatgaaaataactagtaaattctacaggcctacaaaaggaattacacagaacagagttaaatataaaagaccaaaacacatccaagacttgataaatgtccatgctatggaaaggtggttattagttttagactatacaactttttacaacttggtccttgaaagtttcaattacagtaaaaaaaaaaaaggaagaagaaacaactttgcatgaatataatgaagaacataaaaaagttaaaatcaaaaaagatttcaagtacataaaacaaaagaaaatacaaaagtgcagcctttttaatacaaaatactttccaaatctatggtaagatctaggaaagataatccttcaaagccctgagctttatatacccatgttttacttgtaagtttgtaacccaaaatttgacattcttccacaacccttccactgcagcctctttatcttcaaatattcagctatcccttacaacccaaaaaataggatatccacaatgtaattaagtagtccaacttctaattttctagaagttaagtcctaaagtctaacaaatgtgctcctcgaatgttattgttgccatcataatgtgttggggagtcaaattatggtctatgggcagcaaaattttctccaatttatttcaaacaaaatttaacctccattaataactaaaactaactgctaggaaattaaaattttgaagagttaattgctaaaattagaatgctaaggaccaaatcataacaaatagtatcgtctaaagagcaatagtgccaataccaaaaagaggaagaaaaaaaaacataccaatttcacagcatgtctcaaacctaagaaaacagcagataatgaaggcccagaagaacaaagaaacttgaggccgcaagcaagaccctttgtgtcagaaacatgttccaagatgtactttccaaactgcctcacagcctgaacataaacaaataaaataccttaaatggagaattttatttacgtggaagagagcattatgtaaactataatattttggaaaaatgctttgattaatgatttaatttgtttgatttcagttccttttattctgtatttcttttcatctaagaggataccttatcattttctctctgttagtcacttttcctttatgaataacatgtgtttcttccaaaaaaaaaataataattttacataattacatcattagaatccaaaagggtaaggatcaagctttcgcccatccttggttcccaagtccactgcttccgaagttcaccctgccccacctgaactaagaaatgttctgttaacctgtatcacaccgcagaaattttacactaaagataagtaaactgcataaattaaatggattatataacttgaattaccagagttcttgtacaaaagagccatagaaagaaatcaaatatgaacatttatgataatgtacatcaacgatattaaacaagtgaaacacttgacctgatgaatgctcgaattagggaaagtgacattgttgacactttaattgagtttttctgttctttcacatccccgccatcatcagaaccagtaggaagcttccacccaaatgttgtagaaatttcagaggacaaaagccatgttctaactggaactgccaactctgaatttaattcagactctaccatagagaaacgagactgagcccaaaaaacagccttccaaaatgatgggggaagaaccaagggattgatatcagcaaggacgtcaatccataacattggaatgcacatccattctccaaaatccagagatacaattttgctctgtttgctgaagtcactccaagaactatcatacttctcctcaacatcctcggaaaataagagtctaatattgtcgtcctcatcatcattcaattcattagagaaacctctcccagggcttggtggcgggcaggaacttagtaatgaacttattaggacagcagcatcagatacaagaatagtttgtatgagatctatggcaggttgtctaagagaattgtgaagtgaagaatccttcagagatgaaactagaggagggcccctgtccaatgacaatgaaatgagtccgaaaatactggtgcacaattcttaacatattcaatcaatgaaaaaggtgacagatacagacaattatcaagctaagccattgatgtagaccactgagggctacttaaaagtccttaagaacaataaaatgcataagacagctacagtcagaaaagtagcgagcagggcataaattcagcctttcgtatgttgattaatttaaaaagagaaagaaaacatcaagatcgattgtcaacatgagccatgatgaatgttacacccttttgctttgcagagagaaggaacaaataaccaaaagatttatacacgttaacaatttttgtcacccacttcaagaataattacattttctttaaatactctgaatgaatagtgaatacaaccttttctcatttctagatctttctccctggctataaaattgtttcctgtgggaatttctgaatattctcattgattgataaaatgagttacaacctattttatacacaagaaaaagatattccgtctaattctgttgtgaatagaattagctacaaacaagaaaaaaagactaaaactaataaaactatacaaataaataataataaaataaaataaaataacaataatacaaaatacgtattattcctatttctgatatttctacactcccactcaaactgagttgtatatgttatacaaacccggtttggaattgaaatcgtcaaagcttctaggtagggcctttgttaggatgtccccaatttgttttcttgtgggaatgaagttaagttgaataatctttctcggagatgaagtgtctgtcaatctccaaatgttttgttctgtcatgatgaattgggttcttagcgatactgattgcagcttgattttcgctatacaatttgaatgatgtaggaacctcaacgtttagttcaattaatagtcttttaatccacattccctcacaaatacccaatgatagtgcacgatattctaattctacactacttcaagagaccattgactgtttcctgctgcaccaagttactaaattaccccaaacataggtgcaatagccactgattgaatgtctatcagttaattttcctacccaactggcatttgtgtagacttctatgtcttagttgttatgtttcctgaagagtaaaccgaggcctggtgtcatttttacgtatttctcaagatacgatgaacagcttataaatgatcctcacaaggactatgcatatattgacttactaaactgagagagaaagcgatattcgatctagtgtgagagagatagatcaactttcctactaatctttgataactccccctctctactggaattgggagggtctactgattgctcccaatcattccaatttcgtttaaaagatctaggatattccgttgacaaatgacctttggatcggacgacctccattccaagaatatatttcgaagttcttagatcttttacctcaaattctgaagcaaaagatctcttaagatttgagatctcaactgaatcatcttcggttatgattatgtcatcgacgtagacaatgagaacagccagttttcctattggagagttttttacgaaggtgtgatcgacttggcattgagtgaaacccacttttacaactgactttgcaaacctgtcaaaccatgctcgaggtgattggttcaagccataaagagatttttggagtttgcagacaaatcgcccgctaaattttcttcaggcttggtggaatctccatatagactactttgaattctctattcaagaatgcattttttacatccatctagtataacggccaatcacaattcacattaaaagatatcaaaattctaactgtattgagttaggccagaggaccaaacatctgttgataatcaacaccataagattgactgaaccccttagcaaccaaaggagatttgaacttgttgatactcccatataaattgtacttgacaacaaaattccacttacatccgactgtctgttttccaagggtaactcagcaagaatccgtgtgcccctttttctcaagggcattgatttcctcatcaacgacaagtcggcaaccttccatttgggaccttttaaagcccatcaatgcttgtaggaatttgaacaagatcaagagatgagacaaaggatcgatatcaacatacttctcgataggatgattggtgcatgttctaatacctagatattagaggagttaccactagacaagaaggtaatagggtgcaaatgggtgtttacaataaaatataatgcaaacgaatctattgagaggtacaaagctcggttagttgccaagggttttactcaaatttatggaattaactacactgaaacattcgccacggttgtcaaactcaatactatcaaagtattgttgtcactaccaattaacttggattgggaattgcatcaacttgatgtaaaaaatgcattcttaaatggagacctagaagaagtgtacatgagtcagcctcccggttttgaagaatctcccaatacaactaaagtctgcaagttaaacaaatctctataccgtctaaacaatctccttgagcatggttcaatcgctttctaaaagtattcaagggacttggatacatgcaaggtcagactgatcatactctttttatcaaacactcaggaaaagggaaaatggcagtactgattctatacgtggatgacataattgtcaccggaaaccatattgaagagattaatctaatcaaggaaatgttggcaaaggagttcgaagtcaagtcttggtgcactcagatattttctgggaatggaatttgctagaagcannnnagggatttctatgtcccaaaggaaatatactctggatctcttggaggagacaggattgcttggtagcaagcccaacaagactccaatcgaactcggagacaagaggaaaatgtttggaggaagcccaattgacaaagagaggtaccaacagctagtagggaaacttatctacctctcccatacaagacctgctattgcttttgcgataagtctagtcagtcagtatatgcataatccatgtcaaggacatctcaatgttgcatatagaattctgaggtacctcaagcaaacaccaggaaaaggtcttatcttcaagaagacaattgagaggaaggttgaagtcttcacagatgcagactgggctgggtcaattgatgatagaaagtctacatctgggtattgtactcttgt

SEQ ID NO: 111537 - DNA, 3026 bp, Cannabis sativa
  modified_base (2180)..(2181): a, c, t, g, unknown or other
  modified_base (2472)..(2510): a, c, t, g, unknown or other
aataatgtggaagagaaataaaataaaatattatatttttaaatgatgtgtaaatttttagcatctttaaataatgctaccattggagatgctctaaagaggctatcactttaacataagtttattgttggagtgaaaaaaaactaaaaaaacaaaatattatacactgagaatgacacgaagatacactggcacaattagaatctactatgtaaatccaaagcttcaggtggtatggaatttcgctctttcattcactttaatcaagattttttggcgaagcaagcttggcgaatttcgcaaaatctaaattctcttctcagcaaggtgttaaagagtcgataacacccgcacaatgctttcctagaagcataaccagggtactcttctgatcttatgacgtcgtgagttgttggaacttagtttacgttggaaaatttgtgataggagatcagttagatgtggttcgattccttggatccaggtcacacttcttttcttcctttctcttatgttgggcctatgaatggtgtggtagcaaacttgataacagaggagcgccaatagaatatacccctgttgcaataatattattttctctcttggtgtgaaaagaattcttactatattattgagttttcttaaactcgaatatctttatttggcatcatcacaacgctgcccagtacactgttaaatcgggtttccacttggcttatttgattgaagatgtccatctctcctctacctttgtttcatcacgatcgtggtggggttatttctagtctcttaacttaccacaaaaaatcaaaatctttgcttggcgggtggttcacaatgctctacatgtgaccacaaatcttgctagagaaaaggttataactgatgttgcttgcttggtttgttatcggcttgcgagtcaataggacatgctatgttaggctgtaagtatgccaattccgtttggcatagcataggtttggtctttgattggcatctttcttcttccatgaccaaaggagattatcttgttcatctatctacacttctcacaaagattgaaattgaaactattatatgtactctgtggtttatttagacggaaaggaataacgttattcatgacagactatctgagtttactgtaatttttcttgaaaactttagatctgctagactcaaacacagtctagccgcacctacaacacaaggtaatacttcctcgtccacaactgaatgtgaacgctgctttggatgcttccaggagtatcattggtgtcagtgttgttgttagagatgctcatggtcacgttgtggctgctatatccaagccaagtgttgggagcttagaatcgtatgagatggatatatttcatgctctaaatttgcttcttcaattagaggtatctattgcccaaattaagacaaatactttaatggtatcgaatgctttgaacaagccacaaactgggatcttatcttttcatgatttaattgtaaagattttaagttttttgttctttttctttagagttactttttctcatgtcaaatgcagtgccaatatgacacctcacattttgactcggtatgtttaagatttggatgaaaattattttttgttgaagactatatctctatccatatattttgttattgtaaatgatttctattttaatttataataacaaagtatttatcttaaaattcatagtagtttatttttattttttatatcctaccttattacatttctgttttgacctttttaaaatttagttatttatttatctcattatttggtttttcttttacatctttatatctttttgtcttaataattgcgtaaaagatttatataaacatgtaccatatgtgttatttgtatataagaagaggagtgtgatgtgctgtctgcataactttattaagtttttgtattattttaatgaatagttgagatgctttaaaatatttggtaggttgtcaatataataattatttactaatgctaattaattttttagaattaaaagaatattattggtataatttttaaatgaatatttatatatgcacaaactaggaatacaagggaagtataaatagatagaaaattaaataaaccgaagatattattttgcatagaatctaaaatataattattattattataatannaataataataataataggaaaattctacaatacacccccttacaatagatatattgatgcacgtttatctattttagtattcgaaataattttttagtcatattttttctcatggtcgtgtacgttatagttatttaagacatcctgcaaaatttaagaaattcgaaaaagtttaacacaccaaaaattacgttcaaactgtgtgttgcacgcgtgactattttattttatatgcgtgtaaaatagactatttaagcattgttttatatattataaattattctgaatttnnnnnnnnnnnnnnnnnnnnnnnnnnnnnnnnnnnnnnncatgaatatgaaaaaaaaaaatttgactaaaaaattcttctggataccgaaataagttaagaatgcatcagtacatccattttaagtgggtgcattgtagatacaacctagattatatacctattttttttaggaaaagtctcaaccaccaaacactgaaagcactaagagcaacaagcaatctactaaagtggggggtgagaatttattcaactatagcatctgctattattaagttttaaatacaagtaggattctttggccaccaaattacactttttcatgaagtcaaaacaattttagctaaaaaatgggcaacaccattataagatctattacaatgcacaaaagtaatatcttggagcttattacaaagaccaataatgccatttaaaacaagacccaaagaagtaataatatagaagccttggggctcgtttggaacgtcgtattaggtcgtattgtattgtattgaatttgattatatatcatatttttatataatactatgttaaa

SEQ ID NO: 111538 - DNA, 1905 bp, Cannabis sativa
tgtaagagtaagtaataaaaaatcgtacgttcaaatgcaacgtacatgttgtcgtaagatataattaaccaagtaagaatactaattacgtccttgtacgacacaactagagttattcattaaccaacactacttgcagtacactgatcaaatatcctattttgacttttaattagttttatctgtacattatttgagaaggaaaaaaaagggttttataatctgtacatttaaataaatgtcacaataaatttgtataaagatatatattaattaattaaattgaaagctcgcttgagccaactcagagtaaatagattaatcaaataagaactattaagactaaacagttctcgctagcacatgaagtcaaatatgtatagaatacaaaataatttaaactagtatatcttttgcaaacccaataaagatagtcatccacatgtgtgtttttcttttctgattagaccaagaaaatggagaagcaaattaagtgatgaaaagaaccgaagctggcattggaatcagagaaattccttgtctcaagggaagagatattttgttgttccttaccatgaatttggagagactcttcacaaatacaggtcataatctctgaaacccatctttgtttattcaagttttagtcttccccttatcttgtaattcagttattaccataagttgattaatccacctcaaagttattctttttttttttagtaaaggtgactttatccaaaattaaagagtaataatatggatatagtttattgtctagtttaacaatatgtaaaactaattcaaatctctttttctacaaattgaaagataaaggtttttgtggagggtgaggttccaacttaatgttatttggtattaagtgaaggaactgaaccactatgttaagttatttttcatgtatttttaatgtgagactattcagaaacatcattgttatgtttggacctgaaagtgtgagtacaataaacagtctttaagggactataacagcgacattttaaaagaaatccacaaggctgaatctaaaaatttgtagatttgttttaaaataaggcaaagatcctaattttagaaacaagcatacattgatcgaaaggtctcaaataaaaattaaaagtggagacaacaaaaactttaattactctaataacactgtacaaattgaaaagaatgtcttttggttagagattgaggttccaacttaaaattggttggtgttaagtggagcaactcaattactatattaagctataatattttctatatatatattctcaaagtggtggaactatttctaatagtagacgtatatgaaatagtgatgctttgaaaagttatataataaattttaaaatcataaaatgaatgatgatgaaaaagcaagattttgaactcaaatgagtactaccaataagacataaatgaataataaaccacttgaaaattaaataaaatcgatacaatataaatatatttagggaaatttattgtacaaatatttattttgttgagtttgttattgctaaatactcaaaatttaaaaattacggtaaaaatagtcaaaactcaattttttgttatcttttttaatactctttttaacagttcttttaattattttagaatcgcacatgtatgtcaccatataattgctttaatctaaaaaaatttgtcaaaatatattaaaataaaaaaataagaaaattaatttaaaaaaataaataatttgaaaacttatgccttatttctttcattctctcttctttttctctcttgctctatgtacaacacatcatgagcgaagtttggtagatcttaactaggctgaggatgtgatgtcacgaccccgagccctaagccgtggcaaatatgtaatatcca

SEQ ID NO: 111539 - DNA, 4203 bp, Cannabis sativa
  modified_base (48)..(54): a, c, t, g, unknown or other
  modified_base (702)..(710): a, c, t, g, unknown or other
  modified_base (4151)..(4176): a, c, t, g, unknown or other
taactggcccaaatcgggacttgatttttttttttataacaaattagnnnnnnntcttgaatagagtattcttaaataaaggttctactgtatataacttaaataaaataaacgatttcataaaattatatcactctcaattccactatttttgaatggaaaattcatctttattaaccattaatttcaactaccaaacaaggtagcaaatcagttggaacagactccaatctgaaatgacaatcaggatataatattgcagctctagcgaagttatgagccaccatattaacttattgttttacaaaatctacagaaataaatggtcgcgtataataggctcaactataagattttaatttatttattttttttaaaaaatgtatgtttaattaatttataaaatattttatttactaaattattttaaaattttaaattcatactagtagctataaattaactattatatgttattaatgtaaatgatataaaatgtaagagtttttaagtaaaatatatttatttaatgatatatttagtgtaaattattgaaattgcaataccaaaaataaatttttttacaccaatttaatgtagattctacactaaattagtataaacatagagataatcatagcgatttgttctatataaattgtagagacacgattttgtcttgtgatgtactttcacggaatnnnnnnnnngatgtacgacagccgttagatgggttaaaaaatagtaacgtaccttgagacctattattacgtaccgtgagacccatttataatgtaccacataatatatttcgtgaaagtacatcacgggataaaatcgtgtcccataaattgtatctaaaattactaaagattatttttttattattattattatatagaaaaatattacttttttcttctattttgtaggatgtcctagaaatagaatcctttgcttttttttcccctttgctagaaaaagggagcctttttttgtgtgtttgaagatcaagagtgaagctactgaaataagaaatatataataatcccctggtagtcggatgggatattggtggttgtggtggggtttaacggcaaccgtggtggaattaacggtggtgggcggagccggagaagggttgatcccactctcaagaattgcttttggatcatgtgccaaccaaagcgcttctcaggaacaggaagcgatctggaatgccatcatttcattcaatccccagctcttcatttggatgggtgacaacatatatggagacataaagcgcccctttagagtttttgggaaggagaggaccattgggccatggaagaatgtggctcgctttgttccttcctcccctcaagagatgagctccaggtaccttcaggccaagtccaaccctggttattctcgtcttcgtcgacatcctaatctaaccattattggtacttgggatgaccatgactatggattgaatgacgctgggaaagaactctcctttcccaccaaaaccaccaatcaaaaacttcttcttgatttcttggatgaacccagaaacagtccaaggttaactaactaactaactaatcatctctctctctctctctctctctctctctctctaatcctattgttatgttttgttatcttcactcactcactcattctttgttttgttttgttctttctttacaggcgccaccaacaaggtgtgtatgcttcatacacatttggccctcaaggcagacaagtcaaggtatagtgttataataattcattcatagtttgtatataatataatcataaaatgtaactcatttctttgttctctaaaatgtatggatcatcaggttatccttctagatactagataccaccgagaccctctctctagtgatggtactatcttgggggattcacaatggacatggttggaaaaggagctcaacagtacaccttcagctatcaccataataggctcttctattcaggtatctgttaataacactcgagacatgactgtaagagactttgtaagagaagggaagaccttgtaatctgtgattgttgatagtagatttgaaaaggattgccctcttgttttgtgaatgtaacttatattttggtgttgttcttgatattagagtgtgtgtgtgtgtgttctttctttcttgttatgtggttttgctgtagtattaatcattggttccaggttatatcaaatatttcagccaccactggtccattgttttatatggaatcttggggacgtttcccaaaggaaagagagcgcctttttaaagtaatagctgatagtaaggtgatcatcatatccaccctctgagggaatttgcttaactatataatcataataataatctcattgaatttacactaagtgaccctaaaggtggttctgttccatagaagttattttgcaaataattttgttttttaataaatgtttcttccactatagtgagttttacataaacagtcagctcatttggtgcagagggatggagtcatcttcatcagtggagatgttcattttggagaaatcactagatttgattgtgctgctactggatatccactctatgacataacctccagtggcctcactcaagctgtggagaacacagtcccatctgtattacatcttttaatcagatttgtggcatggttgactcccactaccatgagagtaatagatagaaactgtagatataaatcatgcacttttggtaagcaaccatctgaattcttgttaactatatcatatgtataatgcattgtataactgcagagcaaagtttcataatgaatgaataaattttgtacttaggccaacccaattttggggcaatcgagatagactgggcaacaactcctgtgacagtgagaagtgaaataagggataggagtggacagcctgtggccagtgttaatatatcattgtcagatttgaagtgggggaagaatatgaatatcaactcttcaaacacactaaagaaatcagcaaacatctcaaggcactgctctcttgaagtgtctctcccatggattgtcagatacagactggctattttattttattccactttagctggtaacctcctcattcaattctctacatacagatgtttataatatgtatatattcttggacatttttgatttattttcggtccaaaactttggttgcagtactggttcttgtttttataggactgtgttgtgtagcaaaattagcgtaccggaaatgtctcaacaagtgcaaacatgattgaggccactttactggaaaatctttgactatggtagcttggttttttcgttgatgtatatatatatatgtgtgtgtgtgtggatgtattttcatgaagcatgaagatgcatgttgttttacagtgacaggacagatgatgcgtagagatgaagctactaatggagatggacattttctgttgtaattgaagaaaacgacatcttcaaacatttttcttatgtataatccagacaagacaagagacattataggcacaataaagtttttgttatgcacatgatatggatatgatccactcatcttttaaaggaacttttaaatcaatgtagcccacatgattgtgtatgtatgcatctgaaaagattggcaatttggaaaaccagaaatgtggttgtctggaagcaaaaatctaccttagcagctaatgtctgttagctagaattagcccttaatcaatggcaaagtgctcagtcaaggaggatgaagtctttgcttgttccttgtggagtgagtaatggacttgagcactggtttaaacatggtatgtataagattaaaacccgcatccaccacgtggatcgaggtggtcgggatactcaaaatgaacgactttattgataagattaaggtgaataagagtgagtaaagttttctattttcattctaaaaaacaacatttttttttgtaaaaaatatatattataaatcaatattattttttaaatagtagttatttattttaaaaatatgtgtttatttttagaattataggtatttgttgaaatataaatacaattaatcttttcactaatataggtgccgtttggtaacacatttgttttttaattttttaatnnnnnnnnnnnnnnnnnnnnnnnnnntttaaaaaatttatttttgaaaaacaa

SEQ ID NO: 111540 - DNA, 4935 bp, Cannabis sativa
  modified_base (29)..(46): a, c, t, g, unknown or other
atttggggtgttaatcaacatacttgtgnnnnnnnnnnnnnnnnnngtaaaataatttccaacagaatggtcccgagcaggttttcagttcgaagataatctctcctcagttagcgaccgacatggttaaggaaggtattgagtttgtgttttgaaaacttagtaatttggcgctttagactgatctgttagaaaggatcagaagtgctcaaatggaagaccctaagttagttaagtcttggaaggatgttttagcagaccgggctaaagatttctcagtatcatatagtggaatgttactttataaaaattggttttgtgtcccgaatagtggtgtgctcataaaagagatttttgatgaggctcagaccacttcttactcgttgcatcaaggtaccatcaagagattacgtatccaagtgtttaacttgtcagaaaattaaggttgaacatcagagacctgtgagtttgttgcagcctttgacccttaatacaactcagtaatagtttttattttttattaggctaaattgttgtaaaatatcaatatttaaagaatgtaatgcttaaatactcaatttaaaattctcataattggataaattttatgtttagtttgattttatatataaaaaaatagttttcagtgacaaaaatacttaatattggttaattataatatttaaataccaacactattttagcagcaaaaatacctaacatttgttaataataaaagttaaacacgtgcacttttttcggctaaaatactaatgtttaagaccacaggaaccaacaattcaaagcaatgatttacctgatcttttccatgtatgtcagctttaacaagcttagaataaaattctttaggaccctttccatcagcaccaccatcttcaacttgtatgaaagcaactcgaagtgcctcattcctatgtgaaaaaatccaagaacaaaataaatagcaactcgaagtgcctcattctaatggtactttttttttgttgcttaaatatagttattttttgtattcttgctctaatcatgctctgtattttagttaatatttgattattttaacaatatattataatatgaatttgttaaatataattttttataattaaatttgtcaaatataaaataatttaataaaatcatgataaagtaatagtacttttgattaaaatactattaaaaaattttagcaaaaaaataaaaacctttctatcaattctctattatagggagccattttttgtatggttggcgctcatttttttaaggctgactctctattttagctaagtgtgtatagagagcatgactaaagatgttcttaaacaacaaatagcgaatgttgacaacaagaacttgtgtacgatgttatggttggaaatctcggatcaaccgctcttccgatctggatgagtatgagatgatggaaataattgagagagagagagagagagagagattaaagatgaagtgaagaacatgtcttcgaaatctaaaatgaataatgtgttttttattcaaacaatgatctctcaatacacaagattctaaccctctctctaatggaatggagaggtatttatatttgggctctattggtcttgttaacaaaatgagctgtaagtggtccctatatggaccatgtactattatgattacaggtggtagtaagatgaaggcattgttagttaggtgtcaggtgatactgacacaagcacgcctttagaaattgcacccgatgtacatccactactttgtctcagcttttgcaggtgtcatggtcgtaccctccaattagtcatttcttaggcgtgcctttgattccctttggaattcctcatcatatctcaaggtacttgcttcctccttttaattccatctctaatgactttccctccgatgctcacaaaaagtcactttcgttaatgatgactccctcatggaggcaattccaacgctcttatggaggcaacacccttacaaaggcgaggctctgatggacgtgacatccttttggaggtgcggggtaaaatgattaccaacaaggcctttttctcgtggctcttcccctcgtggcttttcctttttctcgtgacctcaatatttttacttagtgaattccaggatcaaaaagggccatgagatagttaccttctttagttcacatatctccttaggaagtttcaagatgaatgccaatgatcctaattgagttttgaggctttgggatggcccgcgggccacaggtttattatggggacatgtaggtgcgtcatcttgctgatggcggtgagcctcctacatttctctcacttagtatattgaccacaactttcgtaatataagtcagaattgagtgatctgagatctcctagaaagttgagaaagagatctacaactgtaatattttgctcttcatctaatttggaatttaaagatgcgtaaaactactggtatgacacgccttatagctttattcatcaattttacctgtttctttccataagcgtcaaaggcacccaaactgacttaaactatgtgattaaccttcaaatatcataaccaagggaagccctcttagtttttaactaatccgctcatcataacatcgagattacaacttgtgaaatttaaaggttaacacttgccctcaagttcataagtgtacttttaagtgctcatatgaactcttgattctagactcctcattagtagctttagtggattttcacgttttgtgaaacacctcttcaagaattacacttaggtttgctatccatataatattttgcatggagatcttaagtaaccaatgttatacacgagggttgggatcttgacccttcttactgcaaatactcttgtgggatgttgaagtttgttttgtcgaattagtacttggtttggtgatcatcgccctgcaattatgttttcaacaaagaaagtaaaggtcacaagtttaataattaccacaactgttgttgtgtattatcattctcatatcttctagctcttgccttggtggtagtagtgatgtttgggagacttttccttgtgcatgaatcgttgtggtctcattaaggtttttatatcttgaggcttctctcgtgactgtagcttgaggctcgtcacattgggagaccttctcttataagcttttctttcatgtcatagtgaaacgattttttcagactttcctctttagtacatggaaagaacttttcgttgagaaatctcttttatgataaatgacactttcgatgagaaactatttgatccacaacccttcttggaatcttctacaaagtatgcaattatttgtattttgctaattatttagcccttgtagaacgacattccttacatcgtttatttgtcgagttcaactctgaggtccataaaatggtaatcttgcatgggtgttggttcttcgttaggatcttggtcatgttggaggtttgacctttattggggtcttagacacttgagagtcaaaagtctctctttaggttctcaaacatcttgggttgctctcgtcacttcttgttatatatgtgacacttatagtgaactttggatcccttcaattttcacattacctttttgcataattgctgctaagtcaccctttatttattttattttttacaagttatttgcctcttttggcacatatgccttagggtcatttattgtatgtggtacccttagtgggggactcttggcctcatgagctacgttagccactattatggtgttcatgtatcgtgtaaaccaatggctctttctccctgcaaggtaagccaatggtttgtgacttttctattgagcgagtatgggtactttgagtccggtctccctcttacgatttgtttacttttgtaatgagcgagtatgggatttctaggccaagtctctctcttattatctgtgtaatgtaagggagtatgcattctgtgaacctatctcaactttttatgtgcgtctattgagaagcgtccttctcgttttatggtactatttttttaggagcatctttcaagatcctcttgctgctaggtgccttagcttcctatacttcagtttaggcaccttagctacttagacttaagatcgtgtttgggggtaaggagtttctcaaagcatacttgttctttttctcttgttgcaaccaaggccagatgatccttgtttgtttaagatcattttttactcctttaccctttcttgccccctaattgtgtagcggtatttatagcgatggacacgtaaggtgttctttattgcaatgaaacttcaacacagggtttcgaggtcatcgaggttacctatttttcttttcttttttttgtgacaacgatgttggagatttatcttttcgtcattaggtccatggaagctcttgtggagggatgtagatgttggtctccacgacttgacttcctgctcccattatatgcttcgcatgacatctcgaatgcctcttatatttggatcgaggaagtaatggtccctttgcaagtgtcatgtccacggtagtggttatctcttctatttttcctctcaccttgaaagtgatatttcattccatccattccactcactcttttggtagccttattcttatatggagactaagtaactttagcgtcgcatgttgagtggaattgtgaaattatacgagtgtgtatatataagaataagccttattcttatatacacataataaagaatgggagtgagagtgtgtgtatatatataatataaagatagggtgagaatatatatatatatgtaagcgtcatacatttcacggggagcgagacgaggcaagcaagcacagggctgcacacgacacaagacgtttgggagtagcacacagaggattgcggcaatactttagagggagtctaaact

SEQ ID NO: 111541 - DNA, 7012 bp, Cannabis sativa
  modified_base (4666)..(4668): a, c, t, g, unknown or other
aaaagaaattctatcatctacaacgacatcgtttcatctagtccaaaatcgaatttcctttttcttttatccaaaaattgaattcattatcgcttccactcagttcgagtctcgaagctcagagtagtcatccatggcttccctacgccttatttgctccccagctaccacatgttttcccatagaacgacaactctctttgacacctctttccttctccaacaaccctcaatctcattcccacatctcttcttctttctttattccttgtaggtttccttcaaactcacttcaactttcaccagttacgaccaaaagagtcaataacgatttcgctctccattccacttccacttccacttcccaagaacaatctctcgagtcttctccattaagtggtgatagtgaaagcgaagaacttgagtcagacaccagggaagttcataaagacaaattgtatgccgagaaccttcctttggattacacttcccaagatgttcgtactctttttgacaagtacgggactgttgtagacgttacggtgaggtttccaatattgttatgtttttccttgaaattatttactttattgagtatgatttggtatgttttctttgaaggtgtttggttattttttgagtttctgatatgggttcgtgctggtttgttgtggtggcttagcttcctaagaatcccaaaaacaggggcatagcttttgttacaatgggttcacctgaggaggctcttgcggctctcaataatctccaatcgtttgtaagcatatttcttctggtttaatcctctcaattgctatgtgtacggaattttagcttgaattttcttacttgggtcattttgcaaaagatagcaaatctttggcacttgacagaagtaaccactttcttgtaattgtaagtgtacctaattgtatttgttatctacttagccatgttcttctttgctaatgtataattataggaagaactaaataacttacaaagttaattattgcattgcatacctttctgtatgtgtgtttttcacaagatgtacacgaaataatgatgttatactgcaattcattgtgtgaattccagcccagtactctaccgaattctttcacaaaacacttgagctgaaagcaaatctaaaattcttgcttgaaacaaatataaaatctttacacacttaaattactatgatgaaatcaatagctctatattaccatctttgtatgacttttctttcattttatcagcaagttaatagaggacttgtaacatttgctttctcttttctgtgtcatgttctctgctaaaagaaatacaaatgatataggaagtggagggtggagttttgaaaattgcctattgcagaaagaggcgagaagtgacattcaatttgtttgttgggaatttgtcatatgatgctacagataaagatctcaaagagttcttcaacaatgagggccatagcgtagtgtctactgaagttatattccacgaaactatacaaaattccttggtatatggatatgtatccttcaaatcaaagaaagaatctgaggcagctctaatctctgttcaaggaaaggtgccagcgttgttcatcatgtttatttcatcttattatttgtgactataagcatggacctattctgcatccaaatttcataaagacattttaaattggagattctctgacttgtctttttttcccccttaggcgtttatgggaagatcaattcgaatagaacacagtaattattttattagaaacaaacaaccagctacggagagtgtagagtccgaacttacttctccggagttgaagtctggtgtaaaagaagcataaattgctgatttaagtatatcatgtgagattttgctcaaaagtgacatcaggtaatcttttgccctgttattagtttattgtgaatcttacttaaaagtgtttctaatctctgttattagttgaaagagaagaactgatggccactgattatgcatgagaggtaactgagttataaataaattcttaattattgaggtaatagtttgctcacattttgtgcagtgatttctactaaagaacatgacacaagattgttgcaaaaactgtcaagcaagttaggagcttgggtctcttggagatgatgatttagttttaggagatacatgtgttttttttttttcatatactaccatggttgtaagtatgtaattgtattctttattactctgaataaaactatatttattgttataattattttctcaaatcataagaaaaagtattattgtaaatcattgtgaaaattatagtaataatgataatttaatcttatgaacatgataaaataataataaaaaaaagtgttatgtagtatattcaataatgcttacaatataagtcacaaaagtattataaatattaaaataataatgatattttaagtgaaaaaatatattatgaaaattaataacatattaaaatattaaaataacacttaaaatgtattataaaagagttttcaataatactttatcataagtcataaaatacgctatgaaaagtaacttaatttttaataatacaactttccttaatccattaaaaagtattatgataagatttttataatacttttatggtattatggaaaacataatttcttactatgaaaaataataaagataatactcatttaaacatattaatgtattaaaataatacttaaaaagtattataaaagagttttcagcaatactttagcataattcataaaatatgttatgaaaagtaacttgatttttaataatacaactttccctaatgcattaaaagtattataataagatttttataatacatactattatggaaaacattatttcttactataatactttttaatgctttccaaaataccataaaattaagtaatggttgaagatatttcgatttttaattttagtgcaatacatattttattaatttcacactttatacaataatatatatacttcatttcatacatataaagtctaacataccatacatagccttatatgatcgactttttagggaaaatatatttattttagatttggtgggaaggaaaaaaaaattgaggtctaggcccaacccaacaacaaagtcagtctgctgtactatataagctcaccaaaagatcaactatatcgaaatccaaagtgttctaaacatgttcttgattactgatactagctagtaagtacattagttataatatatatttatataaaaaattaaataaattaaaggaaactcattaattctgcattttaagacttttgcatgtgtagaagctgctgatcacatgctcaaccgaacctaatcaacagtcaagattattcttaccatatatgtatatgccagaagtatgtgatctattagaagatttaagtgtataaattagacatttaattttataaataaaatagatagtacatatggataatttttccagccaatggcatattgccacatcagcttctcagaaacatatcatacctgtgcatatgctctgtcctgtccttccttccaacaaaacatcccaagtcaataacctaatataatttaatcaagctagttattatcatgtgttatcaattaatatgtgccactattaaggtttccaatgtaaaagcatgtccatttttttttaaaaaaaaattacttcttaacaaattaattatttgcatcttttatatttttaatcagctaaaattctagttttatatataatgatgtcttgttttatttatactcttctaaaattagaaattgcacacatgcatgcaacatatttaaataacttatttttattatcaattgcttgaatatataatggttataattctggcaaaatatgatttggtttaaatgcaaagcatgttatcttataaatatatcgcacaagcaaattaataacgggatttaattaaaagttgataatgtcattcttttatacgctgtattatttgggcaaagaatcccttttaagctaaaaacacagcctgttttaggaatcatgtcacgtggtatgtccatctactaatcaactatcactctatgaaggtttaattttattttatatcaagtttatatgacaatacaagttacaaccatatatatatgatggaaaatataatttttttttcagaagagaaaagaaaaaggtaatgagcaagagggttcgtgtttctcatttatgattataccaataatcttagaaagttcatttaatagatgaggggaggtggaagcatacagcattgtctgttacctgcgcctactgctatcacagcatctatattcatgaatctttgcactcattttcttaacacaatttcatgaattataaaaaaaaaaaaattgacctatagaaattaataaaaaataagcaattaatgtttatttagtaccctgtgaaattttaatttaatatcttgttttctaaaagaaaaaaaaaacaatcaggtacagcataacaaaatttagttgaaatttcattgcttttaataataataataattcaaatttggtggactacttaaattgaaataaaaacatttataaatgaaaaccaaggcgtgttagtgatttaaaaaaaaaaaaaaannnaagaaagaaagaaaaaagaaagagagatagtgaatcatagtgatttcaaagtgtttttgttggggaactgttaatatttcattattttattttaatagaggtgacaaaatgtatgaaggaatttactctcatagaactattttttttttaataaaaaaattacagattgccttttcatagcattaattttttattgcattatttatttattttatttaaaaaaataatagtgaattacaacaatttttttatctatttttttttttctatcaatttgtctaacatttttttttcgagcaaatttggtaatccaaacaaggacttgtagaaatggtaagtatataagaccaactccaatagtatatgtaaatattttatgttatatttgctataaaaaattaatatgagttaatttggcataatatttagctaagcctccaatacaaaatagtagatgttgatgcaatatttaattttttttttattaatgcttaatatttattaaatatataccaaaaaaaaaaaaaaattccttgtatttttttattttttacacaatttttccttatattttattggtcatagagtaataaagtaagaaagttaacattttaattatcaaaagaccctaattacctaagaaaaatgtgataactaaagataaataaattaataataatatatggaaattaataataataataaaaaaggtatgaaatatgcactaccaaattaatttaacacaattttgactttaataaaataaagttcttgaatttttaatatttaaatcattaatttttgtatatacaaatatagatatattattgtatttaatttgaaataaattgtactcttaagagaaaaatgatagagaattatacgatagaattgttaaaataatatgaaatactaaattaattcataatacatattgtcagtccaaccacaatcaaggtgatcatgtgaaattatttaagggactgtggcccatatcggtgccattgatactgattgggaatttgggataatatatttcctacctatttatttatagtcacattgcagtcttttcatggttaatttatcttacattaataatattgcaattcgcaaataaatggtaaaaaaaaactgcatttataattttagttgaattgcgcatttgatatttatgtaaaaaaaatcatatcctcataaatccaaacctaattaatatcaagtcaaaagtaaggaaaacaaaatagaaataaaataacaaaatcaagtcacacaaaatactaattgtatatataggcgagagtacccacagcagagaggccagatgaccaaatcttgttaagaatatttttatacatttgtctcgttcatatacatctacatataatgtatatatgccattttgttttattctttttgcaattatatataatattatgatggcacgtttgacaaaatttagaatttaacataattacaaaaaaacttttgaaggtgtgggtaaacaatatataatttttgtataattatgattattaacttattaaaaaattgagataaaagttcttaaaaaatttattctaatgtagataattctctaattttaaaaaatagcagtaatagtcactaagtatgaaatttttgtaagtctattgattcttattttaatagatccatttgttgcttccaaaaatatcatgtgttaatattaaattacaatataaattcttaaaaagttcactttaatgtatataagtctcaaatttcgaaaaattatggtaatagctccaaccttaagattcttttttcgtcaatgaagggtattttcagtgagaacaaattttgccaatggagagtgtttttttcgtcattgatgattatcaatgacaatgtgtcgtcactaaaaggttatcgttgataactcgttgctgaaaataagtatcaataatgacattcaaggtcctcgttgaaaataaatatcagggacaatagtatagtcatttataattttataatatgtaattattttttatatatatttttaaatattgggattgacgacttagtctaagtcatcactaattatactattaatgactactaagtcttttgggatacgtattagttttttaaaaaataaattttgatatatataataattgttgtttgatttttttttttgttggggtaaccgataaaggttaagataacaacggtaacaaaagttacacagaatgaggagggatttctttcatccaagaaagttcattgtctatcctaagggcatgcttagccaatctatgagcctcaacattaaagttgcggctaacatgagaaagagatg

SEQ ID NO: 111542 - DNA, 2956 bp, Cannabis sativa
ccacgtaaaaagtcttcatctcgctttcgtacagctcattattatactcatattttattggttgtcgaaaacctcggtcaacatatataattttcttttttttaggaaagcatgaaccctatgttaatttaaactttagacaaaaataaaaattaaggcctaataaaaaagtgaagttttgagatttaaactatgaatttattaattattaaaataattaaattatcacataccttcaatacgtatttagtattatgggtattattagttttttattactaataatattttaactttttttttcaaatggaagcctaagccagccgtaccaaccgcctccttcgtgtcactacaggaccgaacttgatgtgatatagttactctattatttttatctaaagtaaatttaaacatattcgaaaccaatatatacctattaaaattatatattattagtggttatagacataatttaatagttccacacttttttttagaaaaagaaggatggaatcccacacctcttcaatgttaaaagaaaaaccacatattaccatataaacatggtcttatttattcattttttttatggggagcatgtagacacattattattctattatgtttgatgttaatttggtgattatcataacatcatatcaaagcaaataataattaaaaaaatgaagttaattaaaaaattatttttattctaccggattcaattatattagataaggatcaggaacttaatattatgtattgtttggtgtaatactagattagataaaatattttattaatttttaagttttaaaattttaaatattagaatttaaattttatttttcattattttaatttttagaaaatataaaataaagatattttaggtaaaacttctaaatatttgcagttgttatatatatgatcccaataacaaaaagtgataaaatattttatctttaagattttttatttaaagttgtatattttaattaatatatagaataaataatatttatttagtatgtggtcaaataatatgacttcacatatttttgagttagtacctaactaacttaattaacatttaaaaatatgattgtaacaaaattgcaaaataaaatatttttattgttattttttattagaattttcaccgcaaatattcttataaaatataacatatttatattagaatgtgtgtacgtaattatgtagaacctattagtattagaactagtataaaaagtaaaaaaataaaaataaatcacacacttttagttgagctaaataattttacacaaattaaactaatttcagagaaataaaaataaataatatcttaatctttccattccatctctacccaccatcactttctctctctagagtaattagcaagagagagagagagagagtcaaccataagaattttcgcgctttctttcttcgcctaacatttgttcaaagaaaggtttattagttttagttggaaagttgtttaagtgtgtactacaacgcctattttgtactacaaaaaatttgtattgtagtacatgcaatgcaatatcatatgttaataattaacgcattattattattattattaatacattcataaatctctttatttttatttatttttctctcaaaatctagtcgtgtggtgtcgttgatttccaagtttaaaatcactcagactgacccttttggggatttggtctgtctctgtgtctgtgtgtgtgtgttgttggatgaacagaagaaaagtctataaatttatagatacccatttcgagttttgatcattttcagtcaagtttcgaagaaaataacaagattgaggtaaattcttatctgggttttgtttacacttgtctaaagttcaaacctttagtgattttgattccttttttgttatatcactatgtttgttgttgttatagattttataatggagaatgggactaaacatatggaagggtcttcttcttcatcttcagagattgagaaatttgaaagagaggatatggaagaggttggacatgagccagaggatttgaacagaattgcaccatggacagaacagattactcttcgtggactggtggctagtatagtgattggaatcatttacagtgttatagtaatgaagctcaatctcaccactggtttggtcccaaatctcaatgtctcagctgctcttcttgcttttgtgttcataagaacatggactaagttgctcagcaaagctggaattatgtcatctcctttcactagacaagagaatactataatccaaacatgtgctgttgcatgttatagtatagctgttggaggttagagaaaacaacaccaagtgtttgttattatgtttaactttgttttaagtcttggtttttttattgttgttttttggggtgaattgcaggtggatttgggtcttatctgttgggtttgaaccagaaaacttatgaacaagcaggaattgatactgtaggcaatactcctgggagtactaaagagcctggtattggttggatgactggttttctctttgttacttgttttgttgggctattggctttggtgcctcttagaaaggtttttttttaactttctttgtcttttctttgtttctttctttaaattcattcactgaagaaagttatgtgatgactttttgtgcagattatgattatagactacaaactatcatatccaagtggaactgctactgctgttcttatcaatggttttcatacacctaaaggagacaaaaaggctaagtaagcaatgagctttttctctcaatcaaacagaattgagtatgaaaaaagtctaactagttaaggctctccttttctttttggcagaaaacaggttcatggattcatgagattcttctccattagtttcttgtggggtttctttcagtggttttattcag

SEQ ID NO: 111543 - DNA, 2993 bp, Cannabis sativa
  modified_base (2931)..(2937): a, c, t, g, unknown or other
tcgttctctctcttaaactcaacatcaggaatacgaagtatcagtaataattatatataatccaacaaaaaaaaaatatcgacctatttatttttataataatttaagttgtactataactataaaattaaccatcaattaaatcgtaaaatatataaaatttactataaaaatataaattctttaaatatatgtattttttattgttataaaaactgcgcgaagcgcagtatcattttttaatttatatatatatatatatataaaaatataaaaaaatgtgtgaaaaaagataaagagagagagagagaggggagagaattggaaaacaaaaagtgaaagagagaaatagagagagaagagaaagaaaaaaaaaacatcagcctatgtaactgaagaaaaaaaaaatgaagtcactgaaaaataaaataataaaaaaaaaagatagaaataaaaaaaaaaaaaaaaaagctttatagaaattttaataaataaaatacagtaaaaaaaaaaagaaacattaatagttggtgtaaattaagataatgtagatatacagataaaagttcattgtatactttattaacccaattaaagtataatgatagcgcatggatgcttcattttagtataggtgctccttaagctattgttattgttcgtttatatataaatatagagaatgtttattttatggtatgaacacttgtttcgtcggcaataaaggtcacaataggataatataacttaaaaacgacacggaataaatagatttagataacacgtttaataatcgtgtcgtattgtgtttaaattttagacacgtttaataattgtattgtatttgtgtttaaatttttgacacgtttaataattgtatcgtgtctgtattaccttaattatgtcgtgctatactcgtatcgacacgtataataattgtgtctgtcaattgtattaacacaataacatgaattgattttcatatattttatataaaaaattcaaaatttttgtacttataatgataatcgtgtcaaaattgtcttatcacattcgtatcatgtgacgtactaattaatcgtatcgtgtttgtgtttgagattttgatacatttaataaatgtgttgtgttcgtatttaaaattttgatacgtttaagaaacatgtgtattcatgcttactttagtcgtatcttgttctaaacatatcgacaaacacaacacaataacatgaattgccaaccttacttatttcatcgttatagaatgaggatattattcttgggaagttttaactatcaaatatagcattaatcatttaaatcatacaatgctattgtaccgcatataaaacaggttcatcatttatttcttaccgttagtcaaattcagtcactatgtttggttggtctttctaccttctctatgtgcgtgctgtgaatgactaatttatttattttgacttcttttacaccactaattttcttttcaacaattctaaattcgaagaacaactacattataagttactgtatattattaaaaaggttaaaaactaaggttataattgggttgtatataataatattatctcatacatatatttatcttacttattctaattcattaactttcaaaattataattttattttcaaattatataataatattaataaaaatacatatgttacttttttttaaaatttattttaatagtaatttttacgtcacttttaaatatatttaaaatcttataaagtaataaaacataaaaatttatcaaatagcttatattggcaaaataaacataacttttcttttttaaaaaaatatattcattgtatgacactgaagtaactctaaatttatatgtataccgtataataacttttatacactccagaaaatagcttcattaataataaacggtgtgtgatgctctcaagtgaagagaaagaagatcgcatcaaagcttgttaatgctgctgcaagtggtatgattgagcagattgagctgccttatatccaagaagatgcctctgttcaaacagaggttttcttagcccatgtgctgaattggagaatgatttgaaggaggctgaggatggtcccagtggtgtgaaatcgacccttagggctgctagatgggctgacgaaataaagaagatggactaccaaactttggccaaagtagcgtggagcaaatttaatgagaatctggtgagaaccccttcttctcaattaaatttcactaagccactgaaaattggtgactaggtggttgcaaaactagatttagaggaggttgaaatagagtcttcctactagaggtcttcgattgtttgtatattcttaggggtgaatccttcgtttagagtttttgaagggtttaccaaaagaatttgggggaattcgggagtgcaaaagattgtgaggttgcactcaggtttcactttggtcagttttgatgatgaagcaactaggatgtcatcctagaaactggagtcatccattttgataaaaaaaaacagtggttcttagaccatggattgatgatatggacacaactcagatgattagatcgattctagtgtggattaggttgaatgaattgggtctttaatattggggaaagaagaatttgagtgctccaatgagcactactggtaaacctataatggtggataaagtgactttagaaagaactatgattaaattcgccagagtcttagtggatgttgaaattttggatgatccaccaaaaactattgcttatgttaatgagaggaaagaattggtggagcaacatgtagaatatgagtggttgccttctaaatgtgcatcctataatcttcatggccatacagttgctaattgcaacaaggataaacatgttgtatggaggaagaagttgttggaattattttaccnnnnnnnagatttactaacaagcatgtttcattaacatcctaatatgaatttctcaaacaatg

SEQ ID NO: 111544 - DNA, 9653 bp, Cannabis sativa
tttccaagttatctgatccacgtgtcccctcttgactggtccacgtattttgggcaaattttggagcaacaacaacaatagtgaaaatctttcttcagctctcaatgaaagtactaaaatattaccgaattttttaaaaaatgaatataaagaaagattaagctaaataaaataaaactaataagaaatgagacacaattttttacgtggttggggtgttaatgagccttagtccacgagcagtattataagctttttgcaatggagttcttacagctcaaataagtaatttactggttatgaattttctaaaccatttgcatggagggcatagtgccatatttataagcaattaagttgaatgggctggatagattcggtctgtactagggttttttatcaataaagcccactgatgggatatagtacattgtatttgtattttcttaagctattgggtcaggtaggtgaggcccaattccaaaaagtaatatggtgtgcggtgcatggtactgtgatggtgacaactggtgtgtgcaacattgttgggaaagagaatgtcaaaatataagtgtaatgcataaaatggtaaccacctttttgtcgcgagtcgttctagaattcgacgaatgagagaggtcaccaaattcctcggattctgtcagaggcgtgccacataagcaatatccaaaaggttagaccatttcggataaccctttcagcttctgctctcgaatgactcctaggggtattcgtcttaggttcgcaacattacttaggtcattggtatttaattagagttaattatactttcgggaatttgctagatccaagtcattcctggacatgctctctgaattcgtatccatttgagagacaaattgtcttgttcattcgcctgggccagtaataggcacagtactttagtgggcctccgggagggaccacatgtcaactctctcgaaacgcatgtaacagaaaagaaaaagaaaactatttcttaaaaaaaaattaatattcttttatcagttttttgacattttcttaatttgcttccattcaatttctattcatattctcatttttaattatttctaaccaaatgttacctaacattacacgttaccaatgcaaggatataaaatttgttattaattttgtttggtaagataaaagtacataaatttagtttttgtaatatttcaataatggcactatgtttggaagcaaaattttggtgtggaaagaaaaaagtaaaaaaaaaaaaaaaaacaaataagtgcaaagagttaaaaaaatcaatttgaaaatttttgttgaatatttttttccataatatttttaattccaatagcaaacatgagacttgttttttatcttattttccatttctttttctacattttctttaccacacgaaatccaacttaaaggattaaggattttcttaaaggtgtatatgaaaacaaaaggcatccatgcttgaccaaaatgtgtttgtatactgagtagtaattactgttacatgtatttatatttggcaaaagagttaacgagtaaacaaaagaattaacattctaaaaattaattatttaaatataataatattttataattacactattctcatttggatctcacgggacactcttattattacctgtaattataaaattatggtacaactacttaattaaacaaacacaccaaacctaattattttgagctactttaaactccgcaaagatgttttttctatctctctctcaagaaaaaaatggttttactgaattacattataatgcgtttaattcaatataccacacgagtcatgactgaatatataacagaaagaatatcgcactataatgtctcttaaaatgggaaatcaaaatcgttaagccctcaacttagaggttcccacaaagaacaactatacttcaatggatttgggaaaaaaaaaaaaattatacaattgcttaaatggatactcacatttcttatgatcttctcatcccctaaactatatttcgtctacataatgaacaaagaaacaatgaagctatagaattggtcggctaattccaacaaaacgatataaatatatatatatatatatatatattataaaactattacgactcaggttgtgccctagaaatgacatggggttggagaggaagcataccaattaccaagcaagcagtgtggcgatatttggaaggcgaagggcatcttcgaataacttgcattcctctactccttttcttgcaattctcttccatttatatccttctgctctgtgatgggatcctgtacctcctcattagtacactttccatcattcgttgtcatctcctcagatttcacctgtttcattcaagcaaatattagaacataacaaaaacactatacttccaagctttataatgtgaccatcatggtaaaccagcaaacgcaccatcatgttatttacaaatgaagctaaccatattacacaatcattattgaaagtaatttaaaattatatcccctctatttaatttgttggtagctcaatgtttacacaactttctaggagaaaatttattgggcagaacccaattacaaagagaaagttcccagaaaatattcaggaaaattttgtgtttctgaagactgggcttccgctaaaaaagtattagacacccaatgcaaaaatgttataacaacaatttgtgacatgtgataaagaaactaaattatagaagcaactgaacaataaaattcaaatagaagggacacagcacaaatatataggttttcacttctctaattgggaatcatccaacattctaattagtcgcatataagctattggtactccaacaaaacagtaactcctacagtgcattagttgataaatgaggaaaccaaccttgttgcgatctctccaaccaagtccaaatggtcgggatagcagactaatctttcttgcaggaatttcttgtgaattatcttgattgctgtgtgcaggagaatcaggacgagaagatctgcaaaacaatgctttcttaccaaattaggacacaaagttcggccttgcatcaaaaggccttttacaacttttcttctctaaaagatgcacccaaaacaaagtgaaaagtttcaacgcacctaggcgaaggctgcgctttgagttgtccagattgatattgcaaagtagcctccaacattgattcagccataacaactctcttctccatatcagctagtgcagcagtggcatcttcatatttttcctgtattagttggaatatagaagatgacaataaacaaaataaataaaacttgacatcagaattcgattaagctctggaaatgaagtatgacatcaataacaaaacatagatgatatgaagtctttcctattcttctatagataggatgcatggaaactgaaatacttgaaacatggaggaataaatgaaataactaggaagagttcaaatataaacaagatattgcacaccatacggagcttttacagcaaaagaaagatgttatttaaaataatatttaaaattagtttattttacaaattattcaccaataacttatttcatacatgacctaattcccttactcttcaaaccacctcgtcagccacaatttgcttcatctaaatcaatctatgacagaactcatatatgggaagttgagaactaattatcgtcaataattgtagaaggcatctagtctaacaacgggttaaagaaattaaagttcaacctgaagcacttgagcagcatatctctgagctgctgcatcctgctctgcaaatctgcgagcatcctctgttaacctttgctcttgttctactcgcatcaagacctgtgaagtgtgcaaccaacaacaatcaccacaacaatgctatatttaagtaaaaagataaaaaaggaatgaaaactacaaattacactattaaagacaaaaataaaacctcttgtcaaaaaaaaaatacctggagcatggcgttttcttgttcttgcttatcagaaagagattggcgaagttcagcaatttcttgctccaactgctcgacctagaaaaaaaatagcgaagacaaaaaattaaacaaacttaggaaaaaaaggccttaaattggacacttctcattctcttgaactgaaagaaagatcatccgactatcagatgaagaaattaaatttcactaacaggagacatcactgtgcaattattgatgtgtatcatattgcttattatccagaaactacaccaaaataattgaaaaaacttagaagatcaaccattaaacgtataatagagagagggtttctttttaaacagatatgggaagatagggacacattatcataagtatgataattgagaattaaaaaatgcatcaagggggaaatacacacacaacttatttgaataaataagttccatgagtaaatgaatgcactaaataaaccttggcactcaattgccttcgattgtcctgcgtcaccatctccattaaagctgtctccaattcctcagctctgagaatacaaggcaaaaatatgaatattactcttagataataatcaaaaatccatagccaccataagaaaagttatattgaaacatataaatatacaagtatcttcacaaacaatttattgacacaaatggttttttgtattcaacataaaagagaaatattaacacctgagaacagcagatcttttgtcctcaagctgcctgcacaattcaaccttcaaccataccacctgcatttgctcatatattaactctctcattagaatgttagaaataagatgtattcaaatttaaaacaaaatataattaattaattaaagtatcatcacttctttaacacattaaaagctattgcttgaaaggtccaggtatcctttcagagagcatcaatacagaaaaaatgtgctaaaaatctgtgcgatcatttttttatatacatatttgatgggatgactgataattttccttaataaatttacaaatagaacacagttctagcaagcatcccactagtttttggaaaattttgaataatttatggtgtcaaaaagagttcaaaataaccagttccacacgaatagaaaaaaaataggcacgagcgcaacttactatttgaaccctattttcaacatcgtaagtttttcaaaatttcccaaaaactaacatgtctgctataactacaatagacgtcgtaatattaaaaaaaaaaaaaggaattatagtttcttcaagtgttgaaaacaaaaagtgccccatggaaagggcaaaaatgatgttaatgatgttcttgcctaagaattttcctatatatatataagagatagattaaacggaaaagcaacctggtcttgaagatctggaagagaatctatctccccacctcccgtcaagctaataagaatttcatcagcattagatgatccagactctgagcgagataaatttccatttgtttgtgcatcaagcaatcgctctcccttctttgtttctatcattactgatttaggatcttgtttaaagctataaagtttagatgcaagaccctgagaatctctccatgcacgaagtcccttcgatctttcctctattgcagccatcacaacaggacgatgtttatttctcaactcttgtaacctagcttcgtttacattttggtagcccatacaggcagtcaatacaagttggctgctgtcaaatgttgagccagccagtgattgtaacaaagtgactgcatctccagcatcctttgttgtaaccaatgcagggcctataagtgaccaattaatacagagattgaattacccttcatagtaaagaagtcaccaaaccaaagcacaaaggaacatgtagtaccatataattccatcaaagcaagtgcagttttaaatagcatgacacggtttccttcaaaaagaagcacatcccatactcgaagaactgcatccgaaaaaaattgccatcaaatgaggatgttgcctgtgcaaattatgagtgcaaaatcttgtgtagctaatgccatgaaaggaattctaaatgtgctctctaacaagcctaaaaatcaattctaaagatacatataaaacctgaccactttcccaaggaagcatgttcatgaaaatggaaagaaaccacggtcccgtaacccatgccacctgcactcccaagtaatctagatgatttactgcaaatatgggtaagttgaaatcagtttctatgcaatatgtatcttttaaaaaaaaaataaacattggaaaagcagagaatacacaaacccagtttaggaaacctctcacgcaccaactcctcaaaaacgagttgatctacctgacaaaatacaacaatattcaacagaactctcatttttcgtgatgtttcacaagtgaaaggccacaggggttaaataaaaaagaacaaagaaaacaagcattacctgagattctatcatttcctctgagtaatagccatcaaaatagtcatcaagaatgcccatcaaggtcctgatttcacaaattgtttagttaatatagcctgctaacagtaactagacaaagcgaaggaataaatatgacaattattatgtccagtaatattcacggaactataaagaaatctgaatcaggaaatgtctatcataaaaaaggtacattgctttcagaaaaacaaagcccaacataaattttgagcttagtttaaaagaagaacgtcaagaaagagcatcttgtactcaaaaaaaaaattatgaacttaccaaaacgcattctcttcaggcataagaagtagtaacaagccagcaaaaaagttcattgcctacgtagagatcaaatcaataagttgtaagttccacgacacaagtaaacttttaataatatattgtacagttaaccaaggtatccaaaccaatacctggcaatatccaacagagggattatgtcttgcataggcagtaagtagacgcctcaaggcatttctaccatcctcgtccagtgctgggtgacctgggaatgttcgaggcaaatcctgcaaatggaatcacaaactagaagttgggaaaatgcaaagctgctacttataatgagcacaacaagatagtggaacaactaaccttttcaatctgtcctttccatttttcaggagcacaaactgtagttgaacccttggtcttgtctgagtctaaaacatcttcttctacattattgctacccttagtttctgaagttagcagatcctggtaatatttctcaactcgccgcgcttttacaccaacaaaggcttgccaaagctgaaatttagttaatcaagctatgaacgtattcatcaataatgcacttcatgtcataaagatgagtcaaacatgtaaatacgcacctctcccctgagagccattggcactcccccacgaacaagaacttccagctcttctctgcatggaaataaggattctgtaggtaccccatcagaggaaccacctacgatgctgtcacttgaaggggaatcttgaattggatctgatctctcgacatcataaaactcatcctcagaatcctcctcaaacgttcccttgggtgatctagcctcttcaacagaaggaagagacttccctgtttcattgacgtgctcatctttagatatgttgtttttcttctttatgcgagtactcatcatattttcaatggcaagaagagatggtctaatctcagaccatatttggatcctatgaatttttgtctcttcagtaactggtttttcctctttattagaaacactttctgttgaattaatggaaccaggctcttcgcaaccatctccagctacttctttctccaaactagcatctgcttccttctctgaaatttctttttgcaaagaccttttactgtctacattaaattccccattgacaggcaatagagcagactctgcttggagttccaggaaagaattccaccgatctgatctttcctcctcctcttcctgaaaataaaaaacacaatatttagcaaaaagctggaagcgagaatttaacatccttttcttctcgttttcctcttataagcaacctaatctcataaaacaaaatatgagaaagaaaaaaaaaaagtgaccttgtaaatattggcatactcccggtatctctgaacgtgctgaggtctcacagcaaagccataagcgtccctgctcaataccattgtccattaattttccatttcaataaaatctacctaaccctacgcgtatactaaaaacccagacagactcttctctgaaaataaaaatccaaatcaaatctcggaccgagaaaaccccaatgttgaacatggcttaaatcagcagcaatactttgagagatcgccaactctccctcgacaataaatactctgtacgaaacctcatttctacatccgaaaacacaccgacattgcgtcaacgcaatttcaattgaccaaaaccagaccaatattcgacccaatttcttttacaaaaaccaagtcaaaaaaacaaacaactaaaaaatacttgaaaattcacaacaattcaaagtaaaaaatcacccgttcaatcccaagctcatcaatcaaaattctcatagcaaaaacagagaaatcactcctcggactcaacacacatttgtaaatttaaaaaaaaaaaagtacaacaacaataacaacttattcaaaaccacatggatgtgaattacggcgatccatacagatgtaaaaccctaggaaatgagatagatagtaagagaaggtagtacagagaaagagtacctcttgtgctcgaaggcaacgagaggattgagcgaggctttggtggtggacattattggatcgggttcagcggcacaaagaccccgacgattcagccggtggagatctccgactttcttctactttgattgtctgcaacaaaaggagtttagagagagaaagtagtggtagtgagtagcggtacgtagagttgaaagagtataggaaagaaagagagagaaagtgatggagggcacatgcacaggaaggaggagccgaaatcagcgttcgtgtcgtgatatttacatgtgcgccatttttcattgacacgaactccaatgaccaacaaaaacgaactcaagaaagtctttttttttttattgcaaagaactgaagaaagtcgataagcacaaaatttatttatttttttattttatttagaaaaagataattgaaacgagaaatttttcttttctttgagaaattagtttttttgttctgatttaagattttttttagaaaggttctgattgaagttacagttttttttttttttgcagagtgatttacgttacagtttacttttctatttgttgagtaaattagaattaaataaataattacacaaaatgaaaatgtgacttggaatttggttgaccaatagaattttatttattgttgataactaccaagtgtaaacaaatagtaaaaatgacaacggtgtttatagaggtttggcctttttatttagcatataatcagggccggccctgaaaatatatgggcccaagacgaattaaattttggggccctcgaaaatatataaaaaataatcaaaagaagagtgttatggga

SEQ ID NO: 111545 - DNA, 7942 bp, Cannabis sativa
  modified_base (7915)..(7915): a, c, t, g, unknown or other
ttttttcttattttttaaatggacatttactaacttagttaccaaattaagggccattttacatctcaaccattagagttttctgttatttttgaaatcgaatctttttctgctaaatttatgtctattttgttaaattatttgttttctaataaagatctatttccattaataaaataataaaaaagattaattaaataataataataatcattaaactccaaaacaccaacaaacaacaatgtcccgtactgctcactgccaaaacccagaatatttttaaagccggagcagccttcattgtcgaaaccattgctacaatgcatttgaataaaatattattaaataaattttaaatagaaataaaaaaaaaaaatttccattgcctaaactcaaagcagtgaaaggtttcccttgctcacacgcttcttcctcattcaatagtcaatatataatatatatatatatataaaggagtgtgtgtacattcacgcagtttatactgattcaagcacagtgggagactaaaggttcgccaatggcgatcagattgagttcagcggatgcctctggcttcaaattcctgttctttctcgccgttatgtacgggctaatgtcaatgcttacctactccattcttcacatgaaattcgttaggccgcttggcatcgacgcacctctggatcagttctcggaagctagagcagtcgaacatgttcgagtgctgtccgaagagatcgatggtcgccaagtgagccatcattcaattatctctcgattttttcgtttgggttccgagaaatttctctaattccgttcaactttttttttttttttaaaaaataaaaattattttcttcattacagattctgaactacgaattcggagttgttacaaatgtttagagtatatgtttgtattagatagagtcgtatactgtttgttgcgttaattattggtaattgagctgcgttattaataggaagggcgccatggtttgaaagaagctgcccgttatatcaaagggcagttggaaacgataaaggaacgagctggtttgaatatgaggtaattaatggattgagtcctgattattagtaaaaaaaaaagtagtctcttctagatattttgttttcaactttggttgtataattgagttttacatatgtttatatatttattgcaggattgaaatcgaggagacaattgtcaatggctcctttaatatgatgtttttaggccatagcatatctctgacttacagaaaccacgtaaatgtcattatgaggtaccttttccatcctttttaatgtatatttattgagcatacttgttgtaccaaccttaaaatacagtagtttgcacttaacttcaggccccacattaagcataattatgcatattttgtaacagtgaagcatttgcatttacatctttcaagtttttaaggaaacatcatcacaaaataattaaattttaatggcagggtatcatctgcagattcacaagactatgattcatctgtactgttgaatggccactttgatagcccacttagttctccaggtgccagtgattgtggttcatgtgttggtgagtacacaaaacaaaagtttttttttcttaattgttactctttttggcctgatggtaacgattgcctcatctttttctgtgcagcatcaatgctggagttggcgagacttattacagactctggttgggtacctcctcggcctattatttttctttttaatggtgctgaagaactttttatgctggtaagatgttttattggatcaattccacaactggaactatgacacacctttataagttgtaactttatgctcattgtacatatcataatgtctaatggtaattatgatgatttcagggctcacatggttttatgaggactcataagtggcgtgagaccattggagcttttataaatgtggaagcatctgggacaggcggaccaggtagaacactatcaaatcaattaccattctcaataattgtaaaatataaaagtgtgcacatagttcgttcctgcaacatgtgtataattgattcattgactgtcctatatttcttttctttaaattgagtgtttgtaataagagtatagaaaccactttctatttctaatgcaatgtcagtcatattgatattggatttggacaggttacacctggtttctcttcataatttatttgtttcacttgtttcattctgcctatgattaaagatttggataatgttagggcaagtggaatgaaatagtgaaacagctgatttgctttagaaatgcatcatttttcacttttattactaaaattgcagatttagtgtgtcaatctggacctggttcatgggcttcgcaagtctatgctcaatcagcagtttaccctatggcacacagtgcagcccaggtactttccgtttgaaaggctcaaataactgtggaagtgtctagttttttcctgtctgtgaaagaggcttgttattgacatctatgtaattatgtaaacctttgttttgacaacccggtttcaccatatctatagcattacctttcctgattttaattcatgttggatggtcatagctatgcttgtctgtattaactttcttgtaaatatttatctggtatatgcaggatgtttttccagttattcctggagatacagattatcgaatattttcccaagactacggcaacataccgggtctggacattatctttcttcttggtggttacttttaccatacctcctatgatacagtggacagactagtgtatgcattacaactgctattttggtacagatttacttaatatggaatattagtatcattcctttctaaatagttcctctgattcatctaattaactcacagaccgggaagtattcaagcacgcggagaaaatttgtttagtgtcactaaggcttttgccaattcttctgagctacataatgcacatgaaagagaacctcatgaagtccaatcagaaaaaagtgagcgtgctgttttctttgattacttaacatggttcatggtatgctctaaagctcctgctcttaagtatctctttgctagttattatataaaccatcttttaaagtgacaagtattttcaccctcttcctcttgatcttacacagatatactatccaagaagagtagctatgattcttcacaacattcctattgccatcttcttcattatgccactccttttacatttgaggtcctctgggctgcgttcttggttcgcaactttatcagattttatgaaaggtaaaatataaggagaatttaaaattggtatggataaaaatagataaatatagttttttctttgggtaatattatgttattatacttgcaaagttatataaatctttagcaattctaatatgttcttaacctttagttactctccatctctacaataacacttcctaaaaagtgtgtttcaactttattgattgctgactaaactcattatgtccaatttgattatgtaccaggaacgctattgcatacaactgggtttatacttgcaattattttcccaattattttttccattctgagattgctttttactagtcaggcaatgaactggtgagattttatactcttacgcaatactcaaattaatttcttattttctatgaactaattaatattagaataagagccctacacttgttcatgaggtttttctgatgatctagtttgtataagatgagatttagagatgtattttaccattatatgcttcagaagtaatgcacataatgggtgtaaaattgagaaatctctcctagtgatcttttctttctcaagattcttgttgacttttaggacttgaattacaggtttgctcatccatatttggctttcatgatgttcatcccttgtgcactttttggtcagttgattcctgtagctttgttgagtcgttctaccgtcatggaagatgttgcatctcaatgcagagcaaaggaggtagcggtacattctaaaacctaaataactgaccatgatcaagttaaatgattgcattcttaacagccctttgactacactggtcttagtttttaactcataggtaaatgcaatgtgtgtgagatcaatgagagaaatgtatggaaagtgaagaattatatttcggaaaaaaaacttggtacattagtggactcagtaatcagttatttgacagagttgaactctcccattgagcgaggatttgttgcccataacacatcaaggattcaatgccccctagcctaccgtacttttctcactttaaacatcataaagcaaccaaatatagaacacaacactaaaatgaaaccagcctgtacaaatatagaacaaaaacagaagagaatgcccaaataacagtcacagaacaaatagacaatcggcgcattttgtttctttcttcttacgcctagcatatgtaaattgcggattggagacttattagtgtgcttcagaatagagtagtaataaaaggaacaattttgaaagtgccattagtaatagctgaaataataattgtgatattaatgatattttgctgttggtgatttactggtttttgggttataaccaaagaccttttttgattaaataagtaaataattatttaaatataatctgtttcacttgcctttgtaactaacttttaggcaagaatcggtatctctaaagatttataatggttcaatgtcttgacaatttgtatcacttatcttttgtaattttaactgaacataaatttttcaggtactatctgttgaagccagattttggggagcttttgggttttatgctatgttaactacggtatgtattatgtaattttattgatgtgtagtgagcatatttggaatattataagcataatatgtattatgttatatttaaatctaaaaagactaaaacacttagtaagcgcaggcttatcttgcagctgggctatctggaggcttcttaacttttgttctgtctggttcgatgcttcttgcttggattttagtttgctcggtagtcaaaagttctgatcatacatctctcaggtattttggctcatgagaaagtctttatatgtcacggaagaacattatcattttgatctgatttatattgcctctcaggtcaacaatgctatatgtgatccctcaaattccagtccttgcctactctgtttactttggtggatttcttatccagttcttggttgagaagatgggaatgatgggtgctgttccacccccatatggttagtttgtcaatatcaagcactttctctcatatacttactgttttagttaggctcttccagttccttaatattgaagcacgatgcagcagacattttgctagaaccaaaatgagactaaactccttgttaattgttgactagatgaaaagcatcttttcttctcttttagttgcagttccttttcttttatgaccaaaaatgaagtttaagtacaagctcatcagtggaaatcacaaaatttgataggaatatgtaacaattggatttcctttgtgtgcaggttatttcattcctgatgttgtagttgcagcaattattggagttgtgacgagttggtgcgtgggccctctactacctgtttgtggtcactggttagccagacactctattatgcaatttttgcttcatcttagtgtgctagcattagctctgtcatctcaattctttccatacaccacagctgcacctaagagggctgtttttcagcatacacttcgtactacaggtactaaagctagtgacaaaaatgttcaataatttgcatcacttctgaagtttggattataacttttgtagtttgcttttaacaaaaacatattttagatgatggtctcttaccttttatgtcaaaaatcctactttttcatttcttatcgagtttattgctaaagaggttatttcttatgtgactgaagattcaaatcgcattgtggactccagttatgatttcgctgtggtggattccaattccttactttttcttttcaaatatgcacctgaagttgcaaaggagttgcaaataactccagagttctcatttgaaactgcaaagttttgtcacagggaatcttggttggtatgtattgtaaatctaaaatgttccgaacgaatatatgatataagttgggcctttaaatctttaactgcttatctctcaaagaaccacttctttgtgagactggctgctatgtttcaaagtttgttgctttttgtctgagcagtaaaaatcatataatccatgtctggagctgttaactttcaccaaattttcatgcaacattttatcttttgcaggcactttttcctgttccttttatgttttcaagaagtttaaagtttccagcaaaaactaatgaaattttggagcaatacgatcgattcccttttctgtccacttacgaatcttatacaacacttggcgagggaactcggagaattcacttggaactttcattggggtaagtagaatgaaatgcatgtaccatttcactaattttgatctcctacattgagacaaacacactgatttggttcttcatctttttacaaactaccagtaactagacacagatttacttactctttttcagttccgtaaaggaggtttgggtgacagtcctcaacattactggcccattatcaagttggtcatttgccgacaatgtgcttccaggtacaaaaaagaaaaatctatctgattacatcttacatgtttattatctttctctctcttacctctaaactcacacccttgaaatattatttcagctcctgaaacaattgatggaggtccaccctcatacatttgtcgcattagtggagccagtcatgaaaattggaccttctggttagaggtaaaagtttgacaatcataggcgcagccctacagtttagtttgctggttttaccatgtcactagctttgttattatttataagaaatcaagtaagaatcttttgattgtgggtgtcattgcaggctaacagtggtgaagatttgagggttgaggttgcagtgttggaccagtacatggttggtgatgcaaagaaactgaaaggccttttccctgattgggttgatgttgttgcatactctagctttgtatctagttacgtattctagcaacagaccctctaatctatctttatttccattaatcgatttcaggcatataattaatttttataggtcagtggtcaccctatattgctttgaaaaatatatatatttttttaagagaatagatcaattagttcttaattctgttcagctcagttaatcttatctattcttcaaagtttcttttactttccaattctttcaatgcaacttcagtgtactattagtaccaaccgaacttggtagtgttttggttagaggcatcgaaagctatagaagagccacaaaacctatattttagtctttgtagatttattaattttatttttaattataatcgtgtaatgagtagcatttttagttatgcctgttaaacaatcacatagattatgaactatccaaacacacattaaacattattgctcataatcattaaatgcaaaatcaatactttatttagagcatcacaaacttatgaaaacacatacctcccatattagcattttccatttgaacaccaaaatcttcaatgtgaatgtgtctccaagatggtagaagatgaggtagaagaggagcttatgaaagcaagccctttttttatcaccacacacagtctctctcattatcatactaacacatattaaccccttatatatccaacacccaaccctaaggggttttattaggcttattgggttaatgantataattagtggtggactataatttaa

SEQ ID NO: 111546 - DNA, 6579 bp, Cannabis sativa
taatttgaaatagtgtaaacaataaaataaccagcttgagacaaatgaagccgcaacagcagtggatagaataataagcaagcacagtacacagacctcgaacttcgaaattctcttcttcgtcgccactttgccacaattttttcatttcctccatctctctcccttcggccatttaggggtggagcgtcgtcctcacgcgcctccgccatggattttgatgtcaagttggtcgctggtatggagagctgcttcgtgtccttgcctctcttcctaatccaaaccctccaatcctcctcctcctccggttacctcccggaagttctcgctctcgacctacgctcccgtacctcagacgatgaccactggaccatagcctggtctggcgccacttcgtcttcttcctcaatcgaggtcaatttcttttcttttgtcttttcaaatttggttttactatttaattttgttgtgattgtaaaaatttggattattttaaacgacgcagattgctcagcagtttgcggattgcatatctctaagagagggtacacgagtcacagtccgagctctgccaaatgtggccaaagctactttggtaaccattgaaccaaatactgaggatgattgggaagttatggagctcaacgcagagcttgcagaggcagctatattgaaccaggtattaacaaactcaaaagaacattagttttagcattttatattcaaattgaatgtttgaataccaaatttattcatttcatcttttgattacatattctcttcctggtgtcatcactcactcaatgagcagatagagcaaattagcaaaaaatcttaatttgaataagaaaaatacctaattcaaacacgacgatttctcaactaactataaacaaatgaattttagcaataaaaagattcaaataaggtcacctcacacaaaaagaacttctgccatcgatattaacaaacctccgtcttcaaatattttaaagtatatagactcacactaatttagttacaatgattgtcttgatacgtgcatgaagtttaatccaaattgacatgattgtcgagagaaaccactgaatttcggttcagaacattgatgaataataattttcattcttggtcgtttgaactggggcttgtttttaagtggtattctgatacggtattttgatcctgtcaactataattttgtctcgtttatttgtagtatctttattttttaaaatttatttatataatatgtatatttatattttgaatttcatgaatgtgttgtctttcttcagaatattattgttacttacataaagcaattctatacaatctctttcaccttcttctatacatatgaaaggatggggtcaacttttcttcttattcttcatccagtgattccaattttttttttttttttgagtagttacttatgtggaaagtttgggtaaattacaggttaggatagttcaggaaaagatgacgtttcctttatggttgggtggccgtactatcatcatgttttgtgtggtttcaacttttcccaaggaagcggtgggtaagatgctacatttaagtgcttctcatattcaattatcttgttaaatgctacccagggtacatattaaagttcttgaaactatacaacatgcattttaatttttaattggaggtttaatttcagcccaaacttatatcatggtattaagaatttccaaatgcctgccataataaatgaggatgttgtaatccactttgattctgacatcaaattttatagtgcaacttgtgccaggaacagaagttgcagttgctccaaagagacgcaggaaaaatttagactcaagtcatgattcttccttgttatcttctaataaagcacgtcatactgcaatggctctactccgtgttcaagatggaaacaggagactagttcacaaaagttttgtcgaaagcattgagcttgatgtagtcctcacttcagtggctatggtacatccagaaacagcaaaaatgtatgaacttgatagtcttcagtccgtaattttagtgcctcggttatcatcaaaggatagcgtaaaagattctgaaaagaatggaatgacagtaaagagcaatcttgcttcaaaggatgctaaaattgcaattaaacaggaacatcgtcaagcagttgtgcgcatattggtttcagattcggttgccaaagggcatgtgatgatcgcccactctcttcgtctttacttgagggctggcctgcattcatgtgcgtttgcccttccttggtcaacaatatcattcttatttaatatattccttgaaactgttgactagtgtgtgacttaagtttacactgcatcaaggatgagtagtatctacattaatcaaaactttccttggaatagttcaccagcatgcaactttagtttacaaaatttattatgtgaaatattttctcatcggacgatgtaagtgttaggtgttatatttacatttttcaagtttttgcatgttgttcattaacctttatgctgtatctactttttgatctcagtaggagctatatggcctgccttcgtcatgtaatttcctccttggtaatcatctcggaaaatgagtgattacatttttctgaatgatcctttgatgactttgtatgttcttagtagtttcttttattagacaaatgacattgtatagatatttaatgactcttgtaatatccatttcctccacattttatctagatgatttagtggcctccaattaattccttatcttaatttttattttatttttctagtaaaattttatttgctatatatataaagtagtcctacatttcctgtttcttttactaatttaaatttgttccaacatttgttcttgcaggggtttatttaaagcgatgcagtcaattgcgaaaagatattccctcactttcactttctccttgtcattttaaggtagaaaaaattaagcattcagagaagaatgattttgaagtgcttgataaccaaaaaaaccgcagaacaaaaaatttgcatctcaatactagttcagtagcttatatgaatgttgtagactgggcaacccatgaggaagttgttgctgctctttcacatgaatctcattgcaaagaggatgagaagggtccttgtaaggatgaaagtgctaagggtctagaaaatcttgttaaagcatggttcagtgcgcaagttgattccatttcatcgacttcaggagtaaaagttacttcactaattctgggaagtgaaacattggttcactttgaagtgaaaggctacaagtttgggtcacataaaaatactatgatgtcatctaatgattttctagagaacataaataagcctagtaaactgccagttgaaatattatatgtattgactattcctgaggactcccatttaggcggaagtgcttatgagctggtttttgatgaaataaatgaagggaacaataatgatctgcaaggtgcattgtctaacaggattggtgatcctgtaacctttaaatgtgtcagagagagaatatttgatgaagatataaggactgacatatcttctttgggttggatggggacaagtgcttcagacgttacaaatagtaggttatttatttatttatttatttttccggcaagaaatagaaaactattttcttcataaatgattcttttttttttgaatggataaatgattcttaattctctctcatttctaaaatcactttcttctaactgtctttggctaacctcttcgtcagcaaggacaaagattaattgttctgaaactctttcagcctgtcttagttgtctttcattgactttgttttagcagaaaacacataatcttttgactaccatgagactgctaaaggggccaacaataatgcttactctataacattttatgtatcctaattcatgttgcatgcaggctacacatttatagaccatgagtttcttttgctgttttgcattgcacatcgttcagtgaggttgataccttatgttagttagaagaaatgacatatattagaatacaacttgcctagtatgtaattatattgcagttatctatacctgacatttgtaaaccatataatacttgtgaggattaaaaccttgttttattttttctttcctaatcttttccaaatgtaggaatgatgatattgctatcctctacttcaagcatgtggttcagttcatacaatcttcctcttccaggacatgttctaatatatggaccttcagtgagtcatctcttaaatttgttttttctttaaaatttagaatgtctattatcagttgttgtcgtgaacaagaatcaattttttgatctttattttctttttctttctattttttttatttgacaacttatttttctttttctagctgaaaagatatatgctatttactgaagttatatcttgatcttgagatcaaattatgaatatgcttcttgagtaaattccttttcaagtgcggcttactctttttctgtatattatacgtaacttcttatgtcatttacatgacactacttattcaaacgccgttttttttttaattataataattcatgacttttaactactaggggtcagggaagacattattagcaaaagctgttgccaaatttcttcaggaacaagaagacttcttaacatacatgtacgatgtgtaatctattatagtgttatcttctgattctgttattttgggatgtttgtgctatttggtttctttttgaagaaacatgactagttttattaagaatcataaaagcctgacaaccaaaggaggttatttatccacattcctaaccaaactcaaacaattgatacatctttttctacaacttcaaatattctattgtttctttctaaccatagacccctaaaatggcaaagatgttcccaatacatttaacattgccttcttgttcatctgcaaaaatcctctacagctgctggaccatccatttgcagcaatatatctttgcaagatgctggatgaacccaatgaactcccatttgttataataacctaggccaaacagtaccagcgaaagacaaatttaaaaataggtaattagtaggtgcaaaactcctttttaacaacatgaaatggaatacttattgtcataataaaaaattttttaaaccttcttcagtatggcacatacttattgggatacagctgtaagaataacttgcctttttgagttataaccagagtccaagcttgttttcgatggactttctggagtgaattcccattcattaacattgatttataattatttgcagtgtctttgtatcttgctctaaacttgctgtggagaaggcccaaaccattcgtcaaacactctctggctatatatcagaggctttagatcatgcaccatctcttgttatccttgatgatcttgactctattatttcctctacttctgactcagagggatctcaaatttcaagctctgtaactgcactgatagaatttctgacagatattatggatgaatatggggtattaatctttccactaaagtcatttagttgggatgagaatggcagagtaatgctgatgttttctaatatatttttagcttttaaattcttttgttctctgatttgttgttaattaataaaattatatctttattaaatgaacagaggaaaactttgtcaagataaatcccacagagaggtttaagttcagtttaagccatggttaacttttctctgacattcattgccttgcattatctttttaattagccttcattgttaggctgtaattagcattctttagcttccatctcttcatcaaccaaagtgaccagctatattacaatctcagtgccatagtccagtaaccttctaacacaattttattgactttgtgaacaggagaagggaaatattgcttgcggaattggcccccttgccttcatagcttctgtcaagtctttggagggactacctcagtcattgacttcttcaggttggttagtctagactctattctctagtgtctgatccttgcagaaaatcccacataagttttgtcattgatgtgtgtacacacacacacatatattatattgtatattctgaattataggtttttttaaatgatcaggaaggtttgactatcatgttcaaatgcctgctcctgctgcctcagaacgggcagccatactgaagcatgaaattcagaagcgttgcttgcaatgtcctgaaagcatcttacaagatgtagcttcgaaatgtgatggctatgatgcatatgatctggtatttacactctttgattttcttatagtacatggtcaaaaaatcattaatgtaagctactgttatcagtgtgatatgtgcatttatttataattaaatgttgcatgctctttttcttactaagatgcaaaatggtattatcaataagaaacatagcaaatagggaatggggagtcctactatcctactgtaaggaacaagacttgtcaagtattccaactttcacagaatggcctttttcct

SEQ ID NO: 111547 - DNA, 6165 bp, Cannabis sativa
gttgaatactcgcacttgttcttacacataaatttctctttgactaacaatacaatataatttggtgttgcgaaattcactcgacaacacattcgtagttcataacaaaaatgatgagaatattcaagttacaagtaaaagttttccaaaaaagtccccctattggcttatttcttcttagagatttattgcccaaaatttatcctatgttttcatacaatttttacccaaaaaactcagaaagcatgtgattattcaaagaaaacactttaaagtgacagaaattttttagagaaaaccaacctttaatccaaaagcctattagagtttctgaacttgattaccacttcggagaatcctttgaacctcaaaacgatcttcagcaaatggaaattcttcaaagtagattacgattttgaaaatagtttttgaaattttagagagaaaagtttcaatgaaaatcaaaaatgagagggaaaatgaaatgaatcatttcgtatcaaagtggtttgaatatagatcaatctcacctgttaagatcatgacatgtggcatttgaaaaccaaaggtcatccaatctaatggttgtctcaaaccacacctgcacaaacctctaagggttcaatgacatggcatcttgggaagataaagtaataaatatggttgtcttttcaaaaccctcgacaaaataatcaaagatcaccgccatgtgacagagcaatttgcctgtccctcatgaatagttttgctatttgacaaatagttgtcatcatcgcaaaattaggggcatgtattatagtgaaaattttttgtctagaaatacgagtacagtctcgtgaaaagttgccacgtggcaccagttttcacagaaaaaaatgatttgctgcaagtgtacgcttgtctccattcttgtgctattaactgcaaaaagtgttgttaatcccaggaagtgttattaacagcagaaagttttgttaactacagaaagaagaagtgtgaacacaacaaccagtgcaattagagaaagaatgatcagttcacctcgcatgatgtgaacttgcgagaagatgcaattgagacagggtctagttgcatactatgccccacatagtcaacgataagtagagccaagagaaattaatattggttgcgcatataccgattatatgtgataaccaagtatatttctcctgcaatgagtaaagaccgtttctttacataagtttagtctgaatgactaatgtattcgacgactcatcaggaactcgcatgtttcaagttatcaacacatagaatgtccgattatgcaatcaaaggtgaacgtagacattcaacgaaataggcccaaaggcccatcctgcgagtacaacaccgtagagcctgcaagctcctgtgtttagaatatgaatggacaatctgcacttatcaagaacagacgaacatgttcttcatttattcattaaacgtttatcttgatttaattatgtcatttattgtaaaaacagtctgatatggctgattatgtaatcctgaaggacacttactttttatataaaggggtgatccaaatcaaataaactaaggtaaaagtatttcttaaaatagactaaacagaccaagctctgattgaaccactatagttttcttattttttctatatttttacttttttgtttatttcgtaacttatactttgagtactcgctattctttgtgagtactagcataactgttggtgactattcttgctttgcttgaatactcgcattatttgtattgtctaaatttcttcgactatacttttcaataaaaaaaaaaaaatagattgtgtatttttgataacttttggagttgactattattggagcatttttgtagaaaaatatagtaaatttatatggatgacagaaaataaaactaataatatttagtgatgaaatgtataattttggcacattgtgtttccattggaaatgctctaacccaaagagctatagctgaaataatctattttcctctatccaaaataatgaaagaaaacttaattggctcccacgaatgagtaacatattaatttaagacacccaaataaaaataaaactataaacaaattcttacaagaatgtctttgaatcatatttaattatatgttccattagcatttgtagttctcaaaaacttgtacatgaagttgcaccacaaaaagattttgtggggactggaaattaagattatgcaatcaataataccaaataggaatcacaatttttttaaaaaacaaaatactaagagaccctcattaatgaagaatgagtgataaggtattgttggaccactattcgattccatatgtgctacacttatttgtggtccacaaaacaaatacataacattaataattgagcgtgatcaaaccttgagtgatgtgaccaaaatccctcttttcttatttattgtttatcctacatcaaatgacttgaaatagattaacataatatgtaaaataagtaagtgtgcttaacataatattttgaatgttgtaaagaggtggtgaggttttagtctctcttgttttgtattgttcagttttaaataaaattctttagttttgttcaaaaaaaaggtgtgatttattatgattctaacttctaataagaacactagtttctttcaaaaacaaaaataaagaggtgttaaatttaaatcttcttcataaaaagaaaaatgaagacactacttgtcctataaaaactttgtggggttaaaattttctccattatttaattaagggtaaatactttatcaattggaccctctgttttgttaaatgacaaaatgaaccatgtattttctaaaatggtacaaataggatcctgaattgattatttgtcaaaataaaatttaattataatctgatctaaaattgctatgagtactgtgtacattttctgtatctgttcgtattaggaattgtcttcaagttagttatattaaaaaaaatgtcaaaaattaagctcagagttctatttaacaagatctattttacaaaacacaagatccaaaatagtatttacctttaattaacaatctggtaagtcttaccttacccaaagactatattcattgccatgagaaagagggggaaaaaaatagtacccacaagttaagagtagacaatccttgtttctttttaataacaccacacaattgaaatacgagtttgcacaaaaaatgaagtgcagccaaaaaagaatacttgatgaatgaactgtaaaaggttgtagaagtgaccaatatttgattctcaaaccccaaaagaaaaatttgaggtagacaataaaagctcatctcactaatgatgcatgggattgggaacaacctcagccacatgaaccaatcacagaaattcagacaaggttcaacattgttccatccaaagatttggctaaagaggcaaaaaaaaaaaaatgaaagccacaatgagatgggggtataatgtctcacccatgcataaaagaataaatttcaatttgcaatagtttatcacaaattaacttaaaaaaaaaaggaaaaattatctcatatactattttttttaacttctttttcaaatttacggtttggatttctaaagtggttgcagtgctagttgcaataggagtttttgtacgattttttattataatttaggttgcagcgctagttacggaaggaatttctatgtagaatttcgtaaaaatgtaaaaaaaaaactatttttaaatgtaaaactgaataagcccccaaaaaaaaaatagtccacaaagagttgggatagatttgccacagtgattgttgctatgggacttaagtactttacaatcatagaattgaattagtaattattatttattatatcattttattacacattatgaccctcttattattgttaaagaaaaagttaaaattgaaagtcatattttttataatttgtgtaaaaatatgacttttttttaaaaaaaatattttatgagaataattcaaaataaaaaatatagaaaaaaaatagtataaactaattggttactaaaaagagttaattggttatctctctagctatccttaggcttctaaattattattcacgtgttttttttaagaaaaaactttaaatttttcccataaataaaagagttatatttttgaaattttttccaataaaaactataaaaatgaaaatttaaaaaaaaaattaaaaaaaaatgacttgagagctgctataattaaaattgttgccaaagttaaagatatttagaaagtcatctaatccaatcagacctaatctaataaagtttgatatttaattataattgaatcaaattggatataaatttaaaaaattgaattggatcgaattgattattagatgggatctctgatctaatagaaaatcgaccgaaccgattcaattattatccaattgtaatttaattataattatatatatttttaaaatatatttattagttttattcttaattgtttatgtgtttattgataaacatacatcttcaattacatatgtatatatactaacaagtaacaagtatatagattatgatagtactattattagattggaatggatttgtaatatattatcatattttagttatgtgatcataaaaattaagttggagtaatgtttattatatatatgttggatttgtgttttatcagaactgattccactaatttttaaaatttattttctcttttggcttattaaacaaacttttgttatattatttactagtcaaatgtaagactaatttagttttcttttattatgtatatttaaatttcaaatatagtaaccaatatatttatatatatatatatcatcataaataataaaaaataaagtttcactgtatattctttattcacatggtatcagtagaataatttcacttgttttttcatgtcggataataatcaaacctccattctgatagttctgcaacagtctttgttacacttcttttaacaagggataattatggattatagagtcgcacagtcaaaatggcacttcttgcaaaaagtaaactaggttttgtggtggatttttttctggtgatttttccggtaacttttccgacgatactaattttttcagtaattttttcgatattggtgacttttctgacgaaatttattattgttttaaaaatataggatttctatctttttttacaaaaatatagtataaaaaatcccatataaatgttaaaaaaaaaatcataacctcatgatattatttatttataccataaatattgtataatttctacaaatatatattacaataattagctgaagtggaagaaaagaaaattgtgaattgtgttgagccaatctggtgggcctggaatcttaggtggacattaggcatgtgcttcatgttggtgctccataacaaaatcagagagtgactgcccataacgaaaattttgataaataaggctgatagggacaatattttttttagagtaatgattagaatactcttaatttacacacacaaccaaaataaaaattgtgtttaatttcaatcatacaattaaattaatttaatttccacctaaaaatatctataattaaaacaaaaacttggttaaagataatcttaaattaaatgcttatttctacgtttaaattgtgtctaatataaataattttgtaataggtattatgttattagatcatttcataaatatacaaaaacaataaaaacaaattacaaaaatataattataccaaattacaagtatttttacaatttttaaaactttatttagtctttttataattccataatatttttatgttgtacttaagttattttattgttaattttttgttattttcatattatttgaatgttattttcttgttacttttaatttttatgtaattttttatttttgttatttttatagaataccgtaaaaatataataaaaatatatataaaaaatgtataaaaatttatataaaaaaaaagtattttgtgtaaattttcttatattatttttaggggtaagttgaaaaatactccttttattaatcaattaatcaaatttacctttaattttatatttatttgaaacatacctct

SEQ ID NO: 111548 - DNA, 2633 bp, Cannabis sativa
  modified_base (291)..(300): a, c, t, g, unknown or other
gtaacttttgcaaaacacagggtttaaaatggtatttgttaacgcagattttcgttaacgaataatgagtatttttcgtaataaattaaacacatatatatatataagaaaattaataagtataataatgacaccaaatattttacgtggttttacagttaaatctgcatacttcacgagtctatcttattcaagatatttctggatatttaatacagtattacaattaataatctttttctctcccagattttccgtccatttttctgtagaatctgcccctatttatannnnnnnnnnttggcagttatttacatttagatttgaattagataaccgtttcattaaacgtaggctttgatcacatttcatgtaaacacgtgtagataagaattgataaccgtataactgcttatcattcctatcttcaaggcggttaacactaacgtgggtagaggcatctcgctttgcctatagatgactaataataacttgatttaatcatatgccttccagctatgttatgagctccagtgttccgagcaaacttaagaactgctctttgaccataaggcctcgcagactggacaatcatgtcctacacgtttcaaagttgttaaacttagttattataatgtggaatatacactaagtgtttcaagagctaattcgtctcgtcaatatttccttatatgtagcgaggtggatatctcgctgtacattacccgtagtttcctcaggactgttccctccgaggtaagatggtctcctgtcaatacagaaattaatagtttgtgtatacttatctcgcttaagaccatacagtcattgagttatgaatatactctattagttctatatttaatgagttatttcattttgcattaaatgatataatcgtcattatatctggtggttcatattccacttggttgacacgtatcactctttgaagtacagtcaaatttcgggtataaccgtatttaccctaaatttaccctaaaaaatattatttatggttaaaaattaaatttctaagtaattattaatttatacgaatgaaattgtagttatgtgaaataaaattttcaaatgcattatttaatatagatttatacacaaaactaaaaaattaaaagaacatgctgcaaatactaataggtagagtttaatgaagaattcacaaattataaggatagatccagcctttttattacagaggacagcacaatgttgtaacccattgcacggtccatccttgcaaattgaacaagaggaaaatgataaattcttaactaattcatataacagagctattatttcacatataattgaaatataaataacatagacatctactcaatgagtcatggctattctgttattatatacaaaaagaaaaataataataataataataaaggaagagagaagaaggtaagagcctaaaatttatatatagaaaagaaaagtagatcctatatgatcctactattaaatcaacaaataacaagctacattcacctagataattctaaagtgtgagccttacaagttacgatgctagtataaatgctcaatagactagagttattgaagatgttgttgaacgcagaaaatgactgcatctgttggtaaatagtgcactttataaggaaatcaaagaaagtgatattatggtgatattatattgtcaataaataacatttaaattgtaaaactaaaacatgataaattatttaacaaaagaaagaaactgggagactaaggaaaattactccatcttaaatacatccccttttggccctgcagagaatgaactgcctccacccataagcaattgtaaagtcaaagtttgtttaagcataattataagtaatattgcctttacatctttatttccaatgtacacatggagaacagtcagaaagatagcttgttttgttagaacctaatagaaataagtttcttaatacttgttttccttgcgacttaactttatggaaataagtttctttaaaagagtacttgtttctgcctattgctttttgcaaagtgtttcaaaattttagtaaagaaagatgtggcatcggtgacctcttcggacaatgcatccctaaaagcattaggtatgccacacttgatgatcataagactcatgcggtttgaacggtcccacttctcaaaaatcctcctttgctcgaaagtactagtatccataagaaaagcaggtctatccatccttaaggcaagatcaagatctatgcagccaaaaataataaaaatattctccttctagtccttatagttattaccattaaggcctgtactgaattaagattagcaaatatagatacaaaagcaacttgtcaaaatggaactatacaattatataaataacatgctcataaaaaaatttaaataaaacaataaattcaaaaaatggttaattccatctcaagatacaaaatatatcattaatatcaagtctttgaatagtaatattaactataggtgttggataaatatccatactaactgtctcataaggaaataccttaaacaagttacaaggaatataaagcaagattttttacaagcctcaacagaccattataactcttggagtagtc

SEQ ID NO: 111549 - DNA, 2533 bp, Cannabis sativa
  modified_base (475)..(489): a, c, t, g, unknown or other
acaatcttttaaaccctaacagccatttaacttcaaaaatcacatactcaactaaaggaaaagcttcacaaacatattcaagagttctagggttatacctttgctttagactcacaaacccttgcttaatactcagaaaataccagcttgaagatgagtttcccccctggtttttgccctagccgaaagagaaaagagagagagagttctattttttttttattttctttaatttcctaaacttttgcttcaaatgaaaaggaattgttaaactaatcccttgataagttgctaggtgtcatcaaattaggtagccacctaaccacctcccttgacaattactaaaatgcccttactcataaatcttgtgtattttcaaggctaggggtaaaatgctcaattccataaccccgcctaaccccgataattattttctccaaaatatttcctactaagaaataaggttctaaacttnnnnnnnnnnnnnnnctagccatccatcgcatttcccgttgtcgcagtgcaaaattacaaaaattacatatttcacatataagataaataatacccctagagtttaataaaatatccgaaattgagaaattataactctaatatttattactaaatattggggtccgcaattaaataaattcataaataattataaaataacagaaattagtgttaattgcatttactaatccaaattactaaagcggtcattacattcatggtagatttcaaggacgaaattcttttgatgggtggataattgtaatgactacataattagatatggaaattgcaatccttttgagtgtggagagtgtcacatcagggttggggttttggttgaccttattttggttaattaccttttttatcctttttttttagggtaacctctttctttctttttcttgagtcttgactcactctggtttggttggttaattagacatattagtgcgtgacagaaaataatcaatcatttaattttacattgaatattatactttataataataagttcgattgtattagtatgtatgggaaggtcataaaattcaagtccatacgaaatataaagatacctttctcacttccatacccctcttttattgcatctcctcagtctcaacctcccctaatctaaatatatagctgcaaagaccagtccatttgttgactataatgactactacttcggctttgattaattttcaatccgacccaagattattttttgttggatatggtttttcacttctgtattttcttctcttcattgtatatatatttgaatttgacacatagaatacaaagaatatatatttttatgttattgtttattacacataattatttatttgatagctcttgcttgaacccatttcgttatttatctttctattatactatatagtatttcttttgaggggattaagtatagatggttatttatttatttttttatttatttttttgaaactatatatagatggttattatgatgtatatataatatatatttttggtcgtgttatgacctatatttttaaacactactttttttttttaaaattgatttttaaacactattacgtgccaatttatgtagctaaattacaggatttgtgtaatcttatgaaaaattacattattgcatgacgaataaggcttagcctttcatacaaaagagtacttgtgtatcgcgtggaaattacacttaatatgagattttaaaacttttttttaaaatataatatatttaattttatctatttttgatagctttttgattttgctttttttagcttttttatggacttaagtttgtttattattgtaaatatgttactaaattccacattcaatattttaaagatttgttctctttgtttaaagcataaatcagaaaagccacataaattgatttttttatctagaaattagttttttttatcgagaaaccaattcttcattaaaaaattagttttgaatacatagaagtaaaatttttgtatgagtttttaagttttttatgatattttttatctatgataattttattaaaaaactgttaaagttattttttttttaatcaagaaactaattttgattatatagaagtaaaatttatgtgtaaacttttaaactttttatggtattctttttcatttataatactttatctcgtatttttaatattttttttaaaaaaaattatatttgattttatatgaaaaatttctttcttttttccgtattttttgtaatatctcgtttatcattgatcaatgagaaatttacaaaaaaatataaaaaaaatataatttttagcaaaattataatatttttactattaaatatattggtgggacccacatggcccataattgtttttcgaaataaccgtgggcatatttttttggcttaatgggcccataagcttgaaagtaaggttgaatctagtgaaaattacatgaaatatgggatttcataacaaagttagaaaaatatggcattt

SEQ ID NO: 111550 - DNA, 5789 bp, Cannabis sativa
  modified_base (1155)..(1161): a, c, t, g, unknown or other
  modified_base (1299)..(1303): a, c, t, g, unknown or other
  modified_base (1403)..(1410): a, c, t, g, unknown or other
tatttttgtaattttttttattgtctttatgtttttgtgaaataatcctaaaaattaattatgtattttctaaaatagtacaaaatagaaattcaattttcgataatttctttttaatataacaaattctattataaatagatacagaaaacataattaattttttcataatatctatagattgaattattattaagttttattttgataaaaatcagtttataatactatttaatattattttaaaaaatacagggtcaaatttattatttaagttaatttattctgtaacttttataaaaccgtgatttttataagttatatattttatataattataatactattgagaagtacaaatacactttgggttagttgatatataataataataataataataataataataataacctaaagctagtatatttatagtatgctatttttataactactctaatatttatatgtatatatagcatagtaataatatatataagctgataaaaacatccattccatgaattgcaaggcatattataggtactatttatataataaagagaagaaaaggaaaacactagtaatctcattaattcacatgtatatatataggatcaattaattcatctcaataatatggaataataaaagtacttattatttggctatatatatagtgataaagattgcatatagtacaatttgtcggtatacaaaattattattgtgtgttaatttcaagtggtacatatgacctaattattgatgacaaaaactacatcttacttaataataatatatatgagccagaaatgtctctacaattactattataaataattaacgatttttaaaattattattaaaataaaataagtaaaactcaattaattaataatatatataacactctcatagcattggtacgtgtactcttcaatacaaggaatatatagtatattataaatgtatataatgatgaacgatcagaataatctcaatccctactgaagcaagataatcatacggtttagattgaagaaacaagagaagatgagcgacatttattttttaaaatcttttttatatatttataataatatattataaaaaaatttacttttattcacaataaaatttgtgactaannnnnnnaaagttgtgactaattatcaattattatttctatgttgtgactaaaattaggtctatggctaaatgtattagtcacaaaaattacaatttattgtaaattaatgtatttttagtcaaaatacttgttgtgactaaaannnnnttagtgacaacttgtaactaaatactatattttagttccttcaaaaaaaaaaatactacattttagtcataaataatatttagtcacaaaaaaattatgnnnnnnnnaaaaaattattactaaaagtaacattttttttttttatagtgatacatgtattattaatttataattaataaatttatgggtgggccaaaaaatatatagcagcctttaaaagtattttctatatatcaattgatttttttgcaacttattgtaatatttctcatatgctttaaaaagattaatcttgaaaataaaagcattagaaaaaaaaaatattttattttattttatagaagtatcaattacctcattgacttttgtactaattattttaccaattattactgtcataataaggagtattttcttatatgaaataataacaaatagacaatatatatgcatgtgattgaatatatataagagacttataataattcatattcaaaaatatttatatatatcttttataatgtagttgacaataagggaaaattataattagtgtgtacctatattatatataataataactatacttaattttgtaatgtcattttcttttaattttgctagatatataggatcgagtgcattcgaaaaagacattacaaacacattttttcaattttatttttatttttcttgttattataaataaataggatacatattagacatgacataccaccaacctatataaacttaattattgtactttttaaagtagagaaaaagcatatgtatatttagtaattattgttctccataaatattgtactaccaagctagctagctaccatttattaattccaacctcctatatcttcattacatgataatatgctttgttaattattttgtccatgccctatttttagctaactctataccttgtatttattaggttatttttaagatggactaaggacactaatagtgtttagtatcatcacgagtaatgttttgttaaaggttagcaatcgatatattctataataattagaatttgatagtatttaattgtatcagtagcaatatgatactttatggcagcactagacactattaatatttttagcattctctataatgatattattggaccttaaatattgagcggtgcattctctatatatagggacgattttgaaacttagtgagtcatacgaaaaaatatttttacccttatttaagaaaaaatatggtattttttaaaatgaataaaaaataatgtgtctttttaaaagggtataatttttttgggctctgtgttaagtggaccctaagcacagacctagtttccctgctcgcctatgccaaagtcgggtatgtatatatatatatattatagttctatagatttaaacaacgacagtcttaatttaaataaatatgattgtttttttaacaaaaaaaaattataatattattgtgtgtaatattttagtctcattactctatatatatatattcgtgtttaagttgagggtgtgtgaatgctctctttatgtatatatatgggggactcagaatttaagttgaggaggcacgtactttatttttttaaaataatataacatgtgtaaaatattgtattaaaaattttgatacaaaattgatacaaatttatatttttataatattaaatataatttaaagtaaaactacaataataaaaagtttggtttctacagtttaaatactaaatacaaatcttgttaataggagttcaaattctatactaaaaccatgttttaatttatagaagtaaattgtaaatgttaaaaacaacatgcttttgcttggatttgaatcttaatttgttctctgtggtgattcaatcaccattcaagaacatcaaaaccagatcaaataaaccagtaggacagataacataaaccagaaaaacaatcaataaaaccagaagcaagaaaaagagaacacaaccggattacaaggttcaatcacaagtgaattaacacttggatctaatccttgggaggaactgccttgaggctttgcctttattatattgaatgtaactcagttgatcaacaacaacatacagcaaacacactaaatggagtcttgctcctacaccagaaacttagacactcgagagacatgaattggatttaatcatgctctgttacaactcaaagtgaacccctcagctcacaatatgaactctctctttctgtcacttacataattacagaacacaagcctttatatacataggctgagagtacaaacaaacaaacaaaaataacagaaataattgtctaagtttacaaccgaaaaataactaactaaactaatacttgcaactgtacataaaccccacattctctaatatatatgtaaggtaactttaattaaccattatggaacatttggtatgaagttagcgggttgggtaaatttaattttaaccatttagggtttgtgttttcaagtgcattgagtcctaccttttaagtttaattaatggtaatgctaattaactttttctaatactcgagtttcatattctcttaatttaaaatctctttaagtctaatttaggcactacaaaaaacaactacttttagtgacgatatttcagttacaatataaattttttgtgattaaaagtgacttttagtcacaacaaaaagttgtttgtgactaaaacatagtatttcacaataaattttaattttcgtgactgatacttttagttacggaccttttagtcacaatataaaaatagtgatttataattagtcacaaattttttatttttactcacaaatttagtttatgcttctaattgtgtctataccctatatatgtgtggtacatttaattttgatccattattatgaatgtgtagtttaaatttaggtcatagcttcaagttagagaaataaatacattaatatttgcatgcatgcatagtgttcagaatacagtgtttagtttagtcacctttaatgtttacttgtttaaatagttaaaaccaatattgagactactgagtctgctatctatatatattcattgatcactcacccatttatagctagggtttttattttggtaatattaatattactagtatattatttattatatgtgcatgtatgacgatcacatataaatatatacaataataaatgcactatagttatcatataaatataacgtaattaaatatattgttgttgtctttttcatcccccaaacttttgctcctataaatatatttaaaaaaaaagttttgcattagttttataattaaaattttagtttaattgtagtatttttaaaataaataatacaattttattaatgacaatttattaaaataataggttgtaatttaatcggtatatcttttatagtttgagccacaattaggataattagaattaaaaaaaatgaatcaaataataagtcgcctaattcttagatcatttgacaaaaaaaaataaaataaaatcagataaaaaaagtacagcactgcaatcaatcttaagaatacttatatttcatccacctctctgaagatacaacagtaattgttgcagtaggttcattcaacctcgtagcttaagcactcaactattgtgtaaagtacgtaactgtactcacaaccccttcaatccttgagaacttgttattctcaaccactaatcacgatttgatggcgagccatcaaagaagaaagaagaaccatcaacaacaacaaaataaaactactatgtcacacatacaatactaaaatactcaaaatcatgtcacataaacaagacgaaaaatgctcaaaactatgtcataaagataagtactaagacactcaaaactatgtcatagaaaaaagactaatcgcaattgcaaaaatcaaattgtagtagcaaaatagaaccccaactaagccgcacctaagcccaaggaaggtcggtaggcttgaccagagaaaagagacaacttctaatagatttaggaatgagaagccttaattttttcccttattagtaacctttgagagagagaacttacgaatttaattttaaagatatttttttaatgaaaaaaaaataattaattaattaacaaatcactcaaaattatgtcatagagacaagacgacaatgttcaaaactacgtcattcgttttggtagatcttttatatgtttcgtcatccagaaattttttttatttttttatgatcaagtatgttgtatctatttaggatcacttataaattttcagaaaatttcgaatagtttacaatgccaaaaataaaatttaaacgtactgttactattatgcgtataagaataaacagtcattcgtacaataaaatatataaatcttattttcggtattataaattatttagaattttctaaaaatttacagttaattttaaataattataatata

SEQ ID NO: 111551 - DNA, 2647 bp, Cannabis sativa
  modified_base (298)..(316): a, c, t, g, unknown or other
  modified_base (2582)..(2594): a, c, t, g, unknown or other
ccgtcagatcaaataactccctcatctgatggctgccgtacatcactattacaatccgtgaaagtacaatgacgggacaaaatcataatattttcatttttacattaacccatatattttaggatttttttatttttactattcaaaatatatttatatatatatatttatgaaattctacataaaaaattcttattgcaactagcggagctacttaaatcgcaaccaaaaaccgcaacccacacataaaaactatcagagaaaccacttcagaaacccaaaccgtaaattttaaaannnnnnnnnnnnnnnnnnnagtatatgggataatttccctatattttatgagtattttatttttacacttgaaagttgttcttttttttttgtatttttatagaaattcatatagcaactaacagaacaatctaaatcacaattaaaatccacataacaacttacataaaaattatcggaacaatccaaactataaattaaaaaaaaaaattaaaaaatagtatatgaaataatattcctatactttatcaattcataaataatcaatcatgattaaagaaaaaaatacacacagtatgtaaaaaattatgtgtttaaatataaaattcaataatcacaattaatattgataaatcccaataatttaacatagagttcggctcatgataccacttgttaaaaattagatctaaaatatatatagataaattcatgtcagattatcaagattactctatttaatcttctacagattaatcttctctctatggattctctctcaattgatgagaatggcagataagagtaattgaaattagccttagagaacaaacctaatatttagggctgaacatttagacttgcaaacccgaaaaacccgatcacccaccccgacctgctgcaaaaaaacggaaaaattgaaatcccgtgtggtcgagtcgggtccaacccgaaaatactccacacgggtttcgggtttcgggttcgggtgttgaaagtgggtgtttttttagtcgggttctaacccttaacccgaacaagtagtaaaaaatttaattttttttttttattattatattaaaaaaataataatattatgaacgagtatgcacatacattggagcattacacataaaagatgagaggtgaagtgcaaagttctaaagctttcttttggcggtgtaaagtattcccttcttcttaaaaggtaaatataaataattaaatataaccaacgactttcgacttattcttccttgtattttttgttttccgaaattctaactaattcttctttttgcaactgcacaattataatcttaattgtttgacatattcttgtcattttatcaatttcttactgttgctgtattattgtgtataggcaatacttcctatgatggattatatgtttgtgctcctgagtataatatgatggattttagtttagaaataggaggtttagtatttacagtagttgaaatttttgtctgctgtaataatactttggtaaaagataaaagcagtagcggaaccagacgatgaaataagaaggggccaaataaaatatattttcacctaattcttttaatatgtagtattttataaatcaatataaaaagttaataagctttatacaacgtatataaataatgagaaataataaatgacaccttatagtgccaagtacggtaaaaagtggcatatcgttatgtgtaaaataatatcaagtcctaaatattttaatttaataaataatataaaaaaccgctaactgtttgtaaagtgacatattaatatggtattggataacataagaatacatatataaagactcatataaatatatataaaacaataacataagaatacatatatatatatatatatatatatatatatataaagactcatataaatatatatcaaacaaaaatactctttaaaaataaattttattaatattttttttatcactttttaccataaaatagataactaatttatataggttgttgagtttgagtttctttttcaatttcaatttcgcaatttattattaggcttaataataagagaattatcacatttttctaataagtaaaatctaattattctaatttaatttatatattatgtatatttttttttctaagaagttagggggtccatggccactctatagacatatgtagttctgccactggataaaaggacgtagcctttttattatctttcgtttcgttataaggatttttgttattcattctgtaataataatcctttgtctcatcttttcattataagttgttattattgttggggaaatcaagactgatcgtaatctaatctcgcggaggtaataattcaaatagaatttcgagtgatgtgattacataaagaaaaaaaaaagccccaaagtgttaaaaattaaaaaacatggcatttttaaaaattaaattttattttagcccaaacataaaatattcaaactcagcctaataaaactcaaacccgagcacgtcaaaccgccataatttgaggaggaaattacactctatacnnnnnnnnnnnnntcctcttttatttttaccctcttttttaaagtttatcatttttacctcttttt

SEQ ID NO: 111552 - DNA, 2600 bp, Cannabis sativa
  modified_base (2502)..(2507): a, c, t, g, unknown or other
aaaaacagttttatagaacatgttattgaaaaatattttcacttttttacttttaaaaacagaaaattaattaaaaaagtattaccaaacgccacctatatgtttttttaattaaccgttttttacatatgggattcttttgtgttttacaaaaaatatgacagctttttatttagctattacacataattaatttctgtgtttttttaattaactattttttttttttgtttcaatttatcttttcattatttatgtgtcttatttctttatttcaatttttcagtttaagtaattagtttttgttttcagctgttgacttttttttacaagttattttctagtctcagatttttaacaattgatttttttgtcgtattctaacgtctaactgcgacatctagctcaagtgattttctgatgacgataataattttgacaatttctccgaccattttttcagtggtgataacaactccgataacttttttgacaataatgaaaaattttaataacttttcaagcaacgataactactccaacaactttagcgataatatttatgatattttgctctagttttttttttttaaaaaaacaaaaaacccacaaacaaaatacaccaaaaagggaccttaggcgtaggccccattcgttgcacccttcatacgccttttggttattgtattttttctgcattatcatattattcttaagcaagtataacttaatatgttaccacaactaataaaaaagtttttttttttttcggaaatgataaattattttttttttatactatttaaaatttttactcctaagttacaattatgtctctttaatttttttttatctgttataatatataacttttattaagttttatcctccaaaaaacaaaatacgacaaaatactgatgtgttattattagcgccatatacaattttatttttagagaaagactattatattaattgagataaatggccatatatgtaattaggagaagttgaagactattatattaattgagataaatggccatatatgtaattaggagaagttgaagaatactaatatttttttttatatactttaactaaatttatctccaaataaaatttaaatcaaatatatctctttttatgagtcttgcatctaaattattctctcacactcacgtaattaagacataatttcaaacataataaatttgtgttctttgtaaataaatgtataagtttgtgaaaaagttgggataaaattttaattaaagaaaaatataaaactatcctaaagtgatagaggagaatgattaaaaaaagaagtaattataataaattttgaaatagaaagtaaaaattaaagaaatcaaattaaaagaattatatagtgtaatttcttctatgcaatttaaaattggtttacgttgttggtgaacaaaaaagtttaaatatgaatactctttctttctttattattattatattgttataaatgtcattttttttcttaaaatggtattggatttaagttgattttttttcttttttattattttattgttataaatgtaatttttttttcttaaaatggtattgggttgaagttgatggtttttttttcttattaattaattactattataagttttaatacaataaatatatattttctctatatctatgtcgttacgctcctttctgaatggtagtttttggagctaggaaaaaagcacttgttctaagaacaagatatgtggtgaagcagctgcggtttgcttggcgcttgaggttgcaaaggacgaaggacatcaattcatcctggtggaaagcgattcaaagatagtgatcaacactgtcaatggtgtggaaccctgatgaataattaaaaactactctttattttgtaaaagaatcgttctctctttcattacctgtttattttgttttacggttacatcatgtaactttatggcctataaagtgaccaagtgggcttttactcaaaacttttatgggtcccttgatgtttctactattcccacgaatatttgttgtaacgaccatgaggtctaatgttcttattgttttatgaatgaacgttttttttttttaaaaaaaaaaaacaagatatgtgatatttttaaaaaataatatattttttttaaaaagaattatttttcttttttagaatagtgtgcatatatcattactcattataattttactaatgattaggattatggtgatcattaaggtttttattttatttttatttttttcaaatcatttctgtttattgattgaattttgatcaggaaataaaaatttttgttaccaaagaaaaaatatattatcacgatgatgttttttttttttgggataattagataaggtactattttttgtacaaaaaattacatttttacgtttattttttttatatatatatatttttgcagttttccatagagataacacgaaaataacaagaaaacnnnnnnaaagtaacatgaaaataatatttaaataacatcaaaacaacaacaaaaaataataaaaaatcaacaacaaattaataagagtacaatataaaa

SEQ ID NO: 111553 - DNA, 3637 bp, Cannabis sativa
ttacttgaacaggtaaactcttacccaactgtgagagggtttacagcaattggaacaggaggtgatgattttgtacaagctatggtggtagccgttgaatccgttattcaacaacctattccggaggtatgcttttgttgttagtgcagttttcactaactggttgatcatgttttctatattgttgaattgggctacgagcattgtttgtgtagctttcactttgatatgtccttagtcataagaatctattgccactactgggagtatcatctactggatgtacttgattctggaaaaacaaagtagaataattagaagttcagttactaatagtgtgtttggtaggatgaagaggtgaatggaaggtggactttgaattttaaaattatagtttcagatcattttatattgctgcccattggacctaaggaatgtgtcgtatactttcctttcttatgatatctacttgtcttacctaatattttctctccccaagctgatgaagatagagtgaaaaagtgtgccgtgcaatgttatgactaagtatgagccaatgtgcatctgtgtcctagctttgctaggtttaaatgttgcgtgagaggaattgtattaaagactcaagaaatcgagagagccttcagctttacaaacagagatatgattctgtccccgaagaaaatacatcttccagctagtatattcccaaaatctgcatccataattataaggatcgagtaacgtcattctaacttaaccaaccatatggtgacatgtagaaagaatattatcaagttatgctgatttttacatatccagcttatatttcgtcccagctacataggtaaatcatagtgaaacgtgaaaataacgtaattacttttcattacaaaagtaattgcaacaagacttgaacactttaattaaccacaactgacagtctgacaccaattactcgcgctctttatttctctaacactcccacacttatatttataatttttcactcacacacattctcttagacacacttggatatcactcacacacacttagcactcaactcatatacttgactctttgctcacatacctcaccaagtgacctagtccctttattaatactactctagagtcaatagaattctgctgcaactagaacattctagttaattgccttttgttgctaaagtgtaaacccatctcaacacaagtgcaagtcaatgtcaagctatgtgcaaaaaaaaaaaattgtcaagctatgtgctcgtgaccttcaagatggagcaatgtaccgacaactagttggtagtctactttgcctaacattgactagacatgatatcccatatgttcgatttatgcaacacccaataaaacctcatttggaagcattgtgatgaatgcttatttacgtcaatgataccactgactacagttatggttttgcttattttgtgaatatactatctggtagttgcttaggggaatgatgaaatttctgctagagcataaaggggtatgtaagagaaaggagtagaatcatctctgtttgtaaagttttcagctttacccttgaagatttttagattcttgggtatctaactcaattcctcccaacattcaaaaccaccaggcagctatgacatgtatgcatattggctcaaacttaaaaataacatttcatgagtaacctttttcggtttttcagtgttcatcagcttgcggtgagcaattatttttagatcttaaaagaggtgggataaggtttggagtgtggtagaagttgacatgggctggaagtgttttgctattgtgcagtgttctttctttcaccggtgcaagtagttgcttaagcttgaactcatggttgaaaccaagtgatcttctgatactatcaactatggatttcaccgggcactacttgtgtttgatatagcttatctaatcactgtgagcaaccctgtactaggggtgtagatgagattttggaatctgatgggtttatggtcttgctgtaggactcggattctgctcaaaatgttttacatagaatacatcatattaagctgtcaaccttagttcctttattgatgatctaacctcctcaattttttgtcttcttgatgtccatatttttaaaaaatgaacaaacatcccccccaaattcatattttagcttgaaaattctgtgagatttaacaaataaacccccacccctcctctttccgtttcctccttcaaaacttataatttcgacggttgaactgtgttgtacctatctgcttgccagttacgttatacattgtatctaatcaattcataatataggtggaaaacaaatggaacaaaaagaaacacggaactaatttcatttctttttctaacagggccatgtgagacagaaattatcatcaagaggaaaatatgtatctgtcaatataggaccagttcaagttgtttctagtgaacaggtctcttctctctttcgcatacttggtgtttaatgaagtaaattgaaaggaattgttgttaatgtcccttctagtggctcttgtgcttatttgatgtgggattttgttaatattttcaggttcaagctgtatacaacgccatgaggagggatgatcggatgaaatacttcttgtagtttggttgttcatacttatgtacagaaagcaattttccagggctctgtagctgccatcttaattcctttagatcatatttgcttaagtagtctgttctgttctggtgctttctttgtcaatttacaatggcaaagtaagcttgagaatttggagtttttaaagtttaatccatgtacatgctcaaggtatatacgagtataattagcttaatcctaagctaggcttactcaattaatctgtacttgattcccaattacgtattgtgacgacttcctttttttttttatctggggtttcataggctttagttagtggttattggttacctttaactaatatgacaaccgtgttagggagggcgtagccaactaccatgcaagattgaagtggatgatttacgcctaactaatatgcaagattggatcattttactttttaatatttatagtgtgattttaatttaatcaatgaagatattacaaagagaaatataaagaactatataggtggtgtttggttggaggcaataaaaataatagaataagaataagaatggtaatgaaatggaataagaataggattaggattaagttgtttggttagatttatggaatcaataattgaatacatattcttatgtttggttgactatataatgcaatggaataaattaattttgaacaaaaatactattatttttaaaacatgattaattaattaaattaaatatattcaacttatatatattttttttaaaaaaaaattgatatatatttttaaaaaaaaaaaactgatatgtattaaaaaaaaataatatttatttaaaaaaatctgatatatatttatataaatttatatttattgaatttactataaaatattatttcttcaaaaaaaaaattgacatatatttttttttttaaaaaaattatataattacatgaaaattttaaactaaacattataattttttaattaataagatca

SEQ ID NO: 111554 - DNA, 4607 bp, Cannabis sativa
  modified_base (857)..(877): a, c, t, g, unknown or other
  modified_base (1311)..(1316): a, c, t, g, unknown or other
  modified_base (1469)..(1490): a, c, t, g, unknown or other
tgtttaaacgatttgttgtattaatatcttttttattttatactgaacattattttatgttttgtatattttttaaaattttacaaggtgttttaaataattatatcatacacgaatattaaaaaaataaaaaattaaacaaatttttatggatactaaaattgtagaggatacattagtacactcttttttggggagtgcaccatagaagctcaaaaaaacccaaccacccgctttgacttgaccctcaaaaaacaaagaaaagaaaagtcgctgcgtcggattggattcaaaccgagtagagatattgaatcgatcggttgaatgaaattaattagattggattagatgctaaaatctaacatttaatatataattggattagatctagatatacttaaaaacatttgagtggcctaataaacaaccctagaattaagtatgcatttccaatatataatatagtgtaagtctacagcgcacccctaaaggcgtgtttcggtatacatcctatctattttgacatacctttttttatgattgtacgttgtagttatttaggataacttacaaattttcagaaaaatcagagtatattacaataccaaaaataagatttacaaattttgttgcataccctacttttttttatatgtgtggtaagtaattgtttaaaccttattttcggtattgtaaactattttgatttttttaaaaaaatttacaagtggtcttaaatagctacaacgtatgctatcataattagaatttttgtcctctgaactttgacatgtaccaaatcatactccctgcactttctggctgttaaaaattattcttgaactattgagattgtnnnnnnnnnnnnnnnnnnnnnatttcattcaattttactaatttggtgattgtacttatactaaatcatgctcactggactttaatatttactaaatcatacctctcgaactttgacatgtgtcaaattatgtctcaaactttcatcatgttagacttttttttttactgaaattagaaaaaattcttaaatttaactatttcaatagttcatggaaaatttttaacagtcttcataaagtcaaaaagtatgatttagtagatatcgaggaaccattaattagcttgaaaaaaaattaaactaggagtatactatcgaaatttcctacatatatataggctaattattaatttttcctcctaaactttgacatgtactaaatcgtgctccctgaacttttttggcagttaaaaattctcctcgcactattgagattattaaatttaaggactttnnnnnnatttcattcaattttattgtttcactgattgtttatgtactaagccatgctccccacactttgatatctaccaaattatgcccctcaaactttgatatgtactaaattatgccctttgaactttcatacatgttagaatttttttactaaaannnnnnnnnnnnnnnnnnnnnnaacaatctcaatagttcgagagaattatcggtaaaaaaaattcaagagccatgatttgataaatatcaaagttcgggaagaaaaattactaattagctatatatattttaaatttaatctaattcctaatttgctaaacctaaaaacattaataaacagacaaagactcatatctctctctctttcgatcgactctcactccaccagccgccgtccccgtcgtcggcggcgctacattcgacgacgctccctcttcctacttcttccttgatctatatctctctcttctctcggcgacggcaacctaacttcgacgacatcaactcagtaagtggcggcggattcactttcactctacggctacaggtatcaaaaattacaaaaccatcaagtcttgacttgaatgttaaattattcactattcattctcttttcacataagaaattgaatcagaagcaaattgaatttgaaattgtaaacataataacactataaattataatgcacctaatgttggtttttttagtctcaaggttccattttcatcctcagtttttttttattattattaaaacaatgaaaaggaaaaagaaaagaacatgtaatattgtataaatagtaaatatatgaagagtttgcatatcttagttgaggaggtaaagtagtaaatctatctaggaattgttattttctaattttgtagtggattataggattcattcattcattgtgtgttaatgaattttattagtggattttaaggttcattgtttgtatattactgagtttttagtagtagattatcaaggttctttgtttgtgtgttactgaattttagttgatactcgattattgtttttatttgttgctgaattttagttgattacaggcttctttgtatgtgttactcaatcaattttatttgataatagatatgtttgaatgtatgtcactcaattttagttgattataggcttttgtgctgctcagttgtagttgattataggtttgctgctcgattgttttacattgtatgtttgctttacccgatgtttggaagttggattttggtagggaaaaaatgggtaagaaaaataaaatcaaaaaaattcttatgtttggtttggaaagaaaaattgtattgaaaaaaaaaaaacttgattcaataaaattttccatattaaacatgaaagttttattttatttcttaatatccacacttttttccctacatttttcctatttttttctttcctcgccaaaatccaacttccaaacattgccttagtttctttgtgatacttctaagttcttagataaataatgttcttgaatttattggtggtattttagctacaaaattataaagttcttcatttgatggaaacttctattcattttatatttgctgttagtatcaagtcatcttagcttatatataatctggacataaatgatcagtttagatgaatgtcaaaatatgacatcggtaaaaaaataaaaatacagggcgggatggatcgcctgctgccctgttggatttgcctcacacttttcccaatttattaaacgaggtgagttgctttgcggggaggggcgaccctctccattgacaagcctagttcaaagagctgaacttttgctttattttggatttgagcttactttgcggtgtcttttttgagatctcgagtctgaatttgagctattaattgtttagcagcttaaccctttaatgtaataattgtcttttagaaatatctcagtcaaatacatattttgttttcactatgtttccaaatttacaactaaccagcgtttccattaactttcttttcgtaattcacattttaatgtggattatttttcagcatttctaaaatttggtttactaaggcccattcggaaaattttctttgaatgtagctctgaattcagaaaaatttcttttctttgttgggtagtttcggttctagtttgtgtttgaattggaaatatgtgaatctatatttctctaattcattctttattttactaagtgctaattttgttggtcagattgctgattcaaagtaaatggctgaaagtatgaggggtgattcggtggaagagttcaggggtcttcgtattacctccttggatgacgaagacgaagaagatcaagaaattgatattgatgaagaagatgatgaagatgaagaaactgattatgcggttttaggttttgtggaaaagccgaagaacccccattcccttctccgccattttttcccatccaaggctggaggtgttcctgtatgttatcgaaaccctctcttttctgtactatgagaaaatttgtatacacttattggaatggttttgtaattaagtgtgcgatttgtgtaatgtaggcttggttggatcctgtgaatctaccatcaggcagatcttttctttgcgacatatgtggagaacctttgcagttcatgctgcaggtattagggaattcgagttttactttctcgtaaaatttacttattcaaggttgatttccttatgaactttcttacttaaattaatgcttaggtctatgcaccagaggatgtggaatatgcatttcatcggacgttatttgtgtttatttgtacgtcaatggcttgtcttcgcatagatcaacatgaacaatggaagcgtcatcccgataaaccttgtagaaggtattgcttgctcttgctcatccaactataatgatatgtatatatatctacagtactgaaatgatgttcttgattatgttttggttattagtgtgaaggtttttcgttgccaattaccacgtggtaatcctttctactctagcgagcctccgaaagaagatgacaaacctcctggaattaaaggtagatattaacttaaatatttatttagttctgggcttacctcaaaatagtttgtgatatttactagtggctttccattagctatcattatcggattttaatagagcctagataccattttagatcctattttttgtaaagcaaaagtgaccgtttggaccttatgttttgtgagaggacaatttagaccctgaaatcaatttttgacaattttttttttttaatataaccaac

SEQ ID NO: 111555 - DNA, 1784 bp, Cannabis sativa
aaccagttcagtatctcttccgaggccacaagggaaatggttaggagtacttgggcttaacacttccctctcggaatggcacatatactctccaaagtttttcctgatacgcattgtagatgtcgttaaatttggctgtccccctttgaacataataccgtttctcagtctccatatttcttcaaagacacacgccatgtgtaccaaaaaagcgttcctgaggctgaccggtatatccaccatcaagtgttccacaaactctatcatggacgaaccaggaaagttacctatcaccattggaaaactgcccgatatccaaagagccctggcaacttcacactctctaaagatgtgaagacaagagtttgtagtaattactaaagtgtagtagtttatttgttgaatgaatctaaagtatttccaaaagcaaaagactaaatttacatggtttgtccttgacttctttctttccaatccatcattctctgctgcggccaccaatttcaggtcccactattggcccatcaacccctgcgccactgcaatttcatctcatcaataatcacaacactaatctaatggtttaatcaaactaattcaataacaaaatcagtcaaactcttagaattgatgaatgattataatctatattaaaagcccaaacttaatgctcataattgtacaatcaaccaaccaaatcagacttagactacttgaatcaattgtcatgattattattattattattattattaagcttttcatctaaataaattcccctcttatgtatccagaattttctatcacaaagactaattaattggacaaatttacacacaagcttaataataagctaaactatatatataaaataacaatgctcaattctatgatcatcaccatcatcagggtctcaattcacaccaattttaatttattaaaaaaaaatcaggaaccaatccactcaatattcacaacacaatcattattcactttcactaaaaaaaaaaaagttaaattataactaacctaactggttgtgtcggatcggatcggataggatcgggaagagtgggaatagttgtcggcccgtcaaccatcggagttcgccgttcattatcatcgatctggatcatgcgggtggtggagatccgctgaataggcttgttagtatctggatgaatgagtatataatcgtcatcatcaacaaaaacaatatcatcctcattaaaatcatcatcttcctcttcctcttcctcttcctcttcctctagtttgatcccaagccgccagcgaccgtaatcgagaagagcatcatcagcaataacatcatcatcatcatcatcttgatcgatctcgctgagagcagagttgttgttggtttggggttgttgtgatgccaacaattgacgaagcttcctccgcttcctcctatcctctgccatcatcacattgtacgtaagaagccctaaatcatctgacattgttgttcttctctctttctctctttcttctttcaaaccctaatccttaataatcctaatccccctttttgtatatattaatatttttttcctatttctattcgtattccttttttttaaacggtttctattcctattcctagttttatctttttgattttgggtaactatcttattataatgcactatcttaaggaattaatgtcacgtttactatacagtattcagaatcggaataaattaaaggagaaatgtaacggaataaataaaaaataatcggaatcaatatttgtaatatgt

SEQ ID NO: 111556 - DNA, 1209 bp, Cannabis sativa
tttaaaaaaaataaattttaaaaataaaaaataaaaaataaaaatgcctaaagcatggtttaaacttttgatctctacataagttactttacccattaaactaaagctaatactctattattaaatacaatttttaattataaatatatattgtacttaactaaaatatatattttttttcgactttttaaggggctattgctcccttgcctctatgtgagtccgcccttatttggaatcaagtctttaattagtctaagtactttattaatgaagaaactaaacctataaattgggtgccgcaagtaataaccattattattcatacccatattctcacaaagtatcgattattttttgattttgaaattgtacattgaagtaaaatttgagtaatgatcacttgtatttgagtcgttacgaaataaatgtgttcggatgatatgtttaataattatgttgtgtttgtatttgaatttttaacgggtttaataattgtgttgacatatttaataattgtgtcgtcacaatagtgcaaattaattatcgtaaattttatatataaaaaaggtaattgtcataataatagttttataatcatttatcgtgtcatgtcgtgtttatatcgtaagtcgtgtttatatcgtgtgccttgctaagtaacatgtttgtatttaaatttttgacacatttaataaatatgttggtatttgtatttagtgtttactgtaattatgtcatattcgtatcaataatagaacagacatgatatagcaaattaccaccctacttgtaagttgtattgatcaatggttagtgatgtagtgcgacaattatatcaaaataagagactataaaattcaatataacatttataggaaacacacaacatatcatgataaattttcaacatcaagtcttctatgtagtatatatgtataaataataaatggttagtgatgaacaatgggtattcatcaataaatatagctacattatttatcgcgtatagaaaactccaacttttatgagcatttaattttcttctctctttttctttttgaacaaaaattatgagtgattcttatatccctcgataatcactaaataaaatataggactaaaacataggttgacataaatctaaagattagagatgtttacattgcaaagatagataactaataaggcaaaaaaaaaaaaaaaaaa

SEQ ID NO: 111557 - DNA, 6541 bp, Cannabis sativa
aaaaaaaaaaactactgaatttttattgggagctacattacataaactgcttataaaatttagaaaataaaattataacttgttccatcagcttaacaaaaccagcaaatctgagaaaaaaaaaactgcatagcagtgaaatagcccctcaaatatcccaacacaaaaccaaaaaagtaacttaatatacaaactcaaagaaggaccatactaacaacaaccacactccaacagtcttaacttaatatttacaaagaacaagtatcatcatcatcatcatcggaggaggaagtacttctcacttctctgaatatggacctggacgatctggatgagccaacccaggctccttctcgagtctccaggtttgctcccaagtcctctaagttcaaaccaaaacccaaaacagaatccgactccacaccacaggactccaagcgcgaattcgaacaccccactctgaaacacgagccacaggaattgaaggtgaacaaaaatgaggacgaacttgtcctgccgcccaagactgaaattttttctgaaaatgggcatgtgaaaatggaggtggagcctatcaccgaagctaaagaagaaccgaaagaaaatgatgattgcatggacgtagacgatagagaagatactgttgttcgagaaattgacgtcttttttaaccctaaaatggatgaagatactcaggtatgtccttctctctctttttccctttgtaaagaaatgtttttgtttatttcattcattttatttacttttgcagctatatgttttgcaatatcctttaaggccttgttggagaccgtacgaattggatgagcgatgtcaagaggtacttatttatggagtttgttcttaatttaattatttttaagttctcacttgattttatttgcattttcatctttgttggaattataatgaagaatctcattcaataccatctttgatcttaccaataacaatagcacattaaggttgcgtttggttggaggttaatgaaatggaatggaaatgaatcaatttttcattccattctcctttgtattatggttgcattttatagtattggaattgaataatttttccaccattttgaactgattggaaagtagaagtacattccaatgcaagatttttttatgcatttcctaaagaacaaaaactgagaataaaaaacaacaaagcacagggttcggtttatttggattctttttgcttgtgtgaactctctcaaaatgctctcttgaatagacccaagtgatcaggctctatttatagagctctgggcaatatattaataactgtctggtgtagatgatcaaatcttgaatatcttgatttcaaggtttggcgctaattgagcttcacaactccttttttctgttgaggctgagaggcatgaagaaagggttgcggctgtagcgccaaatgctcacccatcagcatcaattcagaaatgcctcaaaccttaatttgcaagccactgaatttatctctattgatatggtgactgaatcaaaaatgtctatgcttgtgtttgattcttattttgtaggtgagggttaagcctggaagtagtgaagtggagctcgatttgtccatggatgttgattcccagaattatgatcaagactgtggtaccaaactaaaaatgacaaagcaggtctcttatcattttacttattgattttaaagtaatctgtagattaatttgattccagtttggctggagagtaaattaagtttagaaggttcggactctattggtgtagcatcagtggttttaccacttgataattctttatactctattttgtttcaatttgtttgtctgctcgaagctcatcaactgttaccatgaaacttctgggtgctgccagaaagtgtcattgaatcttacaagcttgttttccttgtaaaaacttgtaggaacgaaattttcaagtctagataagcaattatttatgtaataaaacaagctagcaatgcaattgataaacaaaatgatctctacttctttatttgataataaaatgtgttacataagaaatatggtttttcaaaacataaaacattaaaacccaacataactctggtgtcattctctccttgtgtactgcttttgaaaaaagatttgccttcaattatatgacattgtttcatcttttctttctttctttagactttgtgtagtttatggaagacacctcgagcaactggctacgctgtgggagttttgaagggtaataaagtatgtatatctatgaaaatgccttttagatatggttatgtatggattttcaagtttgatacgactattactgcacacaatgttggtgaattattttaacaatccaacatttttaatatattcactcacttctcttcatcttgcagttacacctcaatcctgttcatgcagttgcacagcttcgtccatcactaaatcatttgagttctggtggctccaaaaggaaggataaggttacaggagatgctgaagacaaaattaaattagaagaatctaaacttgttggttcttcaaagaagcaggtactcattttttccatttcaatttctagttgtcttgtgcatattttgagtgcttcagttaccttctcacttatcccttttctctgtgcagattaagcaagtgaattcagtggagcagaaaactgcagatggggaggtatcagttgctattcataataagtgaatttccgtttcatttttcaaacactttcttttcactcatttaaacattttgtatggttctcataactgattagaagtactccgtgtacagaactttaactatctgctatttttacctttaaacactgaattgtttcttagataatgttcttttaatttattttgttattgatcctttaaaatattacttgcccatattgatttttaaactttcttccaattagctatgtgattggctggtgtcctttcacttgttacaagatacgatattggaaaattctaatttatattaatcttagtatgataaaacacaattttttcgtagggttggattccactcaagtaccatggctccgacactgaattttcatccacatatatacgaaaaatggttgctgaagagtcctcacctttacagtttacaatgaccccgtatgtttgttactagtattactactaccacgactaactataattcaataaattacaaatattattgttagagacaacgcctcaattgtacaaagttataatatttttaaagtattaaatgtgcttatgatgtttgattttgatcattatttgcaggagtgactacattaactcattgtgtcctggagccttcaagaatgttgataagcccaaaggcccttcaaagaggtacgttctagttatgcgtttatcttgtttctaattaaaattttggagatctttatatgtatagtgttcatgcttataattaaacgattcattcgtatactatgttctttcattttgttacttagttttattcctggtttgatccttattgctaagatgtgcaacattttttcaggttgttgctttcactgcccctagaagagcgtattaagaaattactttgtgaggttagttgctagttccttgcatttcatttagagtagctacactgcatttcggactatttatttttttccttctttgtaatcattcaaggcgtttgttttagggacctcctgttcaccgattcagtgctcttaagcattatgctcctgattgtacaacagaagagcttttggatgttcttcagaatcatgctttattagtgcaaggtttctgggctcctaagagttcgttgttgtatactgctaaagaggatggcattcgacgtatagctagggattacattctttttttattttggaagagtccagttattaccacatcatctttacaaaatccaccacctcttaaaaaggcggtgaacgaatttctgagggttttttctgttgaaagacctaaagtcaaagattggaaatttaaagagcaaacagatacttcatttataaaactctaccccgacattgttaagaagcaagaacatggttgggaagaagtggagagacgtatcatgagtagttttggagacggaaaatctgcacgtggtgcaaagaatgttgccatgcctagtaggcctgtgagaccattgacttctgcaacagcagtggcaaaaggtgcaagtgaagttttgatggggacaaacattccagatgatattcgagaagctctgtcatcaaaggtcctcccaaaagttatacaagatcacaaggtttgcaggtatttatcagcagcaaaaatttatcttttctcctgtcaaatgagcttaaaagaagaatgcaaatattgtagtatgattctcccattagtgttgtatttgatatatatacatatatatatataaaggtcattagtagaagtttcactcactatcttgttgtgtgtacttaatagtagaatgttcatcttccttgcagctttcagctgatatgtcaaggtttacgtgatttggcacttaataaattgaatcttccaaaggcagatgctagatttgtaagagcggcagcatatggtactgattctccagatgagctgcggaaacttgtagatcatgttgcaatcaatattcatgatctatatgtcttgaagtcatctccagagcatccacaatatgatccattcaggttgtccccatttctatttctaatatgaagtaaatggctgcttggaattgattagcaccttttatctagtgtgactatactagttggcatatgagactgccatgttagtttgtaatcttttcttgctataaagattatgattatgatgaaactagtggtaacttgttaggccctaggataaatatggtgtgctagaatatagtaaataaaaagagcaaatgattctttgtttgggagggtagttttgagtgagagattactatgtataggtgagtaagagaatagaagggtatgtaatgtattgagtaaaactctttgcatcaaaggggccttagggttctcatagtttgtattggttttctcatacattcaacataataatctactgtttctctatattttgctactgctctattgtttttctggtactattcttgctgttgtgttgtagtattgggtaccggtttattatctacagctggttctcatcataactgatgattgtatcattatcttattttgacatttgtgttttcttcacttatctaaaataaattgtgctcttttcaggaatgttgtcattgatcttctacgccagaatggacccaatgcgaaacttaaaaaagcggaaatttttgatgctgctaagaaatccctaaacagggatataaataacaatgagtatagtaaggttagctgttgaacttgtttatacggctttttcggtgttctctttttacatatagtactttaagaaattagaaaagaagggatgggcttagagtgaggttaaattagtttaaatctttttaacttgtgatcctgcaagtactccatgatgttctagtaaaagtcccgcatgcacataatcctgcttgctttacacttaatctgaatgaagatcttttagaagcatcctcaaaacgttaaatgacttcctaggcttgaagggcataaattcgtttatttgattgcagagtgctgaaactgttacgatcattaatttattttcttcaatattttttcttggaagtttaaatctgagctgtgtttgtttaaagaatgagaactctgagtagtcttatttattgatacaggtcatgaatgaaatttgtgtattcaaggggtcattttggatgttgaagagcggcgatggcaatccaaaatgatggtcctacattacccccagatgaaatacgctcatcaaggcatagctgccgcccaaagttttgaaggttatactacttagtttcttcctctcacatgtgctcaaacataagtttctatctacatctcggattcatcaaactcgctatcgactcatgacatgaacactaaaactcagttttctgcaattgtttttagaatagggatatataaagtaggagtaaaagaggaattggtacattctcgtgttggggctgcctttcatatcttttaatggcaaatttatgccatccttttgtctttctagttctgtaatggctactttatggatttgtgttataattgtgtggtttttattacattaacactgaaatcccatataagccattctttgtatattcttatcttcttcagaggtttcacttgaaaagaaagattcttatacttagccctcctctaagtagagcaatttgtgggattggaatatagtactagaaatagaaaaatgacactatttttgccatttactttttcaacgaatatacaaatatctatcatgtaacgtaatacttgtttaatgatgttttttaagtttttatgttaattttaacagaatattttattacttaacagaatattttttatta

SEQ ID NO: 111558 - DNA, 2800 bp, Cannabis sativa
tttggagggactggtctggcaaaaatattgcagcaggtatgattttcattccaaacatctgttctgtgatccttgctgaagcagaaacaatttttgatgcactgaaggcttgcccgattgacaatagcaacttttttgagattagaatcgattgcaagaggctggtggacgaatttaaggaagaaggcagtaatctaagtgatgtaagccttgttttcaacaagataaagcttcaccattgtttccctttttgtacaaagctcaattttgtaaacagaaataataatgagattgctcataggttagctaagagaaaccttgagaacaagttaactcaattcttttcctgagtggtcagctaatttttgtaaaactgatatctttcctcctttgtagttttgggctttgttaataaagattacttttcaaaaaaaaaaaaaacaaacaaacaaattattggagccccacaaaatgtatttcaattcaacaacccagttctgactcgtattttggataccatctagaaggtcttcgattggtcaaccgataaatagaaactattttataatattatcaataatagtaataaagacttggataagatgtaaagacccagagatattaattaagcaccaaaccattacaaattaaagccactcaaaattatagttgtacattcgggctgagctgcacgataaagtcatagagacacgagcatgatatggccaaaaaaaaaaaagataatgggactttgatctggtataacatgaaaaaatgtagatttagacaaataaaaaaagaaaattattcacaagaccacacaccaagcataaaagcacataaataaacacaaaaatggggaataaaaaaacatgaattgcagctataaatatgtaatattaagttctcacatattattaatacaaaaacattctcttgaaatagtgattattttttgcttatagactcttttaactctttttttttttttttaattggttaatgattttggagcagatacttgttagaattttattttagctttgatatcatgttagaatatgaaaatatagtaaagaaagtagaatagagtgagtgtagggtaagatacatgagacttaccctacactgataggggcggacccacattgtaacgagaggggccgcctcctaaaaaaattaggaaaaaatgtatatgtattttagttggttacaacatatatttataataaaaaaaaaaatatttatagacataataataaatttggtgtaatggttaagttagattacatatatgttaaaggtcaaaggattaaatctcactaacaacaattatgccccatcactttaaattctaagtctgctgctactgtacactcagatgagtagcttatgcatcgtatatataatattaagttctcacacattataatatgagcctctttaatattagtgactattttttactcatcgactcttttagttttttttttttttgactggttaataattttggattagatattcgttagagttttattttagttttaatatcatattagaatatgaaaatgtagcgaagaaagtataatataataaaactataacactattataataaaatgaatagctgatgtattttttatatggtattaaagtctctaacgtcgaggtagaacccatatgtttatacggatcaaactaggtctttatttttagaaatgggctttctaaaatataagttagaccaggacgagccgcccacatgtacatcgtcaaatgataaaggtgtaatttattatttattcattggaaattagtaacataaaatgttattatgagttaattatatataattaacctataactaatattgtttatgtctattatatattttaatcaatttgacttaaaatttgaaagtggcaagcatacttagacaccccaatttgttttgagtaccacagaaacaatactatgtgattatcattattgaataatctcttcctctttttcgtctttgcgttcgataattggccagagtggaccatccactgaaagttaaattccactatgtttgtttattggagatttttttttagtctatatattaattactcgtatgtttccactacgaagtagtcttttccatccataaccacacctcatcacatacaaaaaaataattaaagtgacagattattatgtccatggttttctctttgtctatatactatgactaatgatcactacggtttatggcactcctttcatttttccaactatttttaaataatgtttactttagaatctttctcaatcccttccgcttaaataataagccaaataaaatctggattacaaccttgactatattattttaatatttcgtatttaatatttgttgtgatgtgtgagtatttcttctctgtcatcatctaaagacaatacaattattgtgatttgaattttttctttcttgtttctcctcaagatgagggtgaattgtgcacaacttaaattcagtgtaattcatataaatttcattctcttaagaaattattttatttataagaaatgtgtataattaaaaatatataaatttacaaattttataaattcttgattctataatcttattacatcgataaaaaattatgcaataaaaatccaacaacacctcaagattgctaaagaaatataatttaaatattttttcaaaaataatttaatatatatttattttttagataaataaataaaatcatatatattaaagggtgactacttaatggttaca

SEQ ID NO: 111559 - DNA, 7266 bp, Cannabis sativa
tcgtgtagcccttaatcattggacgtcaacttaattgaaatgagaagttctttattttcacttatgggtttggataaagaccttgagcgttcgactaaatcagatattaatatgattaaggtgaatgttgacggagtaatttttatgtcgaaaagtaattttggtgtcagaatagtggctcgggatagtgctggccaattggtggaagataccttgttgtgtagaaccggtcatgtgtggaactagctttagcagaggtggtggggatcaaagaagtgatctcaattgaattaagacgaaatattggtgggcgagtgaagcatgaaacaaattcgttggtagcatttcaagtaattatttctagttcgttgaatatgctgtttttttttggtcaaatagttcatgaatgtaagtttttgttagttttttttatattttatcaatttatattttgttaaacgttcaagattgttcattgtattgttcataattcttatttataattcagatagtaatttggagaattgcttttattgaacttttttttgtctattataatagttaattgtttattgagtaatgaattaccattcattttaaaattatatatattgtatatataattaatttttaatttttaatttttaattcttttttggtgataataactaccaatttattgatatagtatatcaaacttttttatatatatacatgatacatgtgttatgggtggagttgaccgagtccacaacctgccactcccacatggcatatgtaggatatgtttataattataaccatgcatgtctgcatcatgagtgtgaatgcatgaacttaatctgcaaacaatctaacaatgcattgataatgcatgcagtcacgtcgatacatatatcccaaaaaatacaaataaaaaaaaaagtggtacattctagcttgcagtcaaacacgcatcgcatactcgtccgtctctaatactcatctcattttctaaaacttaattacaagtcttctacaaaatgaattattatccactgactgggagggtaaattatgaagaaaaaaaaaataaaattgggggaggaaaaaggaaattaataataatcatatataattttgtttttcatacataatataaatacatatgaaaacataacaaaaataggagagctacagtagtgagaagagaaaaatcatacagttttatatacaactatttttgaagaagataggcagtttggtcctgcttttgtggttcgagaattgatagcaactacaattcttgttcgcaaggggttgtgtatgtttctttggcagaacggagatcagtgaggttcttagttagttgaaaactaagagttattcgagagtagaggttgaattagatagtcttgctacgattcgaactattcgtagttcttttataatgctttatagtattagtttaatggtttttttttttttttgaaatggttttagtttaatggtttaagattgtaaatatttattgtgttctttaactaatgttgttttatatattttttaaatgttatgctaattgacttgcctatttttttatgagacaatctcaatgttatattggtcataaaaagagaagggatattccttgtgaactttatgccatcattttgagtgattagctattaaatgaagatgaatttcatataaaaaattaaaataaatcaattatctaatgcagggagtaaataaaaaataaacatacattcttaatactttagatcaaattgacaaaaataccttagataaaatataaaagctaataatactaaattgataatcaaaataaaaataaattaaaaaatatatacaaaactacgggaaatatatattttataggaattattttagaaatacccacaaacagccaaaagtatatgtttttaaggaattttaattttttttttttatatttgtaaggattttttttttcagtttgttgtttatacgttgtgaaaatttaccataacgatgcgacaacatcaatataatgttacaataatacaaaactgtaaaaaatgtaaataaaataaaataaaagttcattaaatgtaaatgaaaattatttttagatctattttgtaaatttccatctccaactcgtgattacaaaaaaactaaataaaattccacatatatatgtaaaaaaattagaaaaattcataataaaacagaatttcaactgcctgaattgggtccaatatgcttaggcccagatcaatattgggaggtgggcccatgaaaattttgtggagctcgaagcccagctacccaagcccaaaaacggacgtgcaatagatgaattatgaaggtgaatcatgatcgtgcgtcgtacgactgagcgcatagtcctcttcttttctttttctcccatttgtctcttcgttgcatcacatcccattctcaccaaaaagtttatccaattttttttttcgcttccaccgttctacactcaccaaattatctctcaattttcccaagattgaaaaatccaggtactctttctcaattttacatgatcaatatattcatctgatacatgaatacgagtctgtcactgttcgttaatcggtctgtttggtcgcttggaaaacctcacatagataaaatttacataacggaatactcaattatggattttgattttagactctgcagttgttcgtgttgatattctgggagtttcgtgattaaattagatttttttattttttttttcactccagggttttgagtggtgtgttttatttctttgcttgtttaaaacttgtattaggttgcgatcaatgagaggggaagtacagctagagccaatgggggctcaggaacatgatgattcagaccctttgctggggaagcaggttgattctatttcttcctcctcagggagctcaaatgaaataaaggatgaagatgatattgaggctggctctattccttgttgccgcatttgtcttgaaagtgatgctgaaccaggtgatttgaacctcatgttacattaaaaaacaaattgtattatttgatcttttgtatttatgtctattaacagaagcatggagattcttgatattttcttgctcctgtatctgaggctgaaatttggctgttagcttgtaaaatgttagaatagctcagtaggagttacggaagttttaatggggaacaagtagaatttggacttatcttgctattaatagcaagacttgggtatacagtatacttcaataatgtgaaccttgagatgtaaaattggtatagattggtcgagctcacttgctcttgtttaattttttttcttatttgtttcaggtatcaattttccttagctttttatcagtttctgagatggtagcaaaccacataaattaaaagctaggcattttaaatagttagttgctaactttttgcatcccccaaataaagggtatgttcgttaggaagtgtcctttctaaaaatttaaaatgtattcatgagggtatgttcattctagtgttgttgttttacctttgtatccatcatacccattacatgtcaataattaatatgtccatttaggttatggaaaatgtaattgctactaaaacacatgtccatattctcagcctaaaatcctgttgttcaatcttatagaggacgaaatgatttctccttgcatgtgcaaaggcacccagcaatttgttcaccgatcatgtcttgaccattggcgttctgttaaggtaattcttttttgacacttattactaatgttgtgttgctaagcttcagcggtaatctaaatttagcaacattctgagtatttttatttttattttaggaaggattcgctttctctcattgcacaacttgtaaagctcaatttcacctacgagttgaatcatttgaggacaattcatggcgtaaagttaaatttcgactgtttgttgcaagagatgttgttcttgtgtttttggctgtacaaactgtaagatattatactatttgaattttcatgaatcatggaactgtttgtgtaaattctacagtttcatttatttactacaaaaggcactagttctatagttttgaattttgatcatacaacttaatttgctaataaagtacacatctgttctctcatatttttaatttatttgtttgaacttgactgcggtttaacttgttgaagcatgttaatgtatattattttgacctctagtagataggacatttatattgttaatatgtgaaagagatctttaatgaattatgtcatctgttcagaattattataagtgagcttcttgtatattgttcagaatgtggacagagtcgtttggtatattatgttgatattgttaatggaataaggtactgtgtgtgatatgttggttgttttatgaggtacaatttttaactcagcgcttgatttcaaggtttgtgcttcatagccaaatgtaggtttgataaaaatgttagtgccttctatattgattatgcattattgtttcagttgaaatttagttcttcattccccccattttttttataacagaagtatgcataatgtggcacatgtaattctaggtaattgctgccatggctggcttcgcatatctaatggataaagatggagcattcagaaattcatttagcgatggctgggatcgcattctgtcaaaacatcctatacctttttattattgtataggtaaactatttccttcaaaccatgttatacagtcttattaattattcctgcttgcaatgagggatcatgctgcacttgtgattgctatcttactataattgttatcataggcggtaggccatgtcttatgtctttttctgggcttttaggatattacaggtctatcacttacaacattataaggaagaggaaaatcgcagtaataataattttttttgtttctctctctctctctctctcttaaaagacaaaaaagagccagaaaaggaaaatgctgtagaagtgtttcaattcacattcaatttctcacattggatcttttgttgaaatggtgtgctgtgttcttgaaactttcaggggtactggccttttttgtgatgcttggatttttcgggcttatactgcattgctcatcacttaatagcaacgatccacgaatggctggctgccagaactgttgttatggttggggaatcttggattgctttccagcatccatggaagcatgttttgctcttgttattgtatttgttgtggtgtttgcgattcttggcatagcttatggatttcttgctgccaccatggctatacagaggatttggcagagacattaccacatcctcacgaagagggaactcactagggtaggttctgaaggttttctatttccgtatacttctgcatggttgtttttttgattttgtggctaagaatacttgcacataatggagttgtttctgaaattttgcaggagtacatagtggaggatcttcatggatgttataccccaccgaagttggatccagaaaatgaagaacgtttgaaaatgcttaagttgttgtaattatgtataagaacatgaatttatgcctttcgagtgtttaagaaaaaaaaatgaaaaagaaaagaatgtctgttactgtgttatataagtttgtattggaatgttatacatctgtttaataaatagttttgtatttcatttggtcgttatcttttaatgcgttctttagattgtctttcacatatattttgcacctgatactgttaagaatggcagtactactactttttgaatacttgaagaatcacaattcacaacctcacattaaagtgtgattttcacagctgtatgattagagatccaaccaaaggatagtttgtgtcaggtaaccaacggtcttccttatgactatttgttagacattgcaaccaaaatatttatttcattgacaacttttcatgtatgattagctgattagttacctaataatatactaagctgaacaaaatacgtcataggaggttaaagtctataagtgaacactcatcgtgaattttcctcgtgcctttgtaaactaactagttgattcagtttttatggcattcatattattgtgctacttttgtatcaaagactgctggtgtatgtggtgtagtgaagcgtacatcttttttttttttttttttgtctgataagaagctgaagttgtattaatgtctataagtaaatacaagtctgaaaaaactccatctgtagttaactcagtaaacaagaaacccttaaaccctattactgtttaagaagtctttgatataaaagaaactgttgggaggaaacttttcacttcatcctctatggctctatggtgaaaaagagctattcacaatacctaaaaatcgcaagaattataaatttttgaacccattgctatggccaaatgagtttttgtggatttttagataaattttattcggtagagacaaattaggctttcaatttagtgtcaaattcattagtcaacaacgtgatataaacattggacttcttatgttagattctatttaataccgatgacttttctgaataagattatttttgctttggaaaataatcttttgtggtaatatgtaggtgcatttgaggagaagcatttcggtgatgtcaatgttgaaggaaatgaaggggactgattgagagacctggtttgacataatatgtttgagaacggtcggttgaagtaaatgtatttagggcgaattctacaaagtaatagattcttcagatgttgttgtccaggtctgttttctctaggtccattatttgaataggttttacttcaattttattgaagttggacttttgctcatcttcaaataaatatcatctcaattgcttgtatgccaatttttcactctttcttttttacctttttgttttgttttgtatgatacatcctggaatggttatgtaggattcaggaatttcataattagcgatcatgtaatttaaggccaattctcctgtcaaatgggcactaatattctagaatctttcttcatttatctagaaactctacagtcacagttcccacttatgagtgaataccactatcagtacatcactaaatagagtgttatatccgctttcttagagcacctccaaggaggcagcaaaacttgaaaaatggagtagttaatgctccaaggaggcagcaattatcactgcaaaatgagggtttatctacagtgcacg

SEQ ID NO: 111560 - DNA, 2513 bp, Cannabis sativa
tatttacatggagctaaaaagtaaaattcgctctttataatagtagtacaatcaagtcacacaattgggttctgaaatctgacatataacattgttattaaaaataaaaagacaaaatatcaataaagaaatatgagacaaataacagaaaattcaaatgccataaccccctacacactaactttatccccacaccccaacattttcctcataatttgatataaattaaatcaatcttaaaaaagattcttcacaaatgaatttaacccttttatttctctatctcttcctttccttctccgaacctcttccttttctcaacagctattttaactgccaatggcaataccattgccattcctgctgttctcactgttttctgtaactgtaacaacagactttatagaactcgtgtctaccctcggcggaccagaatgccgccttggcttcgcaggggagggtgggaaagccagccgtttctttgcggtctctgagaatcccttctctagttccccgtttttctcggccccaagtggactttgcagcctggacttggctcttgcagactcagtgggcaccatgtaactaggaagtgcaggagagctggcaaggctctcgtcatctcgtacagatgagccagcaatgctgtgccttcggaacctatctgactgcatgctgaccatacttctgttgtcatcatctggtaccctactcactcttgggctcgcagactttacttttttagatggcgtcgatgaaattggcctgttgggagttgaaggggattggaaaccagaattgctcggcttttgattggctgtaggggaggaaagcttttcggaattgagaaggtatctagcataagatttgttgatttcgccaccagaaatgctgcgactctttacagatgaagcatcattgtttgaatctttatccatagtgccgccgctgcgattttcccatggtctagcagccatccatcgttcaagccaactccaaccccacgatggatttcttggatccatgaacattggatttacagatttcgaattgttcttcaaggtttgctataataagagtgaattaagggttaaactcacaacttagttcatcttaaatacaaagaacaaaaaaagaaagttcaaaatattatcatgattaaaaattagcagttagttcattaaaagaataagcattaataagtcttttacgtataatcattataaatctaaaacataacaatccctactctcctgggttcctacatggcaagtcctaaatttttttattgtacggttaggctaggaacctagtttcaaaaaattagaaagattaataaggcacaagctcaataacgatggtattgttcaatcaactcatttcatataagtttactttcgtttttcactgctcatctatgataggatttgattatctaaaaggaaaggaatgaatacctgatgagagaatgcataagctaatgctctttctcttctcatagatgcttcatacttgccgagtaggttcgcttcaacttgctccttggactgtaagctatcatcccattcctccccaagctgtaacaactttacaagttaacaccagtatgatatgctataaaatattaacacattttgctaccattatgaagaaatttctaaaccaagacagttcctaatttcgtttgcttgagaaaaacaatgcacaatcaaggagcaacatgttagagaatgatttgagtaaaagaatcagacccgcaagttctcgagctcttttgcatgtttctgcaagagttgtctttggagagcctgattctcctccaacattctgatcctccttgatcgaatctgagactggactcgagccaaagtctgcatacaccgcagggtatttgtggcttgacgtttcacaacagaaccctccatcagcaatttcagcctgaccaaccctctcaaagcacgcaatgcccttcttgcctgaaaagtttacaatgcaaatttattacaacacatattatacaaaaacaatgattctatgacaagatacttggtggaaaatcggtaccaggtatcctcggaatgctgtttgaatcctaacagctgctgcttcttccccaaacttcccagcaaaccgagaaactctaggggccggaacaaccactggggctgtccgagtagcgatgaccacaggctcggccggtgcagctggggcaactgcaatgggggggctgtcatggttgttatgttcaatctctgcatcggctattttcacctcttcatgtggaggaagaggtggcaaagcagcagcagaagctgctgtgccagcatcagaatccaaatgtgttggcttcccaaaccatttctttttcgatttacttgatctctgaagaaacaataatgagaatttagtcactcacaaacttgcaaaagcagcacacatgtgaaatgaaataatggaaaaagaaaaaaggaaactgaaaattttcaaacctcggctgtcttctccttcgattc

SEQ ID NO: 111561 - DNA, 17799 bp, Cannabis sativa
accccaatgaggtgcttggtgcgagacttgactaatgatcaagcaccaaggcatgctcatgttacaaaatggccctattgtgggtgtgccatggggcagcacgccacacgcggtggtgtgcctgcatagggagctctgcaaggggggcttggccgcgatttgttgctccttgtggcaggggcttcctttgtgcgggggcgttctcatgcaaggtaaactcatatttgatttatttacacagttttaaagcatttttttaaagattctttttggcttaatctagagaacccaaaattaatacttaacgaatttcaaagtgaacataatctatacctataacatacataaatgagttcaaaaataattttttattctaactataatgtatatttgttttttattatccaagtaatacatttaaaagaaagtattcagctaacacttaattactctcttctctttaatttgacaaagattaaagagacttcttgcttaatagtctattttcaatttttactaaataattagtctcctgcttatgtaaaagtaatttgtagtatttatattacacttagtaactattaaattttaattctataataaaattttgttaattagacaaatattatatttagtgtgattaattttttaaaaaagtgtgtttatattacacttaataacaagctattaataacaaggataaatatcagactgagttgttcatgatattttacatatttggtcttctttctcttactcattgtaaaggtgctcaaaaagctacgactctttctcttgtacgcttgactttatcccttaactcttctcgggtttggtggtctggtttaccgccttgcctctaatccttgactattgtgtattgtcttttggtttttagctttttaccttttaataaactttttcttcggttaaaaaaaaatataattatcaatatttaaattgtatggtattgattctcaaacacacttgtttactaaattttaaaaaatgaaaaattagtggggcccactaaacttaagtagaaaattaaaagaaaagttctccccaatttttgtaggcaatactttcctaacttactttatttttattaaaaataaaaaagacaaatatattctttaaaaatctataaataaaaaataattacatgttctaaaaatgataatttagttaaattcaaacattctgattatgtaaacaaagtaaaatgatattttttttttcagacagtttagtaaataacataataaaatattattttttgattattttatattttaaactaattcatttaggggtattcatccaatccaatccacattattttgctcatagtgcattcgatttgcactaagtgaaaattttatattatagatttaatcgaattcgcacaagagctcaaatccaatccgatccacaataatgcagattgaatcagttattttgaattagttactttttaatatttaattatttaatatttattaagacataaattattttcacataacccataataaaataaaacatgttattatggttctatgtctccaattataaattttaatattagaaattagagttagcattagttgtatcaattatttccctgcctctatgtttgttaattctgttattttagttggttaagactgagctgacaagttggttgttccaactaactcggtctcttgctcagcctatataaaccaacttatgccattgtactcattaattcaattcagtggaatacaataaagctttgctttccgtctctatttctctcatggtatcagaagagaattcccacatatccaccatggccagatcttcgaccagatcttaggatgggattctcccatccaactctaatccagttcagccccaacaagacaccattcctgacatcgcctccgctcccaatcaacctcctcttgttgctgctcctcgtcgatcttcaagaactcgacctcagattggaccagattcatctccgactaacaactctcgtccctctcaagattgtggatcgattgaagctgcttccagccccttcttcctcagctcaggcgatcatccaggactcgtattggtgtcctctgttcttacaggggctaactaccagtcatggaaacgtggtatcaccatggctcttgctgccaagaacaagacatccttcatagacggttctcttccttgtccgattgctgataatctcctcaattcttggctccattgcaacaatatggtaacgtcttggcttgtaaattctgtttcccctgatattgcacaaagtataatgtactttgatattgctgctgaaatgtggcaagatcttgctgaaagattcaatgaggcaaatggtcctcagatctttcaattgcaaacacagctcactcgtttgcatcaaggtgatcaatccgtcacctcctacttcaccaaactcaaatccctatgtgatgagctaaaagactttcaaccaaacacaccatgtacttgtggtgcaatgaaaacatttcttgaccattacaatcagagtcaagtcttgcagttcttgactggtttgaacgaatcttatgcttcggttcgtgctcaaatacttcttaatgagcctattcaaacctgtctagagtcttctctatgattgttcaagaagagcgtcaaagaacccttggaaactcgaatatcacatcccttgcttcctcggttcgcccttcttcatcaaccaaccctccaagaaccaagaaaccaagaccatcatgttccaattgtgggaaaccaagtcacttggtagacaaatgctttttcattcatgacttcccctcgattatggagataagaaaaaaaaaacgacaaaggcaaaaccttgtatgtaattttttttttttttatttattttgaattatatttttcatatacatattttatatgttaaattttgaaacgtatatatactatatatgtactatatatatcttattcttttaaattactatttttttccataaaataaaaaaaaatacatttataacatttgaaatatatataaatagatgtgaattgaattaaatagattacttttatatataaatcaacattcaattcccacaaatacgaattttaaattttcattccgatccaatccgcacaagtacagatatccgtattttgcaaattgaattggattggatcgtgcaaataggattggattgtatattttatgaacacccctagatttatttcttccatattattctgattccgattccaattccaattccaattccaattccaattccaattccaatttaacgtgaatgtcaaccaattggacaacaacattctgaacgagtttctttccaaaaagaaaaaaaaaaaaaattgggcaacaacattcaccggcagcattgtctaacgtgttacaaaacttcagcataggcacgtggctgtaattccttggcaattcttatgcattctgccatgggacaattggtctttattgcgtttgagataatgtgtgacctactaacagcataaccctcctgcaaaaggttcaccaacatatcaggctttatatctctacaaagccattatatattggattgtcaatttgtcaagctgtgtggccaaagccttaatagtcagcttaacactgagacagacaaaggagtttataatcacccaatgcccaagatttttcttgctttataatgtcaacttttcaaaaaagttaaccaagaaagaaacctatataccaaaaacatacattgctgctcctttgttaaccgaaaagctgcaaaagaaattgagaataataccttctgtatggcgtccatcatggttcttaagggtggagaatttactttggcacggcttgcaacctagagatgaaatgaaaacaccacccttagatatttgcaagatatagtagaactaaactgtccattgaaatgagacataggcactagagaatatatatttgcaaaactacctcatccaacttgatgtaaccaaacggtaatcggggatcactttcatccaccatttgtttcaaaagtttctcgagagctgtttctgtgtctccacttgcccatccccattccttagccaaatttaacatttctgtaagatacgaggcgtcgtgaagaggtcctgtccaaagcggccccgagatgacaatggactgataaaccaggaaaggactatgagaattctgtctacttactgataaaactagtaacgactgctgcatttcaaactttgaatgataactaaacagcaaggatgcttaactatacgacttattagttcttataaaaatgatggttaaacgaacatagtctgtattagaacattaaaaatagtggaagaattgtctgcagcagaacagaaaacagttctggaagtctaccccagtaattgaagaaatcattatcacattgtttctttttttttttttttcagaaaaagaggtcaatattgatgcttgagaattacctggatccgatacatatacctttgaattgccacaggagcaactaatctgaccgagttcatcccatgaaaatgtttgagagtttccacattggtgacagtagctaacgaaactataatgactggcagaaatcggacaagtgattaataacatgaatatccaattgcttttatcatgtagaaagttcttgatagcatttaaaacaagatattcttaatagcttttaagagaaagaaacaatttttcttcttttaatcaagagtaatggaacaattatcattttccctattaagcaaacaagcacctgttgtcagaaagtttccctcgatttactcgaagcatgactctgaaaacaggtccatggtatgaataatatgaaaaaagcggaacaacacgaagacccaatacagatgcttccctaacagctccacctataagcattctcaatccaatctcatttgaatatggcagggggcgaacataagctccatatgcagctaatgaacttgacaatgaaaatacacaacagttatgactatccaaatttgaacatcatgctaagaagtacagaaacagaaaagttcaaaaaactcactgatgaggccggtgaccacctgaagagtaaccatcagtcgaagtaaggtaaagcaacccatcaaatctcaaagcattaatggctggcctcaagaaagaagaatcactcccaaacgaatcaatatcaatcaaatcaaagaattccctttgcagataacactccgtcatgactcggttcgcatcggtatgcgtcaccgtccacctaggctcatcgtcggagcctcttggcaccttcgacaagttcctgcaaataacatccctacaatcatcgttcgcgtcgttggccaaaacgaaatcggcctcggcttcgacgaggtaccgaagcgacctaatcccgcaaccgcataacccgtcgagtattcgtagtctggccttggatttcttatacaacgctgccgcgagcacaccgaggtcccggcccgtggcactctcgtggcgaaaaaacgactctccagtctcgaaatccagacccctttcggtctcatactcgaatttcacgctcgaattaagcttaagctttgagctcgagctatggcgatttgggattgggttgtagagaaatggaaatggaacagaagatagggttttagaagccaaaacccacatggcgggaaatagcttgagatgactatggagttagttttggcgggttttaatagcgatgatcgattctatagttgacacgtgtacatatttatagacaacataatggctacgattttgccacgtcactaacttgtttattgtattattttctgttcagtagatattgtgggaccaagccctatttgacaaattggaccaccattgttgctttttttgcttattactgaattggggatttgggattagggtttttaattgtgggagctttgttgttttccgctgcgatgtcgagcttgtgtttagcggagtttaggggtttcaggggcgaggtatgcttttgcagaagcaagaagacgaagcggaagaggaaacacgttccgttgttaagcgttattatgtaggtaagctccaaaaaaaaaaggaaaatatatattgttgcccgttcttttatatttaattttcttgattttttcctcacaaaaaaaaaaaaaaaaaaaaattcttgattttgtttttcaatagctagattttttttttttttttcctttcatgtccctttgcagtgggttctaattgattctcttaccaaattaagattgtgtttcctttttgaattgccataatcgagttattactaaaaaaaggagacatatttaatatagtttttgttacgtggattaggaaattctatggagctttactacccaaaaagcttattaatttggcataggtcattcttttcttcttttttttttaagtatggataacctagggcattgccagtggttatataaccttttttaagctaatactaggggaggttattatacagccatgttgattcaaaggaatggtttttttttccttctttcttttgaatgggatacggaagaatcgttgacctgaagttgcgaatggtgatgattcagagcagttttactactgatacactctcacgttcatttttttttgttggtaattttatacgtgtaattagcttatacttattatgtgtttttttttttaatggaaaatacttattatgtgttttttttttgaatggaaaatacttattatgtgtttttttgtgtgttatatgtgtaaaaattgtggcctttgtagaagtacatacttaaaagttatgatacttgttatcggtgctttttattgcattgacttaaataaatacatagtccaaaatcatgcaaaggattgcaggaattttcctctaaaaataaaggggaaagtttgatttcttctttactccttgttatcaaacttgattttattccaaaatagcttgatacaagtggaatgcactttaaagactaccttaagcaggctctctatacgaccttttcaatttccttccttttaccttttcccccctttaaggtaactacgtgactactatgactggagcaatatcaacttttactttcagtttggactatggagtgggtgtggaagctggtatgggagattttctcaacacatggaagtgcaaattgaaaagaaaaggaagttatgacagcatttaggaatatgaatcttgaagctgctctatccaaggcccttttgcaggtagggatcaactttagttacctggctatgttaatcaacatgattttcaaggctaaactcactgacctttaaccttatgatcttattcttttcacaacatgctatgttttcattttaagccggcttagttactaaaccaagcttgagatttgaaggtagtcttttgaggactcaattgtaatttgtcaacccaatggccaaaattctttaatgctaattggcttgactttgtttacccatttgaacactcgtgctatgctttcagcactactctttcttttccaaaaagtagagctcaactcattatgatccagcccatatggttgatgcataggaattaggaacttgacttaagaccttttctttttatatatgtgtatttatatgtatttatatatatactttaacacgtatataattgtttgtcattaagctctgataaatttaatcagggatgggtttaaacatgatgaggtttgctgtagccaccttggtttggtcaatgttctgtggtaaattttggcagggcatgagaacttgctaaatatcatttattgagtctctttgtatttgtctttgtcatagctatatagaagaccagtcatttgagaaatttgcaaacacatccaagcattaaatgcaataaattaaatatcgtatggaaaggcaatgtgagatatgaaattaaatagggtaattaatttgtaatctgaacacaataagagtaatttaggataagaatcaagaggggaaactgagatggctgaggatgatttggttggtagtatcttcaccaccccactgcaactgttcttctagtttagctcattagtcaagaacaatccacattgtgcagaacctgcacaaattgagagtgtgtgttcatctctgaattagaggtgggttttgaataacattagagagcttagaaagtatgacttcactgaatggaggagtgctttatcattttttattctagttttctcatttctacatcacttatcacccactctcttcttctagatgtctcttcaatgcaactcttaacaaaggggataagaacaacgttattgttctttccattttttttttaattttatcaactttgtccttttcttttcttctcaaaataaaaaaacaaaaaggaaaaaggaaaaaaataactgtcattttctttaactatttttccttttctgctaagctctgcaaacactctttttttttttttcaggaccttatgttttttaatttttaaatatgctctcactattttaacccttcccttcgtaccctaatgtcaaatatccccaaatctcttctttagtttgtttcattgtttttcatttttcctcttcagagggacagttgtttctatcatcatatcagaagcttatgaaatctttctcttacagactgcaaattgtggaagtacttggactacctgaaatatccaagtagcttaattacttctcagtttgctcaaaaaatacatcatagattaagttccttttgatttgttagcatttttctattctttttgccagtttgctagcttttctagtgctactcatctgtttgaaacacttcactttcacggagttctcaggcctctaagttttttgtcaattcatctaatctattttctataccttttatcttctactaggtttagaatgccttttaaattagtcagttgctgaaatctttatttgcagttgtctgtgaggatacccttttttcaaaagctaaagagttcagttacttatggaagattttcaagaaaatttgtctccttcctccttgttatcctcttctttctctccacccaccccacacccattgtcaattgattctgagctctggcagatgggggaggaaagagcccaagagatattatgtgtcattcaaccaaacatagtttctgataagaagagaaaggaggtcattaattacgtgaggaggctaattaatggatattttggaacagaggtgagaagttttctgctcctctctcttttgattcttcttgatatgtatgaattactatgttttgttttgtttcttgttctttctgttgatttttggggctggttaagctcactaatattgtcaactcctcatcaatgattgtttgtggggaacccattattttaaatgtgtactgtatgcttaatagtatatgtgtaagattgtttaatttctttggaaaaatgtctttcaaaatttgttaatggttgtgtaatctccacacagcagtggggagcttgctatggtaattggtaaataactcttgatttttcttttgatggcataagatatttccttctcaaatctttggatctgttgttaatttggatgaggtgtagctacatgttctgccccggtacttcggactatcattaaattgatcgaatattcctttatttctacgtacatttatgtttcactttgtcgtttattatgccttatccgttaaatcgtatttttttaactgtgaaacaaagccaagtgttttcaaagctttgattggaaatcctatattctagctgatgacgcattgtgtgaatagaaaaactgaaatctaaatttgtgatctgatgaagctgttttcgagatggtaacattttcgctttaaaagttgaccttaatttatttatttgctgtgataacatttaattattgtttatttgtttttttttggtaaattttgttcacttgtgttaagcttgtaagagcgttatgttttatcttctgaaactaggctctccgctgaaccctacaatatatggggacaggaaactatagtgttgtatctaagagacttatatgctagctgttctttcttctcgttttttccatggatgctaatgccacttaattagcattgccctcatgtttttttcccttttaatatgaagaagagttcttattaactatagatgaaacacgcgtttttacatggacaattagttcaccgcaaaatcagatttttacaaaacaagaagatcagaacactaaacacccttggaatcctatcgatcaatagtcaaagaggaaatcaatgtttttgttatgtggcttatctcttatacaatccacttgtagtatctcatgaggaaatcttaggacttgctaatatttctcatattcttgcaggttttatcattcgggtcagtccctctgaaaacctatcttcctgatggggatattgatttgactactttcagctatcaaagtttggtagaggatttagcaaatgaagtgtgcaatatactcaaacgcgaagaagactcagtgttccaagttaaagatgttcaatacataaatgcacaggtttgcctttcttaattttgatctttttttttaaaaaaaaacaaggacactaattaattctcatttccagtgacatttttatttatttatagacgattttgagttagagcttcatggacaaaccttatatactgatatgccagctgacacactctgccacgtacatcatagtacataaaccttacatacttggttgtatgtaacgtgcttgtgatggttaaagattttcttttttatatactccagtatcaaacttttttcctcttcttgctcgtagttgttcattcattttgcttgtttcattcttagtgttatatattctctgtaaaattcttacatgaaattaaaattttgaaagatcagaagaccttgaattttaccattttctcacttttacagtgccaaaatagctgcaaatctgctgctaggtgcatgctgatgtagatttctaacttgtgcttgatttcccatttggactgctagtactatgaactaataatccatacatgtcaaatggcaatcaggcatggacaagtggatactgttgaaccttcgtttataaaacgttttttgtatttaaaaagtaagcgttaagagcgatccatgcctttaattagttcccccataagttaatacctgtttaggtattacagttacaatacattgggagatagacataagaccataacgagaactgatgacatcaactaaaggataataagacatgaagcatttattcgccaatcttaagcttcacgtggcattcagttggtttttttcccctatattgacctcactcttttcttctaccgtttcaacttaaataatttcatggagtaacttgacagtattctacatgttagtatgaaataatatacgcttggttaaattgttggaggttcaaatatctttcgcttgtagcctaaccttgatagacgaaactttcaatttttgcaaaacacatgcatctaaattaaaccacaaatcttacccaagataggtagctcaaatggttagacatgtggtttgctcctgtaagatctaaggttcaagttcctcttgggcgcctatatagctattgatataggatctagattttcatatattgcaggattaagcggggagtctagtttcaaaaaaattaaacagatcctcagtaaaaaaacctctataccgaaatatacgaatatgatttgacttccctttgttatctcttaatggataactaagtacatatggaggcttactacatgttgtggatgggacaatttaaattggaaatttatgttcagacagctagtgacaatggatccagtagtattcttttggcagagagccaataggtaataatagttatgtttaataaatgcaaaaaaaaaaaaaaacagaaaaccattatttaacgatcttatagcataaaattctcacttctttatgtgaaatcctttatgtatgcaaaatgctgaagggggaagacaataaaacaaaatttgacatgtttgggaaagggttgttttggaaggattataaagagtaatgatatttgcaccacatacctttgtggcaagcatttttaatctagttatctgaaatagacgtgattgattgaaaagaggtaagtgtgtaatgtttcgtgccaattttgtgtgctcatattattactcaatttaaaatgcaaaaatcttagttaggaaaacttttgtttttgaagttttcagcaatatgtgttgatattctaccaactaaagtttgattttatgttggaaataattcagctgaaactagagattatggctttgcttgttgcagggaatttatttgcttactaaagccttgaacataaggcatttcttctttctttgtaaatctcttgcttaactaccaatgtcaagtatctgtgttttagcttctcatataccatgcagaagcatatcttctctgtttttgatcctcgtttgacatccaagcctattttctctcattttttatagatttattttctaatctatttctcgtgttataagtttgaagagaaaaatagttgggagtccaatttcatctcttattttcttatgatgttgagattttgaagagcaggttaaggttgtgaagtgcactgtcaaaagtatagcagtggatatctctttcaatcaagtagctggcctctgcactctctgcttcatggagcaggtctggaatcctaaaatatagaagctttgtcttttgttttctttgttacgtacggtcactatgtagctctgaatattggtgggtggtataagaattcttataagcaatatatgatcggtcattgtttagattatttgcaattatttactctttgatattgctactttttattcttaaaagatttcctgcttcacttgagttaattctgtaaattatttaattctcttattgtatttgtgagcattgctccagcttacttcaagttttcttgttcttaagcttagcatgattcatcagaatttatttgcttggcccctcatcattttctcattttatcacatttgttctttcttcttttctatgtaaatatctgactttctggagcttccattctcaggttgatcaacttatggggaaggaccatctatttaaacgcagtataatcttggccaaagcatggctctattacgagagccgaatcctcggtgcacatcatggtttgatttcaacctatgcactggaaacgatggtcctgtatattatcaatctctttcatgcatcactacgtggtcctttagaggtattgacttttgtgcttatctttgcgtctttgttattcggaggtgcaagtatataaaacactacactaagatatttgtgtaaccaggtactatatagatttttggagtactatagcacatttgattgggataatttctgtgtcacaataaacgggcctattgcattgtcttcccttgctgaaattgcgagtaagttatataacttcatttagatgctatttaatccgtccattgtttataatggatgatttaattgcacctgttgcagctgagagaacagaaggcggcgatgataaattacttcttggtaaggagtttctgaggaattgcagggatatgttctcaattccaatgagggcaagtgaagctgaagtgaatgaattcccaattaagcatctcaacattttagatcctctaaatgacaacaacaatctaggtcgtagtgttagtaaaggtatctgattagtagttttacttgatgaaagtttctctttatgtttaatactatttaatggcttgtgcatggaactagtaatttttagctattgttagaacaagagaagtgaccatgctggcttcctaatttctatgaaccaatgctgatatctaaaacggttgaaatgaaaatagccccacttactagcaaaccatatttgattattttggatccaaaatggcatcttttagcatgtttctatgaagtgacctctcaaaaactgtaacacattcattcttttgttgtctgattctagacgtttctgccagtttacaaaatttgggctcttatgctaatgctacaagtctgtaggtcattaaaagaggtaaaaagaacaggacattgcaatttctaaacgacaggaaaagctacaaaatattgttttcttctagaagcctgtgttttttagacattatttgtgttgttttactaattaatttgataatgatgagctaccagtctaaaatttcatgtaggcaatttccatcgaattatatgtgcgctttcacatggaactcgaaagcttggagagatactcatgctaccaggagtaggcctgggtgtaggacttgaagagttctttacgaacactttggacagaaatggaaggggagaaaggccagatatccaagctccagttcctgcattcggtactggaagatgtgaactttatgaactcagtggagactatgagagttactatggtggtctacagtatacacagtggtaccatgattatttcataactatttctatgcagtcaaatcaaaccctttcttatgtgtgggatgagagcaccctgtcctggacagtgcagccgaaccagaatggatttcaaagactgggtacggaattatatgtcccaagcatgccgctttatcatcctaatttgtcactactacctgctgcaacttttcatccttctataatggggaaatcaagaggaacaggaacatacattcctgacatggtaaatttttcatagtttgtattcgagcccttctattctagcatgaaatgtctgaataagcaacttaccattattgtttggatattgcagactcatcaactttacaaagatatttataagaaagagtggaaaaggactacagaacctacaaaacatagtcttcctctgaaatcagcccaaaagactaatgaggacaacaagccctccaaaaaggataagggtaaaagtagcagcccacttgatctctcgcttgatgaattcccattcctttctggcacctcgaacaccacacaatcagaaacccctcagcctgttgagctcgccgtgaattcttctccaacatttagaaacgtcgagtttgggtcttcaacgcactcaccgtcaccatcagaaatgcattcccaattagcatgcaaacagacagattcagttatttcgtgctcattcaactctacaccaaatgctcctgtcctggaagttgagaagcaacaagagttgcagagtgatgaagtggcgtaagttgtttggatgccatgaaactgtagattgtgttggttattcaactcacccatttgatttgttctcttattgtgtgtttgtctggtttccatggcaggaatcctgtacaaccttacgagctggaagctgaaaaagatttcccgcctctgacatgttgtagtatcacctcaaagaagggaaatgcaaatagaacagaagttgcagggcatggaaaagataattggctcgactgaagctaatagtccagccaaaaattgaggctaacatgagaagagaacaatttattgttaatttatctttgtttggttctttcttttcttctcgctaaaccattaattagctcttttcaaaagacaaaaattacattatgagagcctgggtgggacgactaactcttctttgatatgataggttcaattttacctttaaatccattgatagtttaatggtttcattgatagttaaatgaaatttaaagatgacataacataaaataaaaattatatggggattagtctaaaagtagtctaactaactatagagtgaaggagttctctaggagcttttcttcataggaagattatcgaagtatactgctagtaactttggacacaaacaactgttttctacaacttcttcatcttacattgcctccttcaaaatggcagacaaactcatgcggattgccctggatgatctatgcctaagtcacctgtttataggctggatccaggagaaatagatacccaggaaccagtggggaaagttctgttgggtgaacttatatgtaaaggcaaacttagtagaacagttctgttgggtgaacttatatgtaaaggcaaacttagtagaacagccatcgcaggtacgttaaagaaagcttggtcctcctttaaggggtagagttggaaggaagatgatgatggtattctgcattttcacatttgcaacgaaagaggacgcctggaatgtcctccatcgacgtccgtgaattgtttgcggggctctactggtgatcatgccttggccgtcttggcttacgcctactgaagtgaagttcgatagatcaccattttgggttaggctcagtggtatactccctttttactggaacaaaacaaatttggaagagcttgcagcaaggtttctccaaattaaaagctaccaagatacattgattttgagcgtggttcttttggcatgggaacagtcttgtttcgagccaccatcgatattgacaaggccctgttctcaggtttctttatgaagagagaggctatcaaggatctttggatacaatacaaatatgaaaagttcccaaaattatgcctaaaatgtggtatcatctcacatgatcaaaagttctgttttaaaccacctacggtcattaaagatcaaattggagctttctttcccatgtttggcccttggatgaagcatgaggagactgccaaatgacctttttcccttgatcttcctaaatggtttcaggcttggatcatccaaaagaggcttactgtggatcacacctttaaacaacaatggaaaattcgtaattccattaaggtggctgacgattgggaagccagggaatctcggagacaactgccagggaagaggtgaatggttgaataggtggtggaagatttgccggccacatgagaggagaaagtgtgtcgttttccgatggtgaccttgaccttaccaggcgtggaggacatttgcccgtttgaggatactgctactctggtaattcgaaaggcccctgcgtgcaatctacttatggaaccaatgtttgatcaacaagaaagagatgcggaccctagcatgcaacagactcaaggcaaagaagtaggggttgggtctagttcctagactgatacaagttcatctgatcgccatcaggaccatgtgcagatgctgcagaccaccatgaggaagaacagtcatattgttgcctctttcgtgtcaagctcctcttaccatggttcagaggggtatgagagagtcctcccctaaaacttgtcagagaggtccctgctaaacccgtcatttagatgaaaaaatgccataaacctttgctccaaaataatcaaatcgggaacaagagaataaactgaaggttcctaaacatgtcatccaagaccataagagcttgtttagtacacatgactgtattgaattggactggactggacaaaattagattatgctgaaagtaatcttgtgtttagtttaagaatagactggactattttatttattttcttttaaaaaaacttaaattaaaattaaaatatataataagaaaaaaataaaaatgaataattcgcagtaaaaaaataaaaataaaaataaataataaaaattattaaattataaaataaaataatatatcatatataatcaaata

SEQ ID NO: 111562 - DNA, 7404 bp, Cannabis sativa
  modified_base (1433)..(1439): a, c, t, g, unknown or other
  modified_base (6887)..(6894): a, c, t, g, unknown or other
aaagatccatcattcattcattatcaagttaagttttttttgtcttatttcaattaagttcaagttttgattttgtgattgattttagttttgaattgtgtttcttgaagctgtaacaaccagttttgagggtgaggattcaccacaacaagaataaaagaaataatcaaaaaaattgagccaacccaagtacaatgaaaacacaaataccataaaaattaaatgatctgatacaattatattattacaatatactccaaatcatatctaaatcaatggctatgcttcagttatactccaaaacatgtttttattattttaagacgaaacatatctctatgcttttattattatttttatggccataaattactaatttataatagaaagggaagcaggcattacctggatggaaaactttctttgacagaaagatatcgttgccaagatgacatagttgatttgtgagttgctttttttgtaccacctctatatgcccttaccacaaactcttcatttctttctctgttaaaaaattaaaaataaaaatagcttaaatttgtggatgtaaggggagtaataaagaaactattgaaaatgaataaagaaatgtaccaagaaacttacttctcttcaaaatttgataaccatttcagataagcagcaccaaaatatacactcacaaaaggcctgaatagaagatctggattccctactacttcataagactggtaattcaattctctgcaaattagtaacaaagactctctactatcactccattcttccaacacaataataataagtggtaaaacatgtcaagtgtaattgatatgtacctataaagccattctgctgtttttggaaaaagttgcatgattcctaattttgtgtccttggatttcttgtcataccgaatagaaaggggttgtctgtcactttcgagctcggcaatggcacaaatcatgttctgtttcatagtgttatgacatataaacttgaattctcaaaaccatgtgaacaaatgaacatctcaaagaacataaattaagaagaatgatcaaaagcaacataagaaattcttttatttgtaaaatataatctcaaatctctgaaagtgtctcttaaattataagtcctctattgtagttcactcccctgctctatagactagtgaatgaatcttagaaagtcattacttaatatctttttttaaaaaattatctatcattctaataaataattaagagagaaggattttcatcagctaagaaatgaactcttaagattaacaaataattcatgtgctctagcatataatatgaatatgttaggccttagcataataaagggtaaatagcggcacaagtacttaaagttttgaaattgtaagcggtatgaactctatgattttttttagcggcataagtacnnnnnnnttgtaaaactgtaatttttctccattttcattagtacagactccgttttgaatttattaacagaagatttgaagtaacttatactacatattttcatcttgacctaataatttagaatttggaccttatatgtgccctgtttaaaacaataataggttgtactgatgaaactggatgaaaattacagttttataaactttatatacttatgccactaaaaaaatcattgggtttatgccgcttacaaactcaaaactttgggtacttatgccactatttacccgcataataaataaagaaggtaaatgagtaattgtaaggagacctaggatctatgaattgagcagagcatctataggagatgggatggaatggttggggtatgaaaattgtaggggactgagctttggctcttgggagagttgagttctctctcacacctcaggttctattgttctattgttctattattctgttctaagctttataatcctatcagaatactctctttttctccaaggaaaggaggctgtttataatacttatgacttatttgagtatggagagaaatttcaaaactcacacactagtgatgaaacatattcatatataaacaacaacagaaaaaccataacaaagacagaatgtttttgttatacaaacacttacaggatccacttgcaaatgaaaatgtctgctgacaataatctcaaccacagcctgaaaaaagtaatatgatggaagatagttaaggtttaataacaaaatatgcaactcaagtctatgtcaatcataatttaaaataatagcaactcaacacattcatttctatatgtcatagtgcagttaacaatcgttattggatatattattattcaaaatttaacaaaaaaataaacaattgtacatgtttagatttttagctatgcaatgtaaaataaacaaatatacatgtttcaattttcttctctatgtaccttcatctcagtctgagtcaaataaggctgtccatcaggatcgcgcgaaaggtgaactttctgtcctcttgtttctccagcatctaaccattccaaattcacttcagggattttccacatagcttccatatccaggggatcaacacagtcatcccaatacttgaagttaacagccattgtatgaattatgcagtatccttaatcaaacactagagaaacatacaaaagcaatctcaaaaccataattaaccaccttatgggaaccatcaaataaacattaaaacagatgctagaggtaaatttcatactactaatgtttgttctttcctttcttttttggttgaaaatagcaaaacatgttaagggatcatatattatcacctcttgagaatgatttaaatattagcaagacatgttagtaataccagaaattaaagaatgaaaatagcaattactaagccaattaaattataattgaaatacaattgtttatattgaagattgtatgttcttaatttcccttggtcaacaagcaatgtgaaaaatatgacattttcaaacatgaatacaatacaatttaaagtaaatgatccacaagatatttaattaccaggactagagaatgatcaatccccaaagaaatatcagaaaaaaaaaaaaaagaattagaaaaattaaaaaaaactaatcacaattcatgtcagcaaaatgaataaaaagaaatgaaaagagagagagatagattaccaaaagggatgtaatgtgagctgggaaaggaggagaagcaaaaatggttagaaaggagagagaagggtgagaggtgagggtggtggtggagcattgttatcggacctttggtaaaatcaatctcattcattcctacattttcattctttctttctttttttatttttttatatatttgaaaggcccttttatatttcattttttttacataaaatactaaaatttggcttaatattacatttatactagaaaactttacatttataacactactttttttattgttttaacttttataaattgcaaatataccctcacatctctccaacctatctctaatcctccatgacacatcaccttcaattactctcctccataatccttcaatcactccatcacatattcactactataaaaaggcttatattgagttgggtctcaaactaatttttttcgaaaactatcgctaataaatttacatgattgttgaagatcgtcgaaaaaaattaagtattcttaacgattttaaatattcatgaagcatctctgacggtttaatatagttacttaaaaattgagcgaggtttttttattgtgtattcccaacagtttaaaactgtcggctatagtatattcgacgattttaaactgtcgagaatatccaatgtatataaatacctccaaatctcatttttcatttcagattatatctctctcttgctcgtttgctctctctcctcgaccacgagccaccaccacctccctcaccttcgttctttctcactccgtccctctccgctgatctctctcctacattctctcctctgtcccctctctctcatctctgatctctctcctctgttctttccttcacgagccactgttccaccaccgttcgaaccgagctccaccactgtttcctcaccaagccgagccaccactactaccacctccagtatatatatatatttatttatatatttcatatatttttatttatttatatatttagaattttaattacattaattttttaggtattaattttagatttaggatagaaaagtttttagaaaggttaattgtttagttttagatttgaggtattatgaaaaatatttagtttagattaattgtttagttattagttttaggtaataaaagaattatttagtttagattattgttttatatattagttttaggtattagaaaaaaaatattttacattaaatatttaggtattagttctattttcatttaattttgcaaaataacgaggtccaaccaaacattgagtaagtttaggttaacttttcatacatgacattacaaaatattcaattgaaactgaaatgttaatgctttattgaatgttgaaggaaacatttcaattggatcaagaccactaattcgactaatgcaaggaatcaaaaataatacaagacgaacattattgaaattttagtacatggttacaaaaaaatgtagtatgtatttattgttttattacttatcatattaatatactagtgctcactaattcacttgtgcatgttaggtgtatgcgaaaatgtgtgaatccccaagcaatatatccgacacactacttttcatattacgaagtccttcgtgtgatgtactcaagtatcaatcgtactgtataaatagtactcaattttgcacttaagactgtgataaatctaaaaaaatacaaaatagtagtgttatgatagttgctatggctttctaaatatctagttcaaaagacaaaaaccctattgaatatgatatgtccttttacggtgtaattcaaaaaaaaaaaaaaatggaattagattacaattgttttcgaatccctatttttctttgtgattaggttaggagtaacaacggggtaaaagacgatgaatataaattcaaattagtggacttgaatcgaatatgtcacgtctgataggtttataatggtatcccaagccactcatgtgctttacatgattgatccattagatgtgcgctagtcaatttttttgacaaggcaaacaaaagattatactaaccaagagtctagtggtgatgatcttatgatcagtgaccaaatcattaaatcactccaccacctattgatgtacgttattgttggggatgatgttgtatcatcttgtgatgatgaggaaggattgtgggtgaatgaaactatcaactcatagtccatgagttatcgaacacgtattaattatcaatttgtatatttttgtataatctaatatatgatttccatatttatgtaagactattcattatggagctagcacaagacaaggattaatatgattattggggccaatctattggtgattatcatgacgcaccatccgagctgaaagaacctcataaagaaccaaaagaacctccactagcaacaacgcagtagaaaaacaccagggaagaagcgaaagagtagatcttactaaaatgaagagctaggggaagcatgtggaagttgagtataacaacttcagacaacattggagaaattgattgactattcactacctggcttaggacttgggtgcggtttaacattccaccgcgagatatcagttaacctaaggtggatgttgaacttaaagaaacatgttggaataaaatgaaggtactattaagtaccttaatttttttttcttattattaattataatttgtacttatatctaactataattgtcaatttttacagagttttctcaagttgtcggaggagtacaaaaaaaatcattttaagagctgaagatagatgaagagataggaaaacattcctaatagaaggcatacgaattcaaagatgtggctcctcaccttctcaagaagccacttaaaatttatgaagaactaattggtgagaatgattgaaaggatttgtggtatctagattgactcttgagtgggcagcaaagagtaaaagtgcctaagagaacagagaaaaaaatatttacaaccaccgcttcggacgaggtggtgtgaggaaggtggaagaagatatggagaaagagttagaccaccaactcatcgacattgataaatgaagtactgtggaagtgtaatgatcgcgtacttagaatacatgattagtaagacaattagcatattaattaactaaattatattattatatttgattattttatattgtgggtgctattatcaagaaataggtattagagttataattttttaattcttgagattttattattatttttataatttttgctcggtaatgatgaaaatgtgacggttttgctaatagagtcacataagtttggtttagaactttttgtttagcggaccggcaagtatttcatatttagaatatcgagattagactgggttgtggtatttgaccattttacccctaaaccttaatgttacttaagcttgaattaaagggtaaaattggaatattgcttaaggttagactttggattttagtggaaaatttgtagagtttatttccttaagtattaattagagtttttgtcggctaaactttctcaactgccattttacttgtatttaaccctccaagctcaaattttggcgataaaaccatccaaactactgaactggtgacaaatttaaggtgtcatttggctaagtgtcattattgaatgcttatgtatacactcttgtacacatgacacgtttatattggtacacnnnnnnnnattatttaaaaattattttcaaaattcattttgaaattataataaattataaaaataaaaagtatattataaattttgaaataatttttatattttttaaataataatattaggtttaccaatataaatgtgatacatgtacaaaagtgtacacataagtagtttatattggcattagaaaattgaaggcaccttcaatttgctaccagtagttcaccgtcaaaatttgagcttagagggttaagtacaagtagagtgatagttgagagggtttaaccgtaaaaaacctctattaattataattatttggtataaaacaaaataaaggaaataaaataagttagaagaaaaatcaagaagtcaaaactcatctcttttaagtccctctcttggcccttctgaacccaaggaaaccaaggattttcctttgaatttcagtcatcctagctggggaaaattaagggctcgtttggtacgttgtattaggtcgtattgtattgtattgtaata

SEQ ID NO: 111563 - DNA, 3063 bp, Cannabis sativa
agggtgtttttgtagtagtgacatgatattttcctcatttaattttcaggttttccacaatcaaagaaattatttaattcttaattagctagagatagagtcaactatcaaatattttctattagtctcgtgcttctaccaagttatgtattagtatagaatattgctaaaggaattatttacataaagacaagtttagtggtcatatatatatgaatttttgaaggaaaaaaaaaaatcatttttagctaggttagataaaaaaataaaaaaaaaaacacttgtacataatgatataataagtgaaagacaaaatgtacaatttacaacctatcaacggttgaaaatagcattttaaacacatgtttctaatgctcaagtaggtacgtaacataggattctttttacttactttttaaatcctttattaatttctgccaaccatattaattagcacatgtgaacagtgcattatatatgcacccatttataccgtgtacctacaaggaaattagaacaagaatattcaatacactaaaatacatatatatatatatatattactctactgcttcatcctttttctagtcgttgttttacttggtaccagagccaatagcgtccactggttcgcaaggtgactccttcgtcaacaacaacaacagaccccaagccgtcgatgctcctcctccagcacttccagcacctctgcaccagcaacttttgcacccatcaccattcgacttgacagagacaactacccctactggtggtcacaagtggtgacgaccgtgcgtgctcatgacctcgacggtttcctgtttggcacgagacagtgccctcctcagtttgtcgagatactccttggtccaaaccaagagatgtaaagataggtaaactcctcatatactctttggattagaattgaccaagctattttgagttggcttctcaactccatttcagaggctatgcttggccaagtcctgcaatgtcaattctcccatgaactatggtcgcttttggagaatctgctcaccactcagtctcgagcacgcctccttcagctgtaatttcagcttcaatcactcaagaaggggtctctgtccattcatgactacatcctcaaaatgaaagccatagcagcagcactcaactccacaggacatacatttagcgatgatgatcttatcctctatattcttggaggtctcggatccgaatatgactcggttgtcataaatctcaccctagagcagatcaactcaccctatctgaagtgcaatacctccttcaaagttaagaaatgtgaatctataaagctaacgatgccttgaacacaaacctcaccaatctgactgcaaactttgtagcacgcaacagaaagccatttgtgcctccaaactctggcagaagttccaacttccgcggacatggacgtggtagaggcagaggaaatcaaggatgtgtcatctgtcaactatgtaacaaaccaggtcatcatgtgaccaaatgctactatcgatttgatgttgccttcaatccaaacaacaacatccaaaacaatccaaacagctcttccttagccaataatccaaacaacaaccagcaagctttccttgccaactctactctgcagcctcgcccaaatgacactaattggtatgtggatagtggtgtttcgaaccacataactgacaatgcaaacaatttgcagaactccactaagtacaatggtaagacaagactcatagtgggtaatggtcaatctctccatatttctcatattggcaatacttttattaaacctttaaatagctctattcctgtcaaacttaaaaatatcttgtgtgtacccactattgctaatactcttctaagtgtttctcaactcactaaagataacaatgcttaggccaagttttatgctgactcttgtgttttaaaggacatggactcaaagaaggttcttcttcaagggaaggttagcaatggactatatcacctcacagcaccagcagccggttctcctcagttgtccataaataacagtcgtagtgtttgtcctagagtctgccaagtcctgttttcaagcttctgtcaatgaatcaagtttgtggcattttaggctaggccatccttccctcaatgcactcaaacatattttaattaatgagaaaaagtctttaccttctaccttacaattctgtcctagttgtcaacttggcaaagctcatcataaaaattatccctccaccctcaaagaatcaaaacaattgctagaacttgtccactccgacatatggggaccatctcctaatatctctcgacatggctatcgctactacattcacttcattgatgatttcagccgctatacctggatatttcccctcaaaactaaagacgaagccctgcccaccttccaaaaacaggtcaaaaaacaacttaacacaaccattaaaaccgtccaaaaatagattggggggcaaatatcgaaagtttgagccttatctcgagtccattagagtaaaattcaggcatccttgtccacacactcaccaacaaaatggaaagcccgagcataaacatcgtcatatcgtaaaaaccggcctcactcttctagctcactctagtatgtctcaacgattttggtgggaagccatccaaatagccactttcctaatcaatcatctacccacaccaattctccattacaaatgtcctttggaaaaactatttggtctcactcccaactacaagttcctcaaagccttcggcagtgcttgttatccatatcttcgtccatacaactccagcaaactcatgtttcgatccgccaagtgcgtcttcattggatatagtccaagccacaaaggttatctctgtctccactcctcaggtcatgtctccattgctagtagtgtctcgtttgacgaaaatgactttccctttgcttcaggcttcacttatccttccgcacacaaagatccaccactcacatgtgacagtcagtagtcccgtgatccataaggggaaataccgggtaagctgtgcaatccc

SEQ ID NO: 111564 - DNA, 2581 bp, Cannabis sativa
catttacttcttccttcaccgatgatgtatttgcatatactttggatttgactttggcaaccgacttaaccttcctaagttatatattttgagaactcctgatgattcatctttatttggtgagctttgatggtcgcctgttttccaaagactcgaaatagctttatgttctgtctgctcattggaacctagctctaagtgttccttgtcatgagggtttgctctccctactcatcttttttctttcaaaagaagtttttcttcaatatttcttcttaactaagaagtacaaccatttgaggagagcaccatgaagacgcttcatcaaatgcgtaggatcgaaacatttccactattttccttaattgtcatatcccacaaaatgtacatgataacttttttatcaaatttactacggatgttattcggtatgaatatatcattaaggtagaataaatattattctcaattatatgttttaattttgtattttattttaacaattatagatataattttagatcacaagctcaaaaatattatttagttcaaacatgtcactgtaaaaaaacaactccttttagtgacaactttgtaatcataacataaattttttgtgactacttttagtcacaacaaaaaaattacttatgactaaaacataatatttagacacaagttcttactaatttagttttagtcaacaaaatttataaaaatacatttagttacaacaatttgtgatttttgtgactaatacttttagctacggattttttagtcatatcataggaatggtgatttgtaattaataacaactattttacttttagccacaagttttgttgtgactaggcccggccctggcataggcgggctaggcctgtgcctaaggcccacctagcccaatggcccaaattttaaattattatatttttttttactgactttgaaaaatatcacatttacataagggctcaaaaataattttttttcttgtgacccacttttttttaggacccgccctagttgtaactaaaagtaaattatgtatattggctaaagtatataaaattgaacctattaaagcaagcgccatgcatgcacaacttgatttgatacataacatacgtacgtgtaaaacttacaaagtattattgtttttatgttattagtagcagcaaccttcttttttcctttttcaatcctagagtctttacttaattataatataagtagaccactattgaatttcgttttcatcaagcgtcaatattgttaatatagtaattaaaaaaatgagattaggtaaaattttaattaaaaaggcataatgacacgaactttttgtttttatttttatttttatttttaaagaacaaaaaggtagagttgctgaaaactagagaaggttagaatcctaatttggatttatgttttgacgtgattcacatgagtagtttttagtttacgagtcagactcaatatatagctaactaacaaatattagcctccatggtccacacaaaacaaatataaataaataaaatggaaataaaagagtctaaatcgcctgcccgaaatgacaaccaggtatattaataattctaatttattgatacaatataattattagtattaattattaaaatgttgcttcttttaatattattcttgtttttaaaacaccatatctcaacttaactaatgagaccaatttactatctgactaaaatactaaacacttgtcgtggaaagagataacaaaaccgaaagctcagaagtttaatgtgtagtcagtagtgaatataaattgtttttttggataaattttctttttgatgactgacagttccaatagttaatctattaaccaaaaattgtttccatcatcaacaacatcacatatattaaaacgtgaatgactttgttttcttttttctttgttttttttattatttattttttgacaattttttccacgataattaaaacgtggatgactattatttgttaaaatttaaatcattattacttgcaatagcatccaatgcataatattttccaccacaacagcaattctgttaattattagtattaataataaaaacctgaaagaaaatgaatttaattggatacaataacaccaatattttcaaataataaattcatgacgttaaattgcttaaattaatatccaacctctctttatatactaacatgaatgcatggttagagttatagtttttattacctaattattaatttaaaaaataattataaaaaaaattaaattttaatacaatttaattatattttttaaatataattttaatttatttataaaaaatatatcttgctaattttattaaataataaaataaataaatagtacttttaaatattttaaacaatataactaatattataaattaattgattatatattataacttctaattcaaatgtaaattaagatttatgcaagaaaaaaataattatttaattttattaatactattaaattaatttagatatttaaatttaattttttgaaaaaataattaattaattaatttaa

SEQ ID NO: 111565 - DNA, 2811 bp, Cannabis sativa
ggagaaggtgctttcgtggcgaggtttatggatttgttgtatcagtactcggcagtgtacgactcgttggaggcgagtttcccgatgcagagccgggcaaggggtttggtggagcgggttttcttggggcccagaattaccgggtcattgggtcggatctacagggctcgtggagaggagcgcagctcgtggggggagtggttgtgtgcggcagggtttaaatcattaacggtgagttccgccaatatatgccaagcgaagctgttactgggattattcaatgacgggtatagagttgaggaactggcgaggaatagactcgttttgggatggaaatcgcggcgtttgctatcggcttctctttggacctcgtctccatcatccaatttttctgattaattaaatcattttgtaaattacttttttattcttcatcatcatcatcatcatcatcataggtactctgaataattattatttgataatttttaatttggcccaatgaaagatggtttttcatcatatatttgatgacaaaacttaagtcaaaacctcaaaatgttggctaaaaaaaaaaaagaaaccaaggctagctttgttaatgttttcgtttcctaacattttgagatcttttaattgtgcttgtcatgagtgtaatgcttttagagatctgtttgtgcttttgaatgatccctgttttccaatcttgaatgtgtgttgttttttaagaaaaaagtttgcttggctactttggctaccctactttgcttatatatagcattttgatcggtagttggtggtaattaagatggtggttttccttttcctttcaatattgttccaatctctcttaacttattttatttagattattgatggtaaaacctcaattaaaaattttagtggcgaaatccccaatattagtttactgttttaagaacaacgtaggagtaccgaacatcgaaatccaaagtatataagataaggttgatgtagttttcgaacaaaatatatagaatcttgatattaaccttataaaaaaaattatgcagagtataacttttttcttctttcttttttacatgtgaataaagaaagaacatatgaaataaattacatgaaattgttttcaaacctgtctgtaaatatcatctaataactcatataaatattacatggaaagatatattataaaataaatagtagctatagtactgtctccgcagctagaggttgttggttgttagcaaatatacatctgattacgtaataataattattcataaaaatgagggaatcagggcaggcaaaggaagatccgcaagaatgtgccttaattttatttatttatttattttgatagagaatgcgccttaatttagcacccaacaaaaccttattattggatttttcgtgaaaactttaaattaaaaatatacaaaagtgacaacatgagttgatctttcagatgctttcatatacattttttttttacaaaataatgataattaaattaatggtttaagacgtcatctctattactataatatattcagcgcaacagagctcgcaaatagagacccccactacctcaatatatacaataacattttgatttttttacttttggtaagaaaaaatacacaaacttggatgcatatatacaaccttttcttaataatgagccacatgtccacatacaaacatataaaaattcataattaattggggaatattcactcgccatcaactcatcattggctctatcttttctcattatacaatatatatatagggcataactactgtacgggtggccaaattttcgctacgggtatggaaactttttggtccattgataaaaaaatagatggtgattaaggtaagcaatataatagttagcgtaaaggttagtttaggagataatttggtatatttgttaataatattttatcattatcttttaaatttactttacatttgagtataagtgattcgttaacattttttacttagctcatgtgaatagattagactgactccttctctttaattccttttaaagaaagagaaagaattaagaagaaaaaaaaaaagatttatttttcattcaatatcgttttgttactttacttcaattatgttctcaaaaacgcctgatcttgaactagagttttcttaggtcaccaatttagccttagtgagatttcgcccaatttgagttttatctataatttccaaagactcaatatttccaacaaaacacctactgggtcacttttaaacttatgaactttaatttttttctttacttgtcgaataacttgattatcaaagagttgtcggaagttatagtaaatattattagttttcaaactctgaatctctctgataatgctttagcgggaattattccgaaaataaaagactgactcgataatagaaattttcaccacatctaaccattcttgacctcattttaagtacctcttaatttgtcatattgatatgagaacaaacttaatttctcaatgatgttgtttttgatactattattattatgccttagaagaaattttgtgtgcatattgagaaaaaaaaaatattaaattatatcctacaacatagtctactatacttggagtttatcttagataatcttacttttctaatccagtcaacctcataccataaggataaaatctaaagtcgaaaagtacaaattctatatatctatattctaaagtgtgcctatataactgaattcttagtttatgaaaaattcatgggtgactttttatttatatttaa

SEQ ID NO: 111566 - DNA, 7520 bp, Cannabis sativa
taattttttaaaatgaggacatatactaacatagtcctatgatttggggccatttactatacttttccttttttttttacatggataaagccagaacaacctttagcataatcaaaggacaagagctcatcaatgccgacactccagtcattgacatatggagaaacttgttgaatatagttgataacaacgagggaatctaactgaagaataatcagttgcaacttaagacactatgccaactggagaccaaaatgaatggctaaactttcagccatctccaccgagaatctccctctctgcttatgcgtttcactagcaaggacatggccagacgagtccctaattatcaccccaacccccagcaattctcaagatgaggcactactgcatcacaattaacacacaagtaacccataagaggcgaagtccattttggaagaagcaggctaccagtagtgtcaatctgtacagagatattaccctactcttgaaaatccaccaaggccatttgtgcctaacttatccatctttccattgaataatgcaactgattcagccttttcttgtttcaacgattccaaaccaactaggatagaaggagaaagttgttaaattgtagtttggttgaggatgttgaaaaaaaagtctaacacattgttgtagcgagtagggaaaaactgctaaaagttaaagttttgctaaatcagagttgtggcacgacaaaaccacaaatattgagccaccgtctcttcactataaccacactaaaaatattgggaatctacttgcattcctatctcattaagatatacccccaaaggcagccaccctgtacacaagcgccaaaggaaattttttacttttgggagaacctcaagatgccaaacagtatgccaccattatttcattgcttgattagaagagctgcttactttgaatggagagacaaccgtcatattattctcgctcttactagttcagataccgttcttaaaatagtgccaagtgatgtcatcctccacactgagactaccagtagcaaggtcaaacaccagaaggatatcatcttgatggaaagtatctactacaccctgctcattctacgaactgtcatcaattttaaacattttatagtagtgtttggaggaatattggctggggtttgagagaaaaaatcattagccaagggagccatttgtcttcatttacacgcattgttcgacctgatttgactctccaacgaacacctttcaacaaatatttatggccctaaagaatgcttatctacataaaagagcaatgaccacttgatttagcctccagaaaagtcccattaacaaagtaacactccttaagaacccgaatcaacattgagaagggttgagagatgatcttccaacactgttttgctaacatatcttggttgaacttagagtgatcccgaaaggccattccaccagctgccttgggtttacaaagcttatcccagctacccccaatgcatttttttgtttatttgttgaggagccccataaaaattaagccatcacggagtagatatcctggattaactccttaggtagccaaaaataactcattatataaaatggtatagcttggataactgctttgagcagaacctctctgtcagcttgcgaggataaatgagccttccagccttgaagcttatttctaatcttggagagaatagattcaaagacttttttttttttgatgaccaatataagctggcatcccgagtatgacaatccactagtttcacccctaaagaagcagccaataattgcccttaagcctcattaacatttttacccacacaaagtttagacttgtcaaaattaattttttgtctcgacaaagttgaatattcatctagcaagttttaaaaatgaccccttcttcggtattggccttgagaaacacaaaactgtcatcagcgaagaattagtgagagatttatggaccataatgaccaaacctagccccatgaagcatatctgcccgtttgacttcctgaataagacaagagaaacctttggaataaataagaaagagataggggagtgagggtcgccttgccttaaccccctttggggttgaatattaccacagtatctatattaataaggacagaaaaagacactgtctgaacacatttcatgattttggagacccacctaaaattgtaacctaaacaaatcattattgcttcgaggaatgacaattctacccggtcataggcctttgacatatcgagtttgagggccattttctgccaattaccaaaccccactttttttcaaccagtggagactcgcaaagcaaagaatggaattatcttgaattaggttccctaggataaaagcactttgattatctgaaataacttcatgcaagttatctttcaatcattagcaacgactttgagataattttatagctcacgttgcataaactaatggggtgaaactccacaacaaaggtgggatgagtagctttagggataaggcataacagggcgtgatttatatagctatagtccaaaatataattgagcacatccaagcaaatttgagtaacatcctcaccagtaatgtcccaatgttggtcatagaaaagtcgggaaatccatccacaccttgagctttcaaagtatcaatttgcgtaagggctactttgatatcctctttggtaaagtcttaaaaaagcttctcattttgtatttgacttagccgaagagggataatctgttggaggaggttaatacgggccgcttgatgctaacttgtgtaaagaggctttgaaaatgatcacaaataataccttctaaatctctaaatctgtcttcgaagtttgccaacccaaattggtgtcaaaaatacctttaatctcatttttctttctacgggaaaaagcacagtgatgaaaataacatatattttgacctccatgggctaaccaggttgcatgaatcctctgtttctaaaacatttcctcttttctatgttgtatattgagagctttttcaagtgtctgcagccctacgaaggcctcaacagtggtgcaagtagaaagagagaacattcttcccttgatatcctttgttttggcctaactatcccttttctgccgcttattccagctgcccagacgatgcccgcatttatcgaacaaatgaaccaagttcgtcgaagtactaatagccaccccctgaacctaaactcttaaaattaagtctcgatattctatattatcagatcatgcttcttcgtaatggaaacgagagccccatgtagtcatttatgatcaggagggacagtgtggaagactaacaacatgggactatgatctgaataccatctgtgtagatgtttgactttggacacagtgaatttattccaccaatctgggttcccaaagacacggtccaaccgctcaaaaattagccccttctccctaccattgcaccaggtaaaagagctactctcaaagtctatttccccaaaaggacaataattagtggcatttttgaattatttcattcgatgtggagcaaaatccaccccacttttcttctccgaaggcctcaaaattttattaaattctcacacacatccaaggaccattgaagcgatcaacaagccttcgaagtataatctaagagtgtcttcattgatttgggtcatgatccccatagaatttcataaagcgtcagctgagatcggtaaacatactgataaaggcatcatatgaaagtcattaaaagactagacactagcatcaaacgatagctcttccaaagtagggcaagagccccactttttcctttagcattcacacagaaacaaccatcaaactccaacttttttcttaacacttcaaggtaagaactttgcgaacaagttttggacaaaaatagaattccaagcttgtagtcttgaacatgagccaaaagggcattaactttccaaggattttctagcccttggacattatataaaagggaattcattggggttggcgactcttcccagcaaagttcgcccatgaaaggtcatctataaaagttgaatctgatccaaaaaaaatgcattctgtgtgttgcactgcgtttagggtcgcgttgggcactaccaatccagccccctccaaactagtagttttagcagtaacacttctgctcttacccagacgctttggcgttgctttgcatcttttctctttaatatccatagttcatagagggaatcccaaagaaaaattaataggcatatcttgcaagatccctgaagatgatgactcgggcaaaattgttgccatagttcgagccttgcacatacaagaatccttggcccacaactcttctgatagtatatgctccttcccttggcactttcgagagctcccatcttaggttccactgttgttcaaagttgaattattcactgaaggaatgctcaactgttctccatgtatttccgtattgtggccatgagatgaagagccccatagggactgtaccttcttatctgtaagataattattcccagcagttattagttcatgttggtaattaatagaattagattggggcggcttggtgcctagtgggtcagttgatttgaggctagtggtggccttgttctcgcggtgagccatatggttagacgagtttgatggtctactcgtttattggaatgcttagttcctactagctctaggtccctctccctgtgaagtcgacctttaaccaagaaccatagacagagacatcctgtccatccctattggcaatcatggctcaccccgtaccgcataattgtagatcatgatcgacaaatccataattttagcatatataggaaaatttatcatattgaaattgagccaaaccttccttccaacactttgaaatgggaatcctagaaatatcttggatcgaatggagctccaaactttgaaacgaaaaatacccattcagagtaattcgatgaggattagagtcttgcacctcaaagaactcccctgccatgccaaccaactttccatattaagctttgttatggcatgaacaaggagattcaacacccgccctatcgaaaacctcatcagtacgtgatcccaactcatttaaatttccttcattcggtcaaggataaaaaagccagtgttgagtacccatggtattcgacccagaacacgttccattgtaaaactttgtttttaagaaagtgccaagaagatcgcagtcggtgaagcttcttaattttaagctccgattcttgttcccctaaattccacaggcgacacaatatgttcttgagtaaagaatgacaaaatggctttgcgtgcagagacgttcgaccaaacaaagcctcccaatttctgtatacccattttcattaacttcccaaccgtatgatgtcacgttttattcaataaatcatccatgaacgggaggatttgagagcattacttattagaaggctcttccttggagagcataggagaagaagagaaatccatggtaggagaaggagagccccacccaaactctagcacaataggcacaattatttatttatttccatagaccaaaatttctagatgatccgattggtaaaaaaaaatggtccagaaaattaataaattaatcgagtacatgttacgcggtgtactcaagtactgtcaaatttcctcactgagtgcaaaatctggttcagactcgttcgtcgctttaattattaaaagcggaatgtaaagaaaaagcatttgatcaactcctcattaaactgaagaatcactcttctgaacattacaagagaataaagatgttaagaacttaaacgacatactttttttttcgcttatttttatctcttagcgaatggacccgttaacaaaaatatacggttcgggttttgtaacttgttgcgatcataatctcgacccggaaacccacattacaaccttgtctttatatatagatatataattggaaaaacagctttgagttgagtggccaataacagttccgatattacttgtcctactttctcaataacaataatcttttctctcaattccttacaaccactcaaatttcattcagaaattttgtccccaacgcactcgtcttcctctctcccaaaaatgaacaatttcacaaaatcagtggttctattagttctcttcattgttcaattgatcataattccaggtacaaaaaatacaccaatcaattaattaaacattcttcttctacatacatatatatatgttctgtaatcataataaatacgtatatgtaaccaacatgcaggactccatgcaatctcagaactgaagccgccgcaactagaaacgacggagccaatggttcctgctggtccgactgcgtatcgattcataaacatgtcggcggcaataggagtcggcagctataggcggagattggctccgttccagctgtgcttgctctgcaagtgctgcgccggcgccacttgcgtctctatgccgtgctgctttggtatcgactgtcagctccccaacaagccctttggcgtctgtgctttcgtaccaaaatcctgtaactgcacaaattgtgctactaaaaattagattatatatattaaagcctttattatagtacgtcatgataagatagtaaaagaaatatatgaatcaagaattgaatatattaattatacggatttgtgggtagttaatttaaaagaattttattaattacgacgtgtgaaacgaacggtaattaaaaaatccaggccgaagatggaacgtgactacgattttcaaatctgctaaactacaaatttgacaaccatggcttgtcagataacactgtacaaattgtttgaagttcttgcaaaaaacaccaagagcttgtggaaccgtgttgttagaaaaagtaattgtacccaccaccacgtggacaactggcagtaatatgctaaaaatatatgtagagccatctatcttcttctctctcactttttttttttttaaaaaattataatctatcttcagatgaagatattattatttatttgtatatattgatttttatgcttttgcaatctttagttacttaatgctgttaattagttaatggcatggcatgggagtcactttcttacaaaaaaaaataaaaaagtttatggcatggtggtggagacaggacaaccctgaaatatagttagattataggataaaatatatttttggacattatttagaaaaaaaaatataagattttttaaaaataataaaaatatatataattttcaaaggaattttttttttttttttagaataatacagaagatgcaaaaaaaaaaaaaaattatatttatacgtttaaagaatttttttacatttttaaaaaggatattttcaaaaatatgggaaaaatgagtcatcttatgataaatatggcaacaaaactaaatgccacaaaatatgacattaactaagga

SEQ ID NO: 111567 - DNA, 4859 bp, Cannabis sativa
gagagagagagagagagaggcaaaaactttaaccaagtgggtggaacaaatttgggtaatggaatgaaaatacagcacaaatggcctaacctgaattagatgagatgaagtgatatacaaagggtacatgtgaaatcaatccctctcttagagaaaaatagaaaacagaagaagaaaaatatgaatgatcacacacacctttctctacctaactcttcaaaactcatgttgcaactaaatattaaagactaagcataagagaagaagaaaaaatactcaaaggttaagaaaaaaaagtgaataaatcatcgcgcttaactcgccaatacaaatgcaatcgaaaccactactacaagaagaaaattgataacaaagaagaagattgtcagctctaaatagacagtttctttttttcagttattgagtcctcactctcacctctattatgcttaaaagaatctttgctcttgttatttttccaaagctacaagctttctcttatattgtctgtagttgggaaaaggagatgcggataattgacccgccaagcgagctagcatgcttggtgacgagagcctcagttgccagctcctcactttcgaacattaccagagcctgtttcttaccgttcatctcaaagagctttgtgttgacgatgggactgtgttcctctaggtggttcacaatctcttcctcggtgacatcctgggggagagaggatagatggataatctttgttggggagcagcagtagcggtagttcttggctgcgttgcggttaaagcggttgagattagagttcatgtactcgtgggtgtcggcaccctgtgttatgtttggatgctttgagaagttgacttccaaacgctttccgaacagcattgcaccctgatattataggattacaaagccatcagtaccaaagaaaagagaaagctcctgttacacaatttttgactaaatccatggaatcgaatcataagttgtataacatatgacaattttaaggaaagcaaaccttcaagaaatgcactgccagttctgcctggaagccatcacccatctgaacgagggcatgatctggtttgttgcggagaagtttgatccttacaatgtttccgtagatggagaacaggttaaaaagcttatcctcgtctattctctgaaatggaaaccttgttatgtaagaaaaccagaaacaccaactctcgaaaatagaagtaacaaacgaatgacttacatcgggatttaggttggagacaagaactgtacacctgtcatttgtcccgcttatacctggaggcaaacctccaccaaaagcggcagcaattgcagccgcgtttgccatctaaattttaagaaaatgaaccagaggtaagttttcaattactagaaaagacagatttagacatacaacgacaattggggaaaatcccaagaccgaccatccaaatggaaatgtccaagtttccatcttagctcaataaatcatctatggagcattaatgaagcaaagaaaagaacagaaaagaaagaataagcataagctcgaggaatgttgcaccaatagtgtaacatcactactggaaaagggatttcgaggagcttgaatatacatatatttctcaaaagtgcacacataagataacctccatcttgaaacaattcaagtcctacacacaatttaaaatagccagcaaaaccaacctgcggaaatggaactgaaacaaaggaaacaaaaaaagttcatcagcaaatgacatttagagcgagtgcaaaaaacaaacaaagaacagaaaccatattaaacccaaaacaaaaacaaattcaatacctccccttgttccagaaggttgcatgccatacatgcctcctgcatcaccatacccaggctgtaacacaagaaacagaaaaggtttacagtttgcttaaactatacatagttcgatgcatgaatatggaggggagtgggacagaggagaataagaagacaatggaatatacttgtgagggtcttcctttctgttctgaaggaagattagggttcgtaaaatccctagacaaagaaaaaaagagaagttagttttagtagccgaaataaaggtcattactgcagtttaatattaagttcatgacagcaactcaccttgaacgctcattattgtaattcacttgtaactcgtcaaggctggaatataaatacaagactcgtgaattcgattacataatatcatgaaacaataatggaaacaactatcatccacaaacaaacaattgtgaattataatgaaaactataaaaggttaagaagcctacttggagaactgaatatcgagttggcaacaaccatcataaatattgcgtccctatagagtgcaaaaatattaaaacttgttttaagtaactaagaacaacagtttaaaacaatccaagttaaagaatacctgcagcgtggtcctagctgctacagcactttggcgtgattggtactgaatgagggcctgaaaacctacatagtcgcacagaagatggaaaatgtataacaaaccaataagagaaccacaaagaaattcgttagataaaagcgtggacttttcccaagtgcaattgcaacgtcacactcccacttgtgtatatataataatgtgaacctcttgaatttcagaagttgtttagaaggactacaaagcaggaaaaacaaaagtgcgtcgataaacataacttttttttttctttccaaaatgcatgcacaaatgtttgagtttaaaccaaaaaagcagagaagagaaagagatagagggagaaaactccaagaagctgaccagctgacttctgaaatgtgacaatcttctccacaaatccgtgggggaaaaacacttgatgcagcacttccaccgttataggatatagcatgtgatgaattgtaactaagaggattcggtttggctaagcatccacacagccacaaacagcagaccaacacagagaaagagggaagaagagaataaataggaagtacagaaataggaaggaagcaattaaataatatacttatgcatatataagaaaagaaaaaagaaagttatcgcgagaaacagaaagaagtttggaaaaactaggttggtgatttcacactattgcttttattgctaatcttatattgcaaacaattattattatctaaccatgttacacaacataacactataatacaacatattatatgcctacaaaacaaagtgccaacctcatctcctcgtccttgagcgttttgatccattgttgtcaattctggatgggatgagaattggacataaacatttctccccctataataaacaaagaccagctaaatacacatgataaatttcaaacatataaatataaaataaaagagagaaaaaagaagaaaagggatgttaacatcggccatgagccatcaccacacagtgttctacaacaaagtttcataccttatggctggttgaacatttgcatagtattggagcgcattgaccgcagaagcaacatcttgcatttggataagagccttttgcacatagaagattttccatagcatatcagatccaaacttaaggtaaaagctaagtaaaacacatttatagaacatttgaatgacaggaagtacctgatttttcgcccgaagcatcacaagcttagttataaccccaaatggctgaaataactgaagcaaatcattctgccacagaatatgtcgaatgcataagaaaatataaaataaaagatgacagagtacctagattaaaacaagtaacctgcaatgttaaatgaattacaaaatgtgatcctcctcctaggaaataggtaacttattttggatattttggaagtcaatacttaaaatttatgacaatatcaatcagccttcaaatcttaatctaacattctttaatacatagggaagaaaaaaaaatgattgaaaagtaaatcaagagaaggataagattaaatttatgcataattgaccacaaagaaagatagctcaaatgttcaagcctatggttttctcctgttcctcaaaaattatagaattaggccaaaacatatcaataattgtttgaaagcagaatacaaactgattaacaatgtcactattcaacttaattcccattatttctttcttatatagcttgaattcattcacaacataaattctgattaaaaacaaagagagaagaacatacttctgatatttcatgcccaacattcctgacgtggatgactttggaaggttctgccattgttaagcaagctgtaacaccaacattaactatgtttaaaacattttcacttaggattataagaaaatcagtacactttctcaattcaaacgtcatatacttacacccacacacacccaaaaaactaacaaattggttttaattgcaactgtataaattgaacataatcaaaacagttttgatgcaaagccattaagaaaaaacctcatcaaaaaacccaccaagaaacagaggacaaaaataaatcataaccaaaatttccaaagggaatttctcttccatcagaacaaaagaaaaaaaaaaacccccctttttttttaacggacactaaactaattaccaattaccatcaaataaagcatcaacaacacaaaaccctaaaaccccatttcgattttacgagaaatcaaaaacagggtaacaacccagatggagaaatgaattcccacacaagagggaaggggttaatttttgtttttgtttttttttttatttttgtaaagctaatttcttggcttccaaacagcattcatcgaaaggagaaagaagatcaataatgagagagagagagagaga

SEQ ID NO: 111568 - DNA, 5762 bp, Cannabis sativa
  modified_base (70)..(73): a, c, t, g, unknown or other
aatttttgaaggggttgtcaaatcagaagtggttgtgtgggagacagttaaattttggacagctacttgnnnntttagaaccaaacattttgaggatacgtcctttctagacttatgtagagaatggagaacatttttataagcttcctagatgctatctgtaaccaaggttttcctccgccataagtgaggcttattaataaataatgggaaggaccctagataaatgggtcttttctcttttcaaaaaaaaagcttattaacttaatttcttttctgttataatctaagtggattcaccacaaacatctaaggtctagacattctgtgtagttaaatattttgacattgatgattagaaaagaaagtaacagacttgaatattttaagcacttcaatggctactgcacatgaaactggatgcccagaataagtaaatccatgggagaagatacctggcattaagagaaacaattgtgaaacactttgaaatgaccaaatgaaaatatttatattgttaattagacccaataattaccaagcttgttgctttgggagtatattacttctgatatttcagggctcactaaaacagctgcaatgggcaaatatgcagaagaaagtgcctgaagattaatccaacattagaaagagtgagaaaaactgttaaatataggtttggaccgcgcccatcatcaagagatagagacaccacttacaagtccaaggaggttctacctcaaaactatatggtaataaggggagtagctccttagccttataaagtgataaactctctcttcttttatcgatctgggacactcacatatattgtttgggaaggctatgctttaacaaaaatatgtgtcataagttttgtaaataatatgtttgtgtgtgtataattttttttgcttgtgacctttttgtgtgtcattcagtttatacacctttacctttgccacagttacaaggtcaggtttaatgttgtatttgtcacatccaaacattgttcccagtcttccaaatccacatatcacctcatcagcaatgaaaagaatgtcatatttcttcaaaacagtttgaacctgcacatcataacacatacagatcacatgaaataaaagttgaatttgttatgctgttgtgtgaaaaaaagagaaaaaaaaacccttgagataattaaagttaccctaacactaatgaaggaaaagacacagctacttcatagaatcttttgatcaaagatgaaaaagagaaaaatgacaatatagaaatagagggcaaacattagaagaaagaaagaaagaatgacaacaactaaaagacaaggaaaagtgaaaagaacaagaacatttgaatatggtgttgcatcataaaatcacagaacatgtaaaaccatgcaaaaacaacaagaacaaccaaacatcaaaaaaagaaaaaaagaagccagctagttcttacaaaataagtctagttagcagtaacatactttttcaaaataagtcttggggggaagtatcactcctcctgctcccataacgggttcagcaatgaatgctgctatctgtataagtgaaatggtccattttttatttggtctaaaaaaaatgaaattcgcactaaataatttattcttgtatgctgagacaatatatttctactaccgtatctggtccctcattgagtatgagactctccaagttattggctagtctagtggagtactcttcctctgtctcatctataatgaagatttcattaccaaatgaagagaaatgaagatgttgttaagtttagcacacaaacaaactcacacctggaaggtgaaagcgccaataatgagggcaatcaatgtgcaatacaaatggagctggaagatcaaatttttgatgcaaagctggaagcctgtgataatgtaaccagtcagttaagatagtaaaaggcttgtttggttgtaatgtttcttcaatattatgcctacccagaaagactagctgctatcaaagtcgatccatggtacctgtcaaaatgcagaatcttaagttacttgagcttgttacaagacaaaagaaaaaacatcaattgagtatgccagtattacgatttttctcgagctatgatcttttttttattcggccttccaagtgcattattgtagtaccaaaccagcttcacctacaaagcaagaagttaagaagttattcataataattgcattataatatgctcacaagatcttgtttcatctctcagtatgttggagcagaaaattgtttccaacttcttcaaggctactaaagactaaggttgaatgcaatatcattaacacattacagggaaactaagtgtaacaaagaaaattttctatcattggctaacctgagtatcattggcatctgacccactattggtaaagaaaactttagccatttttctagctgtaaagacttctagaagctcctttgccaggtcctgtagataaaaggaaaatgtcagttccaaccctgagtctgagtcttgaggaatcttctgaaaggttctcctaacaagttcatcacttggtatgtttaatacttcttatttcagagaaagtagcacaacttttattagtatccaattaaatgaagatgctttaagaagaaatgtatatgaacatgatgaaattaagatactgcaatgtataccaaggacggtttcgtagtacgattccaaaaggagtggtaaaatggcaaagtattcatttgttcagttgcagctgccacaagtctaggttcatttcctcctacagtttttcatcattacagaagtaagagaagctaaatctagattgtagtaactttcaaatgcaaacgttttgatgaatatgtaaataaatgcatcagttttaacagtttgcatttcctttgaaaatattctccaaatgttaacatttaagagggttctaaagtgtagcaccatattgaaagatttatctcaaaaacattagaaatatgcagcaacaaattgaagatagacaaaaccataacttaaagaaacatagatttagagtacctaatactgtgcaccaaagaccagctaaagcatcaaggtattttttgccattgatgtcgtaaacataggaaccctgaaatgttacatcttcaagtaagagatatatactttaaatctcccttaggaaacctaaaaacccatataatacctcagatttttcaataaccaaaggttctgtttcagtggactgccagccagcagtaaatggtgctaacataccatgtcccttgtatctgtgattatcaagatatgcagaaatataaacacataaaaaattgaactcttcaagtttatgaacattagattcttgcatatacatgatagtgtcacttaagatacatgaattaaaaaactgatgcataccctttactttgtttaacctcagcagttgatgatgaaactctttcatttaatctgaacggcaaaggtttccggcgaagatgtctctgcaggtaagacaagcatgtttcaaatgcaagtcaaaggtgaaatattctagggaaaaaaaaaaatcaaaatgggtggttgattttccactgctttggagagattaataaattggttgattttattggcacttttttctttggttatataaatcaattcactttgttaggcaaaaacatctcagtttagtcatttaaatttctagaaaagccatatatactttctaaagattaatatgaaaggaactcaaaaaatatatacatacatataattattatttttaaatgatgaagggtagtgggaattatgagtacctgggctctgaacaaaatggattgaaataggtggttgatagtcattttttttcttttcaccgtaagcagagtgttgaagatgaatagatgatgagtgaggctttattatgtttgtataagttatgagttacagaagtagtgcggatgaaaaagacccgcatttcagtccaagtacattcaggaataataccaacatagaatgaatctatttaattcttaaatgttggggtcttatcttatttgtctctctctctatatacatatataaatcatttggatataataaattaatttaatgttaagtgaacgaacagtcactaattatgtcattggattatgccaattacatctgcctagaaagccaaaaacaagatcacttaaggccaaatacaaaatgagctacaagacaatattataaagtataaattattgtcatatatttacaaggtgagctgtatatatataatgtaaaacattgcattattaagtgtaaattattattattaagtgtaaattagtagcaagtgttaaatttaaattctaatatatagatttgatgttaatgctcttgggcaagttcggtcggtgttcacgataattatttggcattttgattttttttttttttaaggattggacaaaatcatccaaattagtctcctagtcttttggccacaaagattggattatgctaaataattgtttatctagtgtttgatcatgctcgaagattggataatttaatctaattaatcttattcaagagtgtgagataaataatttttcacattattactttttaaatttttaattctgtaaaatatattttaaatatgaaaaataaattaaatggatgcgttatttataattttttttattaaaattagtaaaaatatatattttttttagaagaaagagagaaagagatgaagaaaaatagaaaaattaaggttttttttacttatatgacattattagcgtcagagttcgtcgttaatgctgccgctaataatattacgatattttttcaattttttagaagagctcgctgctaatgtctgtcgctaataaaaattcaaatcaaatgagagagaattttttcacctaattattaacggcagacaatagtaacaggcccgccactaataacctttcttattatttttttaaatcaagtaatattagcggtggaccatgtttcccgccactaacactccaattattagtggcggaattggcctgtcactaataaatctgcaactattaacttttttcttgcaataacctttcttattgttttttttaaaaaaaaaaaaaatcaaccaacattaacggtggattatgttttttgtcgctactgccccatcattagtgacaaaattagcccgctgctaataaatttgcaactattaattatttttcttgtagtgggggttgacttagttctagattgtagattctgaaaactatcataatgctcccattcaaaaaaaaaatattgtataaaaattctatttagtcacttaggtcggcttgtatgaaataacttgtaatattttgagaatacttttacgagatcctagacatgactttaatattttattttaaagtaatgtatgtttttattacaagttatctgttcaattaagtaaaatttattttaaatcacttcgcttatggaccccaattaacaagattagcatattttaattttgacacgtagcgtttctctagacgttataatatttatttattttaaatatattttatttttgaactctcttccacatgtcgtgatcatatttgttgctcgaaatgtgtgcataataactttttataatttttttttttgcacataaataataaggtagcctattaatatatatatatatatatatatatatgggacacttcttaatgggtaatactcattgatgggaactaaaa

SEQ ID NO: 111569 - DNA, 753 bp, Cannabis sativa
gatcctttcattgcatatattatagatatgattacagtttattttccgcatttcatatcattatatatgctatattacatacactatatatatagtctaacacttaccagcctgatttcgaaaacccggctaaaccaggagttgctatgccggttgttggtggtgaagacaagtataaaacgacatcgcttctttctgctgattgtaattcttgcattttctctccggtcgaagtttttgagccaaaggagtcagtggagatggagtatcttgattgtagtggagcctcagggagtggaaatggaatagtttgcagaaaatgataaggttatttatatcatcttagatgattaagtgaaaatgaaagaataaattcatacttgtgttttaagcatatagattttaagtgtagctagcatccccaattagctaaatttgtgatgcaataatatattttattattaaaaaaaaatcttaaattgagtcaatcgtttaagaatttattgtgttacttgcaattttcgggaattagtgttggagaattagattatgtatgctgataatcaaagcattcgaacaaaagattatatttgatgtcattggagcacacctctcacgagttgaaatggatttcatcatataactaactcaaatatcaaaaacaaatgctaacaacacttataaagtggcgaaaatatagtgctaatgttgaatatttataaaagtgttataaatattaataattatgtggat

SEQ ID NO: 111570 - DNA, 3528 bp, Cannabis sativa
ttacattgaaacagagttttatttagggcataaaacccaacaaagtgggtttttgaattattggagtattttggggaatttggttttgagaaaaatgccctaggttttgagatttctcaatggtttagaaatggtcattttgatttaactaagttaatttttttaaggttacaagcttttagtagctaacagaaaataattgaagttagaagtcaagcctccattctccatctgattctcagctaggagtagattcaaactagttatgaagagttgggtgtgattcatgattcttatcttctcataatttatgggaagagattgagttttgttttgaattttgtataaccgctattgtgagtttaaagaaaggttagaatgtgtttctgggattagttaaaaggttttgagggttccgaagcttagttaatagctgaaagaatggtagaaccaagcatgagttcttggaactcaaaacttggtcattaatgacactttttttatttttgatttggttttggtttttctaacttgggttatgttctattggtagtataaaactgttcaatggagtttgagctaattttgttaggtttggtggctttcaaagacaagagaaacttggacttcattttctgcaaaaaaaatggcagaatacttttggaaaactgatcaactgtgttttctgggaaagaacattcatgaaatgttctgccatttcgggtgttgttcgggacctgcactttttaagttttcttgatatttatagtatttcaatgctgtctatcaaatagggaaacttttggttacgaatttaagacctaaaatggtataggtcatgtggtttaataatttactattgttgtgatttagggccaagatcgttaggcttttctccatctgagttgcgtgacatgcatgaatctggaattaaaggtcaagaaaagtactttggtactgcatagcattttacgttagaatgcaattattatcgcttgtgaatctattgttatccaaactaagatacaatgataaccttcatatggcaaaaaaggttatcttattaagcaatgatgaaaatgttgtcttattaggcaatgatacaaaaaaggttgtcttatcacgcaatgatgaaaagtcatgactacaaactgaaattgttgttaggtttctcatatcaaggatattggttgccacgtatcaaaattgtcttattagacaaagatgatgacattgggatacaaaaaaataggtatcaggattgtcttattagacaatgatgatgatgtatggatatagatgataggtatcagggttgtcttattagacaatgaggatgatgtttggatacagatgttagatatcaaggctgtcttattagataaagacaaagatatttggatactggttataggtatcagagttgtcttattagaaaacaaaagagagtttggatgcccggttaggcatcaaggtcgttttgttagataacaatgaaaaatggtttctttttttagtattgggtatggattgtaatatttaacacgtaattttatattgctaaatatggttacattgatgtttatttatgactaggcatttatattaatttggattgaattatatggacaacgtatgagtatttaaattttctttttgagtttaattatggatacctgagtgatgacttataatgttgtatcactgcttttcttgctgagtctttgtgactcgtgggtgctatgtgatcgatgtataaagtagaaatgtttggacaatcataagtcagggaatgtctccagctaatgtacacatcatcttatccgacaagtggtgctgagttgctaggaattgtattatttcaattattctgaacttaattctttattttgtaacattactataatggcttgccttgtaatgttttaaaaaaggaatcgacaattgtaaaatttattatgccatgattttataattcggattggtttgtaaaattttattaacactcgttttaatctcaactgctagtttattttcataaactagtttataaaaggacacacatgtcatccctaagggttagggcattacatgtctacactcacagataagagaatggaaaacattcgttccagtggccttttttaaaatgccaccatcttttgtgcaggtactagatagttggctaatgatcctattcccgacctttgtgcttggtcacaaccacatgtcgagtaggggccatacttccccatcatccttatattaggtgcgtcacttattattacaacatatgactgacacatattagtctgaagggattctagtaattatctgtgttgtacgtattgtacacacaacaaggctggttgaagccttcgaatccaactagcgctgttgcaatgaaaggtatttttatttctccttccttaactacaatttgctggattatacatcagagatcataaatattgtggtgtacttgaggactatttatcactaaggatgtatcagccaaacacctctccttctatcatgttggactattcatctgtcctacctagaccttgaggcttagaaaaagggtgcgccagatactcaaaatcccaacaaaggaagggaacatatcaagcctagctactgaggaaaacttttgtaagtatgacttgtacccatctaactccaattccacaaatgggcatgaacttaccaagcccaaagagaaggtgccatctgcctactaccgatatagataggaaaatgcagcccacgaggtcctcctcatcgtagagatccctttgtccatccaactcatattagtgtcaaggataacatagaaaagttgatgcgctccccttcacttgaagttgaaggcaagggtaaacttgttgttaaagataactttagggaagtatctaatgacgatgaaccataaatcattctatatgaggatggataccaagtagtcaagggtgtacatagtatgaatgtcatcttgcaaatattttatttttctttttatacttgtatatttttgaatatttgtttctaaatttttatttccctttgaagttatgtattttttccatgtacaaggagattaacaagaggaagagtgacgcagtgcctcaagtgtccccaccaaaggtgccatgaggtgactctttgactcagagagaacaaatgactttgctttcgtcagttgtctcatccaaaactaatgagaaggcatctctaagccctacgactccctctgcctccagacttaggttgcatagaaagttgtagagaagactgttctgctgaaaccaacaaaacacgccactgctggggttaccatccaataaccttcaaactctcatcctcccattgtccaaatgacctaactagaaagacgagtactaccctggtcaccataactgtaatgaccgctttagtaatttggattagtaaaggcaattagcactaatttatattattttattattatttatgaatttatttaattgtggaccccaatatttagaa

SEQ ID NO: 111571 - DNA, 10049 bp, Cannabis sativa
  modified_base (10017)..(10020): a, c, t, g, unknown or other
tttttttttttttaaattaaaattgtgctcatgtaatagttgtaaagctaagtgtgtgttcttgtaaaatctgtgtatgagactaaaagtacatttttgacaggtgcatgggcctggggctgatattgacaccctttgtgttgggccatcctatgtgaatcgagaggtgattacatttagaccatctccaatgcatgatgtaaaaaatgtgctgagtttggcacaaaaactgagtaaatattatatttagcacaatttattgtaactgtgctccaatgcacaatagcaaaataagatgcaaattgacataaaatataattatgtttaataaattaaatatttttgttaaaaaaataatgacaatattgtaattaaaaatgtgtattaaagtcactcattaatgattaatcgatattgtaaataaaagaaatgcatttattgatgtgccaactttggcccatgttttagcatctgccaaatttggcaagtacaccattagagatgcattttttcttatatataaaaatgctaaaatatagcattacattacaaatatggcactctgagatgctcttatctccaatttgtgtttttttttaatagattcactctttcctatttatagctgatgagtgtttgtacttttacaggaggatttttttattgttttgcacaatatacttgctgaaatggaagaagttgcagaacttcaaccagttcctgatgcacatgttcctgtaatgaagttcaagttccaaggaatttcaattgatcttctgtatgcaagtatatctcttttggttgttccaaaagtaagttagtatattgttttgcgtacttattcattttattccatttttatacgcgctaattgttttatgcaattttttaagcccgtattaattctatgttgctgaatgcacatttcttctaattccatttgttcctttgggctctgatttttcaaaattgttgtagtggctatttagcaatataatgatgtatacttattcctgcattgggtaagacaccattttgactgcaaagctaactttgtgacaggatctggacatctctcatggatctgtgctatttgaagtggacgagcaaactgttcgaagtcttaatgggtgtagggtagcagatcaaattcttaaacttgtcccaaatatagaggtgggcctatcttaaatttcatcactgcttacataatttgtattttataataccaatttaacatttttttttcaatttatttatgtagcattttcgtacaactctcagatgtttaaaattttgggccaaaaggcgtggtgtttattcaaatgtaagagttgaacatctgctcttgattactgacttgttgcttttattactattccatcattaccatgtgtatctgattaacatttgcatgttcttcttgcgtataggttactggattccttggtggtgtcaactgggctcttttagttgctcgagtatgtcagctttatcccaatgcaattcctagtatgctggtttctaagtttttcagggtttatacacaatggagatggccaaatcctgtaatgctctgttccattgaggagaatgaacttgggttccctgtttgggatcctcgtaaacaccctcgagatcgatttcatcttatgcccataataactcctgcgtacccatgcatgaattctagttacaatgtctcagcaagtactctgcgagttatgacagagcagtttcaatgtggtaacagaatttgtgaggtgagagcataatttgcattttctctaattttactggttgaagtctattagagctttcttttctgttggttggcaggatattgagttgaacaaggtccagtggagtgctctgtttgaaccttatctatttttcgaggcatacaaaaactatttgcaggtggatattcttgcagcggatgctgatgatttgcttgcatggaggggctgggtagagtctcggcttagacagcttacacttaaggtaaaactcagatttttattggtgattttataaaaggattatgcatctactgcattatgtatgcattaatggtgctcagctcttttgatattcacttgttgcgagatgtaaatgtgggtttttttctccttgtttatgagcagatagagcgggatacaaatgggatgttgcaatgccatcctcatccacatgagtatctagacacatcaaggtcatctgcacattgttctttcttcatgggcttgcagaggaaagagggagtgaagggtcaagaaggtcagcagtttgacatccgcgaaacagttgatgaatttaggcaagacgtgaacatgtatgtgttctggaaacctgggatggatatgtttgtttcacacgttcgtagaaagcagctccctgcctttgtgtttcctgatgggtacaaacggtctcgattgtcaagacatataagccctcaggccaaaaagtttagcgaagatgctgcagggtgccagccatcgtctgctgaaaagaagaggaaacatgattctgatgcagtggttccaaagtcaagcaaacaaaataagcaagactctgctagcccacaaaggccatcttctgtgtcccctaatagtaatttgtctggtggtgttaaattggagctcctaggaactgattattccaactgtggttctgagtttaggtcttctgatggaatcttggagagtgagaataatatatcagggaagaatgtggagatcttcgaaaatatcaccccagaactcgtttctagtcatttaactttacagcccaaagaaaccagtggagatgctgcagtatcccagccatcctctgctgaaaataagaggaataatgattctgaagcagtgaatgtgaagtcaatcaaacaacagaagcaacactcggttagtccacagcaaccagcttctgtgtctcctaaaagtaataggactggtagtgttagattagagtgcctggaaactggtgatgtaaattgcagttctgagtttgggtgttctggtggactgttggagagtgaagagcttatgcctagcaataatgtagagatggctcaatatgccaggaaggaacttgttataagacacgttagtcaacaggctaaagaatctagagaagatgctgcaggatgccggctttcttcctctgctacaagaaaatgtcaaagtgattccgaagcgatggatgtgaagcctgtcacagcacagaagcaagcctctacaagttcacaacaatcagcttctgaatctccggaaagtaataggtctgatggtgttaggctagagtgccttaggaatggtggtgaaaagtgcacatctgaggatacaattgggagtcgtgtagagatggctcagaaatctatgcaagaatccattttgcctgggcctggggatgagttcaggccagttgattttagtgagtctggtgtctcatgtgttgtactttgttcagaattcaaggatacgcagcagattggacataatggtaatggagacagagttgagaatttgacattagttgacatggaaaatgtggagagtacatcttccgggaggcggctgaattgggcagaaggtgctgttgatgttgacccagagctagtcaagccatgtaatcaaacatcaatcatagaaaatgctgaacaggcatttaaaccaagctctaatgttaagatcctcaattgcgaggtgagtttctccatttgaagactttggattaggaattgttgaggatggctgtgagatactggaagttctagagatagtgagtcaggggtctttgcagggtgatgtatgtgctggtgcaggttcggatagcttcactgccgggagtgggttgcttcagactgggttataagaagaatttgaggtcttgcttgaacttaaaaacttatttattcagctacttatgtgggttgccttttgctttgctttcctaatcatgtggtagctggtatggttaacccatagctcccattatgattttgcttcgctatagtttggtattttccttctaggtaatcattatatataatatgtatatatatgtatacattatatttggctctatattcttaatgtccagtcttctattctaaatatgttcgtcatatctctttctctctctatctctcacacactcaaacatgtgtatatatatataatatctcttttagcctagagtacctcctaactggtgaatatgtggtggcaggtcgcaccacagtaattgctattgttcccagtaactgtgacattgtcatagagcttagcctctgtgttgtgtttatggatcagatccatgattctttgattttgttctttcaaatttgttaattgtgtaataatttattttgaacctaattaggctttgatctcgttctcttgtttcatatagctaaatgctgcacctggaagtatggtatgctctaaagagggagtgaggtcagactttatagaaaacagtgacaaggcatgtctttgaaacctgatctttttaatacgaaccattatgtctttatactggcctggtttttgtgtggctcttgtgtaccaggttatgtctgagatctgcattataacatcttacaagaaagaatggagtccctcatatgaagaaagccagcaaaaactcggtaagtgtgtggttaaatgctggcttttgtggctctcattatggttttccaggtgcatatgtgcgtggtagcattgggggtggaacaggactaagttggccatgtgaagacctgatgcatatctgagtgatttagcttatggttttgtggatttgaagaggaatttgcggagctgttgaagtgcaagcaccgaagaagctttgggcaaatgctggtgcaaagacttctctgctttgtttgatcagttttttcatacttcatgcacacataaagctcaatcattgtgcgattttatgatgtttcatctaaaatttgcggcaagttagatgttgaaagcacaatgtgcttttaccttctcaccgattgcgatgacttgtcaacaattcgttttttaacagcttatctttgttctctatttctcttgatcaaatgtgataattattctgcaagtaattagttatgctggccagtattggtataacattactgctgctgttgtcaatttttcttttacctaattactgtaattttaaaatagaacattgatgaaattgctatgaagtgattccagtctacgcttacttgatctacttatcctggatacgctatttttcattttcatcctttttcgggggcaagagccaagagctaagctcattcttattattaagggaaaaacacgtattcctctgccgaaaactctcgaagtcaaaccccagtggccaactctacacgacatgctagacaaagaggaagaggagatgctggccacacaatggcttgagggtggtactgttcaagacgaactcagctcagcccctctcccaaattgtcaatattttgagtttgtcagtatatgcacttctttagaaacttctataactagtgtggacatgggtttttcagcgtaaaagttaaatgaagtttcgtttttgtttgctaaattagaaaaatcaaataattcatatgcaaataacgaaagtgacaaaatatattataagattttatgcaaaattattatgtagtatactaaatggtatgataattatgtaaaagtctattgatattgctcaatggtgttttctctcttttgaaattcctctattttgccattgccaagatctaccatttttttttctgacaagagctcacggacttttctatagagttgggtgtgacgtgatttttccgtgtggatgtggttatttttggttggttctcttctcttttgccgattttctctaggcttctcgtgtgttgacaatcttgtgctttgatgttcttggttgagccatatcgacttcagtgtttgatgtccatctgattctttagattctcttcctcgatggttttggtggggaaaaattgtggcaaagggctacgacttgatatggatgtggatgtgcattctgtaggtctctttggtgatgactttgtctccttatgtgatgcaagagcttgtggtgatgcccagtttcatgatggattttagtgttgggttgttgggtctcaattggggttgatcaactggtcgtgggatggtttattagtttttattttcatgttttatgtttcgggaatgtctttatccttctctttgtctatcagaatgtggattcccatatctctattagccatgtattctatactcaattcatttgtgattttagtgttatgacatagttggtcgttttgtcatttcccttatttactatgtgaataatggagttgttattttccgattcaatttggaagattatatatccattggtgggtggactttattagatgttcatttgttttgaaaccttaatataccttatacttctttgtgcttgattgttggtggttcattggatttttagttgaggttgcaattaggttttttttttcttttcgttgttgttatctgcatttccgaatgaaggacacatggcaaaaggtggaaggtgacgatctaagtaattactaaagtctccttaattagagaaagtcgcggaaagactaaacaaaccggggagaggtccaaatttgggaaaggcccataaatttaccacaaggcaaattactgtctaggatttggaagccttgtcatccctttgggactcgaagaagaccatatcaactaagctagggaagcacttgggagtcatacaaatggtctaaagcggatgccaattgcacagggaaaaactagaggcctgtcatgaagctagagccgaatgcctcttgtgaagattataattttatgttacagtatcagatcttgtcccctgtgttagagcatggtagtgcgcgtacctcttttgaatatgcctttctttttgacggctcctcttagctttttgtctaccaggtgcaacctccgcccaacacatgctctagaccaacaaaggtcccagctgtacagaccattcaccccacgagagagagccttcttagggcccaatagtcagtatttctatgtattttgaccccagtagtgggtgggctttttgcataaaatcttaggcaagtaatgggtatgcccatactcgaactcgaactttagtctttataagtttctctgtgtcttcacaaaggagcgatcgaaaaattacatagctaagctctgctaaaatactctctaagctttcatcttctttaagagaaacttagaaaatcagagttagagtttcattgtaaacaccacttgtaatacatttaaacacttataaggccaatatattgactcatggattagggataattaatgcctaaaccacgtaaaatctttcgtctcatttattaaacagttattcaattcctaaagctttcatttaattagtttttgaaaatctcactaaatattttagtgttttcatcgagagctgaggaaagatttgagccactatatttctgcacccatggtggctacacaaaaaatggtgatagagaaaactcctcaggcaaacgccgacgttgtcatggatgatgtaaaccctcccattccagagcacacccagccgagccatgcgaggggaggggatacgtctgaagctaacaacaaatggaacgacccaactcgtcatcgcaagtaagttgaagacaaagaccctgaagccaaggatgacaaggaagaagaagatggatacgaccaagacccatatctggttcgagtatccaatgaactgcttgagactcaacggaagttagctcgtcaaaaagagtgctcttaaaagatggaaaagataatgacccgcctccaggtgaagttcaaaaacctagaagaagatttcgaagaagatgcttcagtggaactagttgactgagacaataaaatgaacctcgccaacgccaaaacctcagctcctgcaaaggacaaggggaaggagaaagtgggtgagacccaaaacaaaacaactcccttgcctcctcgaaaaggcgtgaatccaaccaaccagccctcgcggacgcagaaggccaccgatgccttcgggattggatgaccttttgatccaaaaggcaaggttacaccaaaagggcttggtgcgaaagtacccaagcctaagggaaggaaaaatctccctagtgatttcgttaatcaagatagtgggatagaagaacaattctccaatgacagttggtccactatggctaagggagaaaaggtgaggctacgtggaagcaacttaaggaatcacttaaacgataaggctcttggatgcaaccttccaaatagtgacacgaataggctagaggaacaaattgatgctttgactaagctcgtcaagaagcaaagtggggccctgaagatgaagacatgaagtcgtgtgtcaggtggatcacggaagcctcactacctaaaatttcaaaaagccataaatagagttgtatgatggccgtacgaatcctaggacccatctttcaaactacaacaagatgatgcaagtagcaagagtgagtgatgatgccaagtacctttgtttctcattaacgctaaccaagtctatggaagactggtggaagaggctaactcttgaattaatccatagctcgaagaagttacaggcttccttccggaaacaatttatagctgcaagagactgtggtatggaagtcggatcgctcaccaatatcaaatagtagccaggtgaaagcctgaagacctttattcaaaggatgatggaggtagtagaaaagaccaaggttagcgatgaaatgaaacttgtagcccttcaatctagacttacagttggctccttgttatggggagagatgtaaagaaaaaaagctaagaccctatctgagttcatgtccaaggcacaatgtatcatcaatttagaagattcttatcagtaagattttggagtccctccagctccaactcctttcgcgtctacatcgagtttcaccctgcaagtcccaattttagcaatttcacttcccagaacccaatattcttaggttgtctatggacattctgctcccgagcacactcctacgcaaacctatttttctgggtatggagtggcacaaaccggatgtagtatccctctcagacagtcaaagcaacaaacataatggaacagaacgtaagccattccaggaacaagaggggttgaaagaactaaaattgaagtgaaactttgaaaaaaccaaggaaagagtacgtattggaattttatgccctaaataaaatctaattttgttgttatcttatttgctttcaataaaaatcagaaatcatatcacgactcaatcataagctttgttcagatgttttacacatgattatagatttaatatataagcattattaaatcctaaatatatagttattcacaattattgtgatgtatcacaatagaaaataattgtgattatatgcttcaaattatttagtcccacgatttatcagtgcactggatttacactcacatgataattagtgatgggatttacttacacttggataagtgaaatgtcttttccaagacattagtaaagtaaactagcatcggatgtattagctatacatcggactagaccaatattcacagcagaaaagctattgtaaacttactgtagtatcttttctaagtaaatatctaaaagttgatcttagatcaattatcccaatcttgagatgattagattctagcttaactgtattattcttattctttgatttgttcgatcgaagcctaccaatagtttgggtcaatacttacatcttgggaacagggtagtacaattgagtgtgagcgctagtcatatatatgaaatctatatattctataagtacatcgaagtgaaacattagtttctttagagcttggctaaacgagtttaaatgattgaggtctcatttcagtaattannnnagtttcctgaaatatcatttacaagtagc

SEQ ID NO: 111572 - DNA, 4108 bp, Cannabis sativa
agaaaaaagaaacagatgcaaggcaatgggccaagacaatgaaggtcaactccaattaataacaaaataatggccagaatcaaacaaatggggaaagaaaatacaaatggcaaagaacatatcaaacaaaaaacacatgtcacatgtacatctggaactgccattcccgcataccatatcaaaaactccaaaactgccaacagcgtaatcgcatacctgcaacacttgatgagtcttctaccatgcgtccaccaccaagtgcaccaccagagacatgtaaccgtgcattaacaaaaacctaggatcacaaaatataaaagggattcaacattctatggcaattttgtatgaaacaataacataaaaacaacataaatgcaccaatagaaccaaaagacaaaaaacccactgctgcatgttgatatctcggagacggtgaaacacccggagcaatagcccattcccaacggccatccctatgtttagcaagcccatatgcacttgccagtggctgcacaaagaccaaaaaactattatacatgacttcactaaatctttgagcttaaggagactgaacaacttctcaggactggacaagatacatggcttaaggaaaggcaaatttgcaaaccgaatataaagatttttatgatggagagaaaataattcaaagttatcatgtccttgctgtcaaagtataacatacttgtacaaatattatgaaagcccctgttgttcctaaactgttcaaagggtatacaaatgtttgactccgatacagggacaaactatctaaattaaaaagttttttatatattaaaataggggggaggggggagaaagcataatttgaaattcatgaacaactttctctttttttcaaatccataagaaacaaaacaacttatcattaatgcatttttatttggaaaggaccggctagaataacttccatgtcttcaaaagatacaagtaaatgaaggtcactagattgaaatgtacagctcaacaaagtttagcatatatgattgcatttgactcccaggacaatcagataaatatcccacattctatacttgaaagcgagacttaaataacaataagatataccaatggtaaaaaattcctaaaatcatcatgtgcaaccactaaatgcaatagaacattttcataagaaaatgcaattaaattttacataaaagcaaataaaaaaaattatgccaataaataatttagctcaccacactgttagcatctctccctccgcaaagaagaagaaggccatctgagcgtgcacttgcagttgcatacctagtcaggttgaaaaaacaaagaaatgaccgtcaaatcagtgaaatacaatgttataaaaatgaataaaaaaactaaaaggaacccatataaacagggttctcttgtaagtgaaacttttcgcatatcaaagcatacatgatactgatgctcaggaaaagaaaaattcaatagagttctatctgtacagttaaaattttaacatctataaaataattttcaatctgattcaatattatttcctattgactattataactacaacaaaaatttacaatgtgcaacacaagaagtaacaaatttatccagctgcaagtataactaaaacaaaccaaaaaaaatattgccaaggaactctttgaatttctttgttctaccaaatcaaaattcaaaactctatactaacaatttttcatgttatatcagatagcatttgtattggtcctctcaatggatcctatgattattggaaggcaaagctctagcacattgctaagaataatcgaacctgcaatctcgtgagagagacaaagtatgaatccattatgtaaaattatacatcatcccatttcttttgtttcctttctcctgatacttatccctccagctgatacacactttaggaggcaggaaactctaacaactttctaggtaggtccccatagtgaatacaacccagacctcatggtagcaaatcatgcgcctaaccactagatctcatccatgtcttaacactcatttatttctggttttcttttcggcactgtaacaacctattcttgcttggaatcatagaaacttaatagtgacaaaagcaacgccagattcctttactcgtagatgctccgtgaatatgaaggacaacattacagcaattttcaagcaagcaacaatgtctaaaccaactgaatagagattctaccagcaaaaataattgacacattttatatattgataaaccaacattttccacagcaatataatattaacattcatagacctgccacctgacttgacattttaggttacgtcaaaataaattgagaaactaaatcattaaagcaccccaagagtttcacagtttgacagaggaatacttgcataacagcactcaatcaacaagggtagcacatcaatttaagaaatatttagcatcaagttcacacaaattgttataattaagagtgagagaatgaattacatgcacggtggaggaccatctccctcaggttccaatttccgccattcataaggctttgcagctgtgtctagagcccaaacatcagctaaaggacgtttccctggaaagcacattcagttacccttttcagaattattttatttttagcatttagtaattattcctctcatttggataataaaaaatataaggatagacctcaagtgctcaccatcatttccaccaattgccataagatatctctgccccactaaagccatcacgtgaccataacgtggcccaggtcctggaccttgaacaacaactctacaagaacaatagctcaagttcataaaacatataaaagaagtaagagcaaacccaaaaccatctaacaactcaaacattcgcaattccttacctgtgccatctaggtctttgttgtgtgagatcaagaacatgaagatcttcagcagataaaccagctggaccaattccaccctatacaaacatgaagactccagtgaggaaataaataacaaattacaatcatacactggcccggaaatatgatttgaaagcagagacataaaagagcacgtaatataccaacctgaataacaaccatagttccaacagcagttgctacatgcgctgcccttggtgtgggcggttcgccaaaaggagtgatcctacagcaaagtgactaaattttaagtgacaaattgaaaatgtgatagagagggaaaaatggacacaaaagcagagaagggtacaacaataagcagaactttttaatttcaggcctacctagaccacttatttgttaacacatcataacaatggacatcagcagtggcacctgccaatcctgaaattcaagcaaaatcataaaggtgatcagagtttaatacaattacaaaaaaatataattgctccgtaaagctcaaaagatattcccttttttaaaagataagtactaaaattttatcaactttgggtaacaggtgagctacgagcaacttccaatgaagtaaaaacatgaaagcactagtttttatgtttactcaaaagatactataggcttgacatctacaaggttataggcatgattgaaaatgatgtgaataataaaacggcagcacaagaggaggctcacagtttctataaaattagcttcatgtcttaaaaagaaaaaaaaaaaaaaaagctccatgtcttcaaaatcaatgacaatgattgttattctccactttaataaaaacaaaaaatttcactgtgactaactaaaactaacaaaaataagtctttaaagagtagaccaagaacaatcaggcacgactattatgagtactgacaacacaattacaaataccacctaacagttagaaacaagagaacaacaaagcttagcttcctttcatcagaaaggacaaaatattgaactccaagcgccaaataaaaactcttgctaaacaaaattaactaaatatgtagctcataatcacaacgaattcattgtcacccattataaataggggcttttttattttgatatttcaaaacagttttttttgcatttttacaaaattccacatagaaacccctattgcaact

SEQ ID NO: 111573 - DNA, 2588 bp, Cannabis sativa
tttttttttttttttgggaaaggggatcccctctatcttttaatatccccttctaaaaattttgtgtacaaaactaaaggtacaatattaaatcatttatcctatttattattgataaaatcaactgaatctaactaatattcctgagcaaagcatctaaaatatgatacccaacaaattttatttcttttgttaattattcaaccaaatctaatcatttgttaatttgtacgtattaacctttcattcccttacatgatttatgaccaaaaatataaccatttataattaatgtaataaaaactcataccatttttgcattacaaacaaacaagaaaaaaaaaaaaaaaaactatccataaaattatatatattttttcttttatcttattatttaggaatcttgatgcctaagacattataaatatgaaaattttattgggagccaaataatatgaataaactaaactgaaagtctcatgatataaatttatataaaacgaaacaacaataatggcaatctcaatatgagattgaggatatatttgataataataataacattacacataaaatattaataaacaaataaacattgattaaataactaagactactacttaataagaacattattggtatgaaaaaactgatcatctttggcaaatgatgatgatgatgagtacaagtgtggatcagttcttggagaaggtaatgagctttgatcagtgccaagaggaaagtcagagatggcggcgagaatccgattaatactcgaagatcgagccggtttgaagctaagagatctcatcttgttggagaagacatttgaagaacttgaaagaatcacataaaccaatccttgcactaataaaaaaacacccaccttcaatgcaatctcacctaaattagtactactttctattatagacaccattttcttgattattacttgccaaaaaaggaaacttttcgggaataagaagaggaagagattgtgatttttgtgatgagaggagatttaatagtgatataaatatatttatagggaagaaaagagaaaaggaaagagagatgcacatgcagtgcatgaagttggttttgttataataaacaagcaattgtttgactacacgctatttaactaatcataaaagagaatgactctacttttctatattatataaagtatttaattatacatatataataatgttatggtatgtgtttaattaatattaattaagcttaatgtgcacatttttgtttccttaatggaagcatataactccaaatgtaatactaatttcaatgtttgatatatatatgacccatatggcaaaataattttgtttaaaaaatatataacattattgacacaacttgagattgaaatatacaagaatgttgagtttttattttaatgaaaaattcattaaacaactaagttaattatataaataaaacatatatgatcttgtaataatgccctttaatttcatctctaaaacaggttcagcacttttgataaaaaaaaaaaaagaagtaatagtaacataaataaattgttttaacataacaagaaagcaaacttgtgaagagagagaggggtttttttttttttttgggactaggaatgtatatggtagatgacttggagacactatcttttttattagttgtcaatgcttggagaaaaagtaaaagaaaatgtataagaaagaagattttctttttctttttttaaggaaaaataaatagtattatttaacattatctttaattaataatataaaaagtaaacatttattaaaataatattataattattgtgcaccagtgttcaaacattttttataagtagcggtttatgattggttaatgattttttctaaaaattattattttaagttatagaagattctatacctaattacaccaataataatataaacattaagaaaagcgctacgcactaataatacttttagcatttttttattaaaattatcctttatttagtcttataatacattaaggttgcatattagggtggtcttgccatatatattgtggttcaatttttaaaattaattttatgtgaagtattgttatagacaatgatcacatgttatttttttcttattataattttttttattagaaaaatcaattattgtttacctaaaaaattattaattgggtatttttttaatcgacgttaacaaatcttatctaaatgagaaagaaaacaaaagaaaaatatattttataataatgtgtgtattttagcaactacaagtgttatccaccattagaaatgctctaatataatgtgatgtttcacttgatcatgattggtagggacttttcatattattaaattaaataagtgaaactaaatataaagtgtaccgatcaaaatgtataataatgcactcggatagtattaagcacaaccaatacctcaaactactaaggctcacttcactacaaaaaatcttacttttacccacaataaaacttgtgactaaaaataaaaaaattgtgactaattattaataatcattcctatgtagtgactaaaa

SEQ ID NO: 111574 - DNA, 2517 bp, Cannabis sativa
  modified_base (2469)..(2472): a, c, t, g, unknown or other
ccataaatttgggtacttatgctactatttactctatcatatatacaataataacaaatcaaattttaactcaactttttcagtcaaaagtaaaataagaaattaaagagaaaaatatttttatttgatgttttgttataacatagattacaattataccatgttattatttatttatttaattatataaaattttagggagcatttggtaaaatttttattttttaatattttaattacaaaaataaaagtaaaatttgtgtttttaaaaaataaaaatgtgttctataattatttttttaattttaaaaataaaaaataaaagtgtacatgttctttaactttttttatttttatttttttattttatttaagttgggttcaggtctaggtctaggactgggactgtagtctgagttcgggactaaggccggggccggaattcgggtcctatggtccaagttggggtcagaataagtattgattaagaaaaaaaaaagattgtttaaaaaaattgtaaaagtgatttttttttctattttcagaatttttaattaaaaaattaaaaatgaaaacagttttattaaacatatttttggaaaatatttttacttttctaattaaaaaaaataaaaaaaactgattaaaagagtgttaccaaaacactctcttaattaatacaaaagtataattatatatttgactaaaattgagcataaaaaataatttaatattaatttctcaaatatttgaagtatttactttggattaaactgaaatgtgttaacaaatatttggcagaaagaatttggtagtaaaaatgtttaaatataattctttatacaattctgaagctttgagaaacgaaagagaaataacaaagcaaagtaaaaaacaacacgtattgttaatgtttagagtagaattagctaagctgaaaattagttacactaacaacctgcaacttagatcgtaacaaaaagctaactaataatagaaacttactaatcctaacgaagttaactaattatatttttaataaacccttcaaactaagtgtggatagaaaaaccacactaagcttgcctatgagaaagagaaaccttgtgcttgaaattgtgttggtaagattatgagcaagttgaaattgagcaaggacatgttgaacttgtagtagttgagattgtaagacccaatccctaacaaaatagaagtcaatttcaatatgtttcgttctagcatggagattaggattgacaaccaacatcatagtattcaaatagttgggatagctattgtgatatgtgaagctcaaatagtagagattgcagccaagcgatatctgtgacagcaacagctagactacgaaattcatcttcaattgatgatcttaatatggtatattttttttagacttccaagagattgaattggagccaaacaagacacaagacacagtacccactggtggagtgcctatcatcaaggaccaaagcacagtcagcatcacaaaatgcaatgatatcaaagtgagaagctctctgtaaatggagatcatagtcaagagtgcctattatgtaccttaggatgcgtttaacaactatctaatgagaccacaaagaagcttgtataaactgagaaactttgcttatagaatatgtaataactgtcttagtgatagttgcacactgaagtacacctacaactgatctgtacagagagtaggatccataaccgaatcactaccaaattgagacagcttgagaccactagccataggtgtactactagaattagtaccttgcaatttagttctacacaaaatatcttgtatgtgggtacaacctcttatctgtatgagtaatctgaacaccaagaaagtagtttagatcaccaagatcttttagtgcaaaagtagaactgagttgtgtgatgagactggacacttcaaagtcactgctgctaataacaataatattatctacatacactagaacatatgtagtatgttgaggatgaagtcttataaacaaagaggtgtcagttttagcatgatgaaacccaagacttagtaggacagtagaaagtcactacaaatatcacatttagcttctgttttgatgtttgaaaaattagacaacgacacaaaaaatgaagggtcaaattttgcatcgattttgcttcgacacatcattagtgtcaatttacatatatttttacgtcagttgtgcaccgatgctaatatacttaaaaaaatacataaacatttatgggcttcgggcttcagcctatatattaaaaaaaacctaatcatataaagcctcacttatctaaccctaactcattttaaatgtaggaaatgacacttacttaattatctaagacatctatatctcttttcacatccaatttcttacatctataaaccgtcaggaatactaatttttcccgacggttttaaatagttannnnatttttttagcgacggtcccccaaaaaaagcgtttttaggaccgt

SEQ ID NO: 111575 - DNA, 15548 bp, Cannabis sativa
  modified_base (3097)..(3111): a, c, t, g, unknown or other
  modified_base (3415)..(3427): a, c, t, g, unknown or other
  modified_base (7418)..(7437): a, c, t, g, unknown or other
  modified_base (15473)..(15496): a, c, t, g, unknown or other
ttgaattgaaacaatacagtgtatgtacatatatatatacagttgaatggagtgaaaagagttagttaggtacagttggaaataacataataaaactaacaactgtaaagagaaactaatcctaacagacttaactaattctattcttcaacaaagacttagttgataggattgcactatcaaattataataattactatgaatgaattacgtacgtacacattatctattattattgtgttttatattatatatatacaaattttatattgttggtttatttaatcttctaacatatactactagatttgtgactacttgcatgctatctaagagccacctttgaaaaaagcgaactggataccacccaccttttggaaaggaacactgtcaccactagcaccaaaggggaacaaagtatagatatgaacactcatacaattgtggctttagagggatagcccccatcttgtgattgcccaacaaaccaaccaccaaaccacaattgatcggtttctttttcgtcaattcaaacaagtagagagtacatttatcagacttgtccacgaagcatgaacaacggtacgtgcaagttaataaatcaaagcactttttcttcaaacaagttcttaataatcattggccataaatatttatcaatctatatatatatatatttatataaataatgcagggttggttgacacacattagttttctctttttttctttgggttggtggaatcccattattagacgatatcaatgtcaagtaatgagtatagtaaccactctatttgaataaaaaatttcgaaacaatacaatattgctgcttaaattttatcttcttcttgtgattacttaatttttatttcatggtattattagtcaaaactctttgtcaaaataaattattatttgcttgagacgaaatgatttcacaaaacttgcattaatatttgtcctaatcttatattatgtacaaggtttttactcaacaaatcatttcttagaagccacagccatactattcttctatttaacttatatacacatacttatatatgtatatattcatatataagatcaaattaagctagaacaccaccatgatcgtcaccgttgtggtgaacatggttgtgattgcgatattggtcatcatcatcaccatccattttggggcaagaattgtacaacgcacgattgatcttcagcatcatcacctcatcaaaatattcagtaacaaagaaataatgatgatgatgagtaatagcagtagtaatagtaataataataataagggtaatagtatgctgacatactattgtgcagtgtgtttagaagaggctatgcatggcgaaaggctcagaaaattgccccaatgcaaccattgttttcatgttcattgtattgatgagtggtttcagtctcattctacatgcccactttgtagaattaattatcatcatcatatccatcgccaataccatccctactttaccttattttctttactttttccctactttttttctcgggaaaataatgtatgaattaattcaagtttcattttatcatttaattttttgaatgctaatgtccaatctttatttggattttaatgtttcttaatgattttcattcaattagtgtaaaatattagaaatttaaaatttgaatttgtttacagggaattcaagttttaaattaattatgaaatttatattacctcaaaaaaaaaatatatgaaatttattaattattaacacatgggtaacttaaatggtcttaataattgtttgtttttgaattttattgaaattttcaagagttatagttgtgttgtacctttgaagtaaatttttttagtcccacacaacatgaaaagatataaatttgagtggcccgaaaaagtataattatgcacatgacacataaatatcaactcaagtacaatactacaaatacaatgatacgaaaacaaaagtacaatatgtaagtacgtattatgattaatttataaatgtaaattttttattttaattcatatgttgattatacagttaaaaaaatattattatttttcaatccttatataccatggatatgactgcatttaataccatgttggaactaattatagagattttacatcaagtatcaatttttggacaaattttaacatttataaagttaaaataattttttttatatttttataaaatatatattttttttcattttaatgtattttttaattacaatattatacaaagtcacataaaaataataccaaacaaaaaaaaaatacataaaaacaacaaaaatatacaataaaataaaaataatattcggtatttttattttatttatatataaaatttaaaatccgtaaaaacaaaaaagtaaaaatcgtatttttattaattaattttttttttcttttttttgggataaatatgaaataatcccttaattttaagtgaattttgtaatcatgatctgtttctggttaagggtaaacaaataaaacatagattttggtgcaaaggaaattataatttaaatatatatttatataaatataatatgatgttgctgttgccccacccccaccaccaccacccacattcttggtttacttaattatttgaacgagtcctttatcgtttatgctttccaaaaatgtggaaaccaatcttgttacactacttgtttatgaatatatttttggacaaaacaaattcatggatggttttgtcctgtcccctagacaaataaataacccatagagtgaaaccaattacaaattcaaaagggtccacaacttaccattttaaaaaagataattctttcatggaagctaagccagcaagcattttgttctttgcttcaccaattacaaatgcctattcatactttattcaaagtaccccatacatcattattttagtttttttttttactttctaggcagcatagaaagagtaactagaaaagggaaaagatgcatagacaaggtaagtgaaatgcttttctaaccatgtgtagggaggactatattctatgaaccaaagataataataataataatannnnnnnnnnnnnnnataataataataataatagactaattagaatttttttcctcctaaattttaacatgtattaaatcatgttctctgaacatttatggatattaaaaattctttctaaattattgagattgttagatttaagaacttttgtctaattttattcaattttactattttagtaattgtttatgcactaaaccatgctcctcagactttgatatctactaaatcatgtttctcgaactttgacatgtactaaatcatgtctcctgaactttcatccatattaagattttttttactaaaattggataannnnnnnnnnnnncaacaatctcaatagttcaggtgaggaggcattctggcaggcgcgtgcgtgtaggaaggccgaccactacataagctaaaagactacgactatttgtaacgaccttaaaagttcaaagggcatgatttagtacatgtaaaagttcggaaggcaaaaatgtgacgaacaaacaaatgaagagaacaaagaaattttattcaataataatccatcatatcaaatggaacaataatgtgttcattctctctttgtttcaatgttgtgttattatacatgtgaagatgggcatttcacaactttagccaaacaattgtctttaggcctagaatgaggcaagtacatcactggacttcctgggttaatccttttcagcctgtgaaaaacacattacaattctcagttaagattcataacatttccaataagtgaggagaaaatgtttggattattataactcacctataattgaggagataatagtgaagaaaaatagaaatttccatcttagctaaatcatttcctggacacaatctgcttccagctccaaagggaaggaatgatcctgcttttggtgtataaccctatgcaataaacaacgtgaaaatagttatatatgtatgtatatgagacaatagataatactaagttagtataacacatgctgcttttaccttccatcttccaggattgaactcctttggatttggatatatttcaggatctgaatgaacacttctaaaccagaccaagactttccaacctttggggatggtgtaacctgtaaaaatggaatatcactttgtattaatattaaaaagtaaccttaggagaaacccatgtctttccgtacatgaatcatgttatgaagctaaacattactgttgtggaaactagaacaatgaccaaccgcttatgttcacatcacgtttggcctcgcggaaaacagtgagcgagaatgttatcaatcttagtgtttcatcgatcacctacaacagaaaaatgtcaattgagggaggctgcaatggtcagattttagtgttatgataatcaccgatggcttacatcagaaagatactccattcctcgaatttctttaagagtcaatcctttctgtgttgatggccttttctttacaatctcttcttgctcttcctgcaattgtcagattaagcaagccattaatcatatatatatcatatataaatataaaatacaatgaaacacagctaagctattgtactaaaggccaacattttaatctattgtacacttgcttttcggtgatcatttacacaaaatttgatgagtacaaaagtcagagccaaaaacagggcaataccttggccttttctagaatttcggggtgtttttcaaggaaaacaatagtccacataatcatatgaccagaagattcatggcctgcattcaagtacattaataaaatatctatgacctcctcatcactcaattttctaccattttcatcttcaacatctagcaaagaatccatcatatctttcttctttgttgtggctatgctggccttcttattagctcttctttcatctacaatagattgaaacacagctacaagttttttcctggactggaaaattaagattatcatacaataatgtaagttgtttacaaaaaaatagctttgtgttttttatttatttatttaatgttaccttgagagctctataataagcaaatccaggaatgttaatggccatggctctaacaccatggttaagaattgtgtattccctctccaaagaatccatcacaggctcactctccgagcttaaaaaaatgtacataataatccgaaaagttagccttctaatttcagtcaagaactcaatttgtcccatgttagaccatttctccaatgaagccacaacattatcttgtatgtattcaatgtacattgataatgcttcatgaccattcactggtgcagctgttaacttcctcaaccacttgtgttcttcagaagaaatcccagtgaaagatttctttccaatgagttccacggttgcacgaggccaacctggcttgaatgcatcatcatctgtcagcactcgcttacaagtttcaggcgtcgtcacaatcacactaggattaccaaacatgaaggccttgtagattcctgtacggccaaacctgaaaatacaaacacaaatgttaacacttgtggtgcatacatcatcatagatcatagaatagaaacttcttctagcccattgtgtttgtgattatgttaacagataagattattgagtttgagatttccaaattcattaatcccaatgttgctaaaagtatgtacatacaaaaaacatcaaaatcatatctgttagatatagtgtctgtgtccataacaataataattcacacacagtagtttagtttcaaccattcatttcttaataatatttccttcctttctaatcattttgcagtcactagatgcttttgtacagctcagcaacttatatagcacaagtagcctgtatctcatcaatagatttctaatccacagaactgatctgatacagccaaatctatatgaatattatttatattatatctgtaggcatgtgtacaagaaataagatgatatatatattttattattctggtcagttgacatgttaggtatcaatttcagaaccacatattagtaatttagtaataatccaatggtataagagtcaccttatattattcatttaacagtgttaaagtcaaagacacagtgtttcatttgaaatttagtaaagcagtagtacacttggattttggttgatatcactcttctttttttttcttttatgtccccaaataacctttgaccaaaatggtcaaagggtaacagaatgtaaatatataaatacatttacattttatttataacatggtgagccagacaagatattatcaattatagcttctcaactgttgggaaagggcactgccttttgcaatttaaaaacaaacagaatcgattccattatgtatagtgtttattacctgttccccagtcctacagatgtcaaaaatttgaagcttagaacaaagcaaaaccaaataacaaaaatatattcgtatatattaaaaaggaaagaaagaaaatataaagtcacatatcatcaaaaaaacttttttatttattaactgaactatatttcttataggttctagttatataatatagatatggtattaaacatatcatatagtacattttctgtgtaatactacactgaataagaaagacctgaccaaaaatcatacagtgatggtccactagagaagtatggggtgcccctggtgggaccaaagtcccagatgcttacaatgacatccagagtaaaagaatcaaaaccaatttggaatggacggccgaaacaaacaattttctccacttttctatcttatttttagcccaaaataaataaagtgaaaaaaaggggtggctaaatgaaatatttctttatccttttgatgtgtgtatgtggcactaaactagtatacattattatcagaatgtcattttctccaagtgcatataagtaaaacaataaaaaaataaaactatgcatatgactagtagtttagtttttgggtatgaaaacaaaaaaaaacacttcgataaaccaccacaaatatgattattatatgttggtataataaagttggattatgtggcagttcaaatgataataataaataataataaaagaaaaaaccaaactcaaagctctataattcattggttaatgtatgaatgaaataatgccttgttgattccgtactcactaaggtacccgagacacacagacacagccacatttacacgcacacatatacacaaacagccaccattactggctaaagcttggaggcacactcatataattccaacctccttattctctccctcaaaatcatctaattgaaagagagagatagagagagagannnnnnnnnnnnnnnnnnnngagagagagagagagatgaaagagaagttattattattattacctggtaataaaggaagacatgaaagagtcaggatcagaggacttgaaggctgtgagaaaagcccacatgttgccaaggaaaggccaacccaagtcacctggaggcaaagagtattgcttatcacctaactttgcttcataaacccaccaattcacattcttcagaacccatttcaacaccacaccacacagcaaacaccacagcatcaacacaaccaactccattgctacttcttcttcttcttcttcttcttctgcaaccaagtaaataaaatataacccaataatttaacatatatatttatatttatgactgaatggttataagaaaaaaataataataattcaaactactccaactccacctacccccactttctgagtcagtttcacaaataagaaaaactaaagatggtctgtatttttttttattgttttgtgtatatcacactcagcagtctacttccatgtccctatacataaaatcttattaggagagagaagagggatagtaccccataaaaagttgaaagagataatgaaaatgagaaaggagagagacaagagggaggggagtgattttttttcaaactatgaactgtgaagtagaaaatgaaatcaaaccgaagaaaaagcagagcaaaatttgtggtatttatagggaggaaaaggttggttggtatgtgtgtagtgtgtgtgtgagagagagagaaaaagcctagcctataaaaatacagagagaggacagagaaagaaaaaggcctatatacatagatgtatagatatagccggccttacatgtatgtgattctgtcgttttgtgctcctatatatatatcaaaaagagtctaaaacgaaagcaaccgcaacagcaacagcaacatcatcaacttcttcatcatcttcatcttcttcttcttcttcctatctctctctcttatataactaaagaaaacttataaaatacagaagacactaaaaaatagactatacaaaatattatttggtatgtcattactgctctctattgcatgctccaattggaattctagaaaaagcataccttttcagctcattaaacacccatctttattttatgtaataataataataagacacttggattttgaagcaatgatattctcgtttagtgagttacatacgtatatatataaatatggcatatatatatatatattgtaatacattggaaaaactagtaacgctacttccatatataaaagaccacacatcatgagttggcaaccactttatgattctaacgcaagggaattagaaactttggaagaggattggctggcatacaatgtattaatgccaaaaatacatatctcagtttttatttttcctttagaaaattttgaaatttgttagtaatgttatggacgtttttgaaagttagtgtaattattacacaatatagtaattatatttataatttattttgatgtcaaatagtgagggaaagttaagtttgtatgtttgatttgaatgcttaaagtgcccaatgctattaactggttagtaattttttttattatttatttaattaaaatgtgtggttatgtaacttcttatgatacttggaaggtattttttagcctttcttatggtacagtccttctcagttgggccaagtactcttgtcgtagggtttttggtatttagaaatatttttcgaagtaccatatctcctacaaaaaaatttctgtcattggcgtccttgttaaagtatctgaccggccacctttagttggtaggcttgtaacttcaagttggcctgatctgtttttctttgatttcatcaagggtttctgttaggagagtgtggtttacttcatggtcgtaggatatcctcctaggagatagtagttccaattcgacgggcaacacttatttatagccataagctaaagcaaaaggtgtttgtccagtggtcgtcctctcggtagttctgtatgaccaaagtacttctagaagttgttcggcccatttgccctctgcctcttcaagacgttattttagtgtgtctttgatggttttatttacagcttctacttgcctgttttcttgtgggtaagtaactgcaaagaagcttttaataatgtcgtgtcgactgcaaaaatcaatgaacatatcgctatcgaattgtttaccattatttgatacaatcttctgtgggagaccaccgacagatgatgtttttaacaaaaaaatccaggactttctttgacgttatagtggccaaaggtttcgcctcagtccattttgtaaaatattcgacaacgaccacggcatgctgcactcctcctttctccttcgagagtttcccgataaggtctattccccatatagaaaatggccatggagactgcatttgtatggtggagcttagagaaccattggcacttttcacaatttttgacatagtctattgaatccttgatcattgtaggccaaaaatacccttatctgagtgctttttttcaaagactctgctcctagcgtgattgtcgtagacaccttcatgaacttcaattaggagtcgtgcaacttattcttgggtaacacatcttaagagtagcatcgaaaaaccacaatggtacataattccgtctaggattagataccaaacaactttcctcattatctttcttacttcgtttttgttttctggcagcactcttggctgaaggtatgttgctattggtgtcatccaggtcaggctatcatctagcataactatttcttctggaatagaatacttggatcttgtaggtattgaataaggacgagatttgtcttgtctgcttctgtgctgctggcgagtcggacaagggcatctactgtgatattttcttctatggggatttgtttgatggtgtaccctttgagttaacttagaaggtcttgtatctttcttagctatgccatcatcttttctcccctaggtagtgtattcacctagaacatgattaaccatgagttgggagtctctgaatatgtctaggtactctgcttagacctcgtgtgccaatttcagttcagcaataagggcttcgtattcggcttcattgtttgaggctttgaaaccaaactttatggcactatgcagttgctgcctccaggtttaatgaggacaattcctacgccagatagtctattcgtgtaggaaccatcaacgtgtaacttcctcgccaatttttcttgctcttgcactcgcttcttctctggcacttgctttttctctggcttttgcttctgctcttgctcttgctcagagttttcaagagttacattcatgcattcagcaacaaattcggtgagagcctgaccttttattattacccttggttggtaggttatctcgtattgtcccactttgattgcccatttaagcaatcggccagacgcttcaagtttttgtagaacttgtcatagtggttggtcggtgtatactataataggatgagcttgaaagtaggccttagttttcttgaagctagtagcaggcaatatgttagctttttgattggatggtattgaatttctacatcaataagcctcttgctaacataatacactggatactaaactccattttttctcgaatgaggaccgcacttaaagtgaacttcataactaccaggtatattcctattttttcattatctaggggttttgataggatgtgaggttgagctagttactttttaattcttgaaaggcaacttcacatttattttcccattcaaacttcttatttctctggaggatgttgaagcacaggacaaacttatttgttgagcttgacacaaatttgcgctatctggctagttaaactatgtacctccttgatattcatgggcagtttcatgtccaaaagggcttggatcttctcaagatttgcttcgattccccaggcattcactatgaagccaaggaacttgcccgaattgacttcaaatgagcatttgagggggcttatcttcaaattgtattctcgaaggattttaaagccctcatttaggtcctctatatgccccaagtcttttttgacttgactaacatgtcgtccacgtaggctttcatattttggttgattaggtccttgaacatcttattgacaagacgttggtaggttgcttctacattttttagcccaaaaggcatcaccttttagcaatacatgcctacatctattagaaaacttgtgtgttcctggtcaggcagatacatttttatctaattgtaacttgaatagacatccatgaagcttgggatctcatgaccagctgtggcatccacaagcaggtcgatccttggaagtgggaaacaatcctttggacatgccttattgaggttagcaaaattgatgcaaacttgccacatgttgtttggcttgggcaccaatacgggataggaaacccaaacagggtagaatgcctcgatgtgtgcgcaacttttcaacttatctttcaatgcttgtgctcgctctttatctagtcgcctccaattttgttgtactagatggaagtttggatctatattaagggcgtgagaacttactgatggattgattcccaccgtgtcttcatgtgaccaagcaaaaatatcgaggtttgcccttagaaatttgatcaattcgaattttatttctggcactcgaccaattttgagtttcttggttggcattgaggggtcgatctctgcctcttctaattcctccagcaatcaaaagttgtttgtaggatccttaaagcaaggatctatgtctatctccttgctttgggtagaccctcattgcccttggccagactcgctatttgagctcttggcgggtaggtcctccttttttttttgctttggatagagtaatgtagtaacatttttgggtagagtgttggtcttcccttaggcactcgacaccatgctttgttggaaacttgatgcattggtaaattgaagtgattgcttttaggtcatatagggttggtcgccctatcatgacattgaatccagatgccacatcaaaaattatgaattgggtcatgactgtcatttgtgctatactttcacggattgtcaacgataattggatgtaccctagaggagctagtccttagcctgagaacttgtgcatgaattgtctacagggtgttagatctttcaaatgaagccccatcttctcatacacagtcttgaaattgatattggaagaggctccatcatccaccaagcaacatgctaccatcatattccctatttgggtggttatgaccaaagggtcattacgaggtaaactcacatgggcagcatattcttcagtgaagttgatgccaggcccttctaactttggctactttgaatttcttccctctataggaaggacttcatttctttgctcgtgacaaagagtttgaacatatatgtccaatgctttgtttgaatccctaacaatgtggggtccaccgatgatgacctataaatggccagtaaatagtggtggcaacaagtcaaaattttgttgggcctgggcctggttttagtcagcttagacatacagatgtaagtggggattattccttctttttaagaactcaatttcttctttgaagttttacacttattagggtcgaccgaaatatttatggaatcgacagattttggtgggatcccacttactaatgtctttcttcatcagagggggcttcttgtatggaacaatggcttatgtggccattaggatagtctcgggtgtgtgttaggacgatgaagcatgtgaagttctcctctttttcttgagaatgttgttgtgtagggggatcattgaattttcctttctggccatttcattggctggaaccattatttttctgtttccctccattattgctgttagtttggggctgggcggtattactggccccagctgtggtaggtgtgttgttgggaatagctgcttactacccgctaatttgcacctgttggacaacttcttcaagctttatgaaactgtcagcgcggtctagaaactctctcatactgttggctaatcttttttcgatgtccctttaaaggtcactcagaggtagaatacctcctataatgattgtataccgcccttctttcgtcagacctttgacctttgtggctttggtcttgaatctttggatatagtctttcaaatgttctcctaacctttttttttttaatttcaaccaagtcctccaattgagataatatttgtcaagaggatgaaaactgcatgtaaaactaagcggtgaaagcatcctaggaattaaatctccttacaaaaaacttaaactaccactaaagtgtagtgtcagacaaggtcattggaaaaatcctatagcggacatcatttattacccgttacagatccatctggatctcaaagtatttgatatgggccaaaggatcctcttcccagtatatattttccaagttagcatcttgaacttggttggtaggcgcaacgcattaatgcacgaagagaaagagatcctcgagccttgtcatgttctaggttcgaaagctttgggccagactaggggtgttcgttggatcacatccaatggatttggacccaacagatccaatccaattatttattggatgttgaattttatcacccgatccaatccaatcgaattaagtcatccgatccgatctgatccaatgaatgtattggattggatcggttccaaccattagatgcattggctggttttttattgaattgaattggatccatccaatctattttagctaccatttaagttgatttaattaaaatatatatatatatatgacataatttaaaacgtaataattcaacatacatagtaaacattaatttaatcaaacttaattctcatgatctcataataaaaccacaaaaaattaaaacttattcaatacgcattgataattttattagcgtttaggaagatgagaattaatattttagatctaagatttttttctttaatcttatgtgttaaatatatattaaatcaattaatatatatttttaaataaaatatatcaaacatataaaattataaatgtattttaaaaatatataaatataattagatgataattggatcggtttggtaggttatccattgaatcggatgtcccatctaacaaccgatccgatccgattggattttcaaaatttacatctaatccaatccaattatgattagatatccgatcctataggatcgtttgggattggatcggtcggttgtaattgaattggatgagtttctgcacacccctaggccatacaggccttgtacaaggcttttgagttgttccacctgtggttgcactacaggatcaacttttgtcgtcctttgtctatccaactcctctcttgggttgacaaggggttggtcatatgggtcgacaagaattgacctatcttgtgcccttggttgatcattttggggcgggatgtatccgtcttgattatttcttctgcgatttaagttattccaaagatcttctcctactcgggggcccattttatcaaacacagaattcttgggccttaggtcagaatgtgtttgagcattctggggaagaacgtcgttattacacccagtgttattatgagttctctagttggtgaacccattaatagggtggctagttgcaccatcctcattgaggttggggtaagattccccactacgagacctaatttaaccttgcctaggtgggatatcttccatccttcattcatctctaggaaaatcttggaactagtcagtcctactgtatgtcctttcgggcaagatatgtttatcattcgaccgtatgggaggcatgcttatttgggaagcatttgggcccactgggcgtgaggctttcccatgatccctagggtgtttagttttttctggcacaaaagggtgttggaaatattttaccannnnnnnnnnnnnnnnnnnnnnnngtttcattaacaccctaatatgaattctaaaacaatggaataaacacataag

SEQ ID NO: 111576 - DNA, 7186 bp, Cannabis sativa
  modified_base (7132)..(7138): a, c, t, g, unknown or other
aagagacttagctgaattatctaaacgttaaaccctttcagtctacgtgtcatcatccggttggtccacgtattttggacaaaatcagggacaacacggcatatatgagtataagcatatctaattttaagatattttgtctaatcatcatctttttattttttgaatgattttatcaaaagtaactaactggtatctaatcgaaatcaaaactaattgatccaaaaaaatgtgtcttattagtaatgatttaaaaattatttgtaatttcattctttatttaactaatcaaaatgcatatattaatttatatttaaaaactatgagcactaacatttatgatatatattttttaaaaatataacttactaaaatagtagcttactgaataacaactcattattttcaaaaataaatttgaaagttactcaaatgtattaatataacctaactaattaatgattattaaagtgtatacatgtaagttttagaggtaacaaaatatgtctcaaattatataatataaaaataatacttttttatgaaaaagttacttattagtttcttatcattatgaaaagtaaaaaaaaaaagttaagattagttttagttcaagtatattattttaaaattaaagtattaagatattattgtaattaatatttattaatttatttttgtaattattatatattttacgcatattttttgaaaaatccaaaaaaaaaattaagtacagctgtatttgtgactcttctaaaatctcagatatttgtaacggatgctcattaaaatcccagagagaaactagtgtactgaagaattatgagattttggaaacatatttatgagcaatgaatattggctttgaaagaccaatttcgtctatcatataatgtgtatgatatacaagaataaaaatacattaagcagcaaaactaaggaaatagttgggttacatacaagcacaagcaaacaaaaacttatatgtcaactttatttctacatgtggaactacctttcatttacctgctgaaaatccaatgctctaaaccctcgtcaaagctcccaaataatattagaacatttcagtattatccatttcgaaaaagtaattttagaataataataaagaaaatgacaatagctggttcgtatgataaaaccagcaaatgggtacattacattacatacattccctcaaaaattattatttctggctctgtacctgaatattacatatataaatatatatcaaatgttatttgttctttccctagttgatctcctaaacgatacatcatattttacatcgtttaaagactcggattctactttctcgaagtcagttttaggcctaatattactactactccctaactttctacattgactattagtgtcagaacgcaaaaagggaacgtttccttctccttccaaacccaccgcccagccactcccactactcttctcattccaaccaccatcgtcagcacaaccagtttgatgccctccggttccagggaaaactgaatcatatcggtccaaatcagaaaggcgagaatgctttgagtacaagggggaggaagaggatgacgaacaagtgtcagaatcaggagagttcctccatgggctgctcaagccccgtcctgactccccaaatatgtactcagagaactcatcagtgctaatagagtcacgagtactctctgtactacaggaaccttcatcggaattattactgatgagagaagagttgtcacttgaatcctcttctaaaatcctctgcagccgattgaactttgaataaaatgagtcataattatgggcagagccttcggggggacttaaattgggtaatacttgggctatacttgaaattgtggtggattttaatttaaatgcagtagttttcccaccaatccaagaaggcatagctctagctgtgagatcaggagacactattttgttccttatcgatcttggggcccttggtgaacacctgcagagtagttcataagtcacacacccataaagttaaaagatatggaaaactttaaagaattaaaatccaaagagtcctcaccttgcataaagaagcatgtacgctcccttgctcaggaccttttcaagttccactgctgttacctgctcagccatagacaagacagaaaatggttacaaagcaagaacagaaatataatttgcatcaatgtcaataagtagaaaatacatagagcaaactgttgaaactggaacaagagtgacagcttggggttagtattaggtattagctttcaggaactataatcaactattcacgtatgaagatcaataaatcatttaactatatatcaccaaccaaatttatcatgcaagtccatcttaaaccataccaagtcggtttctaactttcatatgaatttctttaaaaacataggtgtagatcaaagtgaactgagaaaattgaaaaaaaaaaggtaaaacgaaaagaaaggacccaaatattttgagagcgtaccgtgctatcatcaaccttgaaccacttattctgcgcatttttaacgtaggacacatagtgtccagaaaatgcagcattcataacgtccaaatgaacaaccaccccatataacctgtaaatagccaatttatcacttgtgccactcatgaatggagccaaattcaggatctcttgaaaccgtattggcttattaagcttcccaaattttccagactgtaagcaaagaaatcattgtaagaatctaacaaagcagggaacgaaaatcattttaaataagcaaaactagctaaagcagatggtaagattaatttgaaatagattaattacctggaatcgctttaaagcaatagtgaggacattgggagcctccaatattgtcagcttctttttggctttctcataagatttgcatctaattatgggagaaggatccattagccatgtccaaaaaccacaaaaataaaagctagtagaaaagaatccccacaattttgcaacctaaaactaattgaaaacaaggaattgccacactagggcatgttttattaattggaatgagaataagggaataattattcccattccacctctaaacaattgaccacaggaaaaagcattccttcgaaaaacacaattccatcagttgctcctcttactaatcctctttgttaatttttatctttaggatccattaataacaccttttggccctacataacttacaataaaaatatatttgaaatagaacgtacaggtgttttgtctatatgatactctatccattacattagcaataaaaaccaaacagtatttcttattccactattgattccaaatttcaaccaagcaatcgaattcattcatattcccattctattccacttaagcatcaatcacccaaaataaccccaccaacctgtaacattggtacttgttttcaccatctaaagtctctgtacttgtaaattttttaagagcctcttcgagggttcctatatccccttcaatctcaactgtaaggtccatcatgccttcctgcctctcagattttacttggcacttcatgcattttatctgaaaaacacacaatccaatttatttatttttatcaaagctaacaatttctatgaaattcagatctgagatccctacactatctcttacctttgatcgaagataccctccaaatgtaagaccaattagagtagtttgttcttccaaagggcctgatgcacttgtgtcaggttccgcaaggcaaacagattgcatagtgtcaatcacatacctgtcagttaatatattaatttaacccaattaaatcatggctcctccatcaactcgtgcttatacatcaaattagtaatgaatataccttagaaactcgtgtgcatcctcttccctcccattaccaagctgacttcccatattttggatcttggatagtattccaataggtgataatggagattttccctcctttgccttcaaaattaaactttcaaactcacacgtgaaacaccattccttctttatacctgaaacaaagaagataagatttcatatgacaaacaacacaaaacactagctgaacaaacattgatgaatggagacatacaagttttagaatggagtccttgaagaaaatatgcagtcaatggaggagtgaatgccaagcactgaagcacagcattcgcataacagctgacaaaagaggaaacaaaacattaaatctacaggacaaaatatgttaaaaattacagattcccaacacaaacatccaaaacaatgaagttcaatttttaatataacaaaatgaactttacaaaggttacaaaacttcattaagaactaactctctcaagtaaccaaactacgaactaatgttatttttatatgttccatcaaacagaacaaagtgatcttacctattcccacaatttataaggccacacgggcgcagctccaccttgttccaattgaataacttcacaaatgactcataagggaagatcccctggaagaacacgagattaaatacaataaatttggttttacacataatattctatagataaaaacaagaaaataaagaagtaaaaccttgtcactaacactgtatcttccagctatctcactccccagccctaatgaattctgctttgatggtttggatcctttgaactgctcaacaactttctgaaccgaggttttcaaaccattcttgacatttggagggtttgaaacctgatatgaaacagtaacattatcttggacaaaatcaacttcagcttttgaccttgaaattgtagaatccttattgctagatgacaaacaagaagaactagatgaatcacgatctcttgacttcaacagattcgaagtgttctttttgtcattgacaacatgatctaacttctgaataggtgtggatggtttagtagcatttgatgaattggtacatctggaagctctttcattactgggaggcactgatttaacttcccccagcttaaagtcacgtgaaatgcatctactttcaccatccctattcttagatgattcactgtccttgaccatagatacatgaaaatcagtattttctgataaatctgatcgattaagagccttcttaataagcaatgcatctgatgaaggatcctccattgtggtaaatcttttggaagatccagtagatgacctgctcccaccaggtacattggagtcagatgtatcatcaatctcattatgggtattatctgagtcaaaagaatcaagagctctctcccaaaaacctgaagatgattcacaagactcaactgtgggaccatcatgaccagcactatttctgaaaggtggaggaaaagtaggctgctcctgctctccatcactggatctagtttttgtttcactcataatttcactagcagtaaaaccatttatagagttaaccaacctagcaaattttggagataatggctccgagggaattgcatccttcgcaccaaaagctgtatgaagtgtatcaccgtcaacagataagtgtccatctgatttgtcagtctctgttgaactaatgctctcactgatagaaacatcatcagccatttcactacttggggttgaagtagaaaatccagaaaatgatgttgagcatgattcagagatagaatttgtccctttctcactgtcaagagactcagtttcactaccatcatccttctcgtgcggcacttcaggggaaaaagcatgactagggtgtgaaggttctgaaggaaatgctttgattggtttatcttgttttgtgccttctaaattgtcatcataaacttcagcgtactcttctttgctcagcttttggtcagaatcactttctacatcagaattattctgagttgggcatggagggtgacattcctctttgtgtcctagtctccagtgaataatttgacatttaccagaactgaaatataaatttgcagtcagttatacatggatcctcataggtaaaagcatcaaaacaaaaaagcaaagtgaaactttcatccctactgctcttaaggaattaaattcaaagtaaggagttgggtggttggtagcaattaacaagttaaataacagggagaaaccttttacggaaaccttttataagggcttcgctgaataggtgtgtgatgtacaaaatgaaggctactgatcgtatattcccacattctttccatattgatgctatctaggtcaagctcctacagcaaatggaggttgtttggacgcgacctggctctagtcgcaacatacggaaggcactgggatgcagtagaaaaaaagaatatggaatggggctgtcctggttgttctatggccagtttgattggaaacaaaaagtagcatatgtgatggaataaggttaaaccttgggtggctatttggatatccaaaagtaataaattcaaagaattatctttttctgtgctactgtgattcgcagctgtggctgcaatgagctttagtctaatattatgttggtttagtaataataccttaacctgatattctaggatgtaacttaaatgatttccttggtcccatgaaaatatggcctctaaacccaaattattcctgagaccatcgtcacaacatcgttatgaacatcgttttgcctctaaaatcaagcttttgtgggaccgtcattaaaagcatcactttggcaaaatttgataaacactttggtgagacacatatataggctttttttctttttttggagaactacatgtttgtttagatgtgtagaacctcaaattttgagatattcgtttgaggctataatgaggatcgaggttcatctaagcactccaaatttaaggcccagcacattataaatgtgtagatctcaaaaaaatacccaaaagataaatcacatagaactaacaaccaaatgaaaagttatgcttgcggttttttatcaaattttgccaaaacgatgctcataacaatgcttaacgatagctaacgattgtcccacgtaaaaaaacttaattttagaagccaaaactataatcataacaatagttaatgatggtcccacaaaaaaaacttaggtggcgtttggtnnnnnnnaatgaaatggaatggaatggaaatgaaacaatttttattccattcctt

SEQ ID NO: 111577 - DNA, 16542 bp, Cannabis sativa
tctctctctctctctcaaatttgtgtgcttaatgattgagatatttctctcacaattcaaggcaatacttaaattagtgtgggagactatgcagaaggtgttttggcaattcaaaggagcatccaggttcaatactggttactattttgcgacaaaaaggaataagggttagagtactgagcagaatgagtcatattgtttttgttgaaatcaatataaggttttctgaacttttacatgtttaattatcattttacagtttttatatttaggatattatattataatatttataatcaacatacattattagtaaattaagatcctagtaaaataagttctaacacaaatattgaactatattgatataaggtgatgcactttagactgaagaatgttggtgctacatatcaaagactagtcaaccatatgttccatgagttaatcaggaataatatgaaagtctatgtcaatgacatgttggttaaatcaaagaaatctcaaaacccattaatgatttggaagaatgcttcaacatcctacaaacttacaagatgaagcttaaccccctaaagtgtgctttcagcgtccaatcaggaaaggttcttggattcatagttaattcaagagaaattgatgcaaatccaaaaaaaatcaagacattgcaagacatgaagtcactattgtgagtaaaagacgtgcaaagccttactagacaaatcgctgcactaagctgatttatctccaagtctattgacaagtgacttcccttcttcaatcttctaagaggaagtaacaaaaggtttgaatggaccaatgattgcgagcaagccttcgaagctctaaaacatcatttattcaaaccacagatcttatcaaaaccagtagatagtgaagaattattgatctacatggctatcactgagcatttagccaatgctgctctggtgcgtgaggatgaagggacacaacatctggtgtactacttcagcaagcgtctcattggggccgagtctaggtatccgcccattgagaagttggcttactatttagtattggcctccaaaaaactaaggccatacattcaagcctatccaatcaaagtattgactagccaaccattcaggcaagttctaatgaagccagtagcgttaggacgtctactcaaatgggaagtagagcttggtcagtttgaaatctcctatcagcctcacacaacaatcaaaggccaagcactagctaatttcattgttgaatgcagtggcatcaaagaagacgaccccatggtccatgaagaccagaaccacgtgcctgagactatagttaaggaaagttttggaccttattggaagctttacgtagatgtatcctctaatgagcatggctctggtgcaggtctcatcctcgtaaatcctgaaggacttctcactcattgtgcattgcagtttaaatttaccgcaaagaataatgaagcggagtatgaagcactcatagcaggactttaattggcactagtcatgaaagctaaatcatcggagatctatagtgactcttagcttgttgtcaatcaaattcttggcgaataccaagcccgagggcccaaaatgatagcatacttgaggaaagctaaggatctgttagcgtagctaaagcaatactccattcagtaagcaccacatgaggaaaatgaaaatgcaaattccctagctaaactagctagtacaacggactccgacattctaaacatagttcctattaaataccttactcaaccaagcatcagtgaagacttagagtctattctcatgatcaacagtagtccatcatggatgacctcgattgatcaatacttagaacaatgtattcttctaaaagaccagaacaaagctaagaaactgataagaaaaaaagattactttatcatcatggatggagtgatgtatagaagaagctactcagtgcctcttttaaggtgtgtcatgaaagaaaaagcaaagctactcatggtcgaggtacatgaaggtttttgtggcaaccacgtttgaggaaaagcctctcgaaaaagatattgaggtaggggtacttttggccaacaatggtcgaagattcaatggactatgtcaaaaggtgtgaaaagtgcaaaagattctccaaaaatacccaggactaccctaaacgagctcaagagtatgcaaagtccctggacattcaccgtccggggaatcaatctcatagactccctatctaagggaaaagacggagtccaatatgcggtagtggtagtggactatttcaccaaatggaatgaagtagagcccttagccactataacatcgaagaaagttctcaacttcgtagtcaagaatatcatctgttgttacagacttccacaaaaaatagtgtcagacaatataatacagtctgacaacgaacttcttattgatttatgtgaaagacacagaatcattaaaagtttttcagcagtcacttacccacaagcaaatgggcaagtagaatttgttaatcaaactcttaaagatacgctagagaatcgcctggagtaagctaaaggaaattggctcaatgaattacccaaagtgttatggtcttatcgcactacaaaaaaaaatagcaactaatcacactccttttacttcgacttgcaggtatgaagcagtgatacttgtagagctcacaccaccgtctcactgaagactcacttatgatcaacacgtcaatcaccaattattggttgagtatctagacgaaattgaaaaaatcagagagaaatatgagctcacaaaggtcgtgtatcaacaaaggatcgctcgacactacaactccaagtttaaagataggaaatttaagcatggagatatggtgttacgacgagtattcctaaatacaaaagatgcagtagcaggagtactcggaccttttgggaaggaacatatgtcatcattgaagcactagaacctaggacgtacaagttggcctgctatgactgccacttgaatccagtgcccgtaccaaggtacttgaacgggttgcatctaagacgatactgctaataaagtagttgtctccaaaacaactcgcttcacaatgagattcattttaccacaagcaagtgcatcgatcacctcttgaatcgactagatgcagcaaagtcatctctaggtcaagaggtccatcgccaagttatggcccctacacttttagtcgagctaggcatcagtgtagtagggatcaactcggctatttttgatgaaagtgcaagtttgtgaacactttttttcaatttaggtaatgatttaatttttaaaggataaaaaatgttgaaaaaaataattttggtacttcgttgttattaatcaattatagctcacagacctaacaacgctctcaagcactgagtaaagcttgtagagttagtcttgaggtaacttcggttatttctttagtgagttaaacactgccaacccacaaatctccatataagtggacaagtgctcaacatgtaaaacctcctcaagattcatgatcaagaaagcccaacaggatttgatatggcaagtgaccaatgaagatacttctttgatcacttaggggcatatacaccctagtaaatatgagctaggtgttacatgggcattcaaaattttttgcacaaatgagtagtactttcatgggaatgacacgttataaaatattgacgttactcccagtaattgagtttctcaagacatgacatactgtgcaagtgttaaagttcatacggtaactgataaagtaaaaccaaaaaaacaaaaattattggactatagtctagattcaattggaatttatttctaattaaattggaacaaaatttgatttttactacggcatatccacactaaaaggccacctgagaggaccaactaacacactaaagctaaatactaattaaaaaaggagtaagacaacctcctcaaaaaactagcagctatctagttttggaatagctcctcaacttttgttgcattctcttctagtacatcttcaagtgcagccaattttgggtgctctagattgtagcctttgactcctgatgcatctccgatatctgggacgtcaccattcaactcaaagttgacgtcacgaagaattgcctcatttgtccaccgctcgcattggctcgaaaagaatgtgatcttctcttcatcaaaggtttcccaattaaagccagcaactcctccattggctgaccaagagttgtaaatggcatcaaagaaatatcccttgtaaagggaaacatctgcatctgcctttgcctctagggctgccatttggccctcaagacaacgaacttgaccttccgattcagcaacacttaaggtctttttgtcaagggacttgcgaagggactcttctacttcacaagatttcattctcaaagttgtgagctcttttttcaagatcttttcacggtccttggcaagatctgtagcacctcaaagatctgagacactagtttcaagctcattgactatgctctctaagtcagtgaccttggcctccacaacagaagctcttcacttggcgaatgacaatttctctgcaagctcagccactctcttatgttcgttgtccatagaataagcgaaacccacacaagcgtgcaagtgaaaaaataaggtcaaaaaatgactttgactaaacaagagaagtaaaagtaggataagatactcaccccaaagatttcactaaaacccttatgggaaataacatgaggaggcttgatagacaccaacttccccaagggtttactctcttccttagaagtaatcaaagcctctacagatgctaacaatagtgtgccttgtgcacgcaggttggccacaacctccgactaatgagagatcggctcagccatatccatctctcccagaaaaatgaccatcgaagaagtagaaggctcatcttcaatttaatgacttctcttttcctttgaacgaatcccttactagagaagaattcttagtcacaacaacttttcccttcttcctagacctcctcagatgagcaagagaagcagtaggaatggtttgcacgacctctcgagtgggaggttcgtcagtcctggttacaggtttctttctcttagagcaggaagccatggtagcaaggaaactcatcttatttgcaaaacatcaacaccctggtgatttcccaactcgctcgggcacacaagctttagtgtgactcgaaggttcaactttggcttcatcactagaaccaactccaccatcttctgacatcacttcagacccaatggaagtgccactcagcccactttcttcatcttccaagggcattgtccaagaatcatcagcaaagcgagcatcaacatacactcactggcaagttgctataaaccctacgcgacggatgttgtcatcagtgaacaacatcttgccatctctctcccgtaaatcaatgtcagttagcatggcatttgctctccgcttcatgtcaatcagtggagcaagtcttttaaaagggccaaccttttggaaggtaaaatgtcttgaagggatgatgagaatgtagaaatactctttatggtaaagtccacagttactcttagtgatgttgtcaatgtacacactaaattgatggagatggtagaatcctttttctttgtgggtggaaatccttttcagatcacacaaaaaattgaccttaagaggagtcagaataggccaattctgtagacgataaaagatgaagaatgtcgacagaattaggtaacttttcaaattcatctaataaggacataccccaaagtaatagcgatcaacacataccacgactgtagaggaaagaatgcactcgtgttcatgtgaaacctcgaccaagcactacaatagggatttcaagaaccaatgggacaccagattttgggttctgacaacagtttcgggtggagaatactcatctcgaatcagttctacttggtgcttagtgattgaactaaatacaagaggccttagctcaaattcaagatctcttagatctttccttttaatggcagtagtgagtaacccaattgccataactttccccccatgggccttatctagattcttagactttggcatagtgaactttgcacggatgaattgcgtcgtgtgtaggtcatagtcctcgagttatcttctagttcttctcacacgaggcatttttgcttccaacccaaatctcctcaacttgaaccagctgaacatcaacttaatttagctcaaaatagttcctttcagacaaattgcaccttctaggaaggtagaatttcaactcaaacagctgacatgaaaatcgcatatttgattttcggagggcttattaatggagtttaaggattcccaataagatctagaatccttaaactaagctttacaaaaggagaaggagaaaaaaaattgaaaaaaaaaatgaaaattttgaatttttacctgaaattgaaaaacacttaaagaattaatagaagttgaattctcaaactctatttatggcaattgatctcctcttcatcaataggagtttgaagcaatgggaaaggtgattagaggagtattctatttatggcaattgatctcctcttctcctaagccaataaggagtaaatttaaatttaaatttaaaaagaaagatgagagagagagagagagaaaaaaagactattatcttttctttttctctctttccttttagctttaaatttcgaattccctatttcaactgagaacacaatttttgaaatccctaattgcactaggagtcgttgaagaacagaaaacagttgttgagattgtcaaaattaatgcccaccttgtagtttcaagagaaacgagcttaattctcgtcatcaagtcaacctcacacaagtataaagttgatttagggggaaaatctttacccagaaattgaccctagtcacatagacaacccggttggatcgggtcgaatacaacccggttggatcgggtcgggtcagacccagctaaacttctgaagtaatcggggcggggcaatgacttctcgggtcggggcacacccgccccatttgccattcctgactagatttgagtatcttgagaaaaataaaaaataaaataaaataaaaacatttcgagtaatagggaattattgctttgctgccatgttatacttacagacaagtctataccacttaaacatttaaacaaacaaacatcaaaaatccaccaaaattttacatttccatttttcattcattgacatgtaacaataattattcatgttcaaaaaaatttacactgcacctatgcatttgtgatgtcaattttctaactggaagtgccaacaacaaaaaagaaaaagaagaaaaaaaacaaagttagcggtgtatacttgttagaacagctaagtgagtagccaccaaacattggccgaatttccttcattaaaactttgcagcttgttgataccaccaataagattcctggacaaatggtattcaacctgtgagatgtaaactgaaacggactcgtccagttacaaagaagttggtcgatcgcaacatgcaagtgttctatgaaagtgcaataaatttctgagaccatttttaaaaaaaaaaattataagaataccttcacaagcctgtaagctggaggaccaaatggaaagtggttatgttttttcaccaccaaacaagcatcaaaagccgcctctggtgagagaaattgtaggagttgattcaactaaacaaatctttctgcaatttcatccaacttccactctcaaccagaccgccctctcttccaattccttttcttttctttcccttttattcatatgttcacctgcaattttaatcagcatgaagtccgatacggaagtgtctctaattgaatgcttcaaactcttgggaccagcatgcagagcgctaatgcccaaagggcttactggcagagcaccaagtgtaccatccaagatcaggaaaataaaaaatgtcatgaagctcctagaagcacaacagaattaatagacaaccatctttaactacatctctctctttgccacagccccagaagaactttgcttcttttgaataccatattgccaggcatccctagatttatcacctgctgactgatcaaagtcgtccaaggaattatcaaactgtggtttaaagtgcctgtaacttccattcctagatattactgaggcacttgacttctcttcatcttcagatggtgtgcctgacctagactccatatgcatatcaaatgatttatgtcttggtccagaagaccttaaacccctcatatttggtagcatctttcctggcatgggattgtaagaaggtcccttcagtgccaaaatatctttggggatagagtccatgtccatgtaacagttccgggctttggcatcagcaatcaatgcaccccagtcatcagaatgtgttaaagcatttgcatttcccatgacctgtaaacacatatttagttttagggaaaactatatatataaagaaataaaattgttcataataaagcatataaatcagtgttataaagttaccaggtgcacaatcataaaaggagtaacacaacaatatgctttttttttgatggaacacaacaatgctttaaaccaaaatagaaaggtgaaaatggaaaccttacccaaagagctcttcttgcacgagtgagagcgacattcattcgacggatgtctgcaacaaagccaaccccgtggcttgaagcacgcacacatgacattataatcacatcacgttcttggccctggaaagcatctacagtatttatatatatgtcctttccttcttctgaattcagaacttccccaaacacacgttgaagacattttaactgcagcttgtatggcgtgattatgccaactgtgactttaccaactccaaaagatttcacagttttctgaagatgctcatacatccgaaggcaaatttgtgcttcatgtgtgttttcataagaagcagatccacctctgtgtgattcccgcccatgagtaatgtcaaaaaagatgtaaggctgaagtaaacggtccttatagtaaacctcatcaggtaaattagccacactctcactgtctgtaaggcgtccttggtagaagtaccttgaagggaaatcacggatttgaggatgcatcctgtactgaacagataacaacattgtgggacatcctgctagctggaatctttcgaaaagacttctactgtatagcaaagttccagctgccttgctaataacggttgcagggagctgttgaggatccccaacaagtacacatcttgcagcaccaagagaaagaggaggaagaattgccacttcacttgcttgagctgcctcatctatcaccaccatatcaaacccatgagtaagacgagaaaacaattttcgaccactgctcgagacagtagtaaaaacaacctcagcctcatttgcaaaacttgcctctagattagcacgtgcttcttccaaattgaagttgctgccaggacggaacttcccttctaatatgacaaggcgagacaattcaactaaaattttatctctgccttcaactgctgctgcaaggctctggagcaatgcatcacgattctgatccctggctacgagaacatcaggatcaacaccaactgacccttgggaacgaacagcagcagctgcaacagtaagttctctttgtagattagttatctgtgcagcaaactgagcttcacggcttcttaattggtgcatccatccatagacttcctctcgactcttgaccaaaagttgttcagttctccgctcaacagagacagcctgagcagctcgtgtctgtgaatcaaccccaacccgcgccacatcaggccgataaaccttcatctcaccatcgatgaatccacggtcaaggacacgagcaagaagctcatcagttgcagcattagatggggcacaaactaacatcctaggcttggggcagagctttggaagggtacgaaagagattctgatccatatttagaagaacctcatcaatcgatcccacagtcacatggtcagagctgctttcgttcccctgcttatagctctctggtgcaagtttcttgagcaaagaagtgtaataatgttgatactggacaagatggatgacatttagcattccccagacagtgtgtgtcttacctgttccaggaggtccttggacaagagtaaagggccacggatcttgcttttttgtaatcccaccagtagtaccagcagctgtatgcgttgctgcccactggattgctgctaactggggtccattgaaggtcctgtgcaaatgatcaacaaagttctgcgtgaaacagtctggcatggcaggggtttgctgctcatattttgggaaatgttccggactaggctgaagaattgcagcttgcatctgcacaaaaaggtcagtcaaatgttgaagaaaaacttcaagaaccaaaagacgttataaatgacagtcacctgtgaattcagacgacgaaatgcatgaagtgcaacgtactcccgctgagtagttgcaagagaaccaagcacagttaagtaccaagtacttttaggcagcagttttctcacaatatggtcatcatcatttgagctggaaaaatcaaccaaaaaggatagatgaaaaaagtcaacacgattgctgagagaacaatataaaagtcacaacaccaccacaacaaaaaaaacaaaagaagagcaaaagattgtgaaaaggagcaaagaaaataagttgcaaatcctaaaatacccattaaaatcatgcgagtcgccgatgtaaaagtgaaggatagcccctagaggatcacgagtatcaagaggaatgtgtcgcctaacagtacccgccacacgtccgctgatttctagatcttcatcatcatcagcaacagaagtgttgctacgcttggatcgagctaattgacaaataggaattataattaggaaaacttgactaaaggtctacaatctaataatcaatgaatggaagaaatatattgtccaatatgtaccagatccaggcctgggagatgaaagaatagctacatctccttccttaaatgtccatttgcactcatttgatggaaggacaactacatcataccatcctacaacaaaaagacacatgctttggttaatttagctaaaataaaagcccaaatcacattaaatgcatttaatattgcatgccaccgcggcagaaacattttccaaaaaatacaggtttcatgtaataatattccatcatgcttagagcctcataaaaacagtatgatcacagcaaagcaaatatagcctatatgcttcagctgtaaacaaagatatactttcaaccattcagtaatcgggtgtaccatggcatcaaccaacaggaaaaaaaaggacctgtagactttgcagtacctctttctctcctttcaatgctctttacacggaccattacatgtgtatctcttgatattgtttcacttaattcctcccacgtgctgtaaagctgtgctctgcattcctcaaacagcaaaggctcaaatactctgacatactcctccacagattcaaaccgaccaggaacacattggaggtcagtctcccctgagaataataatttcaactcataaaacaatcaatcaaagagagatcactaaatccccttccccaactagaataagaatttaacgattataaatagagatacatgaaatcatgcaatactaaggaaccagatcaccaaaagaattcacaacaaaggcagtccacataagcacaaaaggaagttatattaaacctaaaaaagcaattgaaccagtaatgaaaacttttcattataataagctggggagtgttataaatcatcaaatattgtcacagcactaatcaaaattcatcacgatggcaaaagtttctatcaaacatgccctgccaatggttagagaacaaactttgaaagggttattccagcactcctgagcaaaatataataaaatctgattgaaatagctaaaataatttcttcaaaaaaaggaaatagttaaaatactaatttgaccaaaaatatttatatttacttgggtagaacacaatcatcacatagttgttgtagtcaaaacaattttaccaaaacttcctactcttttaggtaaaacacaaatcatcatagcaatatatcagatcaaaaactccacgccctttaatcaatataccatgagattgagagcatgacattgacaatgcgaaaaaatggtgacaaaaactacatagtgaaattgagatgttacagtaaaatcatgttagctcaaatgctcgatttcacagtataattttcattaccttcgctagttctgttatcattaagatttagcataaaaaaaaaacaaaacttgtcactgaaaatagcccaaagtttccaagtacgatgaaatataaaggcaccagagaacaaaattataacaaaagattgtacaaatcatacctgggtgatgccaaaacttttcattggtgacctcccgtataagacgctctactgatgtgtcttggtatgcattactcaaagttgtttgcttcttggctggctgcggctttttgtttccaacttttgagtccatggaattataacctgaaagcaatggcttcctatttgaaccctgcaaattcttcggttgccttgtatctgtaggctgcttccatgaactctgtctaggaacaggtggcaaggcctccatagctgcatcactgtcaccagcaatttgcttcctagacttaacaatcccagaattgacatcaccgttggtttcgtattttgattcactcgattccaaaggatttccttcttcgccacaagaggcgtcaacttgtctatgttctttcagtattgattgattttgcttttctacaaagcgctccacaggtggaggagctgtacgggtttccttcactgttctagttccaatagctgaagagaaagcttgccttcgaggcgttgaagatttaatagaaccagcctgcttaacatcttccaaattaagaaacatggtctgcctactacgtttctttcccaactttgcttcatgctgctgatctatcttcctcttcaccggattatttgcacacttaattgcatgaattgcttcaatacccttaacttcccgttgctttggaatacaaccaggctcctcttgacaatccacagatacatcatcagtttttagactcccttctatgttacggctgactttcccactttcatcattagcaattggatctacttctaaagacaaatttttgatactttcatccttggcaatttcagaattttttacacaggacgaactaccatcagcagtagcaccagaagcaacatggtccattgctccagacattacctgctcttgtgaaactttaacctgtttatccatacgtctacttctatatactacggcagaaccctcaccctcagcatcagaccattctccttcttctctttctgttggtggagcatctgaactaccagaaacaggtactgctttcatatcctctttatttgacttagaagtagagggattgttggaaatctgatgtctcatcttctgttcaatacccccttcagggccatgggcagacctgggtcgaacaaagggttgaaaaccagatacagatgatgcgtgagaaaaagaattcttgtttgcatttcctttggcagtagctgacactgctaacctttccatagtctcgggatttgcagatggaagggccttctgtggctggaaacgtacgaccccatcgctgtcctcattgttatcctcggaagggagttcgttgagatcaaataaaagctttcctcgagaacccatctcatatgtaaatacatacaaactaaacttcgtaacgaacagtccaactcagtgccaactagctctttctgtcaaaaaataataaggataataataataaaatttccaaaattgcaaagcaataaatttaagtaaaaaaaaaatctcatgaacctgattgagaataagaaattaaaagaaaaaagtatgaactggcactaagggtttatcaaactaaaacaaggtctgtcagatcaccgagtaataccatgaacttcaagtcatcaagtaaaagaacttttcgggaataaatttaattttactatgtatcctgaatgatataacaccatagaatcagtgataaatcaaagtaaaaaggatatggcatacatgtatgtaactaagaggaatgatatttgaccattgcaacggcaccaaatagcacaatgcagagtaaggcccaatacaactaagaatattagtagagaaaaccctaaaagcaacatcagtaagcgttataatcccttaaaaagacgataaagtagatgaaaatatattgctaagaacaccatccacataacactatcatcactaacaattattcaatcaatccaataaacaaaactagatcaaaagcacaaacaacccctcataccgtccacaatttcaatcctcgcaactaacctaacattcattctagggatttcgacacacacacacacaatgaaaaggaaaaaaaaatacttccataaggctccacaatccaatcctcgtaacactaattcatatgcccagtcctcaaaaccacaatccacacaagttctacacagatcgaacccaaactaacttattcaaattcacgacacacaaagtcattccaataagtttaagcattaatctataatagtcaaacgccaagattaaatattttcttcaatctcattatccatattcactgatctttctgtatgataaaaaaaattaaataaatttaggggaaaatactgtagctaacggaaaatttacctctttaaatagctttctcgtatagaaaaattagaaggtgaagatataaaataatatttgatttagaagttatagggttgagttaagagagagagagagcaaagccagagagaaagaacctaaaatgaagaaataaggggcttacttacgggtttatataggaaatatcgagccactctccccggccgggtttttctccgttcgtcggccggtctaattcattaatgaaatccccaaaatacccatctttctaaattgatttgtttagaatttgtgtgggcaatgtcggtagtttaatttttttttttcttttttttaaggatttttcacgagtcgtgtgaatacgatagtttctcttttattaaaataaaaaaaacaaaacaaaatagtcatttgcattacacacgtatgaagctcgcacgtgagaatcttacgatccaaacctatgttagtgatgcccacctcacgtgcttaaattgggattgtatttattttgtcatttttgtttaggtattttacttttacttttatttttttaggggcttttacttttcgttaattaccaattagtccatatttttaataaataatggacgctcatggcacataacaggcttttttacaccaaaaaaaagttatattgatacgatagtgttcattattttatttacatcttgtttatttttagaaaattataaagaataagaaatggtctgtaacattcgtgcatgttttttatatgccaataattaattattttaaattttattttttatattataaattagtaaacaattcgcacttcgcgtacagttatattttgtttaataatatatattaaatttcaaaatttaatattttattttaacaatataagtaactattttactatttttttaattcaaaaatataaaaaaaaaattatcatacaatttcttatttaataaataaaagaaataaagatttattttcaaaaaaaaataaaatttgaagaacatttacacaaaattgaggtctaaaaaattaattaataaacctattaaaaaatgaccatatatatatgatctcaaaattgttgtatcattaatgtcttgtagtcgggactacgttaattcaaaatcgttgttataaccgtatcttgtcattatattcaaaattattattgtcatcattgtatttcactccactatttataaacggactacaagaatcatatttagattttattttttgacacaatatttttttaatactttcatacgggttttttacactatacacatatatattatttttaataataagaagaaaaatatttttttggttgctacttatcttttttttttattagtttagaaaatttatttatttattttaataaatattttttttaattgttattaatattaatattattattaatgataattataatattttttttagttgctacctattgttattttagttagttagaaatttttttgaattggatacaaataatttttttagttaattaatcaattaatatttataaaaagaattaaaaataaaaaattagataaaactattttaagtgattttaaagtgttattttattaa

SEQ ID NO: 111578 - DNA, 3488 bp, Cannabis sativa
  modified_base (3457)..(3463): a, c, t, g, unknown or other
gctgggtttgtataacatatacaattcaacttgagggggagtgtagaaatatctttgtaaatagctagagttatttgtacagctatatttagggtgtatttggcagcttagcttaggatgtattttttcctaatttccttgattgttgcctaattctactatgtaatcaacctatataaacacctcattttcatcaataataccagattagaagtatcattcacaaattactacacgttataccaactttaatctcattgactatttacaaagtagtaaaagagaattcttcatttacacagttgtttcaattcctccatatgttgtagatactaccaacaagacaagcataataaatgctcatactctgccctttacccttgctcgataaccaactcaagcaaccatcaaaattcaaaggccaagatttgatacctagccactcaaaaaccgtagtaatcacctgccttaaaaaaacacagccaaagaaaaggtgtttatggttcaacatttcagaattacaaactggacagctaacattatccatcacaatttgaaatcttacaaacttatttttgataagcaattgatcattaaccacttgtcataacatgaacttgtgcttcggcaggctatttctacaccagactgcctctttatagcaggctttccccacctgcaatgtactgttataaacagaagctgcactaaatttaccattcttcccttcagcaatgaggattgcagcattaaatttcactcttaggtgacacaatttgcgccaataccagctagcatccgtggtttgattgtagtcccagatgtttgtgttctttaaatacaccacattaacccattttccccaaatcaaatcatgtttgttcatcatagcccaaatatactttgttaggattgctctgttccaagtaacactatccctaaatccaagccctcaatgagactttggatagcagattttttcccaagaggctatatatgtatttcgctcctgttacctttgacaccccacagaaaatccgccaagtatttaagaggataggagccctcctctaactgaatatcctcaagaatagcttgtttatccacatcatgaacgcccaccaagaacacttgggacttagctaaattagcaaccagccctattgttttgctaaaatcatccagagccactttaatgtgatgagtatcctgtttagagctcttgcaaaagagaatcaaatcatcagcaaaacataaactgattaggtttacacttttgcacatggggtaatgcctgaaagttttctccttagcctcgaatttgagccttctagtcaagtactccattattagaacaaagagcaaaagtgaaatcaggtatccttgccttaggcccttcatccctttaaagttcccttgaagccttccattcatcattaaagtataggaggttccctttaagcacaccataatccattttatgaacctagtaggaaaattcaaacctgctagtaagtgttcaagaaagttcgagtcaaccgtgtcataggtcttacttagatcaatcttgaaagcacatcttggggagacatttttcctatcatagtttttgattagatcttgaaaaattagaatattatgagcaatagatctatgctcactacatcaaaagggactttttatcccactttttacacttcaaaaattataaagtgggataaaacttttgatcccacttttacttttggagccttaaataaaagtttggaacaagggccttatttggaaaacggataaaaacagtgttagaaaggctatttttatgcatttgccaaacgcaacttagcattttaagtgagactttttatcatctaaaaattgggataacaggtcctcacacatttgggctttttaattgttgggtcggctacacatataaaaggaactactaacgtttagggtttttttttattacggttactattatttcctcccacccaatctctctctctctctcctatctctctaagcgactgcccatggtgtatctcattgcaatctgctcttctattctcgtgcatcatcccacgccagcggcctttttctggtgaaagacgagtcaacaaagtttagatccgagctccatgccctctgaaacttccaggtaccattcgtgttctttttcttttatgttcttgagatatctgtgctcctacttcttttttttttttttttttttctaaaatgccgatcaactctctctccttctctctttcctcaggtgtgaacgttcgtggtcgacgggttcatggtttttcatggttgacgaagctttgtggttgctatttgtggtcgttgataatgactcacggttgtcaaaggtggttcgccgctattcgtggttgtcgaaggtggtttgtggcttttgttgtattgagtttttaggatttaaatgtgtacttattgtatattttgtcaaaaatattattaaggaaagaaaaatctctgtagtggttcattgcttgttagtattagaatattttttttttatttttttttacctttaatactcgttattataggaaaaccgggataaaaaattacttcttatcccagtttttaaagaaaatctaggattaaaaatagtttttttatcctggtttctccataataaccgggattaaaagtgagtttttatcccgatttttataagagcttttatcccacgtgcatgtatcccagttttcattttagcaaaaactgggataaaatgcccctaaaaatcgggataaaaagcatatttttgtagtagttgcttgatgaaggcaccttggttctgatggactaggtgaggaagcacttctgtcatctttaggcaaataagctttgtaatacatttatacaaagtactacaacatgctattggcctaaagtcaatggcttttgcaggaacctccattttaggcaccaaagataacactgtttcattaagctgagtagggatgctgtctgtttcaaagaactgaagtataactttactaatttcaacacctatttttggccaaagttccttgaaaaaagctgatccgaacccatatggtctaggaattttggagttagggatactgaacaaatacctatttatctccttcaaagtaaagggccaaattagttgcaattgctgatcaagattcagcttgtgaccttggtcaagccaggatagatttattcaataacaggcagtacttgggctccccataaagctttaaaaatgatcaaaaaagtccttaacaacatttgaataacaatcaaccatagttccctgatcagaaatgaaactaactattcgattgtcatcccttcttttcttcagactagtaaaaaaataggctgtgttatcatcacctttgctcagccagtttatcttacttgtttgttttgggttttatgccctaannnnnnntccatttcaatgtaatccattttat

SEQ ID NO: 111579 - DNA, 2648 bp, Cannabis sativa
ttgtttggtatggagtgaaaaattgtatggaaaaaatttaaattcaacataatttgtcatatcaaacatgaaaaattgatttttttttttgttctctacatatttttcttctacgatttccttttttcttttctcattaaaatctaacttttaaatttgaccgaaaaaaataattctcttttgaatgtttaatggtggaaaggaattagttatttgaattatatataccccaaataaagaaaaaaacatctatatagtgattcaagtgctttattattattaatatcatgcaatgtattctagtgttcttctttacctaacttctaataaatttaattaccattttcattgggattagtttatgaaacaagaactttctttttcttattgaaacaaacctaccaaagtcaatatgatttaataagctgtgtttacttggtccaattataatgatacatataatacatttacttacacccataatcatatgtaagtcatatttaatcattatcatataaatatatatgtatatatttatttatatagaaatcacattcctatctggacccttcttctaagaaacttcactcatttttaatgtgtattattggttacatagcagccactgctgtaagtttagacagtgacaaataattatgttaataataattaatcaaccataaataaaatttaaaaaaaaaaatacataaaaaaagtggggaccatattttgctatttcatactttctctaggacattctaatctttctataagaggcacatcatactattttgggacatggatatcaattttttaatatataagcttaatattatattaatcaagttctagagatttcaaagtgattaagggagaaaaaatattgtttaatttgtttatagagtggttgttgtacctaagaagtaggcaacattgtttataatcctaattacttgaattaattagtgtaatgggaagaccttaaatatcttttggaagatcacatttaaaaaaaaaaaaaaaacaagtattagttagttagtaagagagaagataatgcaagtatatatttaattttattgtaaaaaattaaatcatgaattatataatataaaaagaactacaaattaagttattaataatccctagtatataccctattacctacaaaacaatttagtctcaaagtatatacttgtacaacaagtaatctatatattaagttttttttctttctttctttggtgaaggacaacgagtttgtagtactaataatttataaattcaacaattacttatccaactacataatctagaatatatatatatatatcattatccaaatatttatatatatttaaaaaaaggaataaaaagttaggttatagagtaataagagacctagaaaaaccatcaatcaatgtttgccaaatatgtgtatgggtagcattcataaattatatatataaataaaaaaaaaaaagtaaatttttttattagagatagtctaaacttaaaagtagattaattttaatctatctatctataaaactaaattaataatacataagtgagatgtataatgcattacattacatgttcaagtctttatataatttatatcacgtttgggaacaaacaaaagtatcacttttcaaaataataataataataataataataataaatacaaaaatacaaaatatctatcaatttaacataaatatcaaacttttaagagattattaattataatttcttattacaattttttagccaattttcacgctcaaaatcatatattaaaatattttttttttcattttttttcacagtgatatttattatagttacaatattatttctgtaaatttttaaaaaattctgaatagtttacagtactgaaaatagagttcttgatatttcagtctaccacgtgtgttcaaaaaaattcaaacatattttcagcactataaactatttgaaatttttcaaaaatttacagaaatgatgttgtaactataacgaacatcgccatgaattttttttttgaaaaaaagtattctgacatgtgttttcgagcttaaaggttgctaataggttgtaataggaggttaacggtaacactccttaactttttaaagtaatttgcggtgtaaatatttaagtttaactcttggttgcatataaatgcttaaatttaatttttttttacaattataatacttaagttatatttgtagaacttctgtatatacctggcttgttaagtgttaagtcattatctgcgtgttttcttattagaatgtttaaattatttttaaaataaaataaaaatttaataacttgaacaacttaaaaactgccatgtagtgattgacttaatacttcacgaccaagtagctactcggagtcaaacttagagcacttccaactacttctctactctattctttaaaatacatcaccaaaactctattttatctattttacctcaaacttttacattatatcatacatcaacttttttattttattttttctatatcatttaaatattatacatattttaaatatattttattcattttatattaataattcatataatattactcacatatataaaaaagttaaagaaaataata

SEQ ID NO: 111580 - DNA, 10030 bp, Cannabis sativa
ctggtttgatggaacctcatgattctcaacaatgaaatatgtccaaatttaatagagactaatagtaataattctcaataatatcaattgtatacaccaaacaaaaagtcatcttccaaagaagaaaaaaaaaaaatatatcaaagattgaagctttgaggtcctccaacaatggcggaggaggagaaagagaagagccaaaatctctattactggggaggagacatagaagaacaagattactacacccaacaaggaatcaaaggctcatcttccttcttcacttccccaagaggcctcaaactcttcactcgttcatggcttccccaaaaccctaacaaccctcctcgtgccctaatcttcatgatccatggctacggaaacgacataagctggaccttccaagccacgccgatcttcctcgctcaaaacggctacgcatgcttcgctctcgatctccaaggccacggcagatccgacggtctcaaagccttcgttccctccgtcgatctagtcgtcgaagattgcctctcattcttcaatttcatcaaaaatcgaaacccccaatttcaaaaattagggtttgaaaaaatccctaattttctcttcggagaatccatgggaggagcaatttctctcttaattcacctctctgatcagaaaggcttcgacggcgccgttttggtcgcacccatgtgtagaattagcgagaaattgaaacccagatggccaattcctcaaattctgactcaatttgctaaatttttcccaaccctagctgtggtaccaactgaggatttgatgcccaaatcagttagggttgaggagaagaaattggtggctgatcggaatccgatgagatatagaggaaagcctaggcttggaacagttgtggagcttttgagagtgactgagtatttgagcttgagattgaaggaagtgaagattccattaatggtggttcatggtagtggtgatgtggtgactgaccctcaggtgagtttagcattggttgaagaagctaagagtgaagataagtgtataaagatatatgatggtatgatgcattcattgttgtttggtgaaagtgatgagaatgttgagattgttaggaatgatattctttcttggcttaatcataggtctaagaatgataatgattcatcttcatcatcaatcataattgattgattgattgaattagttaattatctaaaatgggtttggttgatcaatatcaaagtttgattctttgttgtttttttgatcaattacattatgtgtatattgttgtgtttataggggtttgagattttgattgctataaatgaatattcttttttggttgaattgaatcatagggcttatacttcatattcatcaataatttatgattgaatgaatggatttaactattggttttggttattattttgatttttgttggaacaagtacatttgtgttacattgttttgttaatttgattgggaatgttgaattagattgttataaatgaatagtctttcttaattgaataatagggctttataatcattattgagtgagtgaatgaatgaaccaatgggttaattttattgagaatggttttggttttggttatcaaagtttgaatctttaatatatgatttttgtgcaatattacgaggaattagtaatattagtgtattactaatggccaatatacaaacaatcaaattcatcattcttaatattaaataatccacaaattgattttacttgagcacaaaacaacaactcaaattgatttgaaagagtaatatcaaacttgatggtattaatgataattattacaatcaataaatacacttgattattacaaaatacaaaagaacacaaaaaaatagaagaaatgaagtataaaaaaggtcccaccgagacttgaactcgggttactggattcagagtccaatgtcctaaccactagactatgggacccttttgcttattaaaacctctctactaattttctaccataattacttatttgaaattatacttatatttcaaactaaaattcagatcatatttgttctttttcgagtctttcttttttcattctttgaattccaaaacaatataaaatggaatgatttgctttgctcataacatgttttgattaaaatgaactaatctctcaagtaaattatacaaccaaaccaacaacaacactttttcaaaatataaacctaataacaaaaaccaaatggaataagagacacatcttcaaatggtgggcaatctatcatttacatgtaaacaaaaaatggactaacaaaaattatgaccactttgtatctttaggttaaacctcaagcaattgattcccccccacatcctatacattgtgatttggagaaaataaggaagtggaacaatttcaatagagtaaaaaaaaatcaaaaataaaatgggatcatgtataagaactatgaacataataatcttcgttgcttgttttgtcagtagtagtaatagtagaacctcttcttcttcatcttcttctacttcctttggtccttttcaatcaatctatttgagtcaggggtttaatgaaaaactaactgctaattacctctctgttagcaaaataatatctgtcgaaacctgtacgaagaacaacacattcattcctcctaatcacatcatgaacagatatttcagatcttctacagttaggcgagattgacgaccaccgttttcatcttctccgaatgcagaagcaaccatctctctcttcttttgctgagaaagaccgaaaaaggacacaatattgtgagaacatattaactaagatacccgaataagtgctcgtaatcaatcggatttgtacctgtagatccaagatccgatcttccactgtatctctcacagttaatcgcaaaactgtaacaggacgagtctggccaattcgatgtgctctatcaattgcctgatcttcagtggtaggattccaccacagatcgagaagcaagacatggcaagcagcaaccatgttgagaccaagactggctgctttcaaagacatgatcataacagtgacctgcaaaaagagaaaaatagaaccgaacatcagaaccacatccttcaaattttcgaaagaaaatgacaccagaaagaaaggaatggtttccacaaacctcgggcatggtgttaaaatccttgacagctttatctctggctgttactgacatcgttccatctagccttctgtacttgattgatgaatcttttagacatgcttcaagtaaatcaagcatcctcgtccactgggaaaatacaattgctttctctccagcaaccttaatcgcagtactacaccctttatcggccgcatctgagctttggatatcagcaataacctttggcggttcagctgcacaagtatctattgagttctcaaccgagctgacatttccatctaaggtattctgtgcagaaccattaagtggggaactatccagtgttaaaccaatttgtggtgaaatacccggtgaagaagaaccattttgtggggaactattcggtgtggaactaagttgtggggaactatcctgttgtccacacaatgactttaggacgtcaagagcagccttaatcttggaagaattatacagaggaccgtcattacaggactctcctgtttgaacaacttctgaacgagaacaaccagctaaattatctacacgagactgatcgttgacgcagctgtctaatgcagctttggaaaacactgaagaggcattaagccgagctttacagtttgtaacagggcacccagtgtcatcaccagaaagttgttcactaagacattggttgcaaaagacatgtccacacttggcaacaactgcatcttcaggtggatcctattaaataatcatcatgttttcgtaagcattttctggtatatttgagccacatacctaaacttatatcagaatcaacaatgaacaaaaaggtaagtagacttgattgtacatacattgcagatgcgacaaattgccaaagaaacctccaaacatctcagaagatactcctgttcctcttgcggtagtttcctagccatctcagctgaagaattccagagggaatttgagtcaacacccttgacaagagagggatgatcacacgcttgtcgaagacgcaagagcattaacaaaatgttgacataattttgttttacagttccagcattcgcatactcctgaaaaatagtcatgtgtccgaatttgaacattaccaccatgagcaatagatatgtgcagcaactaatttacataagcagtgctttcaaatttcatacagatgaaccacttcacgtgagaaaaacaaaggcatattcgtaagaaataagaaataaaaaatatgccatacttcaaattgggcacgtgaatcagcctctaatctggagtaaaaatcacgttcttccagcgaaaattccacttttttcaattctacagatttgggtggtaagttgatgatcggtttaccatcaagaagtgtgcctgcagcaagccattataaaaatggtgagcatgctaatgtatcatttcccaattttatggagccaagtttattaattccaatgtataaccgtagctcacaagaagaagaaaaataaatccacgcacaaatactagtttaactctcacctttggtacgtcgtaacatgattgtcttcaagaccgtttgtagttttttgtacccatttgttggactcttactaattgggttcttaatatactgacagaacaatttgtacgcatcataagggtcatatttgagaaatcggaagtagctatacagatcatcaattgcattttgaataggagtccctgacaagcaccacctccgtttggcacgaagaccccaacaagccctagctacctgagttctgtgattcttgatgctctgggcctcatccaggacaaccctgaaccatcccacctttgcaagagggcgcacaagagactcaggcaatgcattgtccgatccctttttatctgaacgccttttatcagaaccaggaggattcttccttttctgtccggccaacgaatgagctttgggtttccctttctcatcatcatcttcatcagcacgaggttgctttggtacttccatactcacaattgaatacgtagtgaggacaacatcatacttagcaagctcattgggatcttttgttcggttgcttccatggtacaccaatacagagagactagctttgctggttaccttattacgcaactcatcatcccattgccgcagaacacttgtaggacaaacaataagagttccagcagccggtctacccttagctatcaccaaaggcttcttgcttctcattggagactcatttgacgttaatgaaagagcttttggttcttgtttcactccacgattaacatcatcatcttcatccaaattcaagggttccacctcatcttgtttcacaggacagagggatggaggtctctctttaagtataagtgcaattgttgatactgttttcccgagcccctacagtaaaaaaaataataatatgattccagaaaatcagaattattctttaagatctacatatgatatgtcataactcaagatagtgtcaataaactataacagggcatcaacctgatcatctgctagaatcccccctgaacaatgtgtgttgtctgtctccttctgaaccatccatgacaaggcaattctctgtgcaagaagtagagtaagattaaagacagaatcaagaaatgagcataaattagccaagcaaaggaagactaatatgatagaaataaaaaccgatttcaagccaaggttaaatatcatagaatatcttgatgagaaggagagagtatgtgcaaattagagttgtatttgccccaaaggaatacaagctcacattatgattatattacagatatttttggcaagattgcccatttttcttttctgattattaagcctagattacccgaaacattagagacaattcaacacttcaacattttaacacgtaacaggcagtaataattccaggcacacgtgcttatcaactaaaattatctttttagacaaatttagtcacacttcacaagtattgccaataatctacatatgtgagttaccatatatctactaaagaggggaaagtttgttcttctccaatatgactaagagttagaaggaaaagaaaaaggggggagcaatttaaacctgatgacgaagaagaggaacagttaaagatccatctggtggactgatttctgtctttggctgtgaaagatcctgcatatgcaagatgaaagctcagttaatcaaaagtatcaaatcgtaacacagaaatggtaaatattaacttaaaatatttacaaacaaatatcataagatccttggcaaaaccctaccacagtgaactcaaaagaaaaagaagagcaagagatcaatgttaatgatgttaaagaaacatttgggaccataacttaaccagtccatcacaaaatgtatatttaatagacgtaacaatttggaagacagattcagaatgtacattaagaacaatgtctaatctaaatctgcacgagtgtggttgcacatagtttctgtccctaattgcatgggtaataaaaaagtagaaatatgcataaaacacttggaaccggaataaggaaatgcatgatatagatttctaacaagtttaaatagcacggtaaaatttagcaaagagctgtttgcataccatggccacactgcccagactaatgaaagttatgagaacaggtaactatctaagtaataattacacttttacacaataacaaaaaaaagaacaaatacgtattaatagcaaagtccaacgacttcaacagcaagtggatatataaatgcaaaactaacaaggcgaacctgcaataatcgtaggattacacgctcatcttttgccttgacccttcctccaactcccacgtgattgtcaacgcttgtagaataatttgaagtaacaatggtattcttaaaagctacaggccgatttaagggagcagaacgaggagcaggatgacttatatcttcaataatgcatatatcagaatcatcctccacaatagatttctctgaaaaattactatgacttgattctggactgaccttagaaacatgagaacccacattataagattgattataacttggagtgaaatgttggccaaagggcatatattgtcctggggcatttaaactgaaatttccaatatttttaggggatgctgagctcataaagttgggagggtgacagagtttcctagatgcaaaaatcatgtcttctttcaaatccattagttgctcagccttctgagtagacaaagaggaaacagaaaatgatgggttaaagtcattggaaaacattttggtgtctgacgagcagggttgctctctgctaacagcttcatcaaacctattaacaggaggccatatagatctactaggcacaagcatatgttcgggtttctcatcttttactctctcttcactgtaaatgtatgattgagaagaagagaacggctgtgttggtaacttctcatcaatatgatagccattgacatcataataagagctttgcataggtgaaatgtaatcattagctttagcttcatattgatgattccatcccggaacatccaagtaattattcattgcaacccctgtcccatatttctcaactcttcccaaatgaccattcaatttcagtttagtacttgagcatacactttctgtttgaaattcctcatccttcacattattcttcagcccatcattggttgtcaaaatttgagaactataactatgaaggagatgatcatctattccactatcatattgaaaagctggatgatagccactcatattatcaccacttagacagatagaagactcattagaactcatgtctcgcggaaacatatcatgcaaatgcatcgtattttctcgagaaaacatattttctggtgatcccactgtatctatattttctccatatgtatcatgcttgctcaaatttacaccaatgttcttaggaccagggtatggaaaaacacctgcaagcataagaaatattagttattgcgactcataatatgcaatgtcatacaatatattgccaagaacatattaggaatgccacttctaatgccctacaaatatgcccaaaaacatacactggcgattgatttcaggtactgtattcctgaattgagtctcagtttcttcctgcgaagtatcatcatcaaaattgttgccaaagtctggaatgctttcagcatctctttgaggaaaactagatgttgtgctgcaagtgggtagtgaaaaaccagcactctctgttaagcaagttccgttacctggaactagagaaaacaagtcttttatacttgcagaattagtattctcaggagacccttgaaccctgttgttgcctgacaaatcatcacacggtgtcaagcccaaggaaccacttgagaaccctacattacgatttgaagctcctgagttatacaaagagttcactggaccgggacacattaagtcagtctctgcaaaatatagataataataagatactatcagtatctgagaagacatctataaaacatatggcattcaaaataacaaagtgaatctgcatagtttgctctacactacctagctcagtattctctgcattgttaatggcaccaagaactgcttcacccgatgcactttttaatgaatcctctgaacaagtctgccattgaattacccaaaaagttaaccatcaaacttcaaacaaatccatacattatataaaccaaataattaaaaaggaagctctctgctgtaaacttcaggcaacactcaattttgaaaacaaataaaaacaaaacaaaccacaacatggggaaaaataccagggtgcaaatcaagaatgtatttattaacattgttaaaaatccaaatgttggattaatctacaatagtttatacaaaaacaaaatttgagcaatggttggtccctaaccaatctcaaaactgaaataagaagccaatgaacaactgtctcctctctatgacattttatgatgaatgtcatcataaatataaccataaataagaaccatcagagcaatgtgcacttgcaattcatttacactttcaccccattcagcacactagaatgagtttaagtatgagaaaagcaccaactttctctactctctgctgttcttcaccatttcctctaacacaatttaccaatttactctcaaaacaacccaaccatataaatcattcaataacctaaaccatacccatattcaaaatcattacagttcaaatcctccataccactttaacaatcggtacaaagagctctaaacaaaaacccacgacaaatattccaaaatcactcaaaaacattcatctcctaacgtgaaattgagtaagttcagagtaatgaatttccaaatacctacctgtaaaggttcagataactccttatcatcatcgtccttctcatcaattatatcaaacaacgtatccaaatcaatagacatactcccatattccggatcatcttcattaaactgaaactcctcaaaaccactcaaactcttattatccatcacaaaattcgaactctcctccgccatcatcaacatcaatcaatcaatccaatccaatcttctttgaataaagaaaaccctaatcgctccgacgattccagttttgacaaaataaccgaactttttccacgaaatttaccaaccaaaacacaatcaacaattcgaatcaaagcaaaacaaaatacaaaatcaaaatctctgattggtttccaagaaagttcccaaattgatttttttttttttttttttttgggttttggtattttgaggctttttaggaatgtatgcttgtatggggtatgttcatgaggctatgtgttttaggtaa

SEQ ID NO: 111581 - DNA, 6857 bp, Cannabis sativa
taataataataataataaaaggttattttattatttcttagccactaaaaaatttctaacactagggtatttggtcaactacgagtaccccaaaatactctggtaattctataatcaacttatctcaataattctatcaaaatttccaactaaatccgttgtgacatttttggcctccaaccgagtctctaaggtcgccaaatctgaaaaatatttttatttcaccagtaactcatattatacctgcatattccaaataattctccgtaattaatacattatgctaatttatctacttatggaaaaattcataatttatgctgaattaggttagtaggatcataaacttactcattactctctaattaatcccataatatacaataaatcctaattattcatatttagatttttgggatattacattttcagttgacaaaaacctataaccattaactccaacttggcatcccatcagaacccactttatagacctttttctcaacttatattctacattgtgtgcgtatgcagcacatccaaaggttatgaggtgtgcaagtgatggtggcttgccattcacatttcttctggtgtcttgagttaaatgactctacttagtctgctgttgattagataacatgcattatacaaggcttcttgccaatatttcttgggcaaaccagattcaattaacaagcatctcatcttattcaagagggttcttttcatcctctcagcaacaccattttacgtaagggttttaataacagttctatgtcttttcacaccataatgcacacataattcattaaatccatcacatgcaaactcaagtctgttatctgctctaagggctttgattttaaattttatttgggtttcaacatacattttcctatttttaaacttagacaattattcttcttttcaacaagaaacccaaaattttctactaaaatcatcgataatggataaaaaaatactggttatctctaggagttttgattcttctagcaccccacagatcagtatgtaggtactctagtacttgtttggccctaaattgactcatggagaattttatcctgtgtggctttccatgcacataagtgtcacggaaaggaaggtcaaaatgtttgtaattcaaaagcaaatttgtttagagagttctaccaaactttgttcactgatatggcccattctagcatgccaaaatgtggaatctatgttgcatttggtgactactgcagcttgtgcaagaatcttagtcttgccatccaagaagtacaaaccatggttcttgatacctttcattataaatagtgatcgttgttgttcctttactagttttgtgctcatatctctcatcatctagagtacctaaggagatcaaacttctcttcaaatctggaatgtgtctcaccttggcaagtttcctaattgtgccatcatagcttctaatggcaattgtaccaatgccaacaacctgacatttatcttcaaatttggaatgtgtctcaccttgccatcatccacaactgtattggagtcatttcctttgtcttcttcttccttcttattctttttcttgtctctttattcctaacagtttctgattaatgacctacttttccacaatggtgataattcctgctctcaattggtcttgatttggatcttgaatttcctctatgtcttgaattgtctctagatcttgaattaactcttccttttgatcttagattacctcttctacgttgtctttctcaagccattaaagcttcattagacctagattcttgctttgcttcatttttccaatttaattcagcatcacttgatctcggagtgctcattatatcttccaaagtgagagtgtccctgctatacattataacaattatcatttctttaaattggtcatgtaaaccattaagaacaatcacaactattcttctttaatggtttcccttgtgttagtaagatataagaaaattatattcaaatcatctaaattctattctaaggaaacagtagcattcattttgaaaccataaagcttccctttcaagaagatctttgtagcagtgaacttggccatgtagagttgatcaagcttgctccaaattcccaaagcagtattcgctccaataacttatatcaagacatggtctgcaaggttcattattattatagatcgagcttgtttcatcataatattgatttcattcttcttgaatgcatcaacttccttctcaaatttctaaacactttcttcaagtgctaaatcaagtttctagtatatcaatatggccatcatcttctccttccatagactaaagtctctcgatccatcaaacttctcaagatcaatcttgcagaagaggaagctatgtttgaaaggttcttgaatgttaatagcttgtcaagattgagttctcctcctcaaaattcctagctttgatactactgttgtaatcatacaacacagaaatcaaaccaaagaacattcaaacaagtcaaaaccaatcacaacaagattaaaaaacaagcaatccaaatcaaaaatcaaaatagagattaaaaatgcagaaaataaaataatgagacacaagaaattttgtacaggtttggccaaacaaaggacctacttcctattactccgctgagatcttctccattaatgtgatgaattacaagcttgagttattgagtgcgccctagagaaaaaatctagaaagaatcccctaaaaatcaactcgggttttagctccaagataattggtcttggtccagatttcccgtctctcttctctctgtttttttctctttctgtatctttctctcactcaatctcactctctctctcagttcattatgaattttttcttacattacaagaatgactaaatcctttaaatatggaataaaagattcaacctaactaccaggtgcacttaactaactaaatagaatgctacaacatttcaaaaaacattattgaactgatgatgcagcatttgactaaaattagttaaggttgttaaattcagatttgcttgttttacgaattaccaaacaacaccttctcttctccttctagcttctttggctgagacacacacacacatacacaattttatcctcttctctcactttctttatgctttggagttaaataggccatagagttgggacagtatgaaataatctttcaatcccgtacagccttagcaaactttgtagtggaatgtacaggcaaagaggaagataatacaaaggacaaccctgagccagtacaagagtccctaccagaagagaacaaagacaaacttacctggaaagtacatgtggacggatcagctactgaccaactttctggtgcagaaattgctctcatcacacctaggggcaacccctacacggagcaatcaaatttggatttaaagcctccaacaacgaagcaaagtatggagcactcatagttgggctaaaacttgctccggaggtacacactgaatacattgaagtctgtagtgattcacatctagtagtaaattaagtctcaggagagtacatggctcgtggagaaaagatgatggcttatctaagtaatatccaagacctgctcgcacaattcaagggttacaccctcaagcaagtcccaagggaagaaaatacaactattgatgccttggcacagcttgtaagtagcacgatgaccgataagtacaacttagtaccaatccaattcatggaagaacccagcatcaactgtgtagaagaagtcgaaatgatagatacatcgctgaactggatgacacccacagcagcttatctcaacacgagaacttccaaacaatggaaacgaggcttggaaaatgatgagaaaagttgcatggtatatcatagttgaaggtgtgatgtatagaagaggcttctccataccattgcttagatgtgtaacaaaagaagaggctgcacagctcttgtccgaagtacatgaaggattctacagtaatcatgcagcaagatagagtttatcaaagaaaatactaagaaaaatgatatttctggtcgaccatgataaaagattgaaaggcctatgtaaagaaatgtgataaatgccaaagatttttaaagatccctcgtgaaccccccaacaagctaatataaacgcaaaatccatggccctttgtcacatagggaatagacatgatcagacagttgtccaaatgtaagggcggggtgcaatatgtaatggttgtagtggattacttcacaaagtggacagaagccgagcccctagcaacaataacatctaagaaagtgttggattttgtagcaaaaaacattatatgtcagtttggactttcgcagaagattgtctcggacattggcaagcagtttgatagctagatgttaactgatttctatacggcacatggaatcatcaagagtttctctgcagtggcacaccctcaaacaaatgggtaggttgaggtagtcaacaagacactcaaagacaccatgaaaaagaagcttgaagaaactaaaggaaattggctagaggaactactggaagtattctaatcatactaaacaacagaaaggacagcaaccggacagacagcattcaccatgacttatggttatgaagcaatgctacccattgagtcagaacctccatcccacaagagactgacctataatcaagaaaccaatcacgccctcctagcggaatcacttgataaaattgaagaaaaaagagcctcgacagacctaaagctagtagctcatcagcaaaaggtggttcgatacttcaacaagcaagtgagggcaaggaaattcttcgtgggagatatggtccttagaagagtgttcttaaataccaaagatagcgtagctggcgtacttaggcctaactcggaaggaccataagtaatagaagtcatagattctggagcatacaaacttggtcggtataatgaaaacatggaacttgttctggtaccaaggtattagaacagggaacatttaagaaaatactacaaatatgtgtgaaaggtttgatgaccccccttaaggtacacaattctcggacatctactcttaagtagatggccttctaagcggacctcgctcgagggtttggataaaacgactgacactcaggttggatgacgatctctaaaatacagtctagaaaaaacaattattttatgttttaattagctaaagatcagttagatcatgtcatagcttttataattcaataaatttaagttactacgataacaaaattattcagaccaataaattcataaagatattaattatcattctaattgtgtctattatttttctttctatagcaagctatgaaattaccgttaaaaatgtgtacaaagggtctgctcgaacccaacaatcaaacagacaaaaacaaacttgtgcaatgcaagtgaccaaaagtcataagtctgctcggtcacttgggggcaactatacccgtacaaagcataggtaaataacaagctcaaaagaaacattttcatgtgcaattacttaagcttaagggaaaatattcatttcaaaagataacaaagcatgataattctgggattaaaagctgcccggctagctagttatcttaaaacaaaatgaagtattaccaagtttaaaagtttcatggtcagccatcttgaactgaaaaaaggcccataggacgaattgaaataaaaaaatgggaaaggaaaaacttcacatggctggagtccttggctctctgtacaggtcggcgatacccttagtggctggggtgtcagtactttggctggtcggagcttcgaggtaggctgcctcggattcctctttgtctttttgggcctcataaaagctaagataggcctctttattttcattgaggtaatcaaagtttgcttctgggtttgccttccaaagctcatagaaaatatctagggggaccgtctctaggttgtctgcctccttttgaagcgcctcccgctctacctacctgaacttgagactctcctctaaaaccttcttttccttggttaagttggaaagtaaggtctgaacgctttccctctcatctttcatagcattgacatctttggtcagagcctcattgtctgcttcaagctaagtagtggacggcatatccttgatctcctgcagcagttcttcaacataattgttggcaaccagaagttgcttattaacctcgcccagcttcagactcttctccttggcctccttcttggcttcttccacctcctttttcaagttggtggtggtcgttgtggctttcaaggctggggacttggctcggaagtaagtataagccatcttcaagttgagttacgcaaagaagaaaagttaaaatctacatggataaaagcatgagaaaaagaccaaaggaaaagtacttactcgggtcgtctccttcagtattctgcccatgagcagctccatagacatgtcctgccccttgagcagttgatcgtttacctcaggaagcacccagtcttagtaaaactagagcatctccttacccttcttagtctcagggttcagcatgacaggagtggcttggggcttaggtagcctaggcccatctatactccctcctttggcacttttggacaatacagccatcgcctgagacttcgaattcctattggccagtgggttcacatccaacactgtctcctcacaaacctcagttataggcgtggttaaaccctgttatagtgagatttctctcacctagaaactcgataccagactcttatttagaggacacgtgtactcagattttccaatgaaag

SEQ ID NO: 111582 - DNA, 2340 bp, Cannabis sativa
  modified_base (44)..(54): a, c, t, g, unknown or other
  modified_base (2273)..(2275): a, c, t, g, unknown or other
tgtattgtattgtattgtattgtactgtattgtattgtattgtnnnnnnnnnnnttgtattgtattgtgttgtattagcgttataatatatttttaatacactcgatccctacaccaactacgggaccgggtccgggtccgggactgggttcgggtctaggtccgggatcgggtttgggtccggggtccgggtctgggatcgggtttgggtccggggttcgggtctgggtctgggttcgggtcccgagtctgagtccggggtccgggttcgggatccagggtccgggtctgggaccgggtacgggatctgggtttaggtccaggtctgggtttcggggtccaggtccaggtccgggatccgtggtccgggttcgggtccgggtccaagtccaggttcgtgttcgggtccgggtctgggtccaggtccggggttcagggtccagggtctggagttcgggttcgggtccaggtccaagtccgggtttaggttcgggtccaagtctgggtccggttccggggttcgggtccgggtctgggtcgaagatttgtgttgaccccaaattttttgtaaatattataatacaagttaatacagatcatttattatgtattaaataatacaacatacattgtattaaaaaatttagtcgtaataattaatacaatacattgcttaatctaaatataatattatttattatttaatacaatacaactcttatacagcgtatcaaatgagctcttaatggattaataagcaaactgaaattaagcatgatcatctatgtatgaatatatataaatgggttatgtggtgggtatggtcaagtcaacttatttataattttggttttagtttcgacactattactaaaatggatcgagtttaaattaataccttaacctcttgacaggatacgatcacaaccataagaacaaattgcaacgctatataattattgtttacgtacgtaatagtgtagtggaattaaatgattaacagaaggccctattactgacgatggccaacttattttgttttcatataacaggtaggtcaaggatagtttttttttttattattattattattagtaataaaaaaatataggtgaagggatacaaactataaagtagtagtgcgatattagtacacacctatatatatatatatccaaactcttgtgaaaaaataatttaggagaattaataatattttttattaaatgtggccaatagaattcaatttcaaggagaaaagttggctcttggggtcccaaataatattttttttttattaaatgtggccaataggatttttttttttttgaaaaaaaaaatgtaattgccatgttggcaacgatgcatgtcttattaatgaagtaatataagaatatattaatatcaattcaatgtaagaagcattgtatattagtggatttgaattgattaacagaaatctcttctttttcttgttatttatatatgtatgatgggattagagattttgagacagagaagagtggtgtggggaaactcttcttttatagtgggatagtccatgtatgatgcaacttttcctgcttatatatatatatactagtgaggtagctcattatttatattgggataacaaaaaatctggggatgactttttctgtggagtaatatctggttatgtattaattctatataaatatatacatatatcataaatcattattaatttaaaagtttgaataatgcaaactgacgaggattatgaataaatggctccacttcaggaaaaatatataatgcttactcagagctactcagcttattatttaagcaatttttgtatgcttataggtccagtagtgctctatatcattggtgacatagatgtataccactaaagtttccttatattatattattattagccattttttccattgttgttcatttatcattgcttaattcgtggcaccatgatcaaaattaattaggtcatctaacctatatatatatatatatatatatatattatctgaaaatcttaaattacccagttgttgcatgcattaatttttatctattttttaaaatatattactaatttttttattattttatctcaaatttattacatcatacactaattttttattttatttctctacataattcagaaatgtagagccaaaataataaaatattgattaaaataaatttgaagaagctcactcccccaatagctaatataaaatagagcattgctattgggcacnnntggtgcctagcaccttctaaatgtgtcgacttgcaattggctagcgatactctataaaaattatt

SEQ ID NO: 111583 - DNA, 5084 bp, Cannabis sativa
aaaacttacctggggcgcaacagacgaagagattttagtgagtgcttgatcaaaatgtgttgttttgatactatcttcatcaaaatcttcaagagcagccaatgcagcttcgttaacctacaatcaatacaaattttataaatgtcacaacccgccatgaaataattttaagttgttttgttttgtttttttgtgagtgtgtttagcatagacaagtagacaaccaatgcatgtaggtcagccccgctgaaattatcgcagcccttcatccgtccaatagcattcaaatcaacagtttcatctaacggcttatcccttgtcagggctttcaagatcaaaccacgttcatcaggagttggcaaagacacgtacagatgcttgccaaacctaccaggtcgcaaagaagctttgtccatcacgtccggtctgcaaaatccggtaacaactactaagaaacggataaatgagtgcatttgataaagaaaaatttacataacagacaaaatttcatttgtacactttcaacttttttatttacaaaaatacaataataaactgtttttttattgttttataatttatttatagttgtattatacttatcatgaggttgtttttctgattattttatagttatcgtgagattgatttttcgttatttttagttgtatttttactttttattgagcaaaatatatttttatattaaaaaattttacaccgtaaaattataaataaaacataaaataaatgtatttttgaaaattccccttttgataaaatgtactttatagcatattttattattttatataatagtaacattagtattgacttgtatttacatacaagtatataacattaaaaaattctataatgactccctatttgtttaattttttaggcatttttttttcatgatcttctacattgtagttatttaagacattatgcaaaattttaaaaaaaattaacatgccaaaaatatgttttaaaagtctaattcgaatacgtaaaaaaaaataagagttgagtttaacaaactgtttgaacactattttcggcgtgttaaatttttccgaatctctcaaaattttgcagaatgtcttaaataactacaacgtagacgaccatgaaaaaaaattgaactaaaaaattctctcaacagataggggtgcatcactgaaccccttttaagagggtgcattgtagaagtatcctaaaatattttaatacaaatgaataccaaacatagtaaaatatatgtcaatacaagactataatataatacagaaacgtgacctttatactaactaaaatggattgagtagttttaatttacctattcgtggcaccaattacaaagacattctgacgcttgtctacaccatctaactcggtaagcaactgaggtggtaagaaatgagttcatttcaattgaggatccaaataaacgataaaacgaatgaaatcaagaatgcctttatgcacattgtttaacctggttaagtagccgctcagtcacccatgacccctcttttccacgctcttttgtcaaggcatctacctatcatagtgaaatgacaaatgataaaggaacaaagttataacatggtaaaatttcacactagagagaaatcattgttgaataactcattctgcaataaaaatagttgtaagctaagccttaattatcttacaagagtattttacaaaatcttttgaccgcggtgtggcttggagcagccagaggaagaacagcaattttaacagggacctttggtgatgtcattgttgtatgcagttccaaagggagccccagaaaatctaaatagggcgtggtgttggcaatgcaagtgccccaaaaagaaattttaagggagagctacgtgatagaaagatatagatagatacagtacaagggcttcaaatagaatatttgtgcttaaaataccatatttgttaatttattaaatatgagaggtggcattttaactgatttgtcttatttttattaactggggacacgtgaggacacataaaaatgggaatggaatttgggttcaacaagaagacatggaatagtttcaaggaaacaagaattattaagatgtttgataacatgaaaaatagttggaaaacaagaaacaaaatcactatattggagaagggaggaggaaaaagagacagtgactacatttaataattgaattgacaattctttataaatagagctttgcaggtggaggaggaataaaattagaaaactaattttgaaattcttttttgtgaaggaagaaactaaaagaactgtttttaattgtatagaaataaagcacctaaaccaaatggctataataaggattttataaaattcacagcaaaacaatggaggatttggtactaataattattttattttgtgagatgtaatataactaatataatttgcacagtcaagaagagacaaccaccaacctcatcaaagaaaagtatgcatggtgaacacatccttgcacgactaaataacatccgaactgctgattcactttctccaacatatttattcagaagttcagggccctaaaaagccagtagaaaatacataattatatcacgaaatttctccaagttctatactagatatgattaatagaatatttcatttttggttcataaacaaacatctgctaaaaaattattaaaattgaaaaagcaaagaaggactaaccttgatgtgaataaaattagctccggcttccttagcaacagcttgtgctatcaacgtcttaccacatcctggaggcccgtaaagcaaaattcctgtatctaaattcactccaaatctcttaagagaaaagagtcatatcagacacaataattatttatagtgcaagatctaaattcactttcagacaacaattctataaatcaaattatgataacacactggaataataaagagaacttaaagttcggaaatttaaggttgcaatccaattgaaacacaaatgagtacagaagtcaaaaaaaatgctgaaccaagatgcaagtataaacaacactaacatgaggcttatagataagatcttgacaaaagaagtgtataataagagctaaagcatagctaagctaactcgtgcaacattagttcaactcgaactctcaataaaatagctgtgatagtttaatttcataacaaatttaccttatatttctcgtgatatttaatacgactaactatgtatcgatcaagttccttccttatatgatctagcccgcctacatcttcccattttacattaggaatggtagaaaaaccttctcttctagtagagggttggacaattttaattgcttcctgcaaaaatatcacccaagaattacttagtcatgctaaggttgcacacactatatgctcacttcatgactattttgaatgatcctttcaaaggatagatagcaactgcaacatataagcttgcaggcaatatgatagccacactggttatcaacatattcacctcaaagataaataccgtaaatcacctcaaaatcagccatggtgatgcttatcttttccattacttcaggcatgactggttctttcaaccattgtgtattttgatcctcctccatagaattcccacataaactggactttctatcatataaaagtttctctgctacaaggtgacctgcttcggaagccagggccttcaaatctgctgcaacaaatcctggggtagccctggctattttaagaagatcaaaagagtcttcaagtctcatggttcttgtgaggacagaaagaatctctgccctcgcattttcatctggtacccctaactcaatctcatattcaaaacgccctggcctccttagtgcagggtcaatagcattaggtctattagtggctccaattacgagaacataactctgtttatcgtcagaagaaactttcgattctgaatgtgcatccatacaagtcattaactgagtcacaatgcgtcgctccatctccttctgtaagttttctctttttgatgcaacagcatcaatctcatcaataaaaattattgaaggggcagtcttatgtgctttttgaaaaagctctcgtatattttcttcagattcacctaaagtagtttgttatcaaagcattattcacaacatacatcaacattttttatataaagggaaaagaaaaattgatacctgaaactccagagacaaactcagtggcagaaatattgtagaagggcaatccagtttggttggcaatggcatgagctaatttggtcttaccacaacctggtggtccatgcaacaaaaggccagaaattggccgaactccaaggaattgcaatagctgatgttgatagagaggcacaagtaccttcttctcaagctgcttcaaaacccctttaatccctcccaaatcctcaaaccctaatttcactttcacctcactcacaggaacagggaggtctaattccaaaacttccttcttttgtaagttggatgtcgatgtcggcatcgacacaaccccactgtcaacatcagacacactcggacaattctgattgttctcccaaatatttccatcgtcaacatccctcttatacttcttccgagaggaaaggctcctctcctcgtgtctcatgttgggttctaggacatcgtggagtagtttcataaaaatgggtctcttttgtcgtttgtattcagggtaactgaactgaagatcatcggcgatttcatcgactgtggatgaattaaggttcttaaaagactgaagacgtcggccaagaactttctcctctctcgctcttattcttgacttttgtctcatcttttcttcactgggtttttgagggctttcgcggctatatgacctccttcgatagcaaaatagaaatacttatatttggttgtgcggttaaacactttttcggattggtactattatcctaataaaaaatagggaaatttttatatatatacattatatacattaatattacagaaaaaataaacattatatacattaatattacatgaaaacaatccatgtgtatgcc

SEQ ID NO: 111584 - DNA, 2828 bp, Cannabis sativa
  modified_base (2768)..(2769): a, c, t, g, unknown or other
  modified_base (2796)..(2797): a, c, t, g, unknown or other
ttaggcctattcagatttgatccaaatatatattgtatgctataaatcttatcatccaatccgatccaattagtttcaatcatccaatcgatctaacatccattggatgttagattggatctattttatctattggatgcatttcatgtatacctattggtttaatatgagtttatctaatattttagacttagtattttttagaacggattggatccatcaaatattttaaatctagtatttattgaattggattggatccatccaatctaaggaaatagagtaaaattttaacattaatttaatatatacatatatatattttacctataaaaagcataaaatctaaacattcaaactaaatgaaaatactaattactttgattggatgttatgtattagattttttaacaccccattcaatactcgatccaatccaaatagatatttaaaaataatatcctatctgatccgatcacaattgaatattcaatgtttggcggtcaattgtaattagatcgattgattgtcattggattggatcgatttatgcacaccctacaactataaaatttaatatatgcaaaaattatgggataaaataaaatatgtaaaaaaaattaaaacataaaatatgacatctcatcaacttttatttatttatttattattagaaaaaaaatataaattttataaatagttaaatcggacaaagtctattgcattataatatatttcatagagcagaattaacaaaaataggctaatcaagacgtttacaataataaggaagaaaatcctaacggcaccttcaactaaaagactaattagctgctagcggtaaagcatcaaaaaaatgtgaagaatatattttagattttcaacttggatgaacatatgtgacaaatcacatctatcaatgactattagtcaaagatcttcccataataattgggtaataacaacctgattattcaaacataaataaaaggaaatagcactactaatcatgttcaagacaatcataataaatgatcaatctacaaaacatgaggctaataataatctgagaatctgccagatctgaatatagaaagtggtaaccatatcacctacgcgtgagcgccaaactaatcaaacgcacacaaaaatccaccaggaaacaagactacaagtcctcagcatacataaaattaatcctactataaaaataatagcagagtggtattgcaataccattattgaaaaaaataaaatagacataaaaaatgaaaactaaacataaataaataacctcacggtaatagaatgagcaatgaccacatgaaaccaatcaaaaacctttgaagccctcttctccccttagcactttccctagtcgcaaccccccaccccaaaccaccacctcgacccagccaaagcccccaccgaaaacaaccaagctctgccaaagcaccatcaccaatccaaatctagaatgacagatcaactcccacgacaattcactactacaaaagggatttttgcgtcggtcaatgcatctggtcaaacttgttgaccgatgcaaaaatcaaacctcgctttttttctttggttgttaaccgaggcaaataataattaatttgcgtcggttgttactttgacactaaactgaaaaaccacgcaaaagatgaaatctttaaaaaaaaaaaaaattacacaaatgaggggttgagtttcagcgtcggtttaacaagttttttgcaccaattgtgcattgacgcaaatttggcctcaatacgaaaccgacgctaaatggcttaaaaaaaagaaaggattattattactcattttttttagaagatgcatgataaaataaatgtgtgtgatttttatgtatggcatgttatatattcactaatgcatgatcatgtcattaatcaactattaattaatatttgtttaaaagtgataataaacaatgatgatgagctgggtaaaatattaggtatttctaattttacaactcttagaaaaaataaaaaataaattacaaaactaatatccattgctgcaagaatatttttgtaattttgtaggatcgtcgtaagcatcctaattaattaaaatatttttaattaattattcttaaataaacattttatttaaaaaaaattcttaaacacttaaattaattaaaattccttttaatcagtttattctaaaataaagttttttattcaagaaaatttgtattatcacatatgtattgtctcaaatgatagcttttattattttaagggattaatacaacatttgtcttaagtttggttatacattttgaatttgaatttgaatttcaaaactaaataatatttatttaatttgaaattagttttaagaaaataaatatcccataaaaatatattttttaattaataaaatatataatagtgataatttatagtgtatatagagcatatatatatatattgtatatgtaccatatatatactatatattatatttaatatattatataaaacatatacacacataaataatatatccaaaaaaggggggtccagccaccatggtcataccgtggttggcggctggaagagccaccatagccacagtgaccttggcagccatgagcagcgcacgtatggacgaggcaaactacggaacaccacacaagtcataaaatttggacaaattcgagtctcttggcaccagacaaagggggacgtgaatccctaagagagctgtaaagaccgcttagtttnntttagaaattagcagttaatcatgttnnattatgaaaattatttatagctatgtaaata

SEQ ID NO: 111585 - DNA, 4048 bp, Cannabis sativa
taggtgggccctaggcacaggcctagcccgcctatgcccagggccggccctgcctaaggcccacctagcccagggacctataattttttcccttttaaaaatatatatttttattttaaataaggcccccaaaaattactttttcttatgacccacgaaatttcagggccggtcctgagttaacttataatagaatttacactcaatatgaaattttaattttttgttacttaaatatggtagctttaagtttggctattttttatggtatttttttttgaactattttatggtatttgctatgtcaatataattttcaaaacccatatttaatctttagataaatcaattttagaaaaacaaaaaatttcatttcttctcctctgtcaaaccctacctccccctcccctcaacagctccacctatcacctttgttcaccagctccacatctgacaaacggcgaccgacaattcaccaatccagtgtctattggtcagagccaaactcaccaaagagtttttttttatcaaaaaactgattttttaatcaaaaatacgagtttttttttttttttatcaagaaattagttttttcatccaaataagtttggatttatcccatattttaaattttttttttaaagaaaatattatagtaaaattaaatttacattccatatatatcaattttttttttattttttctaatatttttttttttgtaaatagccttagcttataacattaaccatgcaataaatagttaagtgggtaggtccgaaatctcaactcattaaaatactaaataaatatatataaacaaaagcatgccaattgccaaatgagttgttgagtactcataatataataacacgagtctataaatacgtaccttgcatgttagataaacttatcaaaaccccaaattacatacataacttctctttaattagctagctttattataccattcaaatcaaaaatggctccaacactagcaaatattacaagcacaactgagccttcaaaggtgactgaatttgtgatccacaagggttttggagtaaagggtctttcagaagctggcctcaggagtctccccaagcaatacattcagccaatccaagaaagggttttcaatcatgaccaaacttcttccacattggctggaaaatcaatcccaatcatcgatatgtccaagtgggacgacccgaaaactgggaattcgatatgtgatgctgcggagaagtggggttttttccaaattgtgaaccatgggattccgatcgaggttatcgagagagttgagaaggcgactcatcggttctttgagttgccagctgaggagaagaacaagttttcgaaagagaattctggttcgaatagtgtaaggtatggcaccagcttcactcctttggctgagaaagctcttgagtggaaggattatcttagtctcttttatgtttctgatcttgaagcctcccaactgtggccctctgcatgcaggtaacaaattatttacatataactataactataactatataaggtctagggtgaaatttgaaacaaattttattcaaatatcaaaatcccatatttgtcaattatgccattgtctccttattttttttttcacatatatataaattttaaattttggccccaaggcccctgaccgttcaacctctggctggccttgcgggtgtacatcaaattgttttaattttaattttggtaccctaaataataatttagaatttttcttaaaaatttgtgaaaagtcctcgtaaaactacataagaaaataattatctatatgtgtttctttgttttttgtttttgtttttttgtttaaggaagtatcttatatgcatgtgatggaaacagaaaatgaaaaatacctttaaatccttttcagaggacctgccataggatacgtacatgcaaataataattacacaaattttgtcacgtataaaataaatcaaattatttaatatcaatatgatctaagacttttatgcaaaaaaattttttatcacaatacaagttattcagattaaacatatatgtactatatatatatatatatatatatataccatgcatttagcaacaaattatataattaatctaatctaatatattcatttaattagtgtataatgtctcatctaagtacatgccagatatattctgtgtttttattttgtggtgattcattttaatatatttaattacttgatttatacaaatatatatagggatgaactgcttgagtacatgaagaagactgaaacagtgataaaaaaactattagaagtgctgatgaaaaggctaaatgtgacaaaaatagacaaggagaaagagagtgctttaatgggatcaaagagaatcaatctcaattactacccaatttgtccaaaccccgatttaacggtcggggttggtcgacactctgacgtgtcaactctcacaatccttctccaagacgagattggagggctttatgtaaaagttgaagaagaagaagaaaccaataataataataattgggttcatgtgccaccaatgaaggggtcactagtgataaacattggtgatgctttacaaataatgagcaatggaaggtacaaaagtgtggagcatagagttgtggctaatggaaaaagtgataggatttcagtgcctatatttgtcaatccaaggccatctgatcttatagcaccatttcctcaagtacttgctaacggtgaaaaggctttgtataagcaagttctctactctgattatgttaagcacttcttcaggaaagctcatgatggaaaacagaccgttgattttgccaaaatatgatctttaattaattaagtaataattgtgcttatttactaaaatatgtatggtaatttgagtaccaataaacctctttcatatataataagtgaattgggtgtccaaaactagtatatgttcggtacccttatatagggccttttatatctaatatatgtatgatcatatatgtataatttgagtatacgtacgaggaatgagaagtttgtggcatgacttattctctttattctaccattataccatatataatttatttaatcatatgtatgcatttgtttcatctaatattggtgatgatgatcaattcatgaattactttgcaaaagttctatccaagaggagaattatgagctaattcatgcaagacactttatttgaaaatggactagaattctaaatcaaagttttatatgcaccacaaaaatttataaatatattttattttaataatttttattttatataaaaaatatatatgtttaattatattagtttttttttttaaaaaattcagttcatattcttaaaaaatataactatcaaacaaaaataaattatattttaaacattataataaaaaaaataaaaaataaaaaattgtgttaagtttaattggaaaaaaataaaaaaaaaattatatatgatgtaaaaaaattataaaattaaaattaaaattagtacaaaataatgtgaaaaataaaattttaaaaaatattcagagtaatttttaaaaattattttaattaagtttaacttttttaaatattaagatttacttatcattttatggagtgcaataaaaattctttattctaaaactagatggaggcagtggaaattacaaagctgccctcactttagatttctctttttatttttttgtgtttatttttgaagtttgaaaattagctgggagacatatctaattttaatgataatgatgcaactcaacgaatttggttcatacattaaataacttgcatgtggtcttgtaggttgtttcaactagacgaactataataagaaataaggaaatttaaaacccaattaaactttaaatatctaaaagaataattagtaattgagattttttctattatagactaaaaatagatgaaatttatatttatgaccccaaaaaaggaaataaacaaaaatggaaattaaaaagttgttaattacaaaa

SEQ ID NO: 111586 - DNA, 8080 bp, Cannabis sativa
  modified_base (30)..(62): a, c, t, g, unknown or other
  modified_base (7132)..(7132): a, c, t, g, unknown or other
tatgcgtttattttcattgttttagaattnnnnnnnnnnnnnnnnnnnnnnnnnnnnnnnnntaaatctagatcctggtaaaattaattccaacaggacatttgatgtccctactcattaatttcttttggataaaatatcaagtgagttcaatcaggtagacttgttgggattaaactcacttaatttgtcaaagttagtagttccatcttatcactcatcagataaatttgaagaaagttgttgttagttgtaacagttggctttgacaccgacttaaagagagtcccactaatatctataaatagaagtacctctactctctcatgataatctccaatgctcatactttagattttagagtcaagtttagagagagagagagtcgaagatcacagtaagtgtgtgtgaagggatgcaatgggagtatcactcttgaaataatttctctcattgtgagatatttcattgtaatcattcattgtgttgagttatattcttgggcgtatctcattgtgcacaattggctattcaatcaataaaaattcacgattcattcatttttcgagctaagtttattcttgtttaatttcatctaagttctagtttttgattctgtgattagttcttgaacagttgtaacaacaatgttctaagggtgatcattcaacatacttagcaataaggaatttatgtttaaaaaatagttatataaaagaaggtttgttgtgagaacatctcgaatgagtgatgtaagaattatacttatatttgatgagaaaaaaaattgtgaaatatttgcattactttttagctatgtgacttcaaaatttgatacaaaatttaatatttgattaatacttttaattaaaataataattttattatataaaataataaaaaataatataaattgtccataatttaatgctatataattatactaataaaataataaaaataataaataaaaaaaatagtgtgtatggtgatgcaaaatttacatatttaattttaaaccatttgtttacattttcattgaaagttctatgattgagctatcttgatattatatataggtgttgttatcaattatcttatgttagacttcagaatacggatacacactttctaaattttcccaaatttgtaactgctactgcaatttttctaatagtaatgatgacaatagtatataaataaataattagaacaattaagtaagccgatgtacatgcatttatcatttgtgttattttattaattaatggcatagtggaatccataacgttgccattaatttgtcacagaaaatgacctgattacctataaaagtaaataattcgcaattgaatatggtgtctaattaatcagtgagaataaatctttataataacatatgcttataatttttaaataagtaatatcggcatcgaaaaaaaattacgatgaataatgattgatatttgatgatatagctgctgatataaacactactaaataattaattttttttttttgaaatgactaaataattaattaatactaccatgaattaataatacaattttaaataatcataaaagatggaaaggtgtggtagcagttgaaaatatattattacaacggcgattgcatacatagtcgtgatttaacatgattattagttctaataatgaaagatcattagtcgtaattaccaccgaatatattcctttttttttttcttacactcttgtaattaattaatacaaacaagttcgtttttttttttttttgttgtttttttaagctactaatagtagtaactagtaagaatgtaccaaaatttcaatcgatacaagcgatactaaaatgataccatttagtatttactaaacatagcaaaattaaattacactgtcttttttatttttgaaaaggaattagactgtcttcattcttgctcaattaatcagtacttaaattgtaccacttaataagaaaattaaccaaagttgtccgatatttcacatcttcactcaaaagtcatatatattataagttgaattttataaagtaaaaatcatgtaaataatatatattttttttgaagagagaactcattcaaataaaaattaatctaataagattatatgaaagaaaaattatataggtcagagatctaataaaaaattaaaatctacttaacaaacacaaaagaaaaatgcaagataaagtttatgcattagggaaaaaaactcgctacgatatatttgcatattaataagctgcgtgactatatatactcttatataatatagattttattttagattcccctaatctaaatatataaatttatgtatatatagagagagactttagatatgataaaaaatgcgtgaccataggctatagctgttcgatttatttgcacacagtaataagctgcatatgggttttggcccaacacgaaggaagtatgagaaactatagatttaaataatatggaatatactttttaaattagaaagaccgctacttaatgttgattatcgcaaagaatataccttttgaaatattatttttatatatataatatatttgattgcgacttctatttctaattgtattgaattaataatgcccccaataagttgatatctatttaattatataaattatagtttaagaattcaagaattcatgttcttgttaattattttatctatggttgatgttccataatatagtaatttattacaaattgacatatatatatatatatgatatatattaggtatagagagctagcaagctcgaaggctacggtcttaataataactcttcaactggttaattaattaattcgggtctatttaactagtattagtataaaaaaggcacgatcaagtagtcttcttccttaaattattaatcctgaatttgaaaatagaattaaggtatactgtattttaaattgtccaagtcacgtaatatatacgatgcaaatttatggcatgatcaccaatacaatatacatgagtaaacaaaacagtattctctttctctattaaagaatatttgtgtcactgtaaaacatgaatattgtaaagggaacacagatgtcctataaaggcattaacatgtgtcactttttaaaatattatttttataacttactttctatcggacaaggaatcgcttcaaaaatttcattttccattcccaatgtatatccacactttggctacgaaaatccacctatgtataataagagaaatgttaaagcatatcactactcttctatcttctatgtgttaatattactattggtacaattaaatatcgaatctaataatttttatatattagcactaactaatagtaaaacaacatatttaaaaattgctaagtgttaaacactactgatgtcattggttccaaaaaataaaaataaaaattactagatggtcaatttaccgcaatgtgtgtaatttccaataatagtggtgagacacagtacaacatacaaaaatgggtaaaattatttttttaggcaaatatttcttttcaagacttattacaacatacactgatacagtgatacacgtatactcaaaattgtctgaaaagtgtttggtgttgtgaaatcatattttgtagcatggattactattattaggcaaagtagagatattttcataaaatacttatttagggaaatctttcctaattttgagaaaattcggtagataaattaaatttttctaaattttatatgcacagacaactcgtacatatattttgagataataagttacttattttgatttattagtatatagtgatgtggttaattatttaaagtacaatagatagtagttttgtaaatgccgatataaatcagaacttgtgcgcgtgtgggtttaagagttcaatgagtcaaatcctctttatactaggtagccattagtctttccccttattttaaggattattaactttgtggtactcaaggcaacaaatatatatttatacacagatcgatttgctaaaatctaattcgaatctttatgttccatcctatgatttgggaaagagaaagagggagccataataagagattagagaaaattatttaaaatacaagcaattattgagagagagagagagttaaataatttttaaagtgagatgataattatagtaataaaatttgcatgagacagtgctcagtgctcatgtagtattatataagatttagaaaatagtaatttactagttgagaggacaaactataatgtgatagtctttcctgtaataggtggggttgacgtggtccactctaccccgtatgaaattttataataccatattttactatacagtagtagaagtaaaaggttaattaattctctctcaaaaaagtaaacaaaaacaattaattataataaataaatagaaacaaattatatatatttgataaatacaagattattataaaattacatggtaaaatctgtacatatttgttttgatgtgtttgattctaatgcatggtgcagctatacctgtaatccctaattagaaagagaaaatcatatcattatttaaaggtttgaaaccaattaaatatgggactatctcttttaaaagtaaatcaatttttttgttaaataaataaactagatgttattcatacgaagtgtatataaaaagttaataaatatttatatttatagagagagaaattaaagagaggaaggaagggaggtcatgagtcagtacgtagtgaagtgtagaggagtggtccagagagtaacgtggaatttgggaccatagttatatcaaattgcgaagacccaaacagcacgaattcaagtgctatgttaataagtgttaaaatcgaggaccagataattttgattttaaggcaatacgatgttgacacctttacacgggttaagacggggttttgttgggagtgtaggtggtgcttagcaccacattgtcctttttcttttattattaaaataataatcttcattaaataaaattgaaatgctaaaagacaccagtggtgccaaaacaactttttacgtgtcaatatcgctattgatttaagtctcatatatatagtttaatataatagccaatcgtaaggcgacacgtctttagggtgctaggcaccactagtgcccaataacattactcttaaataaaaactagctaaattaagcaaacactacgatggaaacaacacaaatcaaaaatagaatttttaaaagcccaattaacgaggtgatcaacatcactattactattgcgaatttcgattaaccaagagacatgggaatggggaagcaattccaaagcatcaaaaagaagaataaaaacataactaatcttcgaggaagggatctttttattactaccaattgcctcagccaaaatgttgcaatctgtcatgaagacaagattgttccagccccgcaatctacaaaaaacaaaaacatgaagtaaagctagagtttcagccttaagcacagctgaactctcaaagcttccacgatagaaccatcaggactctgtcgagtgataaccgcacctgcactacattagtaaaaaaaaattaactcctccacatgtagtaattggaggaggaggaggacaaatgccgctattgccactagcctcagaattccccaactcaaaagctctagccatatcctccatcctattaaaaacaacggttcgaatgctgttacactgttgggattgaactcacttaacccctgttagttatatcagctggctttgtcactaacttaaaaaaaaaattcaccaacacctataaatacatgtgcctctactctctcaagacagctccaaagtttatacttgagacagagagagagtctaagatcatagtgtatgtggagggatgtaatgagagtattatttttgaagtgatttctctcagtgtgagatatttttttataattgtttactgtgttaagttgtaatcttgaacatacctcattgtgtacttctaactattcttaatcaataaagatttatgattcatccattctcgagctaagtctatttttatctaagtttaattttgattttgtgattgattctaatttgaattgtgtgttcttaaacatcactactgttgtaacaatattattttgaagattatctttcaccatagacaccatgaaaatagcgtataaaagcctataatatataattgcatagttattattagatatgtaataagaaattagaattttagttcgattgggagattaacaatgtcttgaagaatgcatttagagatttaattgtcttgtcttgaagaggaccaattacctaatattggtattttcattaagaacatttaagcaaccattccaaaattcttgtgatagaccctattgcaagcattccaaagttctaagcacaaacaacaagtaaaaaacatgatctaaatctatctatagttaggctatgtgaaagaaatactacaacaaaatgtacgtttcacaacaaaatatgtatgacattttctttttaatgtcatgaaagtcctcaaaacttttgtttccatatctcacattctcttgctttaatttcctccatctcaaaaagaacaccagcctcaagctaaagagactcttgggttggaatcctaccctgaacatctatcaagaaatgattaagcaagctcaacttctcaagacagtatccaagcttattctatttagccaaacatttttgagtgtgagctagtcgaaacattaactaaaagtcaagactcttgggcctcgatacgccacacttctttgaccacctctttacagctcgtatccttaaaccaagcctccaaataatggaacaggagtttgataacaatctcattcttgcaacaaatcaagcactgagaaagcatgattagaatccttaatggctagagaacaaaaccccaactttataaaaagtaatcacccactctaggtcactcatagggcttgccctaagtaatttttgagcccttactataaagataaatggtatttttaaaaattaataaaaaatatgtatattttttaaaagatattttttttatttgggcccntaaaatgagtgggccctaggcacacgggcctagcccgcctatgcccagggccaggcctggtcactcaccacactttagttgctctttaattaagtgttcaatgtctctcccattggaccaagtgaagaaataactgatgcaacccaaatcaacaccacccgtaactgatagaatatcccttgaaaggacatagttagaattctcaactaagtttccaccaaattttttaggttattccaaaatcagatttaaatcatcaatcaccgtccacggatagccacaatctcaagagcgaaattattccaaaactcaacccttttagtacgaacatgaagacaataagcaaataaaatcgtccaaagaggaccattgagaacattactataaccactgagataataaaagggaaaaacgataagacctgaatattagcaccaaccatagttgcactcacaaaattcatttgttgccaaaccaaatccatcctctaaatgttaagtttggtctccgtaaaaaatagaacatttgaatttcctgattaactaaagctctaaaatccttttggcttgaagactttcgagtcctcagtatttccacggtagaagaatcatggagagagacacacactctctaaaagagcctacaaataaggagaaacccattgaaagtgcaagctcacagacagagcacaacctctaaaaggcaaccagagacacacgagttgtgagagagaacccaagagcaactcgggcctaaataaacttctatgagcaaacaaacacctagtaacaagcaggggcaagccaaaactctcacgaatccaacccctagcagatacaaagtaatcgataataacaactagagatggaaatttatatcgcggggatgggtaaccgcggggacccgcccctaatggggtggggattccccatcttggtggttaatggg

SEQ ID NO: 111587 - DNA, 1638 bp, Cannabis sativa
agaagtatcatggttgggaaacaagatcaaattatttatataaactctaaagcctgaaaagattttaaccaaagaaaggtacctcctctctcgtataggtattgtccgtgataaagcaaaaatcctctatacgtggtgcacaaacttcttcgtacttccttcaatcaaaaaaacaaaaccatattcacttacatgtcaaaataaagacagataccgctcaaggtaaagtgaagtcactcaaaatataaggtatttattgatgtattaatatttttatcatacattcataatataagccacgtaaactcatgcaaaaactttgttattaaaatgaaagcttacgaggatattagcatgcaagtgatgccaataagttgaagtctctgtctctctatgtaattttcggagagatatcgatcaatcagatatactgtgaggtaaagtgtatctggctccaatttatattctactgatacctgaaaacaagataatcatgatcaactgctgtgtcttgaatatccaatagaagacttaaagcatcaaaagctatatgaaacaaaacttagaaatgacaatgagatgcaagcattatatatatgacaggctaaaaaaatagctgacctccacaagccaatcaaccaaaataccacgcatacatcgagtgatatcttgctgtgttgtgtccataaaattagaacatggcctctgcgaaagctgtaaggaagaacaaagtaatttgaattttaaatcagctcctcactcaaataaacagagcaaagaaaggcaaacaaattatgttaattaaatctcactctaaaggagcacaaacagaatattagatgcacaaacctctgaaacacgcaaattgtcatagatatcaggagcataggtggaacacaattgagggtccttgttatttgcatcaacatcaacaatgtctggtttaattgatgtagtgaagttctcaacagaataatgtttctcatccttatcttctgaaataaaaatgaaattcaacagttaatgaaattcaaccatacaatctattcttcaccgaaagatattattgtactcgcttaaatagaactgaacaagttaatactatgttagtcaaagtacaagctttaaacaccacaggattccaaagagactcaacaaagtcaaacaaacatgtcacattttctcatcttagctaaccttcctttgaaggactttcgtgttctgaagtaagttcagatgtttgacttccaaacaggtcctcatgtttgccaaacccatttgagctagtgaaccaatgaggcatgctctctgtcaaaatttctgaagatacaaccccttcagttttaaattctgtgttgtctttcaaatcagctctcaaagaaaggatatcagtggaaactgaaggggtcactttgttcaccttagcctgaccccttttagcgcttttagcagggttttcgttcttagcctaataaccaccaaaattatgcaaaagtcagacctttcataagagcaagattgatctatccgttactttttcaaacaagtagacaccatgacacaaatatgacgatccacacaatgataaatctaaattaacacgactataagagtaagagaagaaaaaaaaaaaaaaaa

SEQ ID NO: 111588 - DNA, 9969 bp, Cannabis sativa
  modified_base (840)..(844): a, c, t, g, unknown or other
tctctctctctctctcgatttctcaagaaaccagcaaggaaattggatttctcagccttatttttggtgttctagcaagatcttagtgaatccaatccaaggtttaacttcctaactcatctctttttgatttcttaagtttcaagttaggtttcatgcatgaatttggttttagggttgatgtaagttatttttgggtattctaaagttaaattgtaagttattgagctgatttaagatagaattgatgcttagtgttgtgtttgagttttagagctcaaactttgctcttcaatggtaatttgtgtttctgtggttgtttattagttttattgcttggattaggtttattatgtgttgttttggtactctggaagtttttgtgcagtttggggtcgttttgtgatgttggtgttatttttagtatggcctgtaagaatctgaattccggttcatccccaagcgacccccacaaaaccgatttttccggttggaaaccggtctatcagttggggcattttagagtaccctagtttttcatgttttcgtgatatttatagggtattcccatgttatacgtggagaggaaaacttttaattttgattttaagtccccaaaaagtgacttagcgtgtcgctcaccagttttacaaatattgtcatttaggggtctgtaaatcatcgagaagttgttccactcaggttgactatcacacatgaattcaaaaacgagataagattagtataatgatatgcatatctgtttacatatttagcgtacatgtttattaagcatgttaaattacatcaatagcggtatcaatatacgtagagttgtannnnntaccgatagatgtatgtttggctcagatactgatcgacgctatcacattggtacgactagagtatgactagtaccgagtatatgctgatattatggtcgatagtattgtcgtatgaatcttctatactcagtaccacatagggtgcggagatagggttatagttgggtgtatgggcgcctaattgtaatccaacttatatttataattatgattatgcttttcttactgggtctgtcgactcacagttattatttacatgtgtagataagggcaaagctaaggctgagcagccgtgagagcgagcggatgaagattgtacatgtcagggcgattaggcctggagcgtacgatcttttggacagcaggctgtcttttgtatagtctctagacgacaacttttgtatcaaatattttgtaactcagttgtaattattttaaactcgggatcccagatatatataaatgttatttattttcaatattgatagtaattaagcaaaattttaattattcacgattttcaataaattcgttgattagcaacgaactgcacaattaatatataaaaactctgagtgtttcttattcaatccttttaattgaattttctttagctctaaatattaaataatttattttctaaaaattttagtaaacaatacatatggaatattgttgaatttgttgttgttattgttatgagatatgagatattgattgtggtgtgagagtgtagtggtgggtgcagtaggatgttgttgtattttttttttcaaatgtgatatctcaaatcaatttttttattatttttagtgagtgtcagtttataactgatgatttatatcagttataaagggatgtaaattttttataccatcagtaaataaccgacaaaaataaatatttttttgcgtctactgtatatacatcagtattaatgtttattatacagtttaaaactaacgaaaattgacctttttgtagttgttaacatacatgtatatacaacacttctaaaagggattttcagtatccctctacttgttttggtatttaagagaaactctattttttttttcatgattgtatatgttaagtaatttaggattatatgtaaatttttataaaattctgaatcgtttacaatgttaaaaataaaattaataaaataatacgcgtataaaaaatatagttatgcttgcaacaaaatatttgagccttattctaagcattttaaactattcaaacttttataaaaaatttacacataaacctaaataactattcaaattcatcttaatactaaattaattataagaagtaactaataacaccaaaaagggatgtactataaattggccaagataatgaataagtacatgaattacttggcatcaactgtttttttttaaggaaaatttacatggttattaacttaattttactattttttttacaaaaatactgttagatggtattttttttacccttttattgtatttttttataagtttcatactacagtatactatgttaagttttcaccagtgttctattggtgttttatagttgttctactgttgttttgagttgttctgttttgtcacagtatttttgtaaaaattataatacaaattccagtatttttgtaagtttttcattttgaatgtatgcctacaacataaataaattgtactgcttgagctagaagctatttaattatatattatgtataagaaaaaaaaaagaggttgggaatattggatatggcttttaaatggatataatctgtacaacttaattattccacattcggccattcattaaatattgtttatatgacactaattaatccaatgcatgaacatatatacatgactgtatgtaacaactattttaagctttattaaagctatgattaagttctaataattatatgatttcttttatatgcttatttttgttgtaggttaatcacccttgaaatttggttagagaatattttttcttttatacaaccgaatgattttatccattacaaaataattaatcaaaagttaaaaaaaaatagataagcttgtgagtactacttttatctttatttttgacataacataggtatatattcaaattgttaaataaataattatacttatcctttgtaagtaaatctacagaaaaagtttatattgcttatcccttgttatgcctatttaattaagtctaaatttgtctcttttatatttttctacttttctttcttttgctctaaaataaaatgtctcatttctatattgtagatatataaatatatatataattttttttttaaaaaaattacatttaaacattgaaagattttcttttgtatatatatttttaaggtgttctataaaaataacaggaaataacaagaaaattacataaaagtaataggaaaataacatcaaaacaataataaagaaatatacaaataacaaaatattaacaagagtataacataaaaatacatcaaaaaatcataaatagaatcattaaaatcgtaaaaatatttctactggtcatgttaaacgatctgttaacaaagccgcgcactgtatggcacgtggtacttattggtcaggtcgtctttttactgagaatgatgttctcctgactctttagctcattgtattagcggatgtttctgtctaataaaattactttcattaaaaaaaaaattgtaaaaatatttatttttataattttttttgttgttgtttttgcgtattcatgaaataatccctagctatatatatatatatatatatatatatatcatttttcagattattttagtaaagtgtatattaatttatgtggtagactatttttgcaatattactggactgcaatttaaatgggatgagaatattgagtatagcaagatacacgttttggcaattataagttaattatgatcacataaaatatttacaaaatcatagatcgaaaatggtcttttctatgtaactataacaatatatataaaacattatattggttaatataatattttgtgtatttgatataatggcaataccatgcagttaacatcagaatatctttgttctacatttctgtatgagatagtcatgataaataattggaataataatatatatatatatcttgcattatatatattaaatataaaaaaaaattgaaaaacttaattttagtggtcatagatcttattaacacttattaaagtagcactgatcatgatatgtcatctcatataaattaattatatgtatattgattattgtgtgatagtcatcgaagaagggatttatataataattattgggaatgaagaagttttgaatatataaatatatatatatatatacaatgaaaattgaaagaaaagaagtccaagtgaagagattgcaatgtttttgttctaggtacacttgaccactattacgtactcatcaaagaaagaattactcataattaggttatactactactgttggtattgctacatttaatttggtctctttctagtttctaccttccattccataacaattccactatcaatttttgtttctatgtcggtgacccccaaatatatatttgtggatattcacgccacccactatatccaataatttggcatcaatttatgtagttgggtttggactctttgttttgttgaatgataaaatagattaagtattttttaaaattgtatgaataggattctgggctaaattattaacaattttattttaatataaccgacttatagataattaattcctaatacgaatagatgtagaaaatttaaccagttttgttataatacatttaggtcggattattattaagttttattttaacaaaaaaatcagttgacttatttgtagtactattttgaaaaatacaggatctattttatcatttaacaaaacaaaaggttgaatctgtaactattgtaaaatacagggataaaaatagtatttaccctttataatttatagtaaaacttttatttgataatacacttagaatcaaattaattatattttaattaaaggattataactaaataaagatacattaataaaaacaatcaaaacactaaaaataacaacaaaaaattctctatagattattattttttaaaaaaaaaaaaaaaaaaaaacctatatgcttaacacattaatttttttttctatggaattgaaataaatataatataaacatgatatataaactagttattaataacatacaatgtatatttgtttaaagttgtattagagttgctaacccaattattaatttaaataataataatataaataaattaaatataattcttatattttttgaaaatatatatagttttaaatttatttataaaaaaatgtatttaactaattttattaaaaaataaaataaacaataaataaatttaaatataatgtatgattaattaattgaattgacgtttaatttaaatttaaattaaagttacaagaatattcttcacaaactttgcagagattatgagaagaaatttatctctagtttagactctctctctcaactatacactatcacgattttcattcaagcaaatttagtctgatttacacaatggttacaaagatttacagctaaatataaattttcatggttaccaaaaatctttattaagtaattttaatttaacaaaattaaattgaatgtctattttatattatttttttttaaaaaaatgtatagtctgaattattatttaattaaacaaaaaatttaattaataatttttaaaatacataatactctaaaattgctacccaaaaaaaaaaaaaaaacaaccaaaagtaagtattaattttcaactattacaaatcatccttgacctatatatgaatgagtaacaatatatatatatgtgcataattattagtgcacggtcaatgagtttggtcaacctattcaatatatatttggatatatagacaagtagtttttgtttacatataacacaacttggaattattatctaaatatatttttcaaagtccaaccacttgaaagttgtttggaaacatagatgaaaatatatatgctaattctgaaaagcgtaagctcgtcttttatgtatttattatacataatttcgaaacagcaataatgtttttcaatatagtttaatttattaggattgtgtattttatacaaagcttaattattacgtataataatatgaaaactcatatatgtggtggtggaaaatggagatgtcatgccaattgagatttgattttgaggtcattacacgcaaatcttatgtggacgtacgtaaccattataaatattacatatataaagatttgccgacaaaataatgtaaattaattgtaacaccatcccttaatacatatatttatattctatataaatgtggttatataataaaattcttattttattgatattttttttaattttaattttaataaaacatgtttttgttaactttataatattattatatatattaaaaataaaaattatataaatatttatataaaaaaattaattttaatttaaaatacttaaaatattataaataattttaactacatttttaacattgttgctaataataagagtattgtataccagcagaatacgctttctgctaataatgagagtattaccaccagaatatgcttcctgctagtaatagtcaaagaaaataataaaattatttttttttagtattatcggcggacttttagctattaccgacggagtgattcgttgctaataagaaaatgagaataagcgtaaatttgccactcttttagtttgaaaccatattagcagtggactattagcggcgggggtccgctggtaattgattatttgattgccgttattgtaaaatttcgaaaaatatagtactaattaattaggcatattttattaaatatgtgattataaagatattggggtaagattataatcttacttaagctaattgttagttaattagtgtaaatctagtaaataaataattaagcgcaatttattaattacagagattttattagattatgggagtattgtaaataccattgttgaaataaaatattttaggtttggaggggtttggattttttttttttgtcttatttgacttttctaggctaaaaaagaggttatatttcaggattaattcttttggttttattagttaggttatattagaattaagttaaaaattaaaaaaacctaaaacctagataatcctctctctctccttccctccttcaaactctagaaacccaatagaagcaagaggttttcttcatcaatttcacctcttttcctagctgaataatctggtttaggagctgttaagccttgaggtaattaagatctccttattctctttattttcctaggttttgatttaggttttgtggtgttctcatatgtttttggggctatggtgttgagctaagttcagagtatatttctaagttgaaaattaaattatttaaatgtgtatgtgatattcttgtgagctgtgaagtttgaaattggagaatttagttcaaggatccaattttgattcaagcatggtgattttgtaaattttgtaaattgaatgtatatttttgggtattggatgttagaatatgttgttttcatgttatggaactgttttgaaaggtttgagctggttggttgaggttgtggttaggttttggttcgaaaaactagggttcccattttgcagtactaaagaaaccggttagctgattttataggtgctgtaaaaccggtcaaccggtttgccaacaggggaaaccctagtttttggctttgaaaccggttttgtttggggtgtttttcaaagcttggattagggtattttagtgatgtttaagttattttgaaccagtgggggagttacagttgttcagatatggaattagggtttattccggtgtttggataagttgtttaccgaattttattgtcgtgacataggacccgaaattatcaagcatagttccactcaggtcggcacacacacctgatattagattaaggtaagaaaagttatttgcaccactaaacatgttaagtgagaaacgattatcatcgtttgtgactcgattatgatcgaggtaaagatacggtcattaccgtttattgtgaaagagtaattacttgcttgaaatttcagataggtttcttacttatcgcttactttatcgggcaacgatagtgacatatggagctcgtcgatggtgagtggtaaggatgttttatgaggcatcaaagtcggttcgtcttataagacgcataattgtttatgcattggatgatgaacttgtttgttatgccatgttgtgatttctcgtattaaacaatgtttgtattttaattacttttattgttgagtctctgtgactcacgggtgcttcgtggtacaggtaaagggaaagtgggccggtcacaagtcagatgtctctcggcatatcaaccgatgtctcagcttccagtggacaggatccatccttttgattatattttgaaaatgtaaccctattttgtaaatctggtttaaaatcaagttgtaaaagtttataaacaggagatccccgtgcttagtagtattttacataaaggtatattttagtttaatccaaattttttaaattgaccacacttttccttaaactaatcttttaataattattgattaaattataaagcacacacatagcgtccctatgagacagagagttacagttatatttattactggtggtttccattaataccgacaggatcccaccggtaacaaagttctacatataaaataaaaacctcaaaaaaccctactgactcttgtcgtttcttctcttcatctcttttttcttctccgcctcttctcttctactaatcttgctccacttctgcactgagcaagcaccacagggtgaaggacatcaccaccacaactaccaagtaagatttgttttgttttgttttgtttttttttttcattctatcattagttttattttaactgattttgttccccacatacttttttccagctttgaatgtcgaaccaccattaaacttttgagttatttttgcatgtcggaggtttaccgatgggccagtctctttttttttttcctgatatgatgttgtttttgcaactaagagaaatgaaaaaaaaatataagtgagtaaataaattgatagctgattctagtgcagtgtttattaatatgtgagtgaataaaaaaaccctagacttgggttgttctaggagtgttcatccaatccaattcgctctattttctcatagtgcatcggatccgcactaagtgtggatttcattttttagatccaatccaatctgcacaatagttcaaatccaatccaatccaatctggaaaattcgggattagatcagttattttagatttgttactttttaatattaaattatttaatattttttaaaaaattcacataactaacaataaaataaaataaactataattattttatgtctccaacaataaattaaaataaataaaataacaaattcaaagaaaaaaattgtatgtataaaaaaatatttaattttattttaaattgtaagtaggaaaatatatatatatatatataagaatagaatatatatttattgtggtaattttcaatacgcaagtatacatatcgttaacaagttatagactcacaaagagtgaggttgatcccacaaggattgtagttaagtactttaaaattaaatcttaacttctatttagctacacaaaatttaagagaaaattaaaataaaaaaacaataaaaacagtgaaaataagaagcaggtaaattaataaagaaattaacaatgaataaaaagtaggaattttgatttcaattgcatctattgattatatgatttaacatgattttattccaattaccaaattctatgcaatagcaggtttactaagataatttatagtcttctcagatatataaacctcaattacatgcaaattttc

SEQ ID NO: 111589 - DNA, 2064 bp, Cannabis sativa
  modified_base (1832)..(1835): a, c, t, g, unknown or other
aaaaaaaaaaaaaacagagaaaaatgtattggtaattttccttggaaattctttaattaattcatttttttacattgaaatctttatttaaatagttgatcgattggtacttgacgtacgtttgatatttaacaatcatttgctaataaaaattcaaactataagaatgagttaatcataaattaaaacacaattaattattgtaacaaatacttgtacatatagacacctagacagtttatttattttaaaaatggccagtgataatatatataatctttactgaaatttcagatttaacaaatactattaacgaatatataaagtccactattatttacatctaaatctattaacattttactgatttttattatacataaaattgcgctacacgatacctgcctatagatcagttgtctttaagtttaattatatggtcaattatataatttatattatccaaccaaatattcgtctgtctgccttacgatggcctatgtattttaatcaattatgtatatatataattataaattttatgtaaaaattattaactattcgaatagataaagatcaatgaaagcaatacctagaatatttgtgcaaattagttaactattaattatgaaaagtcaaccttaattaagattatatgagatgatatttctccctaatatttttttgtaaggcatttcccattttataatttttctttattattattattttgtaattaggattactcatatatacttaatatctatactatctattttgaaattgtaaaaataataataaaaaatacgaccgtccaaaactaaaaatatgtattacttattgagatactgagggcaaaattactcaaactttatgacttgtaatacttaactccacaaatttattttttgacggcaaaacctactaaactcacattctgttttgctctttacattttcatataaaaatctctattaagtgtcatgatggacaactcccatgtacacaaatgcacatgtcaaatttttatgaatccacgtattgttaattattaaatattataaaaaaataatttaaaaattataaaaaaaacaataataataataaaaaattcttcttcttcttcttcaagaaagaaagaaaaccccatcttatctcaaaaaatccttatagccgcccgtttccattcccgaaccaccatcttctctgtccctctctctagcgtctctttcacaagagctccggccgacgtcttctctgtcctcctctctcgatcgatatccctctgtcctcctcctcctcctcctcctcctcctctctcttttcttttagtcttcctctctcagtttccttgctagcttgacgccgttaataacgagtctcccacaaccatgagatgagggtcatttctaacatcaacggccgtgaaaactcaaggaagaaccggatctcccctcccctgagtttttcagctcatgtctctcctggccaggtccaatcctcccagatccgatcgagcaataagctgagctgaaggaggatgaaaaagaagatgtggattcacatttttacgagctacaagtccaaattcgttcttttatttactgtcattgttgaatttttcttgaagtttgcttctttgaagctttaaaatttagggggtttaggaagggaagggatgttttatcaagtgtgttagttgtgctaaaattttcaatttttgttatggtggtgtgaggtttaaatattgttgaaccaaagaatctttggtattctcttaagcttttagtgttatgactagggtattgaagaagaagaaaaaaaaaagaaannnnaaagaaaaaaaatatttttttattattatattatttttataattttttaaattatttttttataatattttaataattaataatacgtgaactaataaaaacttgacacgtgtacacttgtgtaagatctattattttctgtagtgacaaattatgtcctgttgcattccagttgcgtttgggactcgtagtgttttgtctggagttcgtactgttagtgttagtccac

SEQ ID NO: 111590 - DNA, 4096 bp, Cannabis sativa
agttcctggtaaaataacttccaacaatatctctgaagacatttgatgccaaagaagaagaggttagtgcttcaattatcgctcgagagcaagaggatattacgatcaaggctccaagggaagcataagagaagtccctaggtcaagactcaaaccttccagctgaaaaacaaacaaccatccatcctgctcaagaaccatattaatctctttcggctcccatttcagctgacctcacgagttcaaatacaaagttgatacaaatgtccaacattgagtctagccatttactttacttcttcttttagtattacagggaaagtagttatgccctaactgaggggctttttttatatttgtaatatttttatatctttcggtaagtccttggggactaagacaatttttaattactttgaatatagtttcttttatttggattcatcaagttgtgtaacttacatgaatttcttactaagtgatttactttcgaatatccttaggtcccgattccaagggcctaggctcttgggcttcaatctcgaacttagttcttttcttaggcttttattaagctatctactcccgaattcctcgaggctccgattccaacggcctgggcccttgactttgatattcttgtttttaatatggaaattttaataaagttaagttactttcggttccattgcaacgcatacactatggataagtataatgtcttctaaaactacctcagccccgcatcccccgaagtctcttatttcgtcttgaggcctccaatatcgatgtaggtttccttttctgcccaaccaaagagccacaaccacctccaccatcattggagattcatggatccaatttccccccatacaatggttccacttgattaattccagctatcctctgctccattggtaattccgacatagaaacggttggcatatggggtaaaggtaccacaagcaacctttgttatttcaacatctaaattttctcatcatgtcgctgaattatcgcttccatctctgtgatcctctattccaaatctaatggagcctatggtgaattatcttggagcgttatttgagcaccactgcgacctctgctgcatccaatggggttttggggattcttaccaccccgaccacctctagtctcaaccatttttccttgtcctgtaacgttttgataggcgtccataacctaggacttagcctagcgaacccacaaggcatgaaggttaacattggtcaatatatttccaagaccgtatttaggttttaaacaatatttcacacataaattcaatacaacttaaacagtttaaaaaaggtaacagctagcgaaaccgtgagttgagctcgacactggccttgattgtacatatcttgacggtcttcaatgaacagcctggtggctctgatactaaaattgtaacgctcgtacttgaaaacttatttattttagatttacgtatatttaaacaattataaccaaataaaactatactaaaaatatttcatatgtcgggatcccgaattaaaaaccatttgtgaaaataagcatatcgtataaatatatatacttaattattatttttttacaagtcataaggcgacaacggtagataattcaaaatacaatatgacgggaaccctctaggttgcactaccgcgaaatgcacaattcttgccgagctccaactcactattcctccactttagctatacccttacctacacaaggtagaaaactgatgattcgacaaactcagtaacatatgcatataaaaaatcacatataattgactcgtatctaagcgtccatacacctattcacaagactaaccaaattattaagaacgttttgaatggttggtgttattgaccatgatatcgcccactaccagcgctatgatcgcactacaagaccgacactatgttcgtgccgttatgatagcatcagtagtacccgaaagtaaaattggccatgatatcactcttactatgcccgtactgccgaatcgacacaataattgtgctgccatgatagcgccaatttatactttctggggtgaacatcactcttaacatgtatggtacctgtactgccgaaccgacacaatagttgtgccactatgatatcacccaaaacatatacaatcacaaacacggaatgcatatataatatgttctatgctaatcttacctcgtttccgtgctcaggtgtgccgattagcctgagtggaactgcaactcgacgctttacagggccctaaatcacaatagtcaaaattttgatgagagacacgctaaaacactttctggggacttaaaatcaaaactagaaatatccctatcaatggataacatgataataccctaaatttcacaaaacagaaaaaactaagattccaaaaatgacccaaccaatagaccggtttcccaattggaattttggttcgatggagtttcttggggaccaaccagtcgaccggttgctacaggtccccctgaaccgaaattttggttcagtaaagggaaccccaaaaatgtccccaacactccaactttcctcaaaccacactaaaacttaccaattcagcttaaaacatcccaaataatctcatcctagctccagaatacaaaatttaatgaccccaatcaacacagcaacctagctcacaaatattcaacaacaattcatcttacaaccaaacaaaacaataaaaagagtactagagaattataccttgggttgagattttaaaacctcgatgaactccttgaattgaatcagttaaaaccctcaattcttattggccctagatggttctaaagagagagagaatggtagagagagttctaggtttcttctagcctattactttattcctaacaaaatgaccatttcccctaatcaaacttcaaaggttaagtcataaccaagggtagtttggtcatttccaaacctcgacaatttcccgacacttctagtatctaaccatgttgtcctggtactaataaaattctaaaccatataaaaagtgactctctaatggcccaacgtcgcgttccactgctaccaagcacaaatacaaaaaataaaaaattcacatataacataattagtgcatactgaatttaaataaatccccacaaacgtgtaagtcataattaataatttaatttcataactaaaccctaattatttaataatctaacatattaaaattaggcggtctttacaccatgaatgatttttcttgcttatttcagtcatatgaatgataaaaaattactttagtcacattagttcttggctaattgcttaggagagcactgccactatttttgccaaaacaatggttcagttaatagagagtaagaggatttgatggttaggagtggcatggctcgagtctggcgaagctaagatggtgtgacagtgaagctcaggtccgacaacgactctgtatagtatcaaaataaaaatatcaaattagtaggaaaaagtttagagctgaagagaagtcaagattcaaccacaaatttttaaccgtttagcttcctagtgcaaaccccacagtgaaactcatattcgtgttttgaaaattatcaccaatgaattgagccagccttaagtcaacatcccagagtgaaaaattgtgtcccaaagataaggcggagatagttccttttccatgaagaggaggaatatggctcatgattagaaaaaatatatgtatacatatatatattattttattactaaaaagaccatgtctaaccaacattatcttaacacaaacatgttaagatacattaaacataatctgaggggaaatttggaacctttctagagcccttgctatgcgttgtgaataatctgaggggaacatttcccatggggcatcatcttctattcttggccaaatttctggtggaatagtctgatttttctcaaagataattttttggaggtctttgtactctgcatcttgctctctgaaaggtgcttcctgggatccgtatagttcaaaagtgggattgcaaactattttcttgttctcgtccaattttgcattaagact

SEQ ID NO: 111591 - DNA, 3529 bp, Cannabis sativa
  modified_base (3474)..(3487): a, c, t, g, unknown or other
ccgaaatgcatctcttaatccaatcagtaagaggactactgaatccgagttgattgagcaccattattatgaaattccagtcaagcttgtcataagccttctcaagatcgagtttgattagcatgtatccccgtttgccttttctcgtgttcatcgaatgaacaatctccctagcaatcatagtattttctccgataagtctacctttaacgaaggccgcttgattgggagatattaattttgggaggaagtctcttaatcttaaggcaatgatctttgagattatcttgtacgccacgttgcaaagagctatcgggcggtagtcattgactaggcttggcgattctttcttagggaccagcacaaaggatgtatcattgatgaaattgggcagctccaggtgtgtgaagaagtgaaccaccatttctacaagatcctgattaactgtatcccaatggtgcaaataaaaactaggcggaaggccgtacggacccggggccttatctttccccatatcacatatagccgcccttacctcatcaccttgggggatagcattgagaactagattgtcttgttcagtgatgatcggttgaaaagtcccttcctggagcggtatgagaccatggccgctttgcttgaaaatctccttgaacttattgaggaagcattgagctatttgatcattatcccttatccattcatcatccggagagagtttgacatgttggatatagtttcttcgtcttctaacaatggtcgaggccataaaaaacttcgagcacatatctccttcttgaagccattggactctcgatttttgcttccaatgtatttcctctcttagtaaagcctcagctaactctttcctcgccttctcgatcccatcaccattatccggattcttttgctctgtttcagctagattggtcttcgctagctgaatttgccgagatagatgcgtgaactgagttttgttccagtgccccagctttctgcttgttgctttcaccttcaagtggaagttgatcatgggattctcgtgacgcctggctttccaagcttccttcaccacccaaaaggatcgaggatctctagcccacatgttttcatatttaaattgtctacccttacatgtggctcctcccaaagtgtcgagaaggagagggcgatggtcagactcagctgctgccaggtgattgatgatagcattagggaattggatcctccaatcagtagtagctagaccacggtcaagcctagctcttttcatagcccctcctccccctttcgcccaggtgaaattaggcccaagaaatcctaagtcgattaaacccgctctgtgaaccattcttctaaaatcaaaagcatatttggaggtattaccatggtaattgaaacactccttgtcatttagagtaccattcatgtcccctagcatgattagaggggtttgggactttagaacaatgtcacccgcagttacccagaaatgttctttgtcttctctactgggaggcccatacgtacccaagagcatccatggaatccccagcggatcagatgtaatttcacacataattaagaattttgatgatgactgaatattacacgccactcccttcatccagcacacagcaaggccccccgaacgcccaatgggagggacataatgtaaattcgggaagtgaagtttagcacaaagtttattgaattttgctggaggtagtcgcgtttcagacaagatcatcatttcgggcttatgatggcgcaccaaatgcgccaattgtcgaactgtcgcggagttcccgagcccgcggcagttccaagcgaggattctcatggcgacattggagacttttccgggcaagtctccgtagccccaaattgaaaatccacctccgatttccccattgactcatggttgccttcaacaatttcagtaatagagcaactagttgaaggcttcctctgtttctcaataataacgaaatggttatctaggttcacctttaggtcaaaagtcctatcttcccagtggtgagtagttgtggaagttccccccaagttagatttagacttcttacctcccttgaaagacttgggagtagcccccagtggtgttttggatttaggaggcctgccccttcttttacgcaccccatcatcaatagaggctatgggtgatttgcctttccttcttcctttctttgcagttgctgtggagtccccattagagcctggagagaaggattgcacctcctgttgttgcaaaagatcctcagcagtactatgttttccccgagagaagccatcatcgtgcgattgactttgtttaggaggatcatggactgacccagtgacatgatggtctgggttcgaagggcttggggatagaatgggctttgtgttgggcctaaataagtgtccatcagcagccttgcgtttcctcgggccatgtaagtgttcctccactctgaaatcatctatattaatgatggggttgaaaaggacgggttcacggtggaacttatccacagttaaggcccccattagcaattcacgggctttgggctgagcccaacactcattggatggccattgaagaagttgggcttggcttccaagaaatgtggtagtagcttgatcacaaggatcacatgggccatgcttcagagtactttgattggtcatggtcccttgcttttcagaatccgttgtcgtcatctcagatggattctcaaaggggttaaggttttggtcacttccaaagttggtagaatttgtatcctccaaggaggtaataatcccatttgtccccatcgcctcagttgtggcatgcttgctagtcgacccttcttctccattgcagggtaccctcctttttgcctgagtagcagcatagtgttcagctgcgtcctgcaaatcttggatggagacagtttttgaattattcccaaatggggcaatttccccaatacccgggagatataccagcggaagctgggtaataactagctccgactgtgcatcaccaccggcggcctcctcttcatctgagacgatcctcttcttcccaggatattgccttctgcattctctaatctcagcttcctcgccatttcggatagctttatgaaccttcatttggttccgtagggtaggatcttgaaacagcctcttttgtaacacccagtcttggaaccatttggcaagaggggttgtgaaagtagatttctccggggcatcgctcttcagccaaattccaaacattgggtaaaaattaccacaggagtctttaataatcgttggggttttgaagcacacactttggtcatgagttagaacactgcatttgaagcacaccttcgggaggcgttcataggtgtactgtatccataagtctttgagtcgttggcgccgtaagaagaaccctgagaatattggtttggtaatgtaaagcccgcttagttnnnnnnnnnnnnnncagttgtttatgtttaatcatgaaattatttatagccattta

SEQ ID NO: 111592 - DNA, 8525 bp, Cannabis sativa
taatatttttaatttatttttttaatttttattgactttgaaaccaaaaaaaaaaaaatggccggtttgggcaggttaacccaaccaaaccgcgaaaaccgttagtcagtttacaattttttttttctaaattgggtgggttgcacttaaattttaccttatatttttttacattattttctataataaaaaaaggtaaaataaataaattgtaaaattgttaaaaaaaagtattattttgttccttcataaaattgtccaatgtttgtggaggttttaatgagcccatatttttcaaaaaaaaaaaaaaaaaaaaatccaaaatagtgcagtcccgcccaccatttacatcctatatgaggttgttcagtatgaattttgatggttttgaagttttcaatcaagttttcattgtgttttaactgagttgtaaagctaagttgttgttttgcttcaattgtaaatttgtaatgggatttgttttatatggttgtgcattacttgtttcttggtggtgactatcaattcggaagtgagttacatacagaggagaggaattaggattaacttgatgacaccgaacacaaactccatgaattgattataaaagagcgaaagttgaaataatgccctttctttgtgtgataattttgttcacaaaactgactttgaggattccctttcaactatttaaatttgtccatgagaatggtatggtgcttgctaaagagtttaaaataaccctgtcaattttctctttttttaatatttatctaaaaagaggcctaaagatattattttagaagtggaaaatttgtaatttaacttgcaataatgttgaaatgaaaactacttattcttaacaaattacgaaatataagactaccaccaccacgagagccaatatattagaaatttctgcccaatgaattgcttatgatttgaaccatcctttgtcataattcatgatacatacatgtataccgtttatatatgtatataaacattttggagatcttgtatgctaagttacaagtgcaaagagacaagataagacaatgttcacatgtgtatatgggtttgttaaaactccgtttctggcaaggtaactaaaccaacacaattagcaaaaatttcaagacacaaaaacagaggtgcataagacatgggaatcgtcagagcaacttagtactataaaaagccagtactttgaaacatagctaatcagttctaagaaaacacaactcattacttacccttttcgtcaatactcattatggcattgtcttcattgttattctctttgctagctcttgttgtagcactaatggcactggccattacttcagaagcaggaaaaatagccatctactggggtcagaatgcaaacgaaggcaccttatcagatacttgcgccacaggcaactatgactacgtgaatatagcttttttaccaacatttggaaatggccgaactccaatgatggacttatcaggtcactgtgatccctatagccaaggctgcactggcttaagctcagacatagaagcttgtcaagccaaaggcatcaaagtaatgctctccatcggcggaggggctggaagctactcactttcctctaattctgatgccaaacaagtcgctacttatctttggaacaacttcttaggaggtcaatcatcttctcgtccacttggaccagccgttttggatggcattgactttgacattgaaggagggtcaaacgagtattggggtgaccttgccagaaccctcaagaagcacagctctagaggcaagagtaataagaaggtttacataactggagctccacagtgtcctttcccagacgcttggcttggaaatgctctcaaaacagggctttttgactttgtttgggttcaattctataacaaccctccttgtcaatacacttctggagatatttcaaaccttgaaaatgcatggaaacaatggacttctgatatcccagctggaaaaatcttcctaggcctccctgcatcgtctcaagccgccggtagcggcttcattccggctaatgatcttatctccactgtccttcctgccattaaaggatcttccaaatatggaggagtcatgctttggtccaagtactatgatgaccaaactggatacagttcttctatcaagagccatgtctagaaattatactattttataatttgattagaaatcattactacttctgctgtctatcttctattttacgttgtatgctacatatttatatctaagtaagtaatacatatctttttgttcaattctgtctttatttatgtctttttcctttaactctgctttaaggtcatgatctatttgaaatgagttgtcgcaagttaacagcacatatacaaacgtggaccccgattatatttctctagtaattattatgagtttcaatagaaagattaaaaatggtgaataataatcagaacttgggataaataagtagaataacaacatgtgccagccagttggatgaaacatacaacgtgttcttctacctaattaaacatggaattaatatctcatacctgttcttctattgaaacaacttaccacacacacacctgttcaatatcaacatgtcacaaacttgtaattgacctgttattattatgttataatgggttaaaataagttaatttttctctcttccgattattagataatataaaatatatatattgggggttgttacaagaagacgatgtgcaaaataaacgagtttactgtataaaatgttctaatttcattgaacagatcctgtccggaatattacttcgtttgattggatactttaattgacaaaatggctttttttatattcataataatatcgtaaagactaaagaggaaattgcatcctcagtagacgtggtttggccaagacttgctcgacatgtagggccctctcctccaccaccaccaagcataatagtcgttatgcaataatgaccactaatttctatggcctacccaacttttcttaatagatttagggtcccctctctatataaaacttgccctcatgaccaatgctttggccgctgattgttgactactcgtttcgaaaaatatctaatcataaaatcttattttattatatatttttttcgtgatgagtatttttttcttctctttctagtgtgtctcgctctcacaccattcaaattgatgcgttcttcgttttcgaatgcttattgggccactaaaactgatcttccctccaatcactttgaatatcagtaaagacatttgtacgtgacaaaagaccagtagcatctaggatttggacatttgaggatgtggaaatttattttgtttcctaacaaatgcatttttcgttaatttacaaccatttttcatggcaaaaattaaacacaggtcaaaattaaaacgacttgtcagccacgcagttccccaacaaaagaccgttaaactgaagtaaaactttcttataaaagatgtgatatttgccaacagtagaatcaacaaccaaactttaaaaattacagcgaaaatggcaggaaagttggcactttcacaagcattattccttggttcagtaattcttgctctgttgactagaattaatgctggtgacattgccatctattggggtcagaatgggatggagggaactctagaagaaacttgtgcaactggtgattatgactttgttaacatagcttttcttccaacctttggtaatggccagacaccagtaatcaatctcgctggccactgtgatccatacacaaatggttgcactggcttaagctctgacattaaatcttgtcaagcaaaaggggtcaaggtattgctgtctattggaggaggtgcagggagctattaccttacctcttctgaggatgctagacaagttgcaacttatctttggaacaatttcttaggaggaacttcatcatctcgaccactcggggatgctgttttggatggaattgatttcgatattgaaggaggaacaaatctacactgggatgatcttgctagatacctatctggttacagcaaaaagggcaagaaagtatacctagctgcagctcctcaatgcccttttcctgatgcatgggttggtggtgctcttaagacaggcctatttgactatgtttgggttcagttttacaacaatgctccttgccagtattctggagacataaacaatcttgaaaatgcttggaaacagtggacttcagatattcctgcaaccaagattttcctaggactacctgcagcccctgcagccgctgggagcggctttatacctgtggctgaccttacttctaaggttctaccagctattaagggttcatctaagtatggaggagttatgctatggtctaagtactatgatgatcagactggatatagtaaatccataaaaagccatgtctaatagtctaaattactttcccactgctatgggagtatgtatttgttatacatgtatatgactataatgtataaatatttgcagaattatgagctattcatacatattacatataagaaattgtctttcatctaattttctgaaaatctattaagactattttcacatcctctgtttcaatgcacacatgaagataatattagcatatattagtagagcatataaatatatgtatatgtatgtgatttgagaattacaaacagcaacaaaaaaggaagtaatcccaagataatgtctataaactattttccatctcattgatcagcgctctcaacatatatatcaaagcaaagaaaagaactaaaacagcaacatgtagaaatgaaatcagttctagcgaaaagatttcaaacttgataggtatatatgaataaaaaatgataacgtgctcaaaaccactaacaatagaccgtcaccattctaagttctcaacttattacttgaaaaataatgatcaaatgcgaagggggaaaaaagggagctaaaagaagagcctccaaaatctgactcttcagccatgagtattaacagcttcccagaccaagttcttggggatagggttggtgagatctcgtgcttgaagggcagcagtcctgagagttttaagggtggaaacattggcgtcccagaatgataagctcctgtaaggcaaattgtgcttcttgcaaaggtcaacaacaataggcgaaatgttccttaattggcaacgaggcatgcgtgggaacaaatgatgctcaagctgaaactgcagccctccatagaaccaatccatccaaggtgagcatgaaatatctatagtcccagcagcctgcttctcaaaccaatcattcccaccagggtgaccgagataaacatctgctgagaaatggttcaaagtgaattgaacatgttgaactgatgtgactgcaaagctcaagagcacaaacatcgtcctctctgtccaggtgggcaaacatgaaacaaggagagggaaccaagtccagaacacaagggttcccattatgttcaaagctctatttgggataggtctttttgacaagagcaacaatagtgtctgtacaaacaagttaaccctggcaacacacataactggataatatgtccaatgttggtaactgatcatgaacctagacaatgaatcgaatgtcaactcccttccataaaagcgtgaagtaatggacttgaagaatttagaagacactgcaaagacgggaatgtgttgaagatctggatcataatcaaggctgttgcaagcaatatgatgggcattatgagtccatttccaccaagcaatgctaatcccagtaagacaattcccagccaaaagctgagcaaatttgttatatccagggcttaacatgacctgataatgcccagaatcatgcccaacataagcgctttgaatccaaagcatccccaatacgacagcacaacccatatggactaaaatgctctcagatttcacaacaccataaacaaccatggaaagcattatagcaacacatgtgagagtgtagaaaatcccatgacctttcttttcaaacaaccccagtttggtaaactcgtttgaaattctcctataatccttggaaatctctgagaccacgaaatctttgacataataaccggtgaaaaactgatcaagatgcttccacgcagtaccgggatggtatgcaataaaagcatcagtaacatctctgccagcgaaacttagtagaggcgcatccccaccagggtgatccttaagccattctgatacattataaaccttaccctgaatagagatccacagatcccctgccttgttgtgctccttcagttcctcagtggtaatgtacttcttctccgcttccattctgggtaaagaaaaaaaaacacagtaatcccagacagatattcagaatgagaaccaaccagaaagagagagatcccacaaagtgataagaaagtgaaaagaaaaaaaaaaatgacctcaaactcagaaacccttttgagaagaataaataaaaatttatactttctctattgtttatggggtatggttattttcttttttttcgttagaaaaacaaccccattaacaataaggtgttttcttctatgacttgggtctttgtatcttttttcccctttcaaattctgatcctttttcttgtttggactctgagtttttattgtatttttttttttggatttccttttgttagcgacgtaacacgaaggagagattgaggtttgtgcacccaacgaagcacgcggttaagcttgccgtttgcggtggaaaagagacctagtcttgttgtatgcgcttcgttcaacttgtgaattttgtgggacccaaattgctgaaggggcatctatttgaggacacgaatttacaaggatatttttgacagcacactttttttctttccttcaatttacatcaaaacccttcatttataatgtttatcgatccacatcttatatttttaaatttattgtaaacactaaacacctcttttgtcgccaactattaatatatttaagaaaaaaagattatttaatatttcatcttttttacagttatattaaattaaatatatctattttgacgagggcccttgttgtgttgctgtagtgcaatattcttctagttctagatacttgcttatcttatgccttgtggcatttttttctaaataatatttttataattttgagaaacaacagggtgtcaaaagtaattccacgattccatgagtgatggcattttagtaaattcactattagatattttccggttggtatggtgatgggtctcacgtgcgttgattcagcgaccggagcgctaaataaagaaaagggtagaaaataattgagtctttttagttgtcacccaacccaattttaattttatttttctttttttgaattaattgcttttttatttagaaaccaaataactattaaaaaatatccaaacgaaaatatctgtcatttcataattaattagttaaattgtagtcgtccattcattctcccacttttaaaggtcacgaattatctgttaattcttgaaaaaaaaaaaaatcaactaaaaatttaaaatatattaattttaaaaaaaaacctaaaatatattaatttaaaagtaatctaagtaaagcattaaaagaaataataacagttacaccaccaatgatcataaaattggagaactgaatgtctttaaggatatacaccattaattattttccctttttgtttggctaatcagtttgcttagtgttacaacaagtattttttttctaaattattattttgttgttttaatatggtatattccttatctgttgactttgttatgtggtatattaattaattaatatatattagtatctcttttacttaattattaagtatacaatgggttctaaatttatagtttttgttggttttttttaggacttgccatcaaattattcttaatagttaagaataataagtttttaaccactaaaagattgttacagtaataatttttactattatcttttttaagcagtagatttaaatgaatataagtaaccttgataatgcaatatttatcttattttatttttaatatttttgtcaaatgatctggaaattaaaaggttgattattttgttcatttttctaattttaatcttgattgtgtctctaatgaaagatgtttcgattgaattgtatactattattttaattaattgatatttataaattacctgatttattaaaatatatatacaaaaaaaaatacaggatataatattttccttcccacctttaaatttaatggacgttcgaaagttttaaatttaaaacgtatttttaatctttatttgcttaatatcaaacaaactaatgtgttctggagttgtaggacactaatggcgcgtttactaaactgtaattggaatcagaataatcaatgagagaaatgtatcggtttaaaatagaaaataatcggaatcaatattt

SEQ ID NO: 111593 - DNA, 3031 bp, Cannabis sativa
agtaaaaataaataaattaattattagttttaaaaaaataaaaaaaagtaaactaaataaaagtataattgtaattatttttaacataattttaaaaatttaacttgtcataaaagagagtaccaaaagagatttcctaacactcttcctttattaattcacgccattgcggagaatcttccgactcgactcatttaataaagtaaaagaaacctagctagctaacccagtcagtagccgttaccgcctctctattttcaaattcaaaatctcccattttctctccgctcacctctttacaaatcccctcttaattcccttttcttttctcttccaaaaacaaaacctcacaatccaaacaacatgctcgcggctcactatccagccatcggaaaccataaaatccgggccaagagtggccggaagcctctccagccgaggaactttctccaaaacccagcgaccctactagatcaatgcagtactgccaagcccaagccaaaacaacaagaacgcctccatgtggatgcttcttcggcggcagcgttggtggtggaacattcacctccgcctcctcctcctccaacgaagaaagaggctcagcagatgattatagctccggcgaagatcggatcattcgatgcgtctctggcagaggagctgagtgcgatgaggaagaggctggagcggctgagattagatggggagagaacggagaggattctaaaggagagggatgcggttttggattcggagatgaaggatctagaaaagagaggagagatccagaagagtatggagaacgaagttgatcgattgtataggctgaagcagctccattctcagtccttgaggttttcttcaattccatctcttagagagaaggaacgtgcgaagatctcggtaatttaatttatatctttttttttttcttttctttctaatcaaacaaattcgtattatacatatgaatctcttatattcaaaattttgtctggttcaggaatacaaaaatgaggatagagaagaatccaccgcatccaagaaggaggaacaacagtgaagaatttttctttgatttgaattacgaacgctatgaatatatatataatacctcattattattattattgtaagcataggaatgaaatgaatcaaatatattgttatttttgaatgagctgtttggaacaagaatcttccgctttctctccttttacataattaatacatacattaccttaactttatgggtcaaatcaaatcaaattacagattctatttcccactaattcagacttctataacgaaaagtccatatacattatagtgcttgaaatagtgcgtgtgaatctttatatagtaagagctaagtacattgcattagatattttaaagtatccaacataagggtggaactgtacgagtttcaccgataacaatatgaaattggacactccttataattctccagttggaatatcgcatatgtgcaaattaaaatagattaaaactaatcaagtgtatttttttatttttttgggaaaaaatgttaactgcaattcaaatattagatcaaaattaactcattttgtccttaattatttaggtggcctttggttaaaaaaaataattaaattatttttatcttacattaaaatagtcttttctttgtttcataataaaatagttattttaccaaaatagttaaaaagtcattccatttcaaatcaatgacattctaatattttaaaatactactaaacaaagaaattaaataaaaataatttcatttccattttattaattccaaccaaaattatcttaattcatttatcacaatcataaatcaaattaataagtatgtttacattataccaaaataacttgattgttaaattaatttttagtcatatttacaatatcaaacattttctaattagtgaattttactgtgcttaaaaatatcatattataaactatgtgtgagtagtttaaatttgagtttagcgtgcacttattacactatacccttttctacctcttcatctatgaaatgtttctccgtattttttttgtttattttcaactaaaataacaataataaacaaatgatttatggatctatctatctatttatgttttatatatctatctatcaatatacttatatacataattataaaaaagttggtgtggtgtccacggccggctctgaaacaaagtgggccacagaaaaaaaaattatttttgggcccttatattaaaaaaaatgtgatattttttaaagtcagtaaaaaaaatatataattttaaaaggagaaaaaaaaaattgggccccttggctaggtgggccctaagcacaggcctagtccgcgtatgcccaaggtagaaatagacttccaagaaactcatcgttccgggccttggcaatagggctcgcgatgaaaatattgagttagaactgtcgtgggcccagcctacacgaaatattagttccttaaaaagctcgttgctcaaaaaagggccaaagtaatatttttgtgtgaaactttatgtaataaggagaaagtagagttactttgtagaaatttggaatatgaaggttactttgttgttgaggcccataataggagtaggggtctcgctttattatggaaaaaccaagaggaggtcaacattgattctttctctacgaatcacattgacaacttagttcattttaaagtatggagagccaaaccgtagcttaaggaggaagacttgggatcttttaagaattttgtatgcacgatcaaaagagccttggtgtatcatgggtgatttcaataatgttcttcacaatagggaaaaaggttgggggtaaactttattcgacttggcttattatagaaggcttccaagaggtgactcaacaatgtggtttatgtgactttgatatgtatcggcatccttttacttgggaaaagtgtagagatacgatttcacggaattttgaacaattttataatttttttttattttatttaca

SEQ ID NO: 111594 - DNA, 5051 bp, Cannabis sativa
ataataataataataaaaagcttatctataaagcctagtgtagtatagttttttttttcctaaaagaaaaataaatcatagactaaaaaagtttaagctactttcaaattaatcaaaaatatatattttaatttttattaatttaacaaaaaatgatattgcagtataaataattagaaaatataaaaatttcaatgaaacttacaaaataaatattctttgattttttgaaaaagacttcactgaaaatgtaagtaaaaaaaaattatagttataaaaatatttatgaaaattactccaaagaggcacattatcctcttgctttagctttcaaatttggtaaccatggaaaaatgagtgaagagagtattcaaagcttctttttgagaaaaacctgagtaatgggctaacttagtaatgggctaacttaactaataaataaatatatatatatttatatattcacatcataaatttatgataaatattaatagtggcaaactctaaaaagtactttagattcataattttacacaaagcctcaaacaaaatatttctacatgaaacaaaaactgaagtcattccaagtttgaattatactatacaaagatgtaaacttggatatattttaaaacaaaatctaacatacttaatctgtactctacaaaagcctagctccatttttaaaagtattaaactagacatttccatatgctagtgaaacttataaacaagactgcaatgacagctacccgaaacatcatcgaaaatgtttggtttgaaccacccaaagaagtcttcaacaccttcttgcctgtatcttggattgtgaatgatcttgttttcattttcccataatattctctagatgttcctttttcgagtggctcgtcggggtgatcattggcgtgatgttctgcatctttttcctgctacgaataacacttaacaatttagaatctgtgcagataagaaaaacccgagttggttctatgttatgttgttgcagattcgaaactaattattaccttgttcatagttgtgtttggttcctcttcgggtttactaaaggatttgaagctgcagcttatttgaagtttacgctgcaagcgtattcttttcggtgcatcaccatgtctagcccttatttcatcaggggtcatttgattttgcctgggttgagaccttcttctaatttgaattacagcatcattacttaaaaccggtttcaaatcattgataggattaaggaattcttccccgaactgcatagaacgaaaaacaatgttaaggccacattcaacagaaacaaaaacacaagatgcactgtgcaaatcatttgaaaagtttcagtctttcatctacctcagccatatcaccctcatcagaaatcacactcctcgtagcatggacatcagtgacctgaatacttccactgctcaattcttcagagccattctgctcaaaatcattgagaatggaattcaggaactgagtaatatcgtcggactcatttgtcccatattgattttcccccgtgccagggtaataggcgcaagttgatcctagctccgattgcatctgggaatgcaagggcgaaaacattttgcaatctacatatgtctcagatgggggatcataaaacatatccaagtcttgccttagctgaacatcaacctgtgacacaaaggcaatggttaaaaatggaaccaacataaccgaaaacactaccaaacatcaattaagaccctttcctcacctcactagtactttcctctttcacattatcttctgcctcattagcatcacagccaaaatcagtacctatttcctcaggtgttttggctgcaggatattccatccttatcgaaaccttactctcttgctctacacaaggcagaggctcctgagctactgctagatcagactcttcatcatcaatagaacattgtgcgttaggagatgacaatgctggttctgcgtcctcacacttgtaactctcaacagtctcgtcttgtttcttgaaaagacgacaaattacaaagggattctgaaacaaagaaaacaagttaatacaatcaaaccaacactaaatcttaaagcaaagctagatacaatacaacattgaagaactaactacctgaccggggttagttccatcgagttccttcaacgtggggcggtattcatgcattacccaattagtcctcttacccttaggagcacgccctgtgtagaaaaccagtgtcttcttcataccaatctcagttgttcttccagaccttatcttacgatctttaccagttgctttccaataccctgcatttgtagcacggtttaacctatttccatttgggtattttctgtcctgaggacagaagaagaaccactctggatcccttgttggtataactgataaatctgatcacccaaaatcaaagtattctaattcagacaaaatattttgaattgaagatcaaagctcaaaactttattaaccaaaatgaattcaattcaatcgacacatctaatcaaatctttaataatcacaatcagccaatacctaaaaagcaaatctttctaatttcaaactaaaactatccaaaaatcaaaactttacgctgaaaaattaatggaattaaaaaacagaaaacaagcattaccaggcatatcccatggctccaatttacaaacatcgatttcgcgaatgacagagacttgttcatcctcaccattgatcttcaaacgcaggtagaaatcaacaagttcctcatccgtgggtcgaaatctaaaccccaaaggcaacgaattcaaagacgaaactttcatttcaccgacggccatttccactcactccgaccaaaaaaaaaaacccaatttttctaacaaagagagaattaaaggaaaagtagaagaaaaagagaagaacccttttgacaaaaaccccttaaaaaagcagagccctaggaatcgctatcgagattcagcgagttcagttgaaaattttcggattagaattgttgtgtgtggcccatggtttcgctttttttactactcagctgagaagaaagtgagtcgaatcgctgagttgggtgaacgagtgacgagtcagttcttttatttagtttaattatttatatattaaaaaagaccaaatcaaatcatacccgcgttttttaaccgcgttaattttaacccctatattttctcataattacagatatgccattctctatattgtacgatttactattggagttttgttgtgagcgttgaagggtataatggacaattcacggaatgagaaaacggtatgtgaaaatgagttgagttggcaaaccaattatattttgacacgtaagcaaccgtgtcacgtgatgaagaaggtgggtccggttgttcttgaatctcgacgcagtaggttccacgctctttccaaaattttaattaaatattaaatcaaaaatataaaatattttttttttgacaaaaaaaaattataaaaatatgttattctagaagttatttaaaaaaaaatcattttcttgctttttagaatgtaataataatatttggtcaaacctcaaaatataggtgagagatgagcatttattttttaaataattattttatttattaaatagtaaatttaagaggggcaaaccaaacaaggttgttaaacgcggtgcaaaaacctgggatgaggaatagagaggggtattttagtaatttcagattttattttgggacctggttatgcaatttagaaacttcgaggttaaggaaacaaataatagaattaaaattttatatataaaataaaaactgattgaaaataaaattaacagtggattgggaaagatgaaagtgacattttttttagctaaatatcaaattcatttttttttttgaaatagaaattcattttaattattgttgctcattggtcaatgatagtttttaatttacaatacataaaaaataactatgtatttaattttggtttattgttaaaaaaaaaaaattggtccattgtttattaaataaaatcttttatctttattttattacattaatgtttttttatttagtttattatatcttttatttttgtaattaaaagaaaataaatgatctcatgggagatttgaaaattcatttaaatgaatatatatatatatatttataataaaaataaggtaaaaataccttgttttctttttttaaagaaaaaaactaaaatgaagtgaaaaaaataattttagtaggtttttaagatttataattctaataactaatttataagtatttacatataaaattctttattttatttggttgcatcaatttattgtgaataaaataataataataatggtgtaatgactagctttattaaaattttgcccaagaaaaataagtaaatgaacaaaattgtgcattttatttatatagaagtaataagtggttcacctttgtttaagatttatccttagtaagtatatgtatatgaaaagtatataattaaataaagggaataactttttattagctcaataaagactattcactattgagccttatgacttaggagaaatataaagttatttagtgattggacaaaagaaaatgaaatgtttctaattagatagagacatttctaagtttattcatattagtatgactttcactttcttctcctaaactatattatacaatcgattctttttcaataaacacaaaataaaataaattaatcaagcttatttccataaatatataataaaaaattacgaaaaagaaaaagagattttatcctccactactagccatttgttaattaaaatattttatttaaactttaggtttaggcatttcattgtgtattggaagaaaacaaaaagaaaaacctctcaaagatttttttcttttttaaaaaaaaaatggagaaaagcttcaaagtttggtttggaaactatgctttttattaataggcacacaaccaccccttaattaatgcatttaaaatatataattaaaattccgaaaaa

SEQ ID NO: 111595 - DNA, 3832 bp, Cannabis sativa
  modified_base (3202)..(3215): a, c, t, g, unknown or other
  modified_base (3278)..(3294): a, c, t, g, unknown or other
  modified_base (3458)..(3473): a, c, t, g, unknown or other
ttttttttttttttgataaaaatttaaaaattaaaaaaaacaagaacaacaaaatctgaaaaaaaaaaaaaatactaaaaaatgaccaattttaagtgtgttgtgtatatttctctctaatttatatgttatgatatagtatctaactattaattaaaaataatgcaggaacttacagccatttaagactagacaaatctcctaagctgcttggtatggtccctgtgagttgattattcgataaatcgctgaatatataatgaaacatacattagaaattcaaaactaagtattgcttaaggcaatagtgaaaaaactagttgtaacaaaacaaagagtagaatttgtagccttacagggtttctaagtaaagcaaactccccaagctaaacggtatggaaccttggagattgttgtcggacagaacactgcttagttcacacgagaatgttgtcattaattcttgttattaagttcgtatagagaatattattcttattttaataaaacaaagacccaatttatttgaaattgagatttttatttgtatcttataaaataataagtatacttgttattaatattaaggtggcgtttagttagaagtaatgaaatggaatggaaaggagataattttcatttcatttctttgtttcgttgcatattaaagtgttagaatgtcattccttcattttcattattttggtggaatgactattccattttaaaatggaaaaaaaaaaaaaaaaaagaccattccaatatataatgagaaaaaatttaataatttttttattaattttaaattttatttcattacgccacctaaatggaatttgaatcttaggtattatggcatccacctcaaccaactaagctatgaatatttattgcttataatacacttaaattttacttaaataaaaacttaataaaatgtttaatttttttattttgggccccgaaaaacatggactctaggcacgggcctagcctatctatgcctaggaccggccctgcctaagtgtctaatatcatatactcttttataattggttaaaaatttctcatatcaattattagattcaaatacgtggaattggatttaaaatgcaccaatattaacaatatgtcaatcattagtatttctgaatttgtaagacaaaacaataataaaagagagataataaaagtactaattacagtttgttcagccacggaagatttcccacttcatcatctatgtatccattaagacccaatttatttaagattctgcccaacaaaaaatgatcagtactttgtaataattaatcatgagctaattaggtaattttgactaacatatataatactatattacgtactaaaaaaccaactgaatatatggtatgtcatcttacattaaatttcctgtaaatacttacatttctgtaatgtgggaaacttctgaaccacattcgcaattgattatgtaaccgtagtttctgagagtgttcatgcaataagaggaactaatcgaaggggaagtgaccttcgatttgaactgatttataacgatgttgagagaaaacactgccaaataataattaattacaaccaataacgttagcctaaacattataagaaaccagttcatgtatttgttattttgcattgcggttgaactaatatagaattttctgcaaaataataaaaagacatccctcagtaacagaatcttttcccctgtatttttttctttcaatatttttatttgatcttttcgctgctttatttattagtatttatttcttttaaacaaaaattttaattccctgtttatgttcttcgctaaattattatgtttgagaacactaaattattaatctttgctaaataaagataatctacaataatgagttgaaattggatagaatactagtaagaaattacactcgaataatgtattatattttattttcatgtgacacgtgaaggaaaacatctttttaataattaagtattttatgtttaaaatattagataatattaccatttaaatttatttgtatgtattcatttcatacaacatttatatgaaacatattttgttgtatgttacatatttcagcataaattttgaatatatatgaggctaatttattcaaaacatcataaaaaaattataaaaagaaggatattgacagtaaaattatatgaattttatattttttaatactttatattattaacatgattaaaattatatttacatatttaatatcaatctaaatatttattgtattatattacttattgtaaattatttataaaattttatttataatgaattaacttattaatgtataataatatttaacgatcaatttgtatgattttgtaaatatatatttaagtgtatatatttctaaattatttttttcttcacattttttttttattacgttctttttattgtaaactaaaaaaaaaggccaatatatgtatatatgaatatagttttacgtttattatgtaacgaaccttcactggcaggcaacggaggacaccacgtctttactgtagtggcggtcaaaggctgtggcgttctagccttatttccaagagagctgcgttcaggataagcaactccgagggctactgctctttgaatttggaataagtcagagccagagtaaaggaagatgatgatgatcaagtactgatgaataaaaactttattattataacctaaaccaccaaaccaggccttattccccattttgctttttctacctcaaacttgtaatatctattctataaacaactaacatatataatttcttactcttctattctatattataacccacctatatggctagtcaaagagatattttttttttggaccctatagctaacgatattctttaatttttttttaaatgtttgattataattttattttgggatatttgtgtggaaatcttctttctaattgttacacttatggttataataaaaaaaataatggtaaaattattttattttataattttgttatagatgtattatttttgaattattaaatgtcaattaaactcctcatatttttgttacttatttaattaatacataatattcttcttagtttacacttaatagttaaaaaagaaataccattacaataaattcataaaataggctaattagtaatttnnnnnnnnnnnnnntgacatgtaccaaatcgtgcccctgaacttttttggccgccccccgaactattgagattgttnnnnnnnnnnnnnnnnntctaatttcattcaattttaccgtttcagtgattgtttatgtattaaaccatactgcccagactttgatatttaccaaattatgttcttcaaactttgatatgtacaaaattatgtcatttgaacttttcgttcatgtaagaatttttttactaaaattagacnnnnnnnnnnnnnnnnaacaatcttaatagttcagggaaatttttaactgccaaaaaagttcagagagcatgatttgatacatgtcaaagttccggaaaaaaaaattactaattagtccataaaataatatttataacatatgtaataattataaatattaaaaaaaattcactttatttttattgaaaacaaaattacactatgctgacggactttaaatacatttatggaaaattaaaatattagttttggctctcataaatgttacgtcactgcgtgaggtaagaactttactttttcttgtagttcatcttcgaatcacgtggttaggtaggtataaacatatctttatatctattttatataaagtctgc

SEQ ID NO: 111596 - DNA, 4057 bp, Cannabis sativa
  modified_base (4004)..(4007): a, c, t, g, unknown or other
ttttttttttataaaaaaaaattgggtactattttgtaatcacgttttagaatgtgtagatacttaactttgaagcgtgttattatttatttatgtcgcaaaatttattctgttttgaaaattaatacactctaaatttaaaatctcaaaaaagagaagaagaagaaaaacgttataataatcatctcaaattgatatcgcgcacaaatcatcacaaatgcatcgttaaaactcatttgacattttcttatttgaaaatcaacttttcatgaaaactatcaaccatcgcaaattcattattattttgcaatattttttgtcgccttaaaatatatatttttttatggcacaattaattgcaattgcatcgttaagtatcgtaaatgcatcaattttgtcaaaatgtatcgttacaacatcaattttccagttattcaaattcattattagcttcaaaatgtaatggtttattaactttttattttaattgaacattgatatactaaaaatacattcaagtttgcgtggtggtcgggaacaacgcaaagaggaagggttatatagggtctgagattcaatataagatatatatatatatatatatgtatatacatatttttaaaatagctaaaaagggtgtcatattgaataaataataagagataccaagatgcacaaagcatcaaaatttccaatacgtacgtttgtatgactgggtacatatagctaggcaaataattgtattttacatctgcaaaatatgtggtacatttgaaataatgaaattaaaaattaaaagttaaaatactaaggtgtaataattagataaacaaagtgaattacaaaattctattaaattaattagcaaaaggaaaccaatgatttaagtgtggggaaatcatccatgtgaatttcatatagccaatttacttagtctaaaaataacaacttcaactttggcattacttacaactcctaaggatattcataataagttacaagaagaagaaaaaattatattataaaactcaacgacacatgcaccaaataatacagatagatcataaaattattttatgatctacttgtaatttcttttatggggagtacagatctactaacgtcgataagtagtcgcattggccccatgagaaattggagacttagtatgacgataattaaatgttgaagtagaagaagagtggtcttggcgattaggtttcttgttgtcttttatgatgagtttaatgtcattgattttctccaacttctccaggacatgatccatagaaggcctagttttagggtctgattcaaggcactctagtataagctcagcagcttggaatgcagcttttattggatactcatctccaagccctttatccattatctttttcaactttttcttgtccgaaagcgaaggtctcgcccaatccactaaaacgtgttctcccgacggcctactcgtgtcaagggcgcgaaatcccgtcatcaactccagcaacaccaccccaaacccaaacacatcacttctcaagtataaatgacctaaatattcatcatatattggttaattaataagtattactattgagcaccagttagctagcactttctagacttgtcactttacatttagttaaagattctccctaaaagttattacattaaattataaagtttttgatagttaaattctcccaactatcatttcacttgcatttaaccatccaaactcaaattttggcggtaaaatcttccaaactactaaattgttaacaagttcaaggtgtcatttggttaactgctactatggactactttgtacacgtgacacatttatatatatattcgtataccttaccattattatttcaagattcattttaaaattaaataaaattataaaattaaaatagaatattacaaaaataaaaaaaaatatattataaattttgaaatatttttttataatttttaaagtaataatattagatgtactaatataaatgtgtcacgtgtacacataagcagtccatgttggcagttaactgtaaaaaatagatgtcaccttaattccttaaatttgctagtacttcagtagtttgaagggtttcatcaccaaaatttgagcttggagggttaagtgcaaataaaatgataattggaagagtttaaccgcaaaaacctctaaactatatgggactcaatactagacgacaacgaggagggtacgtgttataatattactattgatgcaatttaatattgggtcttacttattttaatttaataaaaattatataaagtcgctatctaattataaaattttatgttatagctgtattagataccttggtgcctcatagcaatattcttttagattgctattagaaaccagtagtacttaacacttcactttataattgattgacgatactctttaaagttattatattatataatgtagaaactaatatttaattgcatcaataataacaataacaatcaatttctcaataaataaatatgattggttaaaataaaattgataccagttgctacgtattcaggagcagcgtaaccatatgtgcccatgatacgagtcgtcacgtgcgagttaccgtttactgggcccgattttgcaagcccaaaatctgaaagctttgcactataagcctacaaacaaaaataatatttaattatagggaaaattataaattttatggttttttttattttttttatgcataaatatagttttttctttttttttattaaaaaaagttattttattagaaaatttaaaaaaaaattagaaaatatagaaaaatttgataagagttactagatactttatagtaactataggtaactaggtatcttatgttgtttttcttcacattttttaattttttttttcctagaatataattttcttttatatttttgtaaacttatactttaaaaactgaaataaaaattccctgtcatctttaaataataataataaaacaaaaagagataaaagaaagaatgttactccatctagtaaaatgttggaagttttgaagtccctgtaaatgacagacttctcagagttgtgcaagaaggcaaggcctcttgctgctcctattgctatgtgaagccttgtgctccatggaagtggttctgccccttctgtaattaaaatcaaatatattaataatttcaaactaaaaatatatataattttaattacgtattttaatagtgtttaataattatataaaggcttatttaaaataaataattatattatggttaattagaaatttaatctcttcaactttgacaaatgccaaatcatgctctttaatttttttttttactgttaaaaatctcccataaactattgagattgttagttttaagaacttttatccaatttcatttaatttactaattcggtaattgtctctgtactaaattatgcttcgtagactttgatatttactaaattatgtccttcaaactttgacatgtactaaatcatgtcttttgaactttgattcatgttagactttccttactaaaattggataaagtcattaaatctaaaaattttattagttcagggagaatttttaacgattttaaaagttcaagagacataatttggtacatgtcaaaattcgagatacaaaaagttctaattaatctaatataaatatatataataataataatactattttttaaaataatattgacaaatatttacttaaattgtcaaacaattaataaaaaaagaaaatcattctcacttctaaaaaggtgattttccaagcttcccttctgcatgtattcatagacaagaaggaattgattttcttcccaacaatatccgagaagcttgacaaggttggggtgactaaactttcccaagaattttacttctgcctgcaattaataataatattaatataccctaaaaattttttacacttcaaaatattttnnnnttttttttggtatttttacggaattttacatagaaatccctattgcaact

SEQ ID NO: 111597 - DNA, 3825 bp, Cannabis sativa
tatgtatatataaaaattaatattaaaattttactctttttttcttagattggatggatccaattcaatctaatacatactggacctaaaatattggatgactccgattcgatccaaacaatactaggtctaaaatattgaataaactcaaattagactaataaatatatatgaaatacatccaacagatagaaccgatctaatccaacatccaatagatgttgaatcgattggatgactaaaattaattagatcggatcggatggtaaaatttaatatcccatatataattggatcggatttagatatgcttaaaaatattagatatggtccaatgaacattcctactcattaagctgagtttttccattttatcttttctttaaaactcttaagtatacttaattacatttataatattttgtagtaatattgggcactagtgtctctcaaaatttctctctctatatatctatatttacaaaatagttcagtaattagtttttttatgtttgtttttgaaagtatgaaatttttattaaaggcaactacctgaaaacagagtcaaaatactcgtacgacttcgaagaccaggtcacaaaatcatgtgctaagatattagtgcctctaatattacaatgagtgaaactaaaaataataatattattacacataattaaaatatcaacaataacattactaaattcagtaaataaaggatttttatcaatgaaaaaaatataataccagggatgtaaaaaaatatatataattgtatatattatagaatttatggttatattaagcaccctattaatttttaaattttttaaataatttacaagattaaaataatattcaaatatattgttgtaccgatgttttcttctataaatttcaaaaaagaaaattactaaaatctgtctaagaactagaatttctacaattatataataataacaataaaaaaacaaatattataattatcaaggtatgaaaagcacgagggagggtacatgtgaactcccctaaaaagcttagcactattattttaatttgctagttatgatcatcattgttatttaatcataaaagaaaccactcacaaagccaaccactagaaaacagcacatacttcccaattttatttctccatattcccatttggctattttgaaaaatagaaagtattgaaaggataaaaaaattctttttcaataaaagctatctaattagtctttatttatttattttctaaagtcttatatatatttaatatttgtagaacaagaccttgacactcattaagccgccacaataaggatgcttttatttatttatttatttatttactttatgtgattgtggatagttgctgactaagacaccacacattactaatctaatgcccctcactcacctcacccctcaactatttatttatttattattttttctttccatctttggttattaatttatagatctaaaattgatattaattaaggaatggtatcacattcacattcacattcataagttgtgttggttcaaatcattatataacatcttacaattattttctctcatattaaataaatacataaatacatcaccaaaaggaaaaagaaagaaaactatgatacatactatacgactcatacattggttgagcatgcaattaaaatagttgataaattaattaagatataaatagtgatatagttctattcaaataataatttttttctttcaaaatatgactaattcaaatgacaaaatgctttttttatccaccaaactatagcacttatagactcttccacactgttatttacatgttattctaaaaaactactatttacacatggcaaaaatatagtataacattacgacaacataaaaataacgttaaaacaacacaatcgtaaaaatataaataaaaaaaagttcataaaaatgttaaaaaattatgttttatagtgtattgtgtaaatttctcaattattttgctaggcaaaaatacttcccgagctataacacttgtagatttttatccattctatccaaaaaattaatagttcgctagcatggcagttaaaaaaaagaaaaattttcaaaaatactaatttttatgttttatttataattttatgatctaaaacttttatttacaaaaaatactcttttagagttttacaattataaaaatacaattttctcaacaaaaagtaagaaaacaacgagaaatcaatctcacgacaactataaataaactacaaaataacaaaaaaaaatctcatgacaactataatattaatacaactataaataaattatacaacaattgaaaaaacagtttactatttttactgaagaagtatttttgaaaataaaagagctcaaaaggtaaaaatgaaaattattccgtgttgaagtatttttgtattttttttctttaattttctggattattttgtaaaaatttcttaagaaaatatttattgtatttttaattaattaattatttttgaattttaaaaaggtatgttataattattttaagactaaaaacttaatagtaagaataaaaaaaggcctagaattaaataaatacaaacataatcatatttattattcattcaaaattttaaagtaaaacaataataatcaatgttaaaactgaaatataaatttgtaaacaagtttatattatacttgaaataaaaaatcaattaaatcttgttatccacgatttcggaaggaggatacatggcattcctaatttaaaatttatcaattagagtctggtcaaaagccctaccaagaatacatgcccaacttatacgaaaggatgggtccaagcccatccgaggtctaggagacactccgccaagactagacctatccggatccaaaagggtctcccatcctcataagaagaagtaattaaaaccctccaaataagcacttgggacgcatccagagagagcattccaagaggcaccctagagacttggtacaagatgacgtgacagtcctctgacatcaaatgctatagaattagggtattgtcccctatgtcagactctaagagtgcacacaccactaaaaggaaaccttccttttgtccaacgacatgatactaacactacaatacataaaaatggcacacacatgacatatgtcaaggatcgtatggtccccaagcgtacagatcgcctccgcctcatgggctgacctcagtgtatgggccctagtcacatatttcatgtatttaacccattagttggccaagcttgcatgcaaaccatagtgggtcacgaatagacccaaattcgattcctagcctataaatactatattataccctcaagcaagggaagaaaaatgtgattgtataaacaatatagaaagaagctagggttcttcagcttgtagaaactccattgtaatacatcaaggctactttgccaaatacaattgagtcgtggactaaagttcattaatacccaaaccacgtaaaaatctcaatttccactctattaatttatttagtcactcaactcttattttaattgattttcaaaaatctcagtaaatattttggtacttttattaagaattgaagaaagctttgaagctactttatgcctgtaaccatggtggctaggggtgagcatcggtcggtttggtcagttttttctatataaaatttaaaattcgatatttcggtttggattggtgcaatccgaaaactgaccgaccaatccagaacttatcttaaaaccgaccgttttgaacctcagtttggtcggtttaaac

SEQ ID NO: 111598 - DNA, 3495 bp, Cannabis sativa
cattggccaaaatagtagaaaaaaccccacaaaattagataaatttagtaagagtgattataatgtagttataaatatttttttatgataaataagctctcacaaagtaaaaatccgtgatccgtcactggctacaacaagtaattatgaaaaaaaaaaatagactaatttttttttcttatattaggaaatataattaattcgataattaatatttagcatactaaaacaaataatagttgataaaaaaaaatcttaaaaaacaatagatacgggtactaacttgcccacatcgctaacaccacatagataacataacatgtaaacatgtaataactcttcttctgaaccaattaaaccaaataaattctaaaaaggaagaccattcaacacccccaatttattaatgctgcactctgtacttttgtttctctcgtttatcgaaaaaagcttttctctcaccttttcttttggatgttttcatttcatgcttccccaccttgtttttttcccctcttcttcttagacctcccacttctattatcacagaatagaatcccaaacatttttgccagcccattataccaattttcctctatctatctattcttctacctttgcttgattcatttattcattcattatatataaatatagctttttgggttacttattaaggctgctgattctttaagagaagattttgcatgttcttccattagttgtagaaatatgaagaatccaacttggcacaatcctttggagaaattaggaaacaaatttctttccttttaaactctccaaatctttatgcaattacacccaccaccacctcaaggtattattatacttctttcctttatgggcatatgctaaaattttggttgtttttattttttacaaattaaaatcgtaatctttttctaattgcattttgtcttttttatattctgtgattagataccaatcttcattcacagaaaaagtaaaaaaaaaaaaagttccaaaatcacatgcaatggagcctagttggctcttcttattatgttttttttggttagttttaaaagcaaaagatttgagataagtacatttactttgcagcagcaggcaaaagaagaaaacaatctctcttttctcttcttttgggtatttttttaagaagcttagccaccattattgggcttctagtttcctccatggcaaccaagatgaaaggaatctacaaaagcttcaaatttatctcccaaatctttggtaatcattttcaatgcactatttcttacatgatgattaattgatgttgttctttgaatacatcattatatcttttgtatttatttgcttaatattaaaaataaaaattggatctttgttgtagttgtgaaggagcgagagatggaaattgggtacccaacagatgttaaacatgtggcacatattggatgggatggcccatctggtagtgcacccagttgggtatgttgtccacaaaattgtttcattatctctaattaataatctcttttttgtttttttcatgtcatttatcgtggctcccatgttcttttcttttatattcttaaaaaaaaagtcatgcaccaatatgttaaaaaaaagatttaattttttttttttcttcttccagatgaatgatttcaaatctagatcagatttctcagcaacatcacttggtaacaatggagttagtgagggaaatgattccaattctatagccctttccacgtggtcttctcaaggttaatttgcattgaagtacctcttctttgtgtctttttcttcttttaagcttttacatcttaagaacaagtactatgagttagtttttgacactttttttttttttaataaaagaagtgattgtgaaataaataagtttgcccattttagctcctcagtgttttaatttatttttggtctattatgaaactatgccggttgccatgtgcaaatgtgcagacaaattcaaacagaagagacccttttcacgggttaaatagtttatagaagaagatagattattaatgctaattttagtgtattaattagtatcagatttttaagctaagctaaagaatttttcaagattctttgcctcaataggtagatagagtactttggctgttactgtcacgggttaataatactatactaacaagagaatcttactagctcatttacccaaggcaagctactcaatagtgcaatatagacaacattaaatatcatcaacaatgctctcctttgtttaccttaaattctcaaccacttgtttctttaagtttagccctgtttgtgttgtcttaacacatttttggtcatgcattttcatttaagccaaaataagttacactaatttttaagtgcaagttctctctgtgttctgtttttgggtggccatagtaaagtggtcaagagtttagacaatagacattagcagttattttcttctagtcatgacatgattcacactgttatgttcagattttgagcaatccttgagtcgccaacctgtatccgagatgttcaccgatcttcctccaaacgaactcccgaatattcccaagaatcccaagcggaagaagagcaaatcaagttcgtctacaggctcagcatcgtcctcatcgagaggttttcggttgacaaaaccaaaggctacacacaacaacatggaggcatcaccaaatctgcagctaatttgattcataactttagttcatagaaattcacaagggcaagaatgaaaagtcttcaaaacttgaacatagatagttatttgtgtacattttggaattggaaagaaagggtatggataatggggctgcatataaaggggattagagagagatttgtggaagaaaagggtgtgaatgtgttgggctgagtcgtcatatagactttttggtggtttgattagtgatggtatttatttgctaagctgatatttggactagaacgccataaatttttacttgtaaattatcagcaattaaacaccattattagtatccaccaccaccaacagataacatttcacaatctgataacatctttggattgacacacaatagtgtcctttagcctttatttataatcccagatgatcaaactacagtctcatgcccttattcaaaattggcttttagtttcgattaatcattcaaactacaatgttgctgcaatcgtgtctagatgggttatctcctaggaataatttggcctctactgacatttcaatattgacttattgaagtcaaaatatagagaacgtacgtcatcataatgttacaatttgatccccatattatattgatatatttttgttgtgctctactctttttatttttgacctgattatcatcatggattatttcataaaagttaattagtctttaattttgatatgtaccaaatcttgtcccctgaacttttaaagtcgttaaaaataccgctgaactattgagattgttgaat

SEQ ID NO: 111599 - DNA, 6097 bp, Cannabis sativa
gcagaatcgggaacacaagaataaaaaggaacaagaaaagttcgtgtattgtcaaaaaccattagggttccaaaaaagaaaataaaattttgtgagcattccaaaagaaaaatggggttttccagagaaaaacaacaaaagattcaattcctattgtgtccaaaagttattcaagtaattattttgggtatcctatttctgctagcaacagaatctcaaccacaaacttaaagctacagtttccaggtagcaactaagttgcatgcaaaactcatatttatacgtaccatacagttcaaaattatttgatgaggaaatttacctggtgatgaagtaggtgatgactctgaactcggatgaatgtttggcttgggagaatacacactaacgtcgaaagaaggtcgtaagaaaattttcttaaccaacaaaccttcaagttgatcaagcctcactgcaatgatgttggcttggttgatgagcgagtcgaatttagaattaatatccaagtttacaatttccgctggcaatacagtcaaaatcattgggggtggagcacttaaaattctcgaactctaattcgaaagaaaatgcaaaagtcaatatcatgctccagtgtggttcatccatagttagatcattatttgacgatattaatagtttgtgttccaattattatgaaacatccttaattcatgttagttgtacaattgataaactgactcataaattaattgtatatgcacctaaagtgaagggtgaattgacttgaaatttttcatcgattcatttaatttcaatatatatataggataatgcttcagtagaggtattaaaaacaattttatgtaaagttatttttttaatgtgccattgcttcattttatgtccatatttaatgttatttctttattttttaataattatatatataaaaaaaaacactatcattctttttgtcacttctcttttcttcttctctctttgtctctaaaagttcttaaaagttgctcctaaaaggacccaaaactgtaacaaaaaagaaagggctttgatatttcttttcaaaagaaaaatagagattgagactcaatagttccctaatggcaaagttaaagaacaatacaaaaaagcttttattttgtggatatgatctcagaggagagacgtacaaaaactttttgtgcattgttctttgaccattagagaatttctgagtctcaacctctgtttttcttttaaaagaaaatatcaacccttagttttagttacaattgagtcctctgaaaagcaactttttagaatttttagagagaagtaaaagaacaaaaaagaaagtggcaagaaaaataatagtatttttgacaaataattatgtataaaaaataatattaaataagaatataaaaagaaacaataacacattaaaaataataactttacataaaatggtgattcaaaaagagaacgagtatatctagcaagttaaacaatttgaatgacgcataatataatttggtaagttgtgtgattccttcgtaaaaattgggggagctgataacatataaaccaaatatatatattaaatgtatcggttcttcttatgaacaaaccaagctaaaacatatattaaaagagcaaaagaataggaccagaaagaaacatcaaaaatctatttcattttgcaccgtttcttattgaaatccttaatttatcccaactacaaagagacctggatggtgagttcattataggcaaccccgcattcagatcatctttcaaaggtaaagaaacaaaagattcaccaagtaccaacacaaaaagatgctactaaaaatggtccctatcaacaaattctattaacatcatgacccaaccccaacactaccgccttcaaccactgagccatgattgttgtaagatggcccacctcctcttccaccccttccacctctattattatagtaattcctgggataataacctccgggctgctgctgctcataatactggtttctaccattttggtagggtcctccgcctctaccgttttggtagggtcccccacctctactgctgccccgagctccacggctgtttgggtaacctctgcggccacccccaccaccacctccgcgacctcccctttggttctgatagggcctgcgctgtacattctgttgctctttcaattcgaagtctctctgactgtattctacttctgtctctgctatgttttgttcacgttcaatggggatctcttcagaattacctatctcctgttcatcatcctgcatagaaaaataaaactctgttatcttcaataaaacatgtgcaaataataatcaataaatcaataaaacatgtgcaaataattaaagcttagctgaggaggtcaccttatgaaattcatctacatgacttggatgatgatcacccatttcatgctcttgaaattctgatgtgccttcttcctgcattgcatcagaaggtaattcaaaattgtttacaaaatgtaccgtcataatcaataaatcaaaattaattaaactgcaaagaaactaagaaatactagcaaagctgacataattaataatgaaaagcatagataagaatagatcaacatcaacataaacaattttaataatgtcgagaccaaatacagattaacactggcatggatgcaaataagcagaactcaaagttgagccttacgcatacacatatgtagatggaaactttagtgagttgacaaatattatacagaaaaaactctaatcaatgatgaccatatgataagaattggcaatgaaatttatatcttcccatacaaaattatccattgagccaaaatactatgcagttcagccttacatgggtcaatttatcatagttgctcaagcaatcaaggcatttccaatccagtatttcacacataattatcccatttctcaatcattttctaacctgcagcatcttgtgaacttgacaggaagaaaggacagaaaagaacaaaacccccactttcaagctttcctcaaatgatcaagttacaaagccagcctactaaaacacagccatattttctatattctaataaaataaaatatttgttagaatccaacttcctttttaccgattatcccaacattatttggagacagtaactacaacaataactataagtatctaagagggactcaaacctcagacatggtggcagcagaccccatgcctaaccatttatttttgagctactcctcttgggtaacttccaccaacttatattgagcttattttactactagacaataaaccctcctattcatagagttacattgagctaaaatattgattatgcagtgcaggtgctccaccaaactaaatacctccaacccaagtcttattacttatttgtctaatcagcaactgattcagtgtatcctctcccaatattatattctgaaaaaggtgtatacaaattccctccctccctccctccacaataactataagtacttaagagggactcaaacctcagacacggtggaagcagacctcatgcctaaccatttatttttaaaaaggatgtatacaaatttacctatttggcatattgatctacactttcactgcatcggcagaccttagtcatttttgtacattctatccaaattttgttggaacccattatttgaaagaaaagaaaatttgtgccattaatcccttttggttcacttgtttgacagttcagtcttttttttacccctcgaattccataaaaaactaaagttgcatccactaaaagttgtaaaccccaagggggtattaaaaactgtaaacaactaaaatcttaacaacttcaatgtcaatactttgctaatataacctattcaaaatagataaaatgtaatagctacaaagtcaaattttactagtagagaaaggtccttgtgtttttcttcccactccagtttttttgagtgataacataactacatttcggtccattataatttctcatcaaccagtgtatcactactttcttttccattcgtttaatttcaattttatccaattctccaacaaattgattattttacatttttttaactcagagtttagacaattgcgtggagtatcgaagtgagaaaaaacactgaatattaagaatccttggttaacagacccaagaaaaaacctttacattattgaagtgttgttgttttctcatcttcactctacaacagcacatgccttcaaacaattgttcaggattaaactttcctaaggattgctatttgcaatattgtttataggaaaatccaatgcccacctaaaaaacctacatagatataatttataccaagcaaataaatgttagggatccctgggaaaaactttgcccacaataatagctactaaaagaagcagagaaaatgacacttgagttaatgcatgccaaacaaagaaaaaaaacagattgctttaaacagaaacgcattacatcaaagttccaaactaactaataaagataatatatcttacttgacagtattccatgtggcacactggcagattaaaacagtaacatacccctattgaatattatactaaccattctcaaccaaaagtagcaacactaatttccacaaagggaaatgtaatgttgaagttctacacagaagaatgaaaaaggttcacgtcaaggattgctatttgccttcatactattatctatgaccgtccccaaactagctctcctacttcttcgagatattcacactcactctccggctcatgtctgcaggggacaaatcaactattttattctatcctaacattactagtttctagaaattaagagtgctctcaaacttatgatagttgttcttatatttattttaaactggatcccccgcctaatctatacttagggacttggaagctataacaagtcagcaacctaccaattgttgagtaggtacacaggaggcactcaaacctttgacattgtgggaactcccagaactctgatcatttgagctacccctcatgggttatagctgttcttatgtaaacttaagtagcaccaggctagccagcaagataaaatatttataggtcaactaataatactgaaatatttatgtgattgcacgccgtgcaagagtaatgcagcgacaagcaagcaaaccattggttagcaagcatgtaatacatttataggtaagacaaaaaatgcaaaagcaaagtttactacatcatctaatagtaatactaaagtatcattcgtatgaaagacagcagacccagacaacatttaatccaatacagaacaaactgagttaaacctgttggaactgcgaaaccgatgcttccaccgggatcgatgagatggaatcctgaacaggcacctgaaaggaggcataatttcctgcagcaacttctacgggagctttcatctcaggcgtagtggtcaagtagtctgaagccataatcttgctcagcctctccctcaactccgcatctgacaaacaaacaaacagttttagccaacgaaatcatctattccatactaataaacagattaaaagaaaaaacgatatttacaggtaatattagcactgggctcaatgagctggtccgacttggtcaaccaaagcttggcgtgctcaaggcaacgctgcagagcattcttgtgggacaaactcgaatcgacggggcgagagatcaaaagcccaccgagtttggaaatcaggtccaaatctctctcgccaagcagatcagtagcatcgtcagtgacataatcataagtcaagcaacaaccgcgctcgtgggtcctggtaagcatggttgaagtgaagtcactctgagatttaacatcaaaaagagacccaaaatagagtatattgagaaggtcctccaccacagtttctttctgatcctgttctcggctaataacaggctctgaagacgttccgttggtctggttttcgttctgatgatctttatctggggaaccatcggaggatgaggatataggctgggaggagggtaggacctgctggtggttttgtacagcgaggttaatctcctc

SEQ ID NO: 111600 - DNA, 1043 bp, Cannabis sativa
  modified_base (28)..(35): a, c, t, g, unknown or other
tgtgtttttatttatcgttttagaagtnnnnnnnnaggttgttaaatcaacatacttatgagtagatctaagattctggtaaaattaattccaacagtggcatcatcagtattgactttaactgtcccctcactaggatgttgccactgtattgtgaggcccacagtcttatgaactctagagtaataatggtgttttcgtgaatttgtttattttggcagaactaaattcgccaccaagtaataaggatgaattcaatatcataattaggaagaggttgaatgatattacaaatgaacacaaacatatcactaacgaaccactcaattttctaagcttaaacttgtgaagtttcctcccatgatctagattctagcatcctcaaagagcataataagtggtctatctaagtaacttgaaaacttcaggtccaaacgagacataagctagaaaatagagagaaaaagagcaagggttcgcaaggagggtgggaccatcaggttttccttgagttctcaagcttagtttcgcctaagctgatggtggtggcgacgccatgataacgaaagggccgagaagagaaaaggagagtgatggaggttgggctttagggttggggatttttagggttttgagtttcaggaaaagggacccgaggttcgcttgaggtgaggagggggctagagatagtggttccgatatgtttttggcgccacatgagggaaaccagagggagttataaatttttattttttgtaatttattatttattttgctttttttttaaatgatttttatatttttaaatgatgtggactacttcaatattcttacgtaaacatttgtgtacacactgcagtacaccttggcctttgaccttagcacttgacaacttcattttaacgaaagtgtaaaaattaaaacaaaagataatttaagtagttttattgttaaaaaatcaatttatataggtgtcgtttgataacacttatattttttaattttttaatcacaaaatgaaagtaaaatttttgtttttcaaa

SEQ ID NO: 111601 - DNA, 4968 bp, Cannabis sativa
ttatattattttataacagtatacttattttattttacttattttaattttaatttttatattctttaagatgtacccacttttataaataatgtctttattagactcttaaattaatgtaaattatgtagtagatttaaatagagagtgaatatataatggacaacacattccaacacattcaaaaaaaaaaaaaattaaatatattttaataaaataaaatataaaagtatctttgaataataatgaatatagtttagtttttaacttatccctttctacaaaatggtagcattagacaagtgttaacatcaaaatcccaagagtcagtgattataaatgaggacaagagaaggaccaatcacatttggttcttaaagtcaacaaaaaaaaatgaagggtcggtaaaactcgggattagtaaggagataaataaataaaagtctttgcaattttgctaaataaaacaaaaagaaagaaagtagtgaaaagaaaacagtgagtggaactagaagaaatgctggagtgacattgatgagtgagtgaatgagagcaagaaggaactaaagaagaataatccatctgaattcgaaatcggaatgagtggcggtggagaaggtgagtccttggagtatactcccacatggatcgtcgccgtcgtctgctctgtcatcgtcgccatttctctcgccgcggagcgtcttctccactatctcggtcaggttttgaataataagaaccagaagcctctatacgaggccttgcagaagatcaaggaggagttgatgcttttgggtttcatttcgcttctcctcactgtttcgcagaacacaatttcaaagttttgcgtacctgcttctttggtcgacaatctcctcccttgtaagcgccctcatcaggaagctaatgattcgtcttcttcaacctctcatcacatctccggctctttcagacgccttcttgaagaaacttccactgctcatttgggttattgcgctcataaggtctgatctgatctaacccatatctttagttgttgttgtttttttaggggttaaacaaaattttgaatctttttctataaatatactttcccaaaagggactattcgctttaatctaattgtaatagtacaaatatgtttgtttcactttttttctttattgtagaaaaaagtaccccttttatccgttgaagcattgcaccatttgcatatctttatcttcgtcctagccattgtccatgtcactttctgtgttctcactgttgtgtttggaggggtaaaggtaagtatatcttccaaattcatatgcttctctctcttttatactctactactttgtttttgttcgtttatgagaaatatttctacacaactagatacgtcaatggaaacgttgggaggattctattgcaaatgagagttatgacactgaacaaggtaagtattctcagtaccacttttgacaatattatagaaaatttgtctgactgtattccttctaacatatgaatcgcttaacagctgttcttaagtctaagaaaaaggtaacaagcgtccatcaacacgcgttcattaaggaccactttttgggttttggtaaagactcagctctactaggctggctggtaagtaactctttgatttgtacgtttagtatccaaagttctgaattaggattattcttatggtctccgttttcttattctcttgatattatattcttcttttattccactttctattttgagaacgttgttgcttagttaagaaacgtgagaagaactccattgatactgagcctttggagattttctccatcacatgaaaactaggacatttttgtgcacatgttaaggagctagctaacattaacattggaaacaggacatcgctaaaccatgatttgattctttttccccttgtgaacagcatgcttttgttaagcaattttatgcatctgtgaccaaatcagattatgcgaccatgcggttaggattcatcatggtaagaatcagagcttgagtttttacttataaattactagaatggttatgacaattgttatctttctttttttcttttcactaaatggtgtttatgcttctttatttgtattctagactcactgcaggggaaatcttaagtttaattttcacaaatatatgatacgtgctctcgaagatgatttcaagaaagttgttgggataaggtaacccttggttgacagtctattttctgatatttgatatttatgcttctttttctgtgcatatatatgtgtaattcttttaagtctactgtatcggtctcctagattgaccttttagctttttggctgcagttggtacctttgggtttttgtggtcatcttcttgttgctgaatgttaatggtaagatgcttctgtctctagtttataattgcaagaccataactcaagatctaagtgatattggattgttttctgtagcagaatcccgtaatcagtctaggttctttgttttgaacttcaagtgtgtcatctctttggtgcttttacttaaaattgacttccaaattatagtttcaaataagcatctttagttacaacgttttctagtgaaattagtaatatatttttccaattccttactctgcctccacttttctatggtggagaaaattatactccaagttggtgtaaggaattggaaaaatatatttactaatttcactagaatgcaatcaacaaggggtcataatctgattgtatgacagaagaaaccagaattctgattaaaaaaattctttctttatttttctttttcttgccaagaaatttagtttacttttattttattttgcttgaaattaatttacattaaacctatatagaacataattttacatataagtaacaccttaagataattcaattggatcttactccttgtttggactacaatgaggcaatgtctatattgattattaatgcctctcaatactcaaaccaagatcattcattatttatataaaagaccagtgtgtattaaacttctttgttgtatggaacatattagtctttttttttttttttgtcaatgttttgtgattggacgactaagctcttctgaataatgtgttatatttgcaggctggcacacatatttctggatagcattcattcctttctttgtgagttgtattgagattatgctatctactttgtgattattgtttgcatgcatgtttcattgttcttgcatggtgttaatagttcatttcacattttaagtatcatactgatggagaaagagataaaatacagagagggagaatcgggttgaaaaaagtttaacacaattttgtaaataggcaaatggacagctaagaaggaaaccaaatttagaattaattgaacaacatgacctaggtaaatattgtgcaatttgttttgtgataagttacacatgcatcatgcacttgtaaatgtagagtcatgagtcagggtagaaatttgcacctagacaggtggttttaaggtggtacttctcatctccaagtcttaggtgatatgtatgatagtatgagtgccttttgctgttgtgatatacatatcacaaattgtaaccacttgttgttttttcttttaaatagcttctacttgccgtgggcactaaactggagcatgtcattactcagttggctcatgaagttgctgagaaacatgtagcaatagaaggagatctaatagttcagccatcagatgatcacttttggtttcatcgtccccagattgtcctcttcctgattcatttcatccttttccaaaattcatttgagattgcgtttttcttctggatattggtaagctggtttctaactcaccactctgcttctacttctaccaaaaaaagaacaaattgttattatgaacacaaacttatcttcttttctgtgtatctaggttcaatattcatttaactcctgtataatgggacacgttcgttacattgtcccaagacttgtcattgggtaaaagcaatagtctttatattctcattacaaaaattttaatcatcgcttccaagtacgaaacttttattttatttttaccatgttgtgctttagggtgttcattcaggtgctctgtagttacagcactctcccgctctatgccattgtcacacaggtgcgttgatatgatgctgatctataatttaataagttctaaaaggaaagtaggaacttaaataaaatgctgaccataataaaatcttgtggaatgatttgaagatgggaacttcttacaagaaagccatatttgaggagcgcatgcaagtaggaattgttaattgggctcagaaggtcaagaaaaagaagggatttaaagcagccctcattggttccggtgctggctcaggctcaggctcaggctcgggatcaggctctactcctggtcaaccaatttctgatactggttctgcatctgtgggaattcagctgggaagatttgtgcccaaagcatcaaagccagagcagagtgatgactctaagtgatctcttttcaacgtgtcagtgttcatgacactgaagacataagtctacccttaggtaatactactactagttgccactttccagctgtgctgggattagaaattttaattcttctgtcatatattatggctgtggtgggactgtacctaagtcttttatggacaagacacaagcctttgatcaatatattatataatcttatatatacataagagaaattaagaaatctgatcttctcatgcttctttcttcttattatcatggtacatacttttggtaactgaatagtgaatacgtgtagtctcatgggaaaagatatttgataggaatttcctatcattttggtacaaacagaagcaaaataaaagaaaatagagccaaacagtagcaacaataggaaatagctagtatattgatattagagtg

SEQ ID NO: 111602 - DNA, 1454 bp, Cannabis sativa
  modified_base (1041)..(1045): a, c, t, g, unknown or other
aaaaaaaaaaaaaaactgaattgcatgataaaggtttccccgaaaaggagaaaagtgagggaagtagctcactgacagtaacaaattaaaggatctgggttaatttcagtccccaaaataaagtatagttctaaaggaatacttttaaagctacacattcctccattgatgactggtgcaccaactaagagagtaaaatgttgaatctaatacttttaaagctacacattcctccattgatgactggtgcaccaactaagagagtaaaatgttgaatctagtaacagtcaagaagaaaaacaaacagaaggatctacattaagttcagtcccgaaaatcaagtattgttccaaaggagagtcatatgttgtcacaccacatttcttctattgccattgatggttggtacaccaaccaccaagagagtaaaatgttaaacgtaataacagagctaaagatagggtaaaaacaagtatgaaataagcaaagctcaccttcattgagtgaatgatacagtgaaacaacatctcctccagagcaaaaagccttgccactaccctattaggaataaataccctattaggtcaccattatcaatgccaaagagatatacaacttttaacaaaaaacgaatttcatttccttttgttatgtaaataccttcatcaagacaaaaccaatatctgggttttcttcccatgattcatacagtctctttagcctagctgcctacatttaaacagaaacttacattcaatcaatggaaaagaaaaatggaaacagaataatcaaatgtgagaaatacaaagtacataccatagctgtatcaagggcattgagtgaagatggcttattgagtatagctgttcttgaagtagctcttccttcaaccaaaacctaaattacattacacaccaaacaaaaagaaagatctttaaccggtgctattactcattccatctcaatgaactaaaaatcgaaaatgcaggactataaagcaagcaaattcaactaccatgtagagagagagagagagagagnnnnngagagagagagagagagacctggttttgaagagtgtcgtcttcttgggcatagttcggttgagcagaaaagggtctctgatgggaaagagagcgcagactctgagagaagcaagtccggacatgtcccaaagctttcagcttctgcattttagctatcgaatcaaaaaaccctttgaaaatggtgagtcgactcggtcctcggctgagttcgagcagtgccgccgtctagaaggaaaggaaaaatgaaggatcgtcttgtctttcacgaacagagaaaaagaaaagatttttataaaattattttaaaaaaattaaaacatttaataaaatagaaagaaaacctttttttttttttttttgaaaatgaaatagtaacttcattgaataattagcattcagaatacaaaa

SEQ ID NO: 111603 - DNA, 3204 bp, Cannabis sativa
attaattgtaatcaacattcctctttttcttagtttccctttctcttagtttcttaatatgtcattcttgtatatgtataaataggattcaccccattggaataaaaaactcagaaattctcattcactatctctttctctctttatcttcttcttctttcttctcatctattttatataattttatattattttataacaaaactcatttttttaagtcttcatttctattgtagctaaggagtgtgtttaggagcatgattgaagatactcttaaagagtttcctatcctttattttttaattatagatttttttttatgattgaagtttattttttctaggtctcacttcttattttagctaaagagtgtatttggatagcataattgtagatggtgtgaacaaaaataaaaaataaaaaaggaaaaacaaaagaaaagaaaagaaaaaaagaaagaaagaagaccatagtaaattgcgcaattagcgacgctaaatgctaaaacgcgccgaccatactccatgtttggagctttattttccactttgcttttttcatttttaatataaaaatattcctagaagacattcattcgttcactcaactgggtttacttgttcttcaaatcttttggtctagaattgaacaagtcagaaaatgggtttgtctacaagggtagttcagtagttgtagagtagtgagcagtgtgaaaacaaatggagaatgagagttccaaagaagaaatggtgacagggtcaaatgggttgttcgtgaaggttatgactgatgaacaaatggagcttttaaggaggcagatctctgtctacgccaccatctgtgaaaagcttgctgagatgcataaggccatctctacccaccatgatttttctggtttgcaatttctaatctcaattgtttctatgggaaagtttacttttgtttacatggttaactctaacaatgaagagtagggtttttaggggttttctgttttaggccttaaagttgtgttctatttctctttgtttattatgtttaggcatgaaattgggagcttttcactgtgatcctcttatggcttatgctgggcataagatcacatcaaggcagaggtggtctccaacccctttacagcttcaaatacttgagcggattttcgatgaaggtaatggtactccaaccaaacagaagatcaaagagattacttcagaactcacccaacatggccaaatttctgaaaccaatgtctacaattggtttcagaacaggagagctcgttccaaaagaaaacaatctgtttcagcaccacccaacaatatggagccagaagcagagactgaaactgagtttgttaaggacaatacaaagccagaagacaatgaattctatgacaactcagtcccaatggacagtactactaatgatgtatactttcctagtcctgaggtaaattatcaaacaaccacaacaacaacaacatatgtctttgaattgagaaccataacaaagcaaaaactttaacattccattgttttgttgtttgtttctgcaggaattgatcagctggtccacaaatgggggtgtgcttgagttacagccatttccatcatggggtggtggattcaatgtagatgacctttaactgcaacttattatatactgtatgttatgttatgttgtgttgttattacttatgtcaagattaggaaaatttgatcaactcaattatattcccacatctagttttagcaaacacctttatatattcataattttcttgttgatgatatgtatctatatgtgtagaaaccaggcagcaaattgattatgcaaatactaatacaacaaagaaacaaactctcttgattgtttgattagagcattatatgattttaaatccttttgttatgttttattctggtaagtcattagtaatgaacaccatttttgagatctataaactttaacatgtactaaatcatgttacttaaatttttttggccattaaaaattttctctgaactattgagattgttaaatttaagaacttttgtcaaatttcattcaatattactactttggtgattgtccatgtactaaattatgcttcttaaactttgatatataccaaattatgtccttcaaactttgataaatactaaaattagacaaaagtccttaaatctaataatttcaataattcagggaattttttaacgattagaaaagttgaagaaatatgacttagtacatgttaaagtttacgaagtaaaactcttaattagcctaaaaaatatatttggttcttatgatttgaattgactagatggccatacaaactagcttataatatctatcaaataatagcaagagctaaaatctcaccaattttctgagaattaacaggtaaatattgtattgggttacagggttttttgatttggtacgaccattttttatactatggttatgtagcaattgtgatgcgaaattgcagaatgattgaatagaataagaaaactcatataggcatgtatttacaaccattgatctaaatataataattaattgggaaaaaattaagaagcaaaagttgattcaatttcacaacaagaaagaaagaatgaaaaacgaaaacttgtcttgaccgccacacctaattaaatcatttgaggttacctcaaatcgccatatagagagtattgaggtatgtatgtgtgcaagtcatgagatctgattcaacaatgtaactctagtaatgtaatttaaaaaaaaaaaaaattacataaaatactaatttttgtaatttttttatatttttagcgttcaaagtttttttttatatatatttttacggtattttataaaaatacaaaaaacaacacgaaattaacaagaaaacaacattaaaataacataagaaataatatacaaataataaaaaatcaagaacaaaataacaatagaataacagaaaaatataccaaaagactatattttatgtaaataaaatctaactctaaaaatattaaaaattttatggagacggtatttctgtaattttttttttaaattatcaaaaaaaaaaaaaagccggacacaatcatcattatcattagggaaatttacatggtatactaacttttatcatttttttacaaaaatactgtcaggcggcattttttacttttttactgtatt

SEQ ID NO: 111604 - DNA, 3716 bp, Cannabis sativa
aagaaagtgagcttgaaaacaataagcactctttgagatgcatgatggtctaaaaatgtcttgagctccaaaataataaacattatccactcctctttcttttaaggtgtttataaccaaaccacaaactgagttctctgaataaatagaagtcttccttaagaagcgattatgaaagagatggcttgccaagataaagagagaactaaatgtcaaaccattggaaggagtatatttgaaaagacaatacctgattcatttacacactatagcaataaagtgggacaacagattagattgctaacctttcctcagcccaggggaaatatcgtctcctcgaaacactagaggaatattaactttcaacaaagcatgtgaaggtgcccttataaaggttacgttaagtggtgcatccgatgccgagtgaagatgaacctggaaaggtttattgaatgacagttcagagcatgatttgatcaatttttttttttaatcatcgcaaccaattctactacacctttctacgatttcataagttttcaggcaatcaaacaaagcatcatactttatactacatggcacatggtgcctaaccaaaaaatgtaaaatgctccgtgtgacttaacttattttcaaattgccacctttgaatttagtccagaggaaggcaatcaaagaactttaaccaacttttcaacaatcaacaataatatacacaagaaggaataaaacagataaaaagattagcaatggattaccaggcgaggaagcacgcggaccttctcgataaggtcagtgtcggattcaaaatcagagcgaacctcaagatcaaagagacgagagaggaagaacgagcggcctagctgagtgactagtttgcgtatttggtctgtgcggacagagataaggcgcttgttacctccatgttgcccgtcctcctgctcaaacacaatgctggggactctccctgcctttctctcctttgctgagatgctcttacctgatgaaacacgtgggattgcaaggattgtctctgcatatttcgggtcaggtgttggaaacccttctagatacgtcagcacagaagactcgggcggctctacctggagtgccgcagcagcagcttgggtatagtgccggatgtggatcgctttggtgactaaagagcggtagagtaacattggctgagtagtaaaaactggtaaatgaaaagaaggttagaccttaaaaaaattccaacatatgaataaatcaaatctacattcatattcttagtccaattacgatgtaggaattaatgacaatgaaacaaacttacatgaaaaacattcaagctaaatcctccgtcttaagcattttaacaaacaaataatccattatatcataatatttcaccaaattaaaatcaaacaaatactaaatcatctgcctttaaacaattcaacaaacattatcaacccataaaaaattaaatagtagaacatggaaacaaatgaataaaaattgaaaatttaacaagctggggagcaaaacagcttataattaagaggaaaaaaaaagagtcaaccgggaataaatctatcaatgatttcaagtaattttggggtttctctctctttctcacagtccaaaccgacatttggagttttttttttttgtttcagattcaattttatacttaattgtaaaaatgagacaaacataaactaagttctaaagtttaaatccaaaatccgaagttcaaatcaaccaccatacagttcaagtacaaaacagtcaaccaccatgtccaaatccatagaacttaagcttttgaaggcatgtaagtactggtttactggattggtttcaccgatttaatttattatataaagatgtcaagatgagtgataacacatttatatgatggcatcattcatactcatatttagcttgtacaatccaatttgtcgatatacctgggctaataaatcacaatcccaaacatcatatatgcgagacaaataattatatgcacattaacatatttatttaaagtacatgttctacagagtcaagaaaattacattgagaaaaagaaaaaacaaaaagggtttatagagaaacatataattaattactctccttccccaccctataatgttgctttggataggcttctcactttcacacctcacttgtgcttagtgcttagattatactttaaactacggacttgatgtctttctaaaaactggctgttccatgatttgaggaaaaatggaagaaacagccccaatctgtgattgtgtggcagaaaatattggagaatttgattcaaaaattgatgaattgttcataacaattagaccgtaagtgatgaaatgaactgcacttggcagtagaaaatacagaagtcaaaccatgcaaaacatgcatcaatggaataacagagtacggacaacataagaaaatccaagacaggaatgagctaaatattgaaaatgtacctccgatacatagatacaatacaactcaaacaataaacaacttcaaactagagaaatcaatctcaaaattaaaattgaatacctgttggagcttgttggagtgcccaaacggctgaaagagacgcaaacaccaaagtcttgctaatgatcctaaaaacaaatcaaatcaaaagtacccaaaattaactcagcccctccttttctgttataaaaagaatatgaacaatagacagtcggagctaaaatcaaaatgtgcgtgttacacaggtgttttggatgggaattatagtgaccttaatcatgcaggtattgtgtgtaaaatattctaacaatatgcactgattggggaaaaggggtgaaaaaaagaccttttcgaaaaagtttcttcttttagtaaacttatttatagattctatcatcatgtgaaaccatcttatcttatatcctctattattgtctcattttcaggtgaataaagcttcagataaagtacatagcgcaaaaactgcaattagtgatgaatgatcatgatgctaatctgattctaggaagcccaattatgatcacattctattctcctatggaaatagtgtacctaaacatctaaagaatcagaggactaatgcagcactattttgagtcaataggggtcaaagtagaggaaaatttaaataggcatatcaatactcatatatatttcctgaacaaattacagcaataaacacaaaattaaacaaaataattaactctacttactcaaacattcaagcttaaaaataaaaataaagatattgagtattaaagaaataaagaacggcagccaacaatttgaatacctgttggagattcataccgatgcagtcgccgataaaaatagagagggacgccggagttgggtggtgccgactgcggagggaagaggagctgtgtggttggtggtggctacgactgccgagaaagggagagatgagtaaatgaaacaggcgatagagaaatcgagagaggagggttgtggagatcgacgccggcgaagagaacgggagagagaggtagtgagagttgagagtgttggagggaggcgcacagcacagggaatcgacgagagtagggtttaacacctttttttttattttatttttatttttgtaaagatttattatttattttattttaaatagatatgttatttatttcgagagaattatctatatattattttttaatttt

SEQ ID NO: 111605 - DNA, 6959 bp, Cannabis sativa
  modified_base (38)..(54): a, c, t, g, unknown or other
  modified_base (5848)..(5848): a, c, t, g, unknown or other
ccgctcttccgatcttacacaaatgaatgaaaaatacnnnnnnnnnnnnnnnnntattgaataatctggattacaatgaaatagagttttatttagggcagaaaacccaacattgcgatcatagtgttggcagtggatgatatcattgtcaatagcaccaatctttaagaatgttcttaatcatttagttagtcttgtgaataggtgtatgggcgcctagacacaagttgattatatatggtttgatacatgcttatcttactgagtctgtcaactcagcagtttgctaccttgtgtaggtaaggataaagcttggctagaggagcactgagttggggctcgacaaggattgtacatattgtggcagtgcatcctggagggttcagttctaaccgtattttgagtcatattttattaccgccctgtggattgtaaaaaaaaattatgtaagtatattatgatatatgcattcttcaacaatggtttaaaactcaagattacgactataaagttttataaatataataaaatatgtttcgatttcaaattagtaaaatttcaagtacgggcgttacaattatggtataagagccacaatattgttcactgaagaccgtcaagatatgtacaatcaaggccagtgtcgagctcaactcacagttctataaggttttaccttttacaaactgtataagttgtgttgtatttatgcgtgaaatgttgtttaaaccctaaatgcggtcttcaaaatataagttttgtaaggtttgttttcagtgtggaactgttgggcacctcaggaaagattatccccagctgaagaaaggggaacctaagcccgaagatgagcctgctccaacgttggtatatgctaaactcaggcagatgcatctgccaatcctttagtggtcacaagtcagctctttatcaatagttttacttatattatattatttgactttggagctacacactcatatgtatcaacgagagtacttagttagcttggtaggcctagtgatgtttttgagatgggttcagaaccatgttgcctaatggataattgattatatcgagaaagtggattagatccgtgctaattagaattgggggtagggaactaagtgccgatctagtggagttacctttggccgagtttgatattatactcatggattttttttccaaatactctgccagcattgattgtaaacgaaaaatggtaacttttcaacccgagaatgaagaaccatttatttttattagatcggttcaaggttctcatgtcccaagaattttagcgatgaaagctagggatttactacgaagtggatgtgtaggatttctagcggttgtaatagattctggtaaacctgagttacccagacccgaggagatcaaggtggttaaggaattcatggatgtgtttcccaaggaattacaaggactactaccacaacgggagatagatttcttttttgatctggtacctagggcaaaacctgtttcaagggcaccctactttatggctcctgcataattgaaaaagttaaagatacaacttcaggggatgctggatctagcattttttcgacctagtgcgtcattttggggagctccaattttgtttgtaaagaagaaggatgggactctcctaatgtctattgactactaggagttgatcaagttaaccattaaaaacaaatacccctttatctagaaatgatgatatttttgatcaactttagagtaagatggttttctctaagattgatttgcggtctagttatcatcaactgagaattcgggaagaagacattccaaagacaaccttcagaactaggtgcggtcattatgagttcttggttatgtcatttggattaacggatgctccagcaactcttataactctcatgaatcaggtattcaaggatttcctcgataactttgtaattctattaatcgatgatatccttgtgtactcttggtcggaagcagaacatgaacaacatctttgtatggttatgcaacggttcagagatcataaactctatgcaaaatttaaaagtctgagttttggttgtcacaggtatcttttttggtatatattgtcaggaaagacggggttatggttgatccaaggaagattgaattagtgaagaattggcctaggccgaaaatagtcaaaaggtacgtagtttttttggcttagtgagttattatcgacgttttgtggaaggactctctaagattgcaacacgctttagttgactagaaagaatcagcgatttgtggtcagatgagtgtgagaaaggcttccaagagttgaaataatagttaattacagctccagtcttagccttgccaactgatcaagagaagtttgtggtgtattgtgatacatctagacggggtgtgggctgtgggttgatgcaagtagataaagtcatagcttatgcctcacagcaactaaaggattatgagtaacattatctagcccatggcttgtaacttggagcagttgtgtttactttaaagatttggcgacaaaacttgtttggtgagcagtgtaaagtttatattgatcacaaaagtctcaaatattttttcgttcgaaaagatctaaatatgagacaaagacagtggtgggaattagttaaagactatgattgtgaaattttgtatcaccccaagaaggcaaatgttgtagaggatgccttgaaccgaaagggtcctgaccaaactttcaatccagcaatgatttctcctcagttagcctcagatatgtctagggtaaacattgaatttgtaattggagaattgcataacctgacacttcagtcaaatttgttggagaggatcaaaatggcacaattagaagattctgagctagttaaggctcaagaaggtgtcttagaaggaaaagataaggacttctcaattttgagcaacgagacgttgttgtttaaggctcaggtgcatgtcccgagtaatcttgagcttaagaaagaaattttgaatgaagcgcacactaccccttactcattgcatccaggtaccaccaagatgtatcaagatctgaagccctattactggtggtacataatgaaaaggaatgtagtggattgtgtgactaaatatttaacctcccattaagtcaaagcagagcatcagtgaccagcaggactactttagcttttaacatttccagaatggaagtagaatggcattatagtggatcgttttacaaaattagctcatttcttgtttgtaaaagtaacccatacggtggagcaatatcctgacttgtacgttaaggaaattttttgtcttcacgaagttccgaaatccattatttttgatagggacctcaatcttacatcgaagttcaggatgagcctgcagaaggccatgagtacttacttgaggtttagtacggcctatcatcctctcacggatgggcagtctaaacaaaccattcaaatacttgagaatttgttagaagcttgtgtcatggatttcggaggttcatggagtaagtatttgtctctgattgaattctccataatataattgttacggtactatagaaatggctccctacgagctgctctatggtagaaaatgtcgctccccaattcattgggatgaagcgggagaacgaggtatttaggccatgagttagtttagaggacatatgacgcaataaataagataaaaacttggatgcttgcttcgcggagcaggcagaaaagttatgcagatcccaagcgttaggacattacattccaaacaaaagatcatgttttcctacgtatatcatcaatgaagggtattaggcggtttagaaagaaaggcaagctaagtccaaggtttattggaccttttgaatacttgagagggttggacaggttgcatatcgactagcctttcctacaatattgtcagctgtggacaatgtatttcatgtctcaatgttgagaaagtatgtatctgatccaatgcatatcctgagctatgaggcattggagttacaatcgaacatgtcttatgatgagcaacggatgcaaatcctggatagaaaggagaaagtccttcaaaacaaaaccatagcattgtttcaggtactcttgaggaatgataaagttgaagaggccacttgggagctggagtctgacatgaggactctatattcagagctatttaggttagatttcgaggacaaaatcctattaacagggggataattgtaatgaccgcctaaatttaatatgttggattataaattaatcgggggattattagattgaattattaattatgatttacgcatttgtggagatttattttaatttcagaatgtaccaattatgttatatatgtcaatttcgtattttatcggtttgtgtttggtagcaatggaatgagacgtcgggccattagagagtgacattttatatggttaggaatattattaacagggcattattgttaggcattggaggtatcagaagttgtcggggttggaaaaatgacaaaactacccttggttgtcatttaatctttgaatttttgactgggggcaaaaggatctttttgcaaggggaggtttttgtcttttgtgagcattattattcaggtttaataaactatttagttaatggatccttttattagagaaacataatcatagaaaaagaaaaacgtagaacctctctctctctatcaaatagtcaagaacaagcaagaaagggaaggacttttagttttgattcaaggaattacagcagtatctaggtgtttcaatctaaggtatatccttcaaatctagctattccttgttttcttaagctttatttaagttgttgaatgattttgagagtttaggagttgtggatgtgtaacctgcttgatttcttgtcctggtgttaaattaggtttatgatggttgatttaagttgaattggtaggttgtggtgatgatttggcaaagtttgacatccaatggcgaattgagtttccgtgtttaaaactgtgatttattgcttgaatttggttcattatagtatgtacaagtattctggaagtttttgtgaaatttggacttgaattgagaagttagcgacaattttggtggctcctgcactgaactggtcgaccggttcagcgggacctgtacgaaccggtaaaccggttggtccccaggaaccctaccaaatcgaaattcttgttggggaactggtctataggttgggaaaattttggaaaccctagtttttcccgtatttgtgatatttagggtattatcatgttatccatcgatagggataattctagttttagttttaagtccccagaaattattttagcatgtctctcatcaaattatgaatgttgtgatatagggccctgtaatacgtcgagttgttgttccactcaggctgaccggcacacctgagcacgaaaataaggtaagattagcatagaatatattatatatgcatgttgtgtttgtgattgtttatgctttgggtgatatcatagcgacacaaccattatgattgttcaccagtacatgcatcgtactagttaagagtgatattcaccccggagagtattaattaacgctatcatagaaacataatcattgtgttggttcgacagtatgggcatagtactggttaagagtgaaatcatggccaattgtaatcttgggtgctattgatgctatcatagcagtatgaacatagtgccggtcctgcattgcgatcatagtgcttgtagtggatgatatcatgataaataacaccaacctttaagaatgttcttaatcatttggttagtcttntgaataggtgtatgggcgcctatacacaagtcaattatgtatggtttgttacattcttatcttactaagtctatcgactcaccagtttgctaccttatgtaggtaaggataaagcttggctggaggagcagtgagttggggctcggcaaggattgtacgtatggcgacaatgcatcttggaaggtttcggtctaaccatattttgaatcatattttattacctccctgtggattgtaaaaaaaaattatgtaactataccatgatatatgtattctttaacagtggtttaaaactcgggatcccgactataaagttttataaatataataaattttatttagatttcaaattagtaaaatttcaagtacgggcgttacagctatataggcattaatagacgtgtgagcataacacgtgggtcgatgctgtatagacattaattacagtgacaacattacatatgaaataatgtgatacaaagtgcagtggcacaatatatgcgcagtggcgtgcggtataaagtgtaattattattataattatcatgctgtattattattttgtcttgctgggcttggctgacgggtacgctactgtgaaggaaaaggtaaatcgatttgtgatcagccatgagttcgagggcttgggggtagattgtacatgttcgagccatactagaccacatgggttgggtctactagtggatgtattttgtattctcggttttgctgcttaggtcggcatgtaaaaatgtcttttaatattttgtgaaaatttttatgggatcccaaaacgtgagaaatctttttagaatggtttgtaaagtttaaatagttacaagttatattttcattctgtaagtaatttaaagtttaaattcttatcttatttctagtaatcccggtttagcgggattaggttatgtttataaaaaaatggtagcgtgcataattattagggtgttacatgtcttatgtatattcagatgcacttatcgtacattaaagaatttattatccctaaaggagtaatacatatagaaaaatgatgttgcataatgttttatgaacactaaggaagtaatggtggagaaagcagttgcttaccaca

SEQ ID NO: 111606 - DNA, 1441 bp, Cannabis sativa
  modified_base (1383)..(1395): a, c, t, g, unknown or other
aattaatataagtaataacactattttttaattttcgaataaagaatatttataaatattaattatagaaaaggtcatattaattattataattaaaaattaatttattttaattatattaattaattttaatataaatataaaattttacttattaataacttattatagtaggtcataacaaaatgtaagcatgatattgaatagttttttattgctatttgtttactttcttgttgcgttgacaaaattaaactgtctaagattacgaatagaatagaattgtattgtaagcattgaataatctaattaataattacttccatttcatccaacgatgtcaaggaataattcttttgagatgtgcaactcattcattatagcaccctatagctactaaaagcttttctattgtcatttgtcttcttttcttcatttggtttcctttcatgctagaaaatctccaaaggagccaacaatttccaatgtacagctaattagttcgaacaatctctcaatgtacatctggaattcataatcaaggaatgaagctaagacgaataagaaaagttaaaagggaacataattaatggggcctggcccttggagacatgttaagtgtatgttgtaagttacacattatagattggaaaaaatacttttgcaacacattctgacaaatgtgttatcacaatgtccatatgtatagccttcaattatagaataagagtgaggcccatgtgatgtggtttttcattcctgttcttattaggcctactgactctcagtgttcggttagaaagtagtccatattagttcatctaaaatgaagctctttactcaatcaaggccttaaatttgagaaaagacctttcttttgggtctaattaaacaagaaaaggaaaattatgaaatctgttatctgattttttatttactctgtttttaaattgtattatgtaacttttatgaaaattcttgaaatagtattatgtataatatttgaaagagaaattctatttttaaaaaccaagggccccgaaaatataatatttcagcaagaaaagacaaagttgggtcgctcttatcttatattgtcacttgtgtttggtcattgttggacaatgagatccgacattaatcaatcccatattttacacttgtaatattgggaaatatgtatacacaatttcctataccttaatcataataatgttgaattatattcatcttattgtttctttagttttggccttactagtgttgccttaaatatactttaataatgaacatatatatgattgttgctaaacattaaggtggcgtttggttggaggtaataaaatggaatggaatgcaaaggaaacaattttcattccattnnnnnnnnnnnnngcattttaaagtattggaatgacactccaatggaatgctctttcca

SEQ ID NO: 111607 - DNA, 1647 bp, Cannabis sativa
gttgcatgaagacaataagctgaatatgtgacatgatatccaccttcttggactacaaggatgcgcccaccagaataccgattggctaggctatggaccttcttccctatctctcgaaaaccctccatcgtcaagcattgccttccattaggatcaaactgaaaaaacaagatgtaacatgtcaaaggatagaaacatgaagttgctgaagcaccagtttactctaatcaacaacacataaacttcaaaagaagctaaatattcccaagcaggctgtgaaatgcatgaactaaaagactcaaatgttgatgaatgcttctcatgtcgacgatcagtacaggcacagcgctactaaaatttgtaaatatcagttaagaagtatactagagcaattactgcagatgctaagtttgagaaataggaaatatctactattacttttagactgtaaaagcataacaaacaaaagttgaagctctttttgttactgtttgtatgtctattacaaaaccttttcaaattacaaaatatttgaatatatgtaaaataaaatatgccatcatcaaaatatatattgattataataaatccattacagctaaaaaatttcactttatacgcaacaataaactgttggaagtgaaaataattttgacaagaaacattttataatataaaaatgtgtgcagtgtataagaggatgaagatcttgcttttgttaggatttgagatagaaaatttagtattagaattgcataaaatagaataaaatatattaaaggttactacaaatcaaaccaactttaataaaagaatttaatcaaaccaactttgtggaaaagttggtgagcagagtgcttgggaagaccttccaataaattatgcattgcagttcaacttgtttctacttaaatgcaatgtgcaacaatatgccttccctaaaactggtaattttctctaatttccctctcctctaatttggaataagttaattgtcaagacattcaactcattgtccccaatgattgagacgctgtaaaatgtggtcgagtatctacaaacatggatgcaactggaaaagtggcagagtttacttcctaggttttgatagtaaatggaaacagcaaagcttccaataacaacatgaaaactaaagttcaatagttgagatcatatctttaccatgattaaaaattctttcaaaagaaactttgtaatctagtttcataagttatagcttgattagaattctgacaagagtaattgaacagcagagttattaaaatgaatgataacataacaagaagagaaacttacagcacttgaatcttgaccaacaaccaagaccatcatatcaggctcaaaattttggatagctgggacaaccaattccgaaaaagcatattcatatcctcgatcacccgtgccattaggcaaaggtatattcagattgtagccatatccttccccctcaccaagctcatctatagatccattctgaggatgagatgaaccccatgaaccatgattcatatgaagtgagatcgtaagaactttatctgaccgataaaacccctccgcggttccattgccataatgaacatcaatgtcaatcacagctactttagcacaaccagaattcaaagc

SEQ ID NO: 111608 - DNA, 5916 bp, Cannabis sativa
aaactaagcggtctttacactgaactatcatcaaagaatcagtttcaatgaattcagcagataagcaaaggccaattaaccatttcagagcttgatcaagagctaatgcctccatttcttcaggtttgaagcaccccttcataggttttaataacgcagcaataattcaaccactggagtctctcaaaacagcaccaattccactcattccaagagctttgttgcaggctgcatccgtgtttaactttaatttacccacaggaggagcaatccaaggtgaaactggtggaaccgtagatgaggcgaggcaggagctggagtggtagatggacatgcaagggaattggaattcattgctggtgcatgaacaacctggtatttggcaaggtaatctgttgcaaaagctaaaatagcagcaggctgtttggccaatttcccgtggaactcagcattgcgttcgaaccagatactccaacaacaaactaaaaaactttcaaactcaaaagatgacgtgttagctgagacataaagcaaaaattcatctggtgcagatgtaacaaccactttgagatcaaaagttaggtgtgatagacgccacacttctttagctctggtgcagaagaaaagtgcctgatttatagtttctctatgagctttgcacaatggacaaaatggagtgtctgcaatgtgtttacggtttagttcagcagcaacaggtaaagcattacggaaaactttccacacaaagatgcaaagtttcaaaggaatcttcaatttccataattttgtccaccagttttcaagattatagctactgtttgtgtcatgaagatcagccacagattcagcaaattgatatcttgactttactgtgcctgtggtagtaccattccaaatgagtacatcctcagtgggaaaaatgctgagaggaatggacattatacgatcaatatcagcctgcccgaagttagctgaaagagccaccagatcccaagttctatcttgaccaatgagatctgcaacttggatagaaggatcagatcctatgaagcagtaaggagtgaaatctgtatgaccaggaagccatgagcccaatttgtaatttatttgtgtactagtacccactctccaatgcaggcccttcaccaatagtttccccaaacaatgcttcgccaagtcaaagaaggagaagcacctaaaccagctgtaagaaattgaccgtttaagaagtatcggtgatgcaaaacacggctgaggagagaattagggaattccaaaaggcgccaagcttgtttatcaaggagagcttggttgaagtgtatgaaattctgaaagcctaaaccaccatgaatcttggctttacaaagagaattctaatttttccaatggatagcattgccagttgaagttgatccccaccaaaaattagccatcatactttgaatttgagtacataaagtagtaggcaaacagaagcaactcatagcatacgttgggatggcttgtaccacagctttcagaaggacttcctttccaaccaacagaaaacaattgctctttccaactactcagcaacttccaaattttatccgtaattccactaaacaattttgttttatcccgcccagcaaaagatggtaaaccaagatattcctcatgacaaggttgaattggcatattgagtagctgatggaaataattctgattctgatgtcttgtgtttggtgaaaaagagagcacacatttatccggattaatggcttgaccacttgctctatgatagatatcaagaactagtttaatagatatggccgattggtgagtggctcgacaaaagagtacactatcgtctgcaaaaaagagatgagacaccgagggagcagatctggaaactctcaacccatgtagagacccactattctcctcagattagagcagcctggataaaccttcagcacaaatgaggaaaaggtatggggagagtgggtcaccttgccgtatacctcgagtaggaaccaaatctccaagcactttcccatttagaagaaaggaatatgatactgattgcaagcagcgaaagataaggcttacaatggtgtttccaaaccccatttacaacatgacttgagcaagatatggccactccacacggtcaaaggcttttgacatatccaatttaattgcagcatatccttgtgtgcctcgtttacgattctttaaagagtgtagcaactcaaatgcaacaaggacattatcagttatcaacctttgggacataaaagcactttgaaattctaatataaccattggtaaaaaaggctgaatccttagcacaacagactttgaaaccagtttatacaagacagtacacaaactgatcggtcgatactgtgtgataagctgaggctttttgacctttggaataagtgtgatgatggttttgttgaggatagtgggatccgcaccattgttaagaatgtccagtattgattccgtgacaagagagccaacaatgtgtcagtagttagtgtaaaacatgacggacataccatcataaccggggctcttatcatcactcatagagttcaaagcattgagaacttcttctgccgtaaagggtgctgagatgatatccctggagtgttcatcaattgttgttgggatagcatccaggatagtattaatggcttgatcatcaaccccttgactgttgaaaatggattgaaaataggtggaaataatctcaagcaaggcaggagaactggtttgtgtgttaccggctgcatcttttaacttctttattcgattgttggcagatcttgcattggcacgtcaatgaaaaaatttggtgttggaatcccctgatttcagccatgaaactggagcccgttggtgccaataatcttcttcctttgctagcaactcatccaatattgcctcagaattcttaagagcagcaaagtgttgcagatcagtatttgttgaattctgaagggcagccacatgatcatgagagtctttaatctcctttctcagattaccaaagttcgcaaaatgccatttctgaagattagtagcatagcttgatatattttcagttagttgaagcaaagaattccctgagttatgattccatttcgcagctatgatatcagtacaggcttgttcttccaaccatattttttcaaatcgaaaccgtgatctaaactcaggagcatcaacctgatcgagaagagttgtaacaattgcttttaaggctctatgatctgacttataaaaatccagatgaaccagagtaggcactaggaaagtcgaatcccaatgattattaatgaatccataatcaagacgttccttgacattcccattaccttgacttttgtttgtccaagtagttctttcaccctcaaaaggaatttggcagagatggcaagcagtgattgtagtacgaaaggcagtaatctgagaatcactcctagttgaacctccaagtttatcttcatgggaaatgatctcattaaagtcacctaaaactagccaaggagactgaggtgatatgtcatagcttctacgcaataaagtccaggtgagatgcctttgggaagtacaaggatgcccataaaaaccagtaaagtgaagagatgacccatcttgactttccaaaaagcaatcaatgtgattatatgagtaattgttgatggagagtgaaacataggatttccaaagaagcataagatcacccccttgcccttgccgtgtcacttccaagccatgaggaaagtgcaatttattgcgaattctatctatactaccatgttgtaatttagtttccataacgaatagaacacagggggcttgctctttaacaagcaagcgtaaatgcctgaatgcgctcgggttccccaatcctcgggcattccaacttataaaaatcatggctgagcgcggcgttgcaaagcaacaaccgcagtaacatcaggcagagactcctcaaaatccacactgttggtgttggaaacagacagagttggagaagaaccagttggtgctgatgaatccgactagatatgtataacatttgatcgacagcgtttaaggacattacgaagtgactcagaatcaatttgccttttaaattgcttgttggggttaacattttcaatgccatcatctgaaacaatgacaactttgcccttagagtttgggtgagggtgttgtagtgcagcagatggaagagtggagacaatggaactatagattggtgccactggagggtaggaacctgacatagtaggtgagcgattggatgggtatgcaggctgagcatttgtaggagaagtgacagtcaatggtgtaaatggaaggtatgatgggaaaggaataatggaaacatcattagtggaaggagcagcagtagtgaaaggtgttgttgtgggaatggaaggaggatttaaaaatttggaagaggaggaagactcttggttagtcagattcgatggcaagggaagggatcgtgtagccagattgggaacggcagcagtaaacgactttttagcaagtctagtcatcagaggccaaactccacccttaaaaaaatccattctatagcgatcataaccagattcgggaagaggagaacaaatcatagagggtccataatcaagagaaggttcattgccattataaatttgttcaaggaatttatggcatgattcaaaagggtgtccaatgactccacattcaaaacaaaactcaggtagacgttcatagcgaaactccaaccaggattcatcaagggagtccttaaatttcatcatcttacccctaagtaaaggcttggagatgtcaaggatggcacgaaaacgtaaaaaaggcccccaaccctcattcaaagactcttcatgaacatcaacataggtaccaagaaggttgcctgcccattcagccatgattttagtcttactcagaaaaggtagtctgtgaagttgaatccaaaaaggagtgagcgacatagcttctggtgtggccgattgaagagcagtaggtgaggatagcacaataaggtgattttgaaagtgccatggctccaataataacactttcttaagatctccaagacagccaaaagaaacaaggaagaggcccgagtgatgatcagtaacactaacagggtattgacctctccaaaaaccactcatcttgatacgaaaagtttttcgattaatgtcccgagaagagataactctggcatagagaacatggttcgagttagtggaatttccattgttcaaatcagtaggaagtgtaagaacttccttttcagagtcagtcaaaattaaggtatggttcatatcattcaatagatcttccatatgagggaactaagacaaagcatgaatactggaaagaaaattgcagaaattcaaggagaaagaggagggaactgttatatttaaaataagggagaggttataatcggttttatgcaaagaaagaagtaactataattgaaaaggataaacttaagagtgtcatggacgttaataccgctaaaaagaaacagagaaaactaactgccacagagctttttaagggcacacatgctcactgtcacataaaaaatgtaatcgttgttattttttataaccacgcgcaaattttttaaaattctcaataattttacgatatcaaaaatatgaaacatatctttttgaaacatgttttaaatattcatgatcgtgaaacaagttcttttgtattagaatttcacaaatattcgtataggagatctgtttaggaaacctcatactgtttttttcctattttctttcttttttactattacacggtaatatttacttttatactatttttttatactgtcgtgtaacaaatgtatacttcacatattaatca

SEQ ID NO: 111609 - DNA, 4454 bp, Cannabis sativa
  modified_base (1246)..(1246): a, c, t, g, unknown or other
  modified_base (4397)..(4428): a, c, t, g, unknown or other
tttatgtttgcccattttttatggtattttttgatttttaaattgttttatggtatttttttatgacatatttgtgtaaacttaattttaaaactcatatttaatgtttagatacattattaaaaaaaacaatttaaagctatttcttctcctccattacttgcctcatcccttaatagtccacctacccacgtctatacacagcgacacatccagcaatcggtagcggcgacccacacatctgacgactgacgactcaaatggaccctgagatctccaccaacaaaaccttaaaggattgaatagattccatggttgttggagatctagatctgcaccgtaattggagctccactgcctggtcccgaactcttacatattctgaggtgagcttcatctttcttttcaaattaattttgtagactccatactgattttgtgcacttcatcccgtagttgtgttgtttgaatgacaaatttttttctttctttctttttaaagaaatggaaaatctatatatatggatattgctttaatttttgtgcttaaaaaactgcaatatcagttggtgaacaagatttgatatgcgatcatagtagttaaatataagtagacactcaaactattctcttaattgaataattgacaaatagaccagtataactggtaaattttctatgtaacctgaaacctgagcgagactagctcaagtgatatatagaaagaaaaaaaaaaccttgtaaatatgattatgctaggatgatattctatacttcttttgtttttacgaagtgtttcatctttaaaactaagcttgggttatatagttataggggtgttcatcaaatccaatccacactattttgctcatagtgcattcgatccgcactaagtgcgaattttattttttggatccaatctaattcacacaatagctcaaatccattttaattgaatccgcaaaagtgcggattgaattggttattttggattggttgctttttaatattaaataatttaatatttacgaaaaaaaaatattttttctttcagataattggaaacaaaataaataaattataattattttatgtctccaacaacatattaaaataaataaaataacaaataataagtttaaaggaagaaaaaaaatgtatgtataaaaaaatatttacttttattttaaattgtatgtagaataaaaaattatatataataatagaatatacatttgatctattnagttttgaaatataattgtattatttgcattagacttaaattacgattttctttacattaaaatatcattttgtatatataattttttttttttataaagatgtgtggattggattggataagttacttttacatgtcaatcaatatccaatcggcacaagtacagattttgaattttccaatccaatccaatccgcacaagtacatatatccgcactttacggattggattggatcatgcggattagattggattggttattttatgaacacctctataatatatacatatatgttgtacttgatcaatcttactatacagtttgattatatctgtagtcatgctttgttacatctatctctatataatgggaaagcatgtcgttagatcttatttggttctgttgattagaagagctaatgataacgttggctctttattaataaaggagcacagtgaacttgtaatatatttttatgcaaactggtttaatatttttatttttggtaagttatgttaatggtgtttgttaaaaattagtttcaattttttttttgttagatatgtcaatgtattatgtccttctttcaaagttaaggtggtaccatggtacactattttaccataaatttttgttatgttgatttttataaattttaataatgttatatgtaattatttgttgtaaaaattggttttgttattgttctctatttgatttgtctaaaaatataatgaagtgaagaaaaaaaaagtgataatttatattcaagtaacttcattatgatgtcagccttttagtatttttaataattattagttgatgatttgagatttttttcatttcatttttgttatggttttgtatgagttcacaagttttcttatggttttacaagttgttgttataatttttcataaggtcgaaattggttttacaaggttaacaagttcgaaactagtatcacaggttcgaaattggtttcagcaagttcacaggttcgaaactagttttatatgttttgaggtgctctattttatgatgttaatgtatgttttttattttaactttctttttttatgattttgtttctaggtttaaaactggttttaattatattttgtgattggtattttgttatgcatggtgtattgttttgattatatttataattagtgttattttttttgcattttttttgcatttttgtgtgtattttttctttttttcatttggttgtttggtaaaactagttttagttaattttatgtttaccatttcaattttgttatgattttttatagggtcgaaactagtttcagagggttcacatgttcgaaactggtttcataagttttgagggttctataatggggttgctctattttatgatattattgtatattttttattttaattttcttcgtattattttgtttttaggttcaaaaactggtttttatgtgttaaatttttaattggttgttttatatagttggtttctatgatttaatttatatagatttcttaaaaattattttgtggcatgtcttattattttattgatttttataactgtttttttaagtaagttttcataactgatgaaactggtttaagttatttttattgtatatcatttatgttttgtttcataatcttcaatgttgttgtgtgacgaaactagtttttatttcatttcataatgttcattgttgttgtaagatggaattggtttcaatttatttttttttagttttgttaaatttaattcctccaataaaaatgcaatggaagtcgttggtacatttttttttatgtatgttcttttttttaaaaaaaaattatcttctcatagttttatatgtttatttgtatgaaattatttttttaggtatgttatgtttgtttaattttttagttgtttatttataaattttaaaattggtttgtttttaatagaaaactgattttttgtaggtgtcttattaatgttcactttcttagttaattatactaaataactaattttcgtgtttaaatgttaattttttttaaatgtaattgaggtttaaggttttttttttttttggtttatacaagaaagtggtttcattgttcagatttttaattagctaataaatgtaattggtttatgagagacaaatttcaatgtctaactccagtgacgattctggcatcaaactctagtgacggcgataactctgataattttgtttgctgattttttctagtgacaatgtaaatttcgacgacttttttggcaccatcagcaactctagtgactttctgtcactgtcagtgaattctgacgactttttcgacacgacagtagctctctggcaactaggttggtgtcttagagcttttaagaaagatgtaaaatttatatgagttttagtttttgtaattattttttattaaaaaactagttttcgattatatagaattaattggtttattaatttattgtcttaataaaattatttaaatattattttagtttttgtaaaaaaaaataaaaaataaaataaaattcagttgacattaattttttattctagcattttatttttcaaaaagaaaaaaaaacacaattttaaagtttttatatggcatttcttcttacatataataatttttatccatatttatttatttcttttaaaaaaaaatgtaatattttgtacaattaaatttttatgccatatatatatatatcaaaacttgtatttatttttctatatttttgtaaatagcacaattaatattttaaaaattattaattatgattaatttaattcttaaaaaaattacctattgataacttactaatacaggtaaaaaaaatataataataaaaatattatcattgagcaatcacccttatatccatattatatatatatacatttaacactaccacatattaactataaattttttattgtattataaatattacagttttctaaattttaatgggttcctcgtaggtgcccaatggatataattatgaatttttttacaccatactcctaattaaataaaaaatattactttttaacagttggtaggagttttttttacatttttagggttattatctgatattttcattattttannnnnnnnnnnnnnnnnnnnnnnnnnnnnnnnatgctataaatagatagtgagggctt

SEQ ID NO: 111610 - DNA, 3056 bp, Cannabis sativa
aaagtaattgacttatgcataaatagacttcatcttattgtatgccgccagcttgacgtattctaccctctaattgaatcttgttaaaacttcaagtgctcgaactcccttcagcctccttgaagagtgttcgccaaacgcttgtaacactttctcccaaaggtagcactcttgttctttttcttttgtagacttgattatagactcaagacgatacaaaatacataaacatagagaaagagacgaacacactcttctctacaaaacaaagattctcttttgtaaagatatgaatacaattcaaagtgaataaaagagatacacgacctagctactttaacgtgtatctataatcaatatacacattatagatagcctatacacgttcggaacaagaccacaattcacaagatacttccttaaaaatgatcttcaatcaacctaggaatttctacttctatacctacataatcatgagcagtaagtacaattttccttttatagtttaggaaagtcttactttgattttcttcacaagagatctgatcaaaccaattagaaaactctataggatcagattaacacggctcgagagatagaaattgatttattcataaaacttaccctttatgataaactttccaaatatagaaaaactagtaacttttcatacctaataaaaatccatcaattagatataaatatatggaaaaaaatacaactcaaccaaaattaaaaaaaaaaaacaatttataaaatatttttataaatctaaagataccaaaaatagaattaacaatctccctctttgatactttgattgacaaaatattttataagaagaaaacttgcatgaagtgtaagaaacaaaacaatatagtatagcaaatactctcccaacatgaaagtatactagcacataaaagataataaaatttttaacgaaaaagttcaaaaaccacaaacacaaaacttcccctaaaacaaggctccatagttgtaaccgaaaaataaaaaaaaatactacttttttttgatcaaggagccaaagacaaccaaaaatgaaacatgagtcataatagttcgaccaaacatagataataagtaaaaaaaaaaaaaaagtgaaccacataagcatcctcattagattgaaaaaacttaatgatgttgtccatcctcctgaggagcaaagcttgacttgtctccattatgcccaaacacaagttgaattctgtcatttccgtaggagcagaagtagaagttgatgcaacatctatctcatttggagcactaggggatgcaaacctagcctttttctttgtagattttgaggaggtttttctagtactttgaaggtagtaccaacagtaggagcttcaatggactcattatcaagaatctattccttttggtcagataacatcttataaatcaagcgaggaaaattgagattaagcctaggtttcttacattttctaagagagacaattttctcccaaatcatatcagccgaattaaattttgcataagttgaaactttatacaaaaagaaagcaagttcatttgaaatatttacatgattcgagcaaggaaaccaattggacaaggcaatcctcataagaacaacatgatgacatgtgatttgagacatgtgcattgtgtctgagagctctagatcattgtcaccagtgagatacccaaacaccttttggcgatcaaattctacttcagttggttcaacttaaattggaaattgaagagcattagccacatcgctcataatgaaagagcaccagtttcccctgacaaacactttcccaaacatcaaggagtcctcatcaagactcccatcaattatgttagcataaaactccttaaaaattcaatccacataaccctcaaaactgatcaaagtatctaactattttctttcattgaataaattaaacacctgaaatggcttatgagcaagcatattaaatttttttctcgatagtaaaacttcttcataaaattacatatctctaacattgtcattgtaacaaatataatgattatgaggcttgaagtttttaagagtaatactagagggccttttctttttttgaggaaggacaagttttcaagaaaccatgggtagtttacctttagcattctgttgagcagcaacaggaataggaactggttatgcagcaacaagatcatcttctggaacttcactctcagagctagaatcatcaacagatggccctttcggtaaaaactcttcacttgaatcaaactcaacctctgattcttgatcactattctcagattcttcttttggtttagaatcagatgaagatttagagatttttaatatttaaatgcaattaaaacaactagaaatcaaggttgaatttcccaaataaattttgactagtcgatgaacgaaacaaaatctccattttcaagaattatgaatccccttttccatgcacttaattattggaaacctaaacttaattgtttctaacgtgattaagactgaaaaacgagtatgagatataaaacgtttgtacaccacgaccaaaactttactatatcgtatatatatacaaatatacatagatatatttcgaagcatggaagaaaaatattaactaaattaaaaccacaaaaccacaaaaccacaaactattcaacatctaatgcatatataaatcaaagcagagatataataagctattgatacaaattgttgaattaatttgaaattatatgcatatgaataatcctacaaatgcgataataaggaatatagattgaatatatataaataaatgatcagatattgatatatgtaaattgtactaatatgttaattaaatctccagatctgcaaactgagaaagaaaagaaattagtgaggtatatggttctttcaagctatctctagctcattttgatagttatttcatagagactgagagtagtgactcactgttggaaatttataccgcggggacccgcccctaatggggtggggatttcccgtcttagtggttaatggggcg

SEQ ID NO: 111611 - DNA, 3119 bp, Cannabis sativa
  modified_base (2907)..(2913): a, c, t, g, unknown or other
  modified_base (2998)..(3003): a, c, t, g, unknown or other
agggtttcgtgggggttaatcttttttcctttttttttttaattaatcaagatctactacttgtgacgagaacccctgtcaaatatatttttgggattaagatcataataatgagttattttcggtaggttagccaaaagaataggcaaatgggtacaccaagatgcggtgattgtttcaggttaagttatacatagagatctaacaatactattattattatttgcctgcctatttagctgtcttcaactttaggtcttttttccctaaataatgttgtttcgtcatatctttctcttttcctacacctgttgtctcctaaaacttgattagatgtgtactatacactcatcagatcgatgacaattatttctcatatacatatgtatatataatatactttgttggtaccatagcaacacatatcatatagatgaaataaagaaattaactcatttgtgtctatgcattgtattataatcatctattcactcaaaaccctactcttgttatccattgtgataatatatatagattcgtttcgcgactcaaaacaattcaatatatacatgataatatttctttctttctttgtataacgtatctttcccccaaataatttggccttacccttcatagctttctttcatatatattatagtttttatttttcataaattgtaaaactgagttcgggtaccagatgaatataacctttaatctatcacttactcgtacgttccctaaggtttgatatgaagaaatgcatggcagtctaattataatgtgagactgatcaagaaacaactactgataattatgagctgcattgcttcaggtatatctgtatttatatttatataaatatatattaatgttccatactctctttttttgcttagtggacattgatttttgagtttaaacctatggtacatcttattcatggattttaagttaagttgctgttgaagacagacatgatatcatgtgtctctgataaattaatctcattactattatttaattctaagaatcaattatgaaatctcttttgacattatcatcacatgaatgttatcactcttttttttttcttgtaaggcagggaatagtactatagaagtctggaacccacttaaatatatatacatataatatagaagagaccagacagttatgcatgacgaggaggcaagatcgagagtgttacatgtatcttagttaggtctcactaagagcataggcgattgcgtcaatcaatttaaaatattattttagcagcaataaaagttaatggtgaatattgtcttctatattctaaatttccaacaagtttaggaatcagtgcaaataaaagtttacacatttcagaaatcgcacctgttttggaatcaattttcagcttttttggatgatctgtattcatatattcactacaagttgttcaattaagaaaataattataaattataaccaaagcaacgcattaattaatttctcctgtttaatgaacttatatctatatcgttttgacattttctaccccaatttaaagggtattctctaaagttttttgtctgaatgccatctcataaaagaagtgctttttgggaaattgaatctttttgacctttataaacataaaagttaaagactttaatgctttactcggctccttttctatttctatttaatattttttggtggggttgaagggtttgaaatttgtttgcttagcagccatgggagagagagagctgtagttttactctttctctcactcactgtgagacacatggagatatagcctttggttaacttaataggagatttaattgaatggcaatgatgaaataatgcatcttttatggccaccacaactttccatgaaataattggagttttgtacaacttttacttgaccgatagagactttttcgaggactttgaatattatttaccttgttccttttagataggaagtttattattagggacctataagctagctcgttttagagaggttagtagggcatacataaatgtaggttgttgtaaattattagcttttttgactgggtactcatatattttggggttacttattagctccctatcttaatagtttttgagacctatttttggtaatgtatatataaatataagacagcgctgtagagagacctcttgctcgtaacttgttcttgtctcccagctgcatgccatgtaattaatgacaattcaaactcattcatatataagagtgatctctaatgattagtgtaaatattaagtcattcactgtacgtgtgcttacgtactagtagctacttaaacatctgcactatattttaaaagaaaaaaaaaattaagcatcacattacaaatgttttcttttttccatcaaaattacatagatgaaaaatctttaagtagatgctaaatgtaataaatattaatgttaatggtactaaaaaaatttgtttgattatgttttaaagttgtttaatatgtataattaagcattattatcggtgtttagcactccattgtgagtagcctttagctcttcttatttttagcgtggttacctgacaatttggttatctcttagtgagacttatgccgaaatttcacctttttaaatatatacataagtattaaatcacaatttatacattaattaggtttcattatatattcatacactactataaaatagccttttaatttaatttcgattttgataaaatttacaatcggtaaaaaaaaaaaaattgaagggaaaaggtcccttatggttttagttacactaaaaaaactgctactaaatgtaatttttagtcacaacaaaatgttacatgtgactaaaaatacttctagtcacaacaaattgtaattttnnnnnnnaatacttttagtcacggactttttagtcacaacataagaattatgatttataattagtcacaatttttttatttttagtcacaannnnnnttgtgactaaaagtaaaatttttggtaattgtgacaacctattttatttagtcacaacatttgtggctaaatgtgacttttagtcccaacaaaatattacttgtaactaaaacata

SEQ ID NO: 111612 - DNA, 8223 bp, Cannabis sativa
  modified_base (2985)..(2990): a, c, t, g, unknown or other
tggaattgacttgcagagaaatcaacttagctttatgattctgaccattttattttttggcaattatgtcggaagcagaacctggaaattatattaaccaatcataacatacttttattacctcttacagatttaactactatacaagctcatacatggacgagtatcctggaaaacgaactcctgatgaccttgttatctctagaaaggggtctgttttaagagaatctcctaacaacagagataacaatgcccaattctgcaacagaattggatgcaatggaagaccaaactccacaaaggctacccaaactggaaaagccaaaccttggaagccttttgcgcgtgcatcttctagtgggaaggagataattggaagttcttctaggacaaatgcttctgtcagcaattcaaaaaaatccatctcagaggcttgtaaaaagctttctcctcatatggaaacagattcgtcagagactagcagtatccaggatgagccagaaggttcagacccgatcactccatctggaaagattcaaaggggactagtgaagtctagtgagatctcaatgatggaagtaggaggctctagtgtagcatcaaatgcactatctcgtaggagatttaaccagagttctggaatgagcaaccaggctgcttcaggaagtccctctgcgtcttccagatcgaaaaacacaagcatgcagcctcatgccggtgcaaccaggtatggtttgaaaagtctaaaatgcaattcgatatctgatgttgtcccatcaagttgctcatcatcgcatgcgagcttcagtaaaagaagggaagctgtaaaaaagagaaattctgaagcagaaagtagttccagtgccaaagggaagaagatcaatgggtcattatctggacaaacttccagttctaatggcatttccatttctgattcaagaagaggtagaaatatgcctcttaatagggataatagtcctgcatcagttaggactcggaggtcagtcaacagtcaaacaaggcttccaaatgaaggaagtggaaacaatttatcacacaatggttctcctgtggttattccacggcggtcccaccgtgagatatctatggacatgagtcctagttcatcacagctattatccaccgaagctcccttcggtcacccaaattcgtatggtcgatcaggtagtagcagtgaggatatgcacaatattttaccatctggtccagcagaagttggttttagtcgatctttagcgaatcgagataataggcgtcgatacaacatggatggaattgcagaggtagcttctctgcattttttttttgctgttgtaaagttctgttgtcaaagagcttccatacataatatgaagttgcaaagtgttgtgaacatatcctctgaattactttatttaattgtgtgtcttctctgatgttttcttacagcaatttgtttaatcatttctgcaggtattattggctcttgagagaattgaacatgatgaagaactaacatttgaggtagttgatttatatttacaaatacatatatattttcgatgactgacgacgacctgttaataactctattttgcttaaatcattgcagcaattgcttgctctggagaccaatttgttccttaatggccttagtttctatgatcaacatagagacatgagactggatatcgataacatgtcatatgaggtttgttattgctataatagtattataggttacaattgttttcttttctattatcttgattatcttttctttaataacgtctttggggtatttactctgttttgcatataaaacctttttttcaacatgatgctgcccaaggatttttctttttaaataaaaaacaatagagggaattaaagaaaagaagagatttatttctttcttttaagcattctttcttgtctcaacatattaggctagcagtttatcattcttatgttactattaccatgacaggaattattagcccttgaagagagaatgggtaatgtgagtacagcacttccagaagaagcactgtctgattgccttaagagaagtatttatcagtctatgcctttagaaggtgtggccattggtagcaatgatgatgtcaaatgcagtgtctgccaggtcttctttcaacaactctgataacttttattaatttgtttggtagttagaaagttgtaattaaaactagcagccgtggttcagtggttatgcctattggcctaattgaatagggtagaatgggattaggtttaggtttgaataccattaaattagagcagacattatatgggctattttacatcatttactttgagtttttttttttttaaaaaaaacagctgttactaggatggggaaatttacagaattcctattataaattatactgtaaagtaaaccattctaacccaaagtctgtttcttgataattttgacctaactacaaccttccaagtagattagatcactttcgagcttggttgtgaatcctttttctgttgtgtcacttacaatgcctgttgatttttttacaggaagaatatgtgggtggagatgaacttggaaggttgcagtgtgagcacagatttcatgctgtttgcatacaacagtggctgggtcttaagaactggtgcccgatatgcaagtcttcagcggctccttcaccttcaacttcaccaaaccgacactccacatagatatagtagttcttttatgtgccaaagtgaggtacattgtgtacaaatttaatgggtttcttcttgttctcttttttctacttttttttttcttcctttaaattattattttatatccactttgttaatgtacatatcgattctcttttatctccatcaactaataagcccaagtattggtgcacatagcaggaactctgcactcatttacaaaactgtgaatattcacaagttgtttttatgaatctctctctctctctnnnnnnctctctctctctctctattattttctgtggttgcaattattcttttttttttttttttctctttctttcatgtattaaaatttgcttcttcttgagtattagactctaaactcacattgctaagttggttacaataatatagtaatattcacaagattgcaagggtcttcttaattggaaattggttatgctcaagataagctgttaaactcataattcacaaacaagttcaaatctacttttatacagatcaattaagatgcttttgttgcacaagctccataaaaagatatgataacatcatctgatagtaaagtgcaccccaacctaacccaacccaatccaattgattgatttgtcaagctcgagttgagattcaggtggtagtggaaacagcaaagggatactttgttcaaaaactttgttaagtacatataacttggtttaagaaattttaggagcattaaccctaccaatgaatggtctttcacttgctcaaaaagagtaatagaagttaggtagtggtgtttaacacacccgacgaggtggcgcttgattaatgattttctttaataattattaaattaaaaatatatgagaacttgatatttaattacattaagaataatatgtcgtcttatagtagtgcaaagtagtactggtgtcttttagcatttactccaacgttaaatatgatgatgtgcacaacatcattcatcattgaacataagcgttcttaagaaccaaacttgcatttaaaaaaacaaccaattcaaactaatgtcaaatttcaatcttcttactataaaattaaatacacaaaaattgtaactttttaaataaatacatgttttagtagctgtttatgtgaaattgtgtgtaaaactagcacgtttatgcgaatggaaactggattggacactgccataaatatttgaatctccttaagagtcatacatgcaaaaacaacatgattccacccttgatttccatttcaaaataagagcaaggatgtgatgaaatcttcaaaacacaaaatcattcataaaagatgagcatcgttgttttttaagcattgccatttggataatttcttctatttggataatttctttgattgatgtaacttaatatcgaattatatatatatataaaatataaataaatattaatttagaataagatacacaagtcttgtaatgaattgcactattctaaacacctgaaaaaggacttgatatacaagtaaagatgtgatgtgatattttacatttaaaagaaccaagcttggaacactttcaagagataatgtataataactcttcaaataaatgagttataatatttcaatagctataaagtaaaattatatctcaaaactcttaaaataactcttcaaataaatgagttataatattttaactcataaatagtatatctccacatttagctaaggtctcttagctaaatattttttattattattttttgttatttttttctcatattatttatattaataaatacatatattaaaagactatgtagtagttgatgtatgatattatgtaaaaatttgagataaaataaaaaaaaaaattcgtaaaatattttaaatgataaagtagagaagctcgtgggagggagtgttcttcttatatgtaagcttttcacattggaaaatgatacctaaaggggacacacaaacattcgttctcacacatgcttccatctttctagcggcagcagagatttcaaggtcaaaagtttcagatacacctcaaacaagccgttccttttaacaggcagtagatagctttggtatagtaggcaactattaccagcatgtcatgatgaacaaaaaaagaagaaaaggtcaatctaagcagttccatatatgatgaataataacaatgaagtgaaattctcagcagtggtacatataatcactcaatgtaaacagtgaagtgatacaattaaggaaagttcgacggattataatgtgttattgatactggaattcaaattgattatcagattttagaaatacatacagagcaacactctaactctaaagtgatttcacctttgaacaagttacgtaacagtattccctgcaaaactttctcaggttcctctttcactggctgtcagtcgcgccaagagctaaaaggtaataccagttcagcttcagccaatgtcaacgataaacatacaacgacacaaccaaacacgggtcttcaattgaaacatttttccatatgtagctgcaattaactaatccctgaccgagctggtctgcagtgagcagataagagacattttaagctcaatgcaaagggcatcatcgtgttgcaagggccagaggtttccccaactgggtttcatccggtcctcctggcaatgacgagagaactaggtgcataggtgcacctcccacaactcaggacatatgaaccagaacagacttccaaacatagctctggaggaaaactctttggagatgtttcattcctcaagagcatgcatacaaatcttttccagcagcaatggccaatcttcaccaagttgatgtggattcaactccatggcaaccttaaaatcaagcaacgatattgagcactgtggtcttggatcctgcatagcttccaagggtgtgttgctgctgttcatatgcaagtgattactagtccacaagccattaataagtttgctttgaaactgctgcttctgggcagggtgctttcttagttcctgcgcagtagaccttgacccaaccaactcaacacaagatctgattaatcgcttcaagtaaacatccaacatattgttcagcaaactagcacattcaacagaaacaccttctagaccttgtgctgcagcgatatgctccattcgttttctcagtgaatccgtatcagacaacccaccactgtcgtaatagctggaggcttctccaccgttaacaactggtgtggttttgcgggccccacctacaccggctgagcaaaatggaatcccaagaggtgcaattaaaggacttctagaaaagcttaagcagttagacagttccacctcctccccatcatctataacagttcctctggcccgatctatccttggtttttctgtaggccgcatagccactgcttccctttcaatctcaggcagctcagcaactggttgaagatgttgcactggtctctggtagtcacatggagtcacatccccattctccatcccaaccttactgccactatcttctgcaccatttgaagcgtgcaagacactatctaccttcccatttggtccaagaggacttggtctatccttgagcttacgatcacgtatcccagaccttccctttcgaggtgacatgggcaaaactccatttgaccaaatgggtacattttgattttgattcggaaaaacaattccaccatgctcgttcacatcttctctgccaggagaactatttgtagcttgtagcccaagttttgagagacctgatatatgaattggaggtggggtgttggcttggcatgcattctttaagattgactttataaaatgattgtgcaaagtgatattctcattaccaagctctctacagcagaacttatcaaattctttcttgctcagtttctgactcaacagcttattcaagtaatgaaagtacctttttgacctctcaactcctatcctcttcactaactgagctttcaagtcggccaagtcaattcttgaatactgctgaggttgcatttctcaaaaaaaaggttcatacaccatccacaaaatcgaaagaaaaagaatccaagttccccaattcaaactaaattgcagttatttctgtttccagacaaccccacgacccggcacatgactcattcgaaatcaactcgaaaagttctgcatatatcaataaacagaggtgcaagtcattcagcaaattaaatatccccaaaaaccctaatttctgactggatagcagtcagtcttgaatcagaaagacccccaattcttccatccaacaaaacatacaatgcaaccccaaatctcatcttctaggaaccaaaaccctagagatcaagcccagtagcgaaattcactaaatcccaccaataaaacacataagcgaagcttaaattcacgaaaatcataacaaatcaaaaccacaagtttaaaatcaccatactttggggccagaacaagacgctcttcgcgaaaaagacgaactgcaaaaaattacacaccaccgcgccaattaaaacccgcctatatattcgaacaattcaaaagctcagaacttcaaaacaaaataattcaaatttgagggaatgagatctacaggttcaatagatttaagttaataaaggaaaaagtaggaattgcagaagaaaaacaaaatagcctccagtgaagcgccaaagtaaaaaattataaaaaagaaactaactttagagagggaaagaaatagggttataggattgattgaagtctgacctcaacaaagtaaaggaatttcagataaatcgaacaccacccaatcagtagcccagtcggtttggctttcagagcttcgccccctggcttttctatttttcttctttgctgggtctctctctccttgttcttcttcagaagtgtttctctctctaaagagtattgaattgggactgcatttttgtgatgaaagtttctgtaggtttgctgataaaatgaagctctctctctctgctctcgctgaagcttcgatcgctgctataactcttttctctctcttcgtatacctctatcaaggtcttttctttcctttattttttttttattatctaatttaatttatttatttatacttatcaaagtgagaaacatgagtttagtaagttttagtcactttctatctattatctatgtgtttcgttatttgagattaaatatggtttttgtccttactatgacagtaaaataatatctgaatatgtgtaaaaataatttctatttttattttaaaaaagtaactcttattaattatatatatatgtaattaattgttttttttaataaaatattaattatttataaaaaatttacatgaaaaatataaaataatatttttattatacttttacccacacatgacttggacaatatttttatttttattattaggataaatagtgtcataagtacctaaagttttaagtttgtaagcggcatacacccaatg

SEQ ID NO: 111613 - DNA, 3073 bp, Cannabis sativa
  modified_base (148)..(159): a, c, t, g, unknown or other
atcaacacaattcagataatcaggcaatcagaaaattaacaaacaatcttttcactaaaagcttactaaaccatgagttgatcaagtccttccagcctatgtacatatcaaaccagtctttaggatctaaaaaccttggcgctctgannnnnnnnnnnnacgccctgtccaacagggacgccatgtgtgggcaatttattaaaattcttcttttatatactatataattacactaaaagtgtgggtaattaattttttataattaaaattcgacatataaaactattcgataaaagataagtgatattaactacggggtccctctgttttcaaaatattcataaactggtttaattgtgtttttacaacataaactttgtaatcccaaaatactttcaaaatagggcatcctgtttactaggccatgccactgcagctgatacgtacattactgctacgacctcgactcatggctgctcaattttagcgttccctttacctgcaccataaagcacctgtgagtcacgttaacttagcaagaaaagtgaaataaacaataactgataataaccatcaatttaaatatcatattaacacgtttacacatttacgtaatcacacaattctggtactttataaagtacccctttttacccctatttcgagaaggcagactacaaatccttctaggagtgaattgatttgggagccagtttcttctaccaatcctcagcagacttggtgagggtcagggagaagcacaaataattaacatcttcactcactctagccacttgcatcatcttgttatatttttctagatgagtcttttgatctgtgtgcccatcatacaacacgattttggtcatcctaaggttttctaggagcaaagcttctgtgaaccttctgacgcatggcttcgggtcctcgtcctcagagtcggttaggaccctctttgttttcgaactaattttgtcaaagcagcaattttctcttctaatcttttggtgtcactattcaggagatctctttctcataccttgttatttagatggttcttgaggtcattaccatgtggcctcgccttttcactttttgctttttcatacttggcatccaaacgctttctgagatctgctgtggaccagttatcatcagaatattgttccctggtacgatcgtcatggttaatagaatcactaggccattttttccatcccttgggctttggtactttcgtactagtcccgtttggcacaacatggcctttctgagtagaaggatgcccgagcccagaggcatcagtggtcttctgcacctgagaattggccaaattcatactttttgaggaggctcgggagcagcagggttttaagggtcacctactttttctttccccttgtcctgagcaagaggagaggttccagcattagtggggttttcctattgtttcaacacattttccactgagggttctttgtctgaatctcccccgtctaggtctccaaacttacttcgaaggaaaaccatcattctttccattttctaagataaattatcttgatgggctagcttttactgagactcgaacaactctttggaaactcaatcacttcgtggtcctgctcattgtggtagtcatctttgtagtgtccatctttgacgtattctccatcgtcctcctcctcttcatcttcaacgtcctagtcttcatcgataatgttgtgctatttatcaaggttggcctctcggttgtttgggttggataaatccccttttcccacattgctcggctgggcgaggcctagagacaaagggtttacatcctccataacagcgtcaatgccataaggagggttcttcttggtaacagtttttctcgtaaacaccatggctacaacaacactatgggtttaggtctttctttaactctcaataaaagcactaaaatatttaccaaggttttcagaaactaaatatttaggagctaaagaaataataaaatgcaaaaattaataagatagagatttttacatagtttaggtgttaattaaccttgtccactagtcagtctattagcctctaaaggcgtatttgatcagtttacagtattttgtaggaaactctaactctatactcttagtttcttgaagaagaagaattagagcagtattggaagagcttcgaatatttagttggtgatccccccttcgtatggaaatagaagggtatacataggttgtgtggtgggtatggacattcccatgacctgcctaaggtttttgcagaaatcccactaatggggtaaattacatgcaaaaatagctaaccatagtgccccttagaaacaattgtgctcgtgcgtgcagcagctggacaattggggaccatcgtactgggtggacacgtgttgccaaaaagtttaacctttaaaagtataggcatggaataactgtctgccaaaagggtggatgaggtacgcgcactacaatgtctggacacaggggacaagattcgatcctgtgtcaaaaaaaaggtataactgtcactgggtgatccaggttattccaaaggtagacatctgcaaccctcttgggcgataagtgtcagtgattggcccttcaagtatccatccgggttttgattgggtatgttctaggggacctctctgggtcctagagagacaatatgtcttccgcatccgagaagcaaatatgaggcgaggtagacttttgattatgtcttggtcttgattgttctcaatttcgtgaagcttctctgtgagtagacaattatggggattttaattagggagattatctcttcctttttatgccacttgttacttgttgagaaacacgaataacatggtataaaaaaataaggaaaaaaaattggtaaaaaaaatataaaaaaattgagtttaacttaagtattttatatataaaaatatttttaatagtgcaaaaagaattatttttttgatatatttttttttaattaagtagctaaatgaaatatataaagaaatttttacactaaaaatacaaaaggctaactttattacatatat

SEQ ID NO: 111614 - DNA, 1914 bp, Cannabis sativa
  modified_base (156)..(173): a, c, t, g, unknown or other
  modified_base (1858)..(1865): a, c, t, g, unknown or other
attcaattttactatttcagtgattatttgtgtattaaactatgctctccagactttgatatctaccaaatcatgcctctcgaaatttgacacgtactaaatcatgttcccttaactttcatccatgttagactttttttactaaaattagacaannnnnnnnnnnnnnnnnnatctcaatagttcagggggcatgatttggtacatgtcaaagttggagaggaaaaaatcctaattagccgaaaaaaagttgggagaagttgaagaataccttttttttttatatatatatacattaaccaaatttacctccaaataaaatttaattcaaatatatctctttttatgagtattgtacctaaattatcctcacacactcacataactaagacataatttcaaacataatagatttgtattctttgtagatggatgtgtaggtttgtgggaaagttgaggcaaaattttgattagagaagaatgaaaactatcgttaattgatagtggtaaaattggtagaatggttaaaaaaaaaggtaaacataagagattttaaaagagaggctaaaaattaaagccatcaagttaaaagaggtatatgatgtaattacctcaaaaaagatttttattgaaaaaatatgtgatatttttgaaaatttaaaaaaaaatatgtataattttaaacgaaaagtatttttttgggttcctgggttgggtaggttttaggcgcgggcctaacgcgccttagcacaagcctggccctaggccaccccacctaaaaagggttacaaagcaactctcaaaaatttaggcaaataacatttcgaataaaatctttagaaaactaccacattttggtataattgggcatatgtccagtgtttacgggagatcaaagccagctcaatccacactaatagtacaagtacatattttttcttacaaagtttccgattcactaagattccaaaattacgtaccttgttattctgaatcttagtgaggtccaagatagtttgagggagggcagggaacctcatctttaaattatgtaaaagggtctcagcgcggtgtgctagaagcttacttctttctgtatcactggaaaagcctttgaccatgccaccccaggatgatttacagggcttggtcaccattatatttatactccttttcatatgcttctgcttccaaatgtgtatggatgcctctatcctgttagctatttccagtgtggtgtactctgatgagaggtctaagtaatccagaagacactctggggagaacttgtcagcagtcatgtaacggtatattatctcccctaagcaagcttttccactctgaaataaaaaagtaagttgtcttatcaatatacatgtgtgtactcatattcatggaactagattagatttatgtgatgtttggtttgaggtaatgaaataggatagaatagaaataaatgaaattttattatattagtatgtttggttgcattataaagtattggattgaaatggaatgattattttatttttgtatgcattttaaattttattttattttattactattttttatttttatttattccttccaaccaaatgtaaagtggaatttttttgagagctttgagtgtggttgttgtaaaaggggttctcgggtttggtttaaaggatacatgaagagtgagttgtgttctggtaccaagaaaccattgaagatcatctttgactgtaaaaaaattgtattgtttattatttctattgtggaataatcatgatgatggtcacagtagacgtaggacaaatttgttagaattattattgtggactaatataatcatgagcttaataccatnnnnnnnntcattaactatgtgcccaatatttgttcactaccataatgggatggtta

SEQ ID NO: 111615 - DNA, 1443 bp, Cannabis sativa
  modified_base (40)..(57): a, c, t, g, unknown or other
  modified_base (632)..(637): a, c, t, g, unknown or other
  modified_base (1062)..(1069): a, c, t, g, unknown or other
  modified_base (1372)..(1389): a, c, t, g, unknown or other
tatattttagtcacgagtaacattttgttgtgactaaaannnnnnnnnnnnnnnnnnaaaattatattgtgacaaaaagttgtcactaaaagtagcatttgttgtagtcaagaaagaagaaaataatttcgttattagatatatttgtgtgcgagtaaattgtcttttgagctcaacacaaatacaaattgagttacatatatagtctgttacattacttacctgaaaatctaattgttggaacttatttttctaaaaacttattttactaacatatatgttgattctaccgtatataaattaacattctaaaatatgaattacctaaaacaataaataaataccttaaagttttagatttcttacattaatggcagcagaatataaagactcatgttattcgatactctaatccttgaatcctttttgtattacagtatcaccaagtactgaacttggatctccttccttaacctgaaaaagcaaaaaaatttcatcatgttcccaaaggtctgaggatcaccttaaatagtgtgggttgatactcaactcaataatggaacaaattgaaagagataaaaacactctagaatttttgaattcttttaggaaaatagagagagagagagagnnnnnnagagagagagagagagatttctgtcagatttaggctagagtcacttaaaaattagcttaacaacaaagctccatctctttccttgtatagactttgtattggaataggactagattaaatgggctttacaaaatataatggacctaaaaatctaagttatggtcaaaatcctttaattggcaaaagagatagatttttgccactttatttcataaaatattacaataaatgttacttttatcacaacagttcgctactaaactggcaaaagtcacttttaccagcgcatctcgtgaactatgttggtaaaaaggtcaaaattttactaacgcacaattgcaatggcaaaacttattcttactagcgcaactcatttgcgttggcatatgaagtcgtgtaaactattgagttttgtgccctaaatnnnnnnnnatttcaatgtaatcttgaatatttctttatcaatatatcaagaaaaagacttattttattacttatttaatgtgttacttaattcacatatttatttcatgatcatttgtttgatttataaattcatctaaatccttatcacattgatattcttgattattgtgatgtcaacaaagtaaaaagtaatcaagattatttgattcaataaatttctatgatttatcagtacgtaggagttaactgatattacaatctacaatgtagtttacctgcttcttggataagtgttatgtcctttctagnnnnnnnnnnnnnnnnnncttgggttggatgtatggagtatacatcgaaagggaccaatattgaacttggat

SEQ ID NO: 111616 - DNA, 5973 bp, Cannabis sativa
  modified_base (5918)..(5946): a, c, t, g, unknown or other
cattttggggttcccatgacaaaataggcatatttacacaatgtgtaattttttgggtcaaaataacaccatgtgttattttgaagcataaaagatcaaatttcccttatattattacttaaaactaccaaactaccctttccatcacatgctagcaaaggcaaaaaaaaacaaaaatctatcccaaaactgaaaaaaacgacaataaaactgtgttcacaattacaagtttgttttgctgcatgaggaacaaagtttacacgtgtgagtagtcaaatcacttacaccaattatagtacacaaaattaccaaattaccctttccatcacctgcgggcaaaatcaaaacaaaaaaatggaaaacgacgcagaactgtgttcacaattaatgtcgtttcaaaaacgaaaatatcttcaaaaaaaccaagtttgttttgctacaagagaaacaaaagctgaaatcacacgaaattaccaaagtacccttttccttcacaaaactggaaaacgacaacaaaactactttcacaattaatgtcgttttaagaaccataataatatcttaaaaaaacgccaattttgtgaacaaaaacaaagaatacacgtgttgtgtgaaccactagcaccaattatattacacataattactaaactacccttcccttcacaatactgaaaaaacgacaataaaactgtgttaacaattaatgtcgttttgaaaaaccaaataatatcttaaaaaaaaccaattttgtggcgcttcttcggttcataacttcatataaatatatgtatatatatcatcatcttcttcatcaaagctcaaactcagagacattattatcattcatcaatggcggattcaacaaaatacattacccaagaagagcttaaacaacacaacaaacatggagatctatggatctcaatccaaggcaaaatctacaacgtctcagattgggccaaagaccatcccggcggcgaacacccattactaaatctcgccggtcaagacgtgacagaagctttcatagcttaccatccaaggtcggcatggcaatacatggaccaattctttactgggtttcatctcaaagatcactcctttaccgaggtttcaaaggattacagaaaactcgtcaatgaatttaccaaaatgggtttgtttgagaagaaaggacatggggtttgcttctcattcttcttcattacattgttttttatactcagtgtttatggtgttctgtgttctgatagtattttggttcatttctgttctggatgtttattagggtttttatggattcaaagtggttggttaggtcatgattcaggtcattatcaaatcatgactaatcaattttataacagatttgttcagatcttaactgggaattgtttagctgggattagtattgcttggtggaaatggaatcacaatgctcatcatttagcttgtaatagtcttgaatttgatcctgatcttcaacacatgccattctttgttgtatcatcaaaattctttgattcactcacgtcacatttctatggcagaaaattgagttttgattcaatcacaagatccttagttagttaccaacattggacattttaccctgtcatgtgtttagctaggcttaatctcttcgctcaatcatttgctttgttattatctaagagaaaagttcataatagaggtcaagagattcttgggttacttgtgttttggatttggtatccacttttggtttcatatttaccaaattggagtgaaagggttatgtttgtcatggcaagtttttcagtaactggtatccaacatgttcaattttgtttgaaccatttctcagctaatgtttatgttggtttgccaagtagttatgattggtttgagaagcaaacaaaagggacacttaatatcctttgtccttcttggatggattggtttcatggcggtttgcagtttcagattgaacaccatttgtttccaagattgcccaaatcacaactgaggaaaatttctccctttgtttatgaactgtgtaagaagcataatttgccttacaattgtgcttcgttttgggaagctaatgtaatgacagtgaatactcttaagaccgcggctttgcaggctcgcgatcttactaatcctgttccgaagaacttggtttgggaagctgtcaatactcatggatagtgtgttcatttctctgtgtttttgaacctatatgatgttcaaagaactgtttttgagagatgtaaattcttattattattatagatattttggtttttgagaagatttcaactactttttcatgtaaagtaatgtactttccagtttgtttgaattttaatttactttttcaagaatttggtatgtctcaattgagattttgagatattgtagatttttttctatgatttaataatagatgttgaatttgtgttttagtcatataatatatattttaatgtttctcatttcttaaaaaccaaacatagattttcttttcttttctttgaatgaaaaataaataaatgtttcacttgtcttttgttttcttataacaagcacaatcatttcacattaaaaaaatcattcaataatttcaaaattattaaggtaataataatatctctgcaaaaccagtacaaactcagaaaaagtataaatttttattcagtaaatgttctctttaaaaaaatccctttatattatataagaattgtactatttaacacccaacaattcatgtcgttttgagtataagttcatccattatagatgtcgtttcatggtctctactagtatttttatcaactctctttttccttatatcttcaatcattctatacacaacattcatgtcaggacgatctttaggcaaaggagccaaacaaagcctagcaatctccataagaccaatgatttcttcctccataacatctttaaacacaaacaattcatagtccaaaacttccataaaattcatatcattaatcttcttaataatcataacaatattttcttcttcgtcctcttcttcatcctcttctttttcgactattttcccactcagaatctcgattagaacaactccaaagctataaacatcgcacttttgagtgtatttactagggctagtagtagtggtgagctcgggtgcggcgtaggcgttatggggtggttggaggcgtagaagttggtggagacagacgtcggtgatgcaagcattgcttgagcgatcgagtatgatgtttgtggatgttatgtgaccgtgaaagaggttgatgtcggcatatttgttgttattgttgtgaaggaaagcaatggctttcgatgaatcggaggctatttttagccttgttgaccaacctaatggggttcttcctggtcctctattgcctgtaataatattttgtatcaaaattgaactttgttacataaattgttgattagtaggaaattgtaacaaaataatatataaatttaccttaatatgtttttcttttcttaacataaatgagattactagtgtttctcacaccttcgattttaaataattttgagtacatcaaaagaagtaactcgcatacagggtcagacttggattaagacggagtagggccacgcctaaaacccaacccacactcagcctagagtctaaaaaaatattttttctttaaaaatatacatattttttcagtaattttcaaaattactatataaattttaaataaaagacccaacaatttttatttttttaaggcccacccaatctcagcaccggtcttacttgaatattttcataaaaaaaaaatactcgttataaaagcatcactaccactataccacacatcacgtgttatatatttttatattttttcttctccaaactttgaaaattccatcctattaataaataaaaatataatattaatgtatatataaggagggtaaagtagtaaactaaccatgaagaagagaatgaagtgtcccattaggaagaaaatcataaactaaaagaagcaaatcttcactatttgaatagcaataagctcttaggctaacaatattagagtgcctcaaatttcccaacacttgtctcaaccaccaatccacttctttcccgccaccgccactgccactgccaccgccacaacaaccctttctaaccctcttcaccaccacttcggccgccctatctccaccatccaccgccactctataagtggtccccacacttccttttcccaacataaccgccgaagctctcaacaaatcttccactcccccaattcccttactacacccttcaaacgtcaccaacaccggaccgccactactgccgccgccgccattgtaagagtgctcacgtgattggcacgtgactctctttttacgccacgtgttaattaagacaaatgctataacgcccaagattgccaccgaagcaacggttatgatcgtaattagtagaatgtgagattggttttgcgccgttggatcattctttggacattgtgacgacaaagggtggccgcagagaaggctgtttccggcgaaagacgatgccggaaaatgcgatagccaaatgggtatttccccggagagattgttgttcgaaacgttgaagtcggaaacggtggaagggaaagagtgggtgtctccggcgccggcagcggcggcgagttctgagtcgaacgagttaaactcgagtcggagagttaacaagtgagtcaaccgatttaactcgttaaacggaatttttcccctgaactcgttgtgggataagtcgatacggcggagacgacggagggttgatattccggcggggaatttaccggcgaaacggttgtgggaaaggtaaagatgtttgagattcggccatgaagagagattgagattagaagaagtgagaagattctgtttaaggctcaagagtcttagctcggtgagttcaccgagtgaccgagttgacccaatgagttgaagattttcaagaacgagtcttgtgactcgtcctgagttggaatcgcaggtgactccaagccagtggtcggagcaagggtcggacgagttaacccaggaagagagcgagttggaacggtctgatgaggctttgaaactcagtaaagctgtaatgtcagaagagaaggaaattgagatgaactgagtcagaatgaaggctgtgattgtaactcggttggtcaacatttctggtcaacgaaaagaataataagaaggaagaaaggttgaagatttatataaatggaaattagaaataaagaaaatgaaattgtgattattattgtaattatataaagaataagtagccgttaagattatgtaaagatgaaagaaaccgttaatgtaaattgataattaggattaagtttacttaatacgtgttaaggttaattataactagaagaattgtagtaatatttttatgggaatggtaatttttcaccttttctttttgtttggtggtataagatttttttgtaagaaaaaaatctctaaaagttattactatattctttcatgagatgagtaattttaaagtatttgaagaataatttaccgcataaatatataagtgttaagtaaattgttgcgtgataatctttaattattttaagtcattaaatttttattattttaaaaaaataatttaaatataccaataagacaaatagataatgatttgatattaaattgtcgggaacttacggagttccaaaaatataagttaagtattattacttctaaaaaataaacttagatatttaattacaactaaaaattaaaacttaaatatttataccacaaattacttttctttaaaaatgctgaattgtaaacattccattcaattataatataatagattaagggctcgtttggaacgnnnnnnnnnnnnnnnnnnnnnnnnnnnnnattatattgaattgtattttatgcaat

SEQ ID NO: 111617 - DNA, 5175 bp, Cannabis sativa
  modified_base (3993)..(3999): a, c, t, g, unknown or other
  modified_base (4123)..(4126): a, c, t, g, unknown or other
atacataaagaaaaaaaaaaactttaataaatttatatatatatgtataacggttggttttggttttttcggtcgatttattactcaaaaaaaaaaaaaccgaccgttcaatggtggttttaacagttagccgttttttttcatttttcggttccatctgtttcggttctaatgatgttcggtaggttagtttgaacaattttttttgattttttggattttatggtcagccctagccaaaattaatggtggttatcttgttggattttcgtttcagttgcgttgggttactgtgtggttgttcgatagttgcccaggaagcatggatcctgagttgaaggtgcgtgtaagtgatatttgtgtaaaaaaatttatttgggttgtatatttgtttatttggccagctgaaagtatttttataatattgttatcttttttggttaaaactaaaaaaaaactctttaatgtaagtatataaaaataaaaaataaattaattaattttagaataagattatttagttaaaatgggtattagagaggtcatatagtttaagaagaaaaaaactagtgtgtttcaaaaaaaaaaaaaaactagagatagagaaattttgcaaagaaacaaataggattatagaaaaaaattgtagcttaatatttaaatttaactcaaataattataatttaaatattatttgaacaagaggggcggtttggagtgggctgtgtagctcgagatgatcatggaaccatggtagaagctttcaagaagggaaagattgggtatgtccaatcccaaattgctgagatcataggcatcaaaaaagttttgagttggattgtaactcatccctgggacaatgtagtgttagaaactgatagtttggtgtgtgtccaagcaatccaaagtaatattttatgtcctcacagtttggtcttattgttcaagatgctttatcttttgttaagttatgttttgttaaacgatctgtaaacaagttggcttattgccgaaatgcgttctattgtttttgttctattgttttgaacgagtttattaattaataaatcttcttttttattaaaaaaatatatatattattaagttaaaaattaaattaaattaaattaaattatttatttaagtatttatagaattaaactaataaatccgttcatacacgaaggtattgcagcttgaagccgttcatggaggcaccctccgaccttaaggaccgctagcccactttcagatctgtaactccttccttcttcttcttttcatatacattaactttactttaaagactatcttcattcgtaaaccctagactgattctggacttgggaactatatctaaacatgactactgaaaatgatgattccgtcgacaaagctgtggccgaacgtcgagagaggctgaaagccctcaaagcttcacaagagctctcaaataccccagaagaagatgacaatcaaaccaataaagaaacgtcagtagtactctactattcatatctcttcccaactcatttctctttcaatcaatttttcttttttatttacttttgtttgaattaatgcaggaatcttaacatgaaatttcgaaattatgttcctcatgataagaagcttcaagaggccaaggttgcccctcccgttcttccgaaatttgaagaccctgttgcagtagagcctccaccatctgagaagaaagaggtatatgtatatgattattaataacaatgaatgcatatgataatgatactgatactgatactgtgtttgtaattttagttatcttcttgtttatggaccctaattcttgtttaattttcaggacccatttgtcaatatagctcctaaaaaacctaattgggatctcagaagggatgtgcaaaaaaaacttgataagcttgaaaaacgaacccagaaggcaatttatactctcatgggtatgtactttcctttcctttccattccattccttataaatcaatattgggttttgtaaatcaatattcttgtttttgctgttttgttttcctttgattgtgaaggattgttgaatatcgcttatacatagttcactttcgcatattctttctgagccttgtttcttattgtcacttgagtgttacttgcataaactacttgggtgtgatgaaagaatttatgaaacctgttttgctcttaacacaaatttctgatagaccccctaactcctaaccccatcaatactaattattatgcacttagacatccttggagtcacaagcacaggtcaggtgtgttttgggaatggtgatgagggaattggttggatgtagcatgaggacaagtgtagttttttctttttgaatttttatacatagcaatgcaaacttccacagtttcttcttccatttttgtctgcctgtgtgtgtttgaatagtgtaggtaattcctatcaatttcttaaatgagtgaaatgtaacttgcattgatggtattgttagtgtaactattattataagtcagattctgtgttttgcatccaattcaccagctacatatttgtgtttgttttgcagaggaacaagtaaagcaaaaagaattggctgaagatggtacaaatgaggtggcttaaccgaaccaggtaccacaatgagcatgttggttctttcctataaaagaaacataataggttttagctttgtttaattgtcatatacttgatagatttgtgtattttatgtttaaagatactttatcctttggcaccattgctgaatgtgacattttggtaaaagtttaatggtgaggctgcctgtttggttagttaatctgaaccagctttccattccatatatctttgagtttcttatattggggttcttgaggattattgatttcagaaaacaagggagcttcctttctgttgggttacacatttttcattttaaatgacacattcatggttcagttataaggaatatatgtggtataatttagtaccaaaatacttatgtatcatattaaatttaaaagactatcaaccaaacaacagtatatcaatgcttggacatggtgccttttataaagaatgaaactctaacacagaatcatgaacaaaaccagaggcattttagtttttagattggtaattggttattcatcttcaataaaacgaacaacaaatgcaaaaatacaagtgcctagaaaaataacaaagttgagccaaagatgaatgatgttggaatgagttgcaaagatcggagctcgactttttaaacgagatttctatgatgattttgttcttgttcaagaatgacaactttgagtgttggtagcaaaagaggtagatcaatgattatttttttttttctttttgatgcaaagagaccaatgagtatttcttttttctcattttttcttttttcaagcaatgatattgaaaaccaattaatagagtcatctaaccaaacaagttattcatccatttgaagagcatgtgcactgtcttggccttagaaaataagcttgttatatcctctaataatgaaccaaaatcattgaaataagaatgttaagcagatactaagcaattagattcaacaacatttatatccaatcctgaaaaggtaatccaatctacaaccacaaaaattgctatgcattctgcctgtacaactgaaaacttcctgttcataatttccaaaactccatgcatacacacggaccaaaaatatttgggctatgactgaccttccacggccttaaagtatctgggccacgattttccgtgtaaaacatggtctgaattccttcacggctttctaataaagcccagttctatatctaaataaaaaaaggggaaacttataaaaaatactgtaatttgggttaatttttacaaaaatactgtcacacgaaatttttttcaaaaactactatgtttttataaaacagcagtttttataaaacagcagtagaacacaaaacagaacaacnnnnnnnaacagtagaacaactaacaaacaccagtaaaataccagtaaaaatttaacacagtatacaacagtatgaaacttataaaaaaaacacagtaaaaatgtaaaaaataccgcctggcagtattttnnnnaaaaaataacaaaagttagtatactatgtaaatttcccataaaaaaggaactactttatatttaaccaaaaaaagtggttttttcaaaaatatgggattttaagtaaaaatttataattttactcacataattttttacaaaaatattgtctttttataaaataactgtaaaacaataaaacagaacaattaatacaacaataaaacaactaaaaaataactgtaaaaacttaacacagtacatagtataaaatttacacaataattttgaaaaaacttctgtcccacagtaataaaaaaagtaaaaaagttagaaatttcagtatgtggtgtaaaaactaaaacaaaaaacttagggttgcaaagagttttaaccaaaagaattatttcctttatgacttacaaacttttcaaaaaatacagacaaatattgcatattgttttcatgttattatcttgctattcatattagatttatgttatttatgttatttttaattttttttttaatttttgttttcttgttatcttcttgttgtttctatgttctttttatagtatattataaaattataattagaaaaataaaaaactgtaaaattgaaaatatatatgtataaccatataaattttaaaattgtgccaaaaataatactgtgtaaaaatctacataccaattaggtcttttttatttcttcttttcgtgattttttttttttaaataaagcatttatatataaatcaacgattagatcatacggtcattataaaatatgttcttaagaattgacgataatgtcacacatcaaattgattgtaggtaaaggctcacttagtcacattatgggccataaaattgcatgttcttaagatattacaaaataaacaactaataaaaagaaaaaaaaaaaatcctcttacaaacaaagaaatagtttacaatttgggaaacttacaaaaatactgtttttttcccaaattttacaataatactgccacacggcaattatttcttttttactgtccaagccttttttttttcttttata

SEQ ID NO: 111618 - DNA, 3594 bp, Cannabis sativa
tctgattatattgaaatgagatttatttagggcataaaacccaacactcaaagtaacctccacttgacatctagggataagattattcttccaaaagattatgggggtttaggcttcaggaaggagctaaatggaacaaagccttgttagaaaaattgtttgggctattagtaagaagccagataccctttaggtgaaatgggtgaataagatgtacttaaagggggaggacttttggatttatctgcttaagattgatactagcaggtattggaggaaattgtgcagcatcagactttccttttctcaagaagatatagaggctgctggaatacatgggaaatttaatactggcaagtggtatatgtctcttattagcaatgagaaggtgaaacatactcatttttttttagaactggatcagtgtgccaaagcactgtttcattctttggcaattagttaatacaaagcttctcacgagagataatttgaagtgatttcacatcttgtggataactctctctgcccagtttgtcatttggaaaaggataaccagtagcacttattccttaaaagcatatttctaaccaagtttcttggcagctacacaactggcttggtaaagtttggccccaaagttttaaggattatcaaggttggatagaatatatggaaaaaggagctaaagctatgattttggctgttgcttttgcagccacagtttatcatattttgtacaggaattcttgtatttttaaaggattctcttatactgtaatacctaatgtagataaaattaaaaaaagatatgacgtgtagaggtcatagtctattacacaaaaaattggaagatcatgaaaagaggtttttgtagagagtgtgttcggtgtaagggtggttctggccttgtttctggctttttttgtattttgtttgtgattaataaagattttttcttgattaaaaaaaataagatttggcattcaacactgcaaaccagaagatgccctgttgctaaaggagacaaatttaatcttaagtaataccctaaaggaagcattgaagttcaagaaatttaaaagattccttacgatttagttgttgcgagtctaatgtacatgctcaattttgtacacatttggatatagcgtacattgtttaagtggtaggtagatacttcagcaatccaagaattgatcgcaagaaatcaaacaaaagattatgagatattcaaagagaacaagaaatgctcacatgtaagaggtcaggtcactttgagataattgggtattctgactctgactttgcgggatgccaagatagtaagagatctactccaggctacatatatctgttagatggtgggttatatcgtgggagtgcacaacaaacagtcatagcttcatccaccatggcagtataatttgttgcatgttatgaggcatccaaccatgttatatggctgaggaactttatcactgggttacacattgtgaatggaatagaaagaccatttaagttgtattgtgacaataaatcagttgttttgtattccaacaataataagagctcaacaaagtcaaaatatattgacatcaagttccttgttgtgaaagaaaaagtgcaaagtgaacatatttgtatagagaacttaggtacaaactctatgattgcagacccccctttcaaagggttttcctcccaaggtctttcataagcacactgctcgtatgggtgttttagagtatgacgatatctagattcaataaaaatttatctttgttatcctttgtgtttatatttctttcatgaaaacttgtgtattttgaatattattctgataaaagatataaagttatttagtttatttcactttacatttaagctcaagtttttatatccataaagtaaaataggaccaaacaaaattaacatggatagatcattatgcgtgtaatttttataccacattatcatgattgatctatgtcatttgactatcttaatatatatgatcattgatggatttagttatgattcatacaataaaaaattactttaatctatgttgatatagttaatgaacgagattgcacatacctacaattatgataacaaggttatgaacttaataaggtttacactttacacatttatatggatacatgtatatctggcccaatgggaaattattgggaatttaatcatttggggccgcataattgtatatataaaatgtatgttgagtcattatataaataagtcaaaattatgtggtctttttttaaataaaatgtatgacttaagggcatgattgtcatggttttaatatgtagatataccaaaggataatttctaatttgatgaggggtcatattagaaatagtcgatacaaattagtagctattttgacagttggtaatatagtaggtaatgatccccaatttgtatacatatcttttaacttttaaattctcatcatcaagagactaaggttccaaagaattttactaataatttggaagatcgtacttttgcacaatcaattcaaagaactctggtacaattatgctaatccttaactattcattattttattctcataaattaattaaagctaattcatataacaatattccaacaacaagatcctggaaacaagagtcaaaactatttgtcctaaaaataatctatgtttttattttgagggataagttagctataataattaatacattctgtgttcttttaaatattaaactaaaatttaaacgacttgtttgagagctttaattaaaatgagaaatagaagtaaaaaagagagagtttttacaaaaatactgaatttttggtaaaaatttacaattatacagtcacacagatttttttacaaaaatactatctttttataaaataaccgtaaaataacaaaacaaaataattaaaataacagtggaataactaaaaaatagccgtggaacaacagtaaaaacttaacacagtacacagtataaaatttacacaatatttttgaaaaaaaaatacgtcccacagtaaaaaagtaaaaaagttaaatttcagtatgtggtgtataaaccccataaaaaaataccaaaagattaggctcacatatcttctaggagaattttcataaatatgagaattgagggtatagtttactttttttatggcataaataaataatgcaaaaaaaatatgagattaaaaaataattaaaatttaaaatatgagaaaaaaaaataaataaatttaataaaacttgtaataataagttctaccggaaaagtccccggcaccggaaaagtcactgtcgccgaaagtcaccgaaaaagtcaccaaaagtatatgtctcagatataactaaaaatagaaccggttctatagcataatgaataaaaacaaataactataactagttctgtaacataatgaataaaaacaaaagacgcaaaattactcaaaccagttataattaaaatagaatcagttctataacagtactgcaatgaataaaaataaataacacgaaataactcaaaccggttatagctaaattagaaccggttatataac

SEQ ID NO: 111619 - DNA, 7437 bp, Cannabis sativa
tatgatatataatccaattcaatataatacaatacgacctaatacaacgttccaaatgagcccttaatgtactacaaattttaatataaggagtgtacttttaataatattaggggtgtacaaattttggtacaaaacatttttttaggaaaaggtcttaactaccaaatcccaagagcagcaagcactctactatggtggggtgagaatttattcaaatatagcatccgctattattaagttctgaatacaaatagaattcgctggctaccaaattacactttttcctgttgtttaagcaagtttggccaaagaatggacaacaccattacaagatctcttacaatacacaaaaataacatcttcaagcctcttataaaaactcaaaatatcatctaaaactagacccaaagaagtaataatagaattattatttttaagtttaagcacaatattcaagtagtctgactcaataataatgtttctatacctaaaggagatgcattgaatcaatgcgttgcggatagccaaagcttcagccacttcaggaacaaaacaaccatccaaaagccaactagctgaagctatatcacttcccaaatgatcacgaatcactatacccaagccactacaattttccaaagatctaatagcagcatcagtattgactttgagaaagcaagtgggggaggtttcaatttaagcatcacctgaagaggggttgtccaaggcactgacctgccaacagagacatccattgccaactggcaagttaagggagccaccgtcaaaacttttttgttatgaaacgttccaaggtaattgtgggtctaatgtatagtgagtacaggagacaatttaacgttattatggaccattttattacatctgaactaaatcctctactgaatcaccataaccaattcaatcacatgttttaaaaggatatcaacaaacctgtgaatgaaatgaagaaaatccacataaacaagtggatcccccctacacaaattcacaaagtttcccaaaatatgacaatgaagaacaccccaaagagcatgatgaatagtttcttcttccaatccacacaaaggacataacccatcagctaacagaccatgacgagttagattaattttagttggaagacaatcataggatgcttgccaagcaaaaagtctaacctttggaagaagattaagagaccaaatatttttccaccaaccagaaaaactaccagacggtgaagcacgaggagcaaccatattttgaaggctaagccaataaccattcttaatagaataccacaccgaattctcaaaattgtaaattatcttatctgacacatcaaatgaagaccaaggaatagaaaggataacttccgcttcatgaggcaaaaaaatggatcaaattaatgcattattccaaccacccgaagcatctcttaataccaaaactttgctagatccagcaatccaaacaagagacgacaaaacgaaagacaaaactgatggaatccaattgtcaaaaaaaatagcaatgtttttcccattccccacacgccaacctaccctggagtcaaaaatttcattcccccataagatatttttccacacaaaagaccctctctttgatttcttaatctcagcaaaagaccgctttcaaaagtacaagccctttaacacacagccagccaaagagtcgggaacattataaatacgagaagcttgtttagccaagagagcctgattaaataagcaaagcccctgatccccataccaccatcttccttatgtaagcaaagtttgtcccaagtgcaccaatatatcttttttttacatcatttacaccccacaaaagcgaggacacatatgatgaatatttttgataaagactttcgaaagtttacagagattcatagtgtaagtagggatcgtttaaataattgctttgatgaggacctcacgacccgccatagaaaacaacttggatttccacccattaaaccttttccaaatcctgtccctaatggcatctaacaaacatgccttgctatgccacacaaaaaaagggaggccaagataagtctcatggaattcaccccttcacacccaataaatccaccaatttttctttctcagaacttagcacatcgagactaaacaacactgcaaacttatcaaaatttactacctgactagaggctgcgccatactaactgaacaattgtcaaaacctcacacaacacacatcagtatccttaaaaaggaacaaactatcatcagcgaacaacaaaggagatatagcagggccaccactactacaaggaaaacctacaaaaatttattctcagagtctcttcttaccataaagtaaaagaaaagataaggggacattggatcactttgtctaagtctacgttgaggagtgatagagccaaggacctcaccattcaacaaaatagagtactccacagaagaaattcagtcaagaatatttcaaatccacactccatgaaacccaagctccgtcataatttgctccaaaaacaccactcaacacgatcataagctttggacatatcaagcttaatagcacagaaactatcacctccctatttttcttcaaagcattgatacattcaaaaccaataagtgcattgtcggttataagatgactcaggagaaaggcactttgctcatctgaaatgatgtgacccaacaccttacgcaagcaattagtcataatcttagtgaaaatcttgtaaaagacattacaaagactaataggtcaaaagtcaacagcattacttgggttgtcaattttaggaatcaaacaaataatagttttgttgatacctttcaagctagagaccccattaaggaaagctaaagctgccgaaatgatgtcttgcccaataatactccaatatttatgataaaaccccattgtgaaaccatcctctcttggacttttagaggggtccaattgaaacaaagcttctctaaaatatcttccccacaaaaatcctgaatcaaatgagcattcatgtcctcaaaaatctttctaggaaccgagctaataattttagcaaaagcatcatcagggggtctgtttgaggtaaacaaattggagaagtactctttaaagatagttccaattttaccttggcgtgtaaccttaatacccaggctattctgaaacttcaagatcttcttcttagcccgcccacccaaagcacacttgtgaaaataggcagtatttttgtcccctaaattaagccaatcatttttagctcgagaagcccaatatttttcttctttctcctgaagaacatcaagctatttttcaatcttacgtaacttctcacaactaacactatcaagattagcatctacaatctcaaattctttgaggttttgattaatggcaatgcggtgatgcttatgaatttttttgttccaatcattcggtttacctcccacatcaaggacatcaagttgaacattacaaatagaatttgaatatttacatctccaatatttacctatgatatccacacaatcttcttcattagcccaagcattttaaaagtggaaatgggaccgtgatacatggtcattgttgccccatacattgaaaatacaagaaagcacaatgggtcgatgatccaaaccttacagagacaagtgagagacatgagtattggggtacaaattaagccaagaagagttacacacaaacctatccaaacgttcttccacaaagttaatattataatttttttgtatcattaatatactactcttttttattatattttatgtcattctaattatttaattattatatttacttataccattaacttataaaaaaatttatttattttttattgttttatctaattaaataataaaaaaaattaatggtaaagttatcttttatgtattttataattaattagtattaaattttacataaagttttctaattgtgtattggaacacattagcaaaaattgatacaaatttatcatagaatttttttttcacaaatattgcacaatttatacatttcttaatggagatggctttatataaaattattttttttgtagtaaaatatagatatatttactaaattaattatatattaaaaatatttaatttatctaaacatattacttctcaattttgtgagagtactttaacatttatattaatttttttcttagtggttgtatccttaactattaaaaatagcttaatggttttattaatctttttgacataattgtattgtataaattgtaagagtttaaatattgaagagtttgatataaattcattatgtatttttttcatatgtttgttaaagagtttatgtttagtgttctgactaagaaaattattgtatagacaaataacttgcgttatactaacttgagctaattacattgatgttctgaaattctaatctgaaatgaagattcccattgtaggggttttaagtgctaatttttgataatatacattgtacaggaaagtggcagaggaataagtatgttggagtctccttattaggaaaaaaacttgctataatgggatttggaaaagttggatcagaagtagctcggagagcaaaagggctgggaatgaatgtcatggcacacgatccctatgcaccattagatcgtgcccgtgccattggtgtgaagctagtgagctttgaagaagccatttcgactgcagattttatatccctgcacatgcctctcacccctactacctctaagatgtttaacaatgactctttctccaagatgaaaaagggaattcgaattatcaatgttgctcgtggtggtgtcattgatgaggcagctctagttagcgccttggactctcagattgttgctcaggttcttacttatgtttataagaaccacattcacactaatcaaatagttaatgaaaaacttgaatacactagttaaatattcttttacttctcctggcaggccgcacttgatgtattcatggaagagccaccaccgaaggacagtaagttagtactgcatgaaaatgtgattgtgactcctcatcttggtgctagtactactgaggcccaggtgtttgcattctcataagtaacatcacacctctatatataacatgaaatatgaatgcatattttatcataaatttcattgtgaaatcttcatattcaggaaggtgtggcccttgaagtggcagaagctgttcttagagctctaaatggagagctttcttctactgttgtgaatgcacctatgctctctgctgaggtagtaattgatatgttaagcatggtgtgttttgtttatgtacttgtacttgtacatgtgtatagtcgtaaagatctttcttagaagtttaataagttggcttgattagtcagacttagtgtgtatactttttctgtgatcacaggttttatcagaactagaaccatttgttgccttatcagaaaagctaggtagactggcagttcaattagtggctggtggaagtgacatgaaattagtaaagctaacttatggctcagctagaaatccaaatgatctggacacaagggtgctccgtgctatggtgataaaaggtctgattgagcctatttctagtgtttccgtaaatcttatcaattataatttcattgctaaacagagaggattgataatagcagaagagagaataattttaaatggttcacctgagaatccaatagagtttatccagcttcaaattgccaacgtggaatcaaatttcgccagttctatttctgactctggtgagatcacagtggagggaaaactcaaagatgggaaacctcatttgaccaaggtaggatcttttgaggttgatgtgagcctggaagggtgtatcatactttgcaagcaagttgaccaaccgggattgattggaaaagttggaagcattttgggtcaagagaaagtaaacgtgaattttatgacagttgggaggattgctccccgaagacaagctgtgatgatcattggagtggatgaagatccaagtaaagaagtactgaaaaaaattggtgagatatcagccattgaagagtttgtcttcctcaagttgtaatcatactttttctatacctattgttcaaatagagagtgtcacctaccaaatctctttgttttttttttcttttattttctttatggcatattcattttattggattaattcttagtatatagtggctctaatgtttatgaaatcttgtgttctaattaggggtgttaatgtgacaaaaggaaagaaaaaaatgattatattccttaggtgaattagtacacaatacatgcgtcaaataactctttgaataaaggaaacacaattactagatacatgtcctatcaagaaaagatgaaacaccataaaattaggacaaagcaaaataactacaaaacttaaattaattactatttaacatctcccctcaaactcatgggattggaagcactatgagtttgtttcgtaactcctaaaatcgagatgccacaagaggtttcgtcaagaaatcaacaacttggttcttggagggaatgaaggataaagagagagtgtcacagtttactcgttcttggacgaggtgatagtcaatctcaaatgtttagtgcatgcatgaagaactaggtttgaagccaagtaaatggtgctcatgttgtcgcaatggagagttggaggagcaaaaagagaaaagccaagttccctaaggagacaaagagacaggatactttagaggttcagttttccatggctcgatatttagattcggtactagaatgagatatcactttttgtttggaggaggactaagagataaggttgagtactaagaaaacataataagcattagtgctacgacgatcatcaagacatgaagcccaattgacatcggtgaagcattggagaagaagattgggatcaggttaaagaagagtaccaagatgagcagtacctttgaggtaccaaagaatagattggccgcctgatgatgaaccgttgtaagggcatgaagaaattgacacagcttgttgacagttaatgcaatgtcaggatcaatcagggtacaatattgtaaggcccgaacgagactgcagtatttagtagcattttcaagaggatctccatcataaagcgatagtggggtgagagatattggggtgttgataggtttcgagtccaaaagtgcagtcttggtgggaaaatcacggatatatttggtttgagaaagatggagacccaaagaggaccaattaacttggtgttgggttttataccctaaataaaactctatttcaatgtaatccctatcatttaaatatcaataaagagacagaagtattttcataacttatttaatgtg

SEQ ID NO: 111620 - DNA, 9381 bp, Cannabis sativa
  modified_base (26)..(29): a, c, t, g, unknown or other
  modified_base (9309)..(9311): a, c, t, g, unknown or other
  modified_base (9338)..(9345): a, c, t, g, unknown or other
ataaaatgatttctgatctttattannnngtaaatctaattatattgaaattggttttatttaggacacaaaacccaacactcacacacacacacataagtgtccaaggtcaattttgaccattctttgtttctgaattatgaatcacagtttgacacgtttactttctgttatattttctaattgtgtttatatatttcttgaattaaatttaccaaaaatgttgctatgacgagcagacttcaaaaacacaacaaacacaaaataggttagggctaaacacaatcaaggtgagctcaagaatttgagctgaatcaaaataaacacggaaaagcatcaaagtcaaagagatgagaagaatagaaaacaagcacagagattttacaagattcaccacctattcttggaactacgtctttagtgagcgacctcagagaagctcatatcgaatccattatcaagattaagattttgcaaactgttgcagggattctaggtcacatcgattaacttgtaatcctctactttcactctttaggtaagaatctctattctatgttcaagttttcttctttggatcgaaccaatccctcatttcttttctctctctaaatatcttttttttaaaaaactctttgaacacgagggtctctctctatctctaaattattactctagatcacttctaggactgggagaagtaatttttgaagttgtaagtctctcgatcttgttttcttcaatttatatacttaatgagtaattgagctaagtagtgagttaaaaaaataactaactttcttataatcttgatttctaagctgtaaagtttgataggattcgaaccaaatgatattcattgtgaatgaaaagggttagtttatatggggaattaatttcaataactaacttattatttagtaacaacaatatactctgattcagtagttgatagagcaactactggttggagctgtacttttcaactaatacaacttccaccaattatgaagtaataggctatagtagaccttctactatctttatctccaacctaaccaacatcattatatccctccatgagtagtttagtattctatcttctatatactatctcaacaatattagatcttgttaggtatttgattgtctatttcattacttgccaatgctctattactaggattagccatatattttcttatgatattcatcacatgtgctaggtcaagcctagtacatgctatcaaatatattacagagccaattgcatttgaataaggaacctctttcatttcctcaatttttttaggttctgttgggcattgagccttggaaaattggtgctagtaggtgataggttgcttcgttaccttagcttcattagtcaagaactttttaataatcttgttgatgtagtctttctagtttaaaataacattccatttcttcatgtcccttttaatgttcataccaaggatattagtggcctctcctaagccctttattcaaactctgatttcaacaaattaattcttgaggatctctacctttgacttctctttgcttatgataagcatatcattctcttataatattactagataaatgtgtaaactttgcttcctttgtaatataggcagtgatcataatagctgcttaagtaaccttgttttttcattgaagaatcaaacatcttattccatattcttagggacctcttgagcccatacaatgatctttctaactttcatactaggtcttcctcaccctctttaatgcaaccttttggtttctccatatatatgttttcttctagttcaccattttggaatacaatggtaacatccatttgttgaacttctaaatcaaattgagtggttatagccagcatgattctaattgtcctgcatttcactactagtgaaaatatatctgtgttgtttaccaagatttttgaaaactaaatacttaaaaactaaagaaataataaattgtagaaaataaagagatggagatttttttatgtggttcaagttttgattaatcgtagtccacgagttagtctattagcctttaatggcatatttactgtgtttacaatatttagtaggaaaaccataactctgtactgttagtttctcttgaagaagaataatacctagagcaatattggtaaagcttcacctattttgacttttatcccccctttgtatatagatagatgggtatatataggctacgtggtgggtatagacatgcccatgacctgcctagcgtttcaactcaaagaccactaatggggtaaattacatgcaaaagagagctaactattgtgtcccttagaaataattatacccgtgcatgctccaactagacaattggggaccatttgcactttgtggacacgtgtcgctcaaaggtttaatctttaaaagtagagggcatgtgtcatctaaagatttcacctttaaaagtagaggtctgcaatattcatctggaaaaaggtagacgaggtccacgcactaccatgcctggacataggggaaaagatctgatcctgtgtatgaaaaagtataaccatcactgggcgatctagaatgcaccaaaggtagacatctgcgacagttatgggcggtcgatattcataatatgcccttcgagtacccatgtgagtatcaactgggtaggcttccatatttggactactctgagtccaagagagacaatatgtcttctgcgttccggaagctatgataagaaaagtggacttctgcttctctagtagtcttaacttattcccggttctgtgaggcttctccatgataggattataatgaagaattttaattagcaaaattttttagtttaatatttcctcttatatgccacgtgttacacactcaaaaacacagagaacatttaccccctaagcttctgagactcttcaaggtccaagagcttgcagtcgtcttccatcccttggagataagttctttatgcgtggtgtttttcaagattgtagatgtatcccatgagcaatcatcaaataaagggctataagttgaatgtaccataatcgtagcacacatgcagtgcctttaatacggttgtggttaacacgtgcgttccgggccatatttcttaggaggagttgcaatgatggcagaacaattgaaatgacctctcctttaatgcttacagtactcgaggcatataatgatgaaaatagacaccaggggcaagctttaaatgctatcttttcaacttcccatccatcaaatcaaaacgtgctttttggagagtggatcttggccatacaattcaattcacaaggatattggtcgaagtataaatagattttccaaacccatttcttctttttttcatcacttcagactctcaaaataccgctttttgaatttcaaactagaacctcctattttccaaaaaactcccattatactgtcatcttcaatagtgaatgcaagctacaggccttcaactgcatgattcaatactttctaaaccaccgttcagctcgtttcccgaacatagagccattagacctcaaactgttccatttccttactgacaaaagttttgacactcaggttggctacgattgtgtaattgactgggttcaacattcttgggaaattttccacaacaacctttccttcccgactcatataacaagtaagtatccaaatgctttgttgactatttgctattttgtatttaagatagaaatgcttagttcaagctaggtctaggatgtcttggatgttcgagtggtaaagtgttgtccgtagagtttcatttctagggtaggattatgcggaaattttttatgccatggaaattttagttttatgtggatatttagggtatggtcgtctgtattctgtagatacttgcatgttataaggattctagaatcagggttgaactaggcacgatgagtttctgaatgaacactaggccaatgtactatccttaaacccatttggagttgttaggactctggatggctttaatttattgatttttgctttagacattgttcatgtaattttcccagggttcccgatctattactccaaattgtcaggggagggcagacttttgggaatgatagatccggtggggacctctccaagcaatttcaagggaggcattccctaatgcccattttgtcatttggatagtgggcgtctaatttcttggcacttattttcctttcatttttccagtgatggatttgaaccaggaattccatcttgaagcagtggaaattgaagaaaacacaatagttgcccctgttgaggaaatagccactaggaactcaatcgaatgttcctatatgggaacttgactcagatgccactcttgaacctatcacagaggccactccttttgagacatccaagaagtccaaagggaaagggaaggccgaaattccacctcctgctcataaattcaacaactccatctaggagatggagtaggaggaaaattgcttccgttcctatgggatgctagaaatgtatgtcactaaagccaaactactcaacatatcgagactgatgtggcataggttggctgtcatgaaggagtctacatccacgagcatggatgggttcagtgcctgaatttggtcccacatctcaaggggggacacctccccctaagagcttacttcgaagagtttattgtgcgaattgggattgctcgtttcaactaataccactagcttataagcatttagctaaatggtacattttctaaaagattcaaagttcgaggtaccttctctagaggagatttatgttcgtctacggtgtgaagcctccactgatgagaaccaacttcaagaaattgggattttacaaactcgagaggtattctggtgctcatttccccaccagctaccccaaacgttcccccgaccttgggcagtattggttcttatccactggttttccagtgaagaaggtgcctactctccagctcaacttctagatcccaggtaaatgctcttacatttgtagtttggatatttttctttcaaaatttcctctatcttggttcaaatgttgattagacttccatatttccttgtttattttgacagatcatgtacctcagagtgctaaaactgaggaactggccaaaaaggtagtccattataaggtcctcactgaagccaagttaaaagttgacggcttggtcaccacacagctgctctgcaagcacagactcattgcaaacttctaaaccattaacaatgtcaagaataggggcaaagtcaggcttcaaaagaggccaaggaattgatagcccatgacctggaaaaaattattacggaagccactaaggaggacaagatttgggaagctagttgtatgctccatgtgtgtaattaattttaaaaaaataatttaaactttttaatttagttttgattaattttgtttatcattaattgattttttacttaataatctctaaaaataaatatttttacttttttaattttaaattacacatgtggcactgacgtgataatgatataaatatccacgttattattatgtttaccacgtgtgacaaaactatacagaaggaccacattacaaaattttgaatagttaagggactatttttaacgggctgaaaaattcaagggcacaatcatgtataggtcattgttcggaggacaaaaatcttaaatagcctatttttctatctaaatagaatttttcatcagaaataatattttttttttagtttacttaattagttttaaaattttaatttattttttaatattttttaatcatttaaaatgattttttaagatctaaattaatttcttaagattactaaaaaactgttatatttttttcatttttatttggacggagtacaatttgatagttgtcaaagtttagaggtaaaagttattaatttataaagacatgtcagtatttaaacggaataatggcacaaaatcttacataaagactaaaattctataaatataaaagtttaggaagaatttttaacaagccgtatattttagaggcagaatcaatattgtcaaaagttaaaatagtgcgggttaaattagatgaacaccccataattattttatgatgaagttttcataatttttaaatggtgtatttaaaataattatttacaggaagcggggagatactagaagtgtaaaatatatttgaacaaattttaaaaaaattattctttaaaaatcagtgaaatcagaattatgattatgttgttgaacagatgataaacaaaataattaaattaaattaatatatggttaaagaaaattaaacttatttttgttttaaagataaaaattacaaaaatatcactcatatttatataagtatatgtatacacataatttttttagcaatttagccgataatgatttaaaataaacatattaattatatgaaccataaaataatttatgcagtcaaaaattctcttaataattttacaaattaaaaaatttaatatataaaatggttgacattcacgaaacttttaaatcaatgaaaattttataaaaaatgcaaaaatatgtaaattactcaaaattaaatttatcaatcatctccatatgaaaaaattacaattaattggataaggttaaatttataaactactcatataaaaaataaataatattaattttggaacaaactatgtaaaagatcaatcatctatatataatttagaaacataatccctacaatattctgtaaaccataagatataatacattgaaagatttgtttaaactttcttatttatattgtagattttttattttttttttacaagtaaataactttatttcaaataaaggaagccatttcccttaaacagccctcagactgtaccttagcacaacgagtctaactggccaacgcatctgtaaaacagttaagaaaacaagaaattaactttcctatttatattgttgattgatgattggtaattgttgattgattattattaattgtatgtatacagagagatcatattgtatttacaacttcacttcagcacgcaccatctccaattagtagtggatgatcaacagaaaggtcaatatgaaattaaaagtatttgagagatatgctcatgctaactaaaatgcaacattcgttggaggtaggagccgacaacatattaattagttatatatttatgaaaaagtagtatacacattaggtatttatgtactatcttatattccaattacagtagtggatttttcctagattaaatagtgagtagtggaacagaagcataataattatttataaattttggaataatataaaactgtaataatatgtttttttttttagatcgtattgtattaaattataataaataataataaaaataataaatattatattattatagagcatggtagtagcttcatcccaaattctaatgtgttagtattaatcttctttggtgtctttatttttctgtattatttttactgttttgtgctttttcatcccaaattctaatgtgatttctgtattaatcttctttgttaatttaattttagtcttgtctcatgacatggttttgagagttttttaatttttttgttttcttctctagtataattttgtctggctctggtgtggaatatggcaagttcaagtggggtaactagtggggtcaatgaggatgtctacagttttcagttagaagaagatgacttggaagcggttccagtaggaaatgaaggagaggaagagggcattgatgatcgatggtgtctcgtaggaaggtttttatcaaaccgtatgattgattttgataagatgcagaacattttggcttcgttatggcaaccggggatgggaatgtttgttaaaaaacttgatgacaatcggttcttattccaattctatcatgaagttgatatattaagagtcattaatgggagtccttggacgtttgacagaatgaagttgatcatccaacgattgcctgtagggggggactcgaatttgatacaacttaatcatcttgagatgtggatccaaatccatgatgttaaatcgggttgtatgacagaagggacagtgagagggctggccaacacgctaggaaaattcatagaatcggatccaaagaattttataggtgtgtggagggattatctcagagtgcgggttactttggatattaggaaagctctacgaaggcgtataaagttaactcgggatgatggtagctggttttgggtacatttcaaatacgaaagagttcccactttttgtttcatttgcgggttaattgggcactcggatcgattttgaagtaggttgtttcagcagcctatagatcaaattgttaagccttatggagatttcatgaaagctttgccacaaaaaactcacaagaacatcggggcgagaaggttgcgtaacaatgggtggaagtcggaggtgcacaccagatttagaaagaaatcatacaactcactcagccgaaaatcatgcctatgcaaatctgttacatcaaggagaaaatcatggagttgatagtgccatgatggagaatgatcaagaggagagtaatgatggtattgaagaaggagaagtcaagggagcaaataaaggaaagaataaggaacaggagaatattaataagggaagtgctgagttggttgtttatgacagtaaaaaaaggaaagttggagaaggtctaattggtggccatctgggacaggcccaagaaagtattggactcccaaaaaatggttatggggcgggccttggtgttggggctcgcctaccattatgaaactactctgctggaactgtcgtgggctggggcccccacgtaatattcaactccttaaatccttggttgatcagagaaggctcaaagttttgtttttatgtgaaactttaagtaataaggaaaagatggttgcattgagcaggaagttagagtttgacgggtgttttgtagtcgactcacagggtaggagtggtggtttagcacttttatggaaaaatgaggaagaagtggttattgactctttttctttgaaccacattgattgttttgttcttattgaggggcaaagaaagtttcggttcactggtttttatggagaaccaaaccagagacttagggagaatacctgggagttgttacgagttcttcatgaacggtttcaagagccgtggtgcattatgttggaagttattttaccaggatctnnnatttactcacaagtatgttgatttaannnnnnnnatatgaacttctaaaacgataagaaattaaacacat

SEQ ID NO: 111621 - DNA, 1837 bp, Cannabis sativa
  modified_base (1096)..(1099): a, c, t, g, unknown or other
gtaaaataatttccaacatccattacatatgtatccaactttgattgaagacatatatcgcgtgagtccaaaggatacaaaatactgatgcttcatttgcttttaatgggcttatgttattatactctaatttcatatataccattttctttttaaatttgaaaaataacataaaattaaaataaattaaaaacttctaataaaaataaattaaccattaaaattataaaatattcaatttatattaattatatatgtataattaaagacttaaaatgtaccgatttgagcgttaatcacactatgtgtcttgttttgaacttctttgattttcttcttgtcttctctaaaagcagcaagctcttctcgatcaatggcttctgaaattccttgatacacaaggaaagccttcatcttgatcctccacagaccaaaatcattattgccattgaacttgtcaactttgaatcgtgtggaagccattactgatcagatcttgattctttttgatgtcttgactcaattctttgacttttcctctcgactgagctttgataccatttgatgtgatcgatagcttgatcatgtaacttatgcacaatcaagacaaatagaatgatagaacaaatgatcaagatcaacaataaagacacacaaagaactaaaaacagaactaagaacaattagacaagaaacttaaaatcagatgcaacacaaagaagtaacgaggttcatacagagtgattgagtatcacctgaacacttattctttaattattttttttttagtgtttcttgtcttgagaaagtgttcgactggattcaatgtaattgcagatgtaaaactttggcacatgtgcataatttggtgagaggagcaaatataacatatttaaaagaagagtggtaattgctgccatcaatgtagtgttttaccattcttggagagctaaaaataaagtgtattgggaagagttttgtctaaccataaatagtactgggaatcatattaaaaggaacattgttattgggcattagcggtgcctagcacctctagacatattttcttgtgattggctagtgatattctttaaannnnattatattaaattatataaaactcaataattagtttgactaattagttatgttgtcttgtgtaattcacagcctgaaacatttgcacatttattttttgaatgtccaacatctcaactgtgtttataaaacattaaagattggctgtagtggaaagcacaatgcaattccctggctagtctggttcgatggctcaggagagcaaagcttagcagctttaagaaactagtgctagctgctgctttagctagcttggtatacaacatctggaaagtgaggaatgtatgttacttggataaagaagtcaggatgtctcgagagtctgcaaatagttgaaggttggagttcttcaaagagtggaatttttttggccaaaaaaagtctccaatgatgacaaagagtggttttcatcattgtaatgaagccaattattttacttgtacagattgtatagatacataacttaggtcttataatttcgggtgctattagattgtaaaaagttttgtgtgctaatacaagtttcttgattcatcgaaaaaaaaaatattagcacatagaataatgctaagtaccattggtccttatagcatttttatattaaaggagagctttactatagaatgttagaaataatagagatattacaatggaagaataaaataagatgaataaaagactaagacaattacaactctaaacaaaatattacaaggacaatatattaaataaagagtta

SEQ ID NO: 111622 - DNA, 2139 bp, Cannabis sativa
accaactaactaactaacataaccgaatgttagttaagttagttggtttaaatgagttggataataagttggtttagaggatcaatttccacattaattaattaagataaaaaaaataattaactcatttctttcaataaaagtttaaataaaagatgtaaattaatcccgtttaattaactattcctctgaagaaaatctagctagctagatcatataaatatatagaaatcaagattctaattaatcttagctataaatatttaatattaattaacatgttaaacaattgtttatattaacttctgttgcatgcatgttgtgccattattcagttaatctttccttaaccttatctcatcactaattagtttctttttcatttttcctgaaaattatatattataacaaataaagtaggtgagtaagttgggggtgtgtgggactctaggagtaagtgaataatgaaatatatataaatatatatatatatttatatttatataaattatggatcattgagggaaatgtgattcgaaatagggatatgtgccaaattagaagagataatgaaaattatagtgagcaagattaaaaagaattgcatgatcatatttatgattttaaggtgaaagagcacaactaattaataaattagctagtcatgacatgaaaaatgaacaaggcaactaaaatagtcaacgtggaggcaaagtaaacaaataatgctcacaattagttgtatattgttgagaatcgatcaatcaataacttacgattaagaatattagaccaataaacgcgtaattaaaaataatattattaaagaatcacaagaactagataacgaattagacaataaatcaaagagcggacaacaattaagtttaacgaattcaagtcatgtgcgattaatgctctacatctcagttcaaacaatagcaaccatatcattattaatattatttgtaaggttacaagaatttacaaaaaatcctcataaaagatacaagatgaattttctcttttaaatcttaattctctttataaccttacataatcacgattttttctcaagcttttcaaaatggtctgatacacaatagagtacaaaagtgatagctatatatagattcacatagttgctaacattagctacggagttatcatggctaattaataaattctctttcaacgccaacaacatattccacgtcaactttagaaatacaatttttgtacgaacaatctggagttatcatggctaattagttttgaggcttgatgttgtactttctggttgcaatatgttttatatgttgtctttaagagttctagagctttgtaggtgaatttgattcgttttgagtgagaaatgagattttatgaaaatctgtagtagaaaacggcaaataatttttccagaaatagtctacgtttatagcatgtagggacccaggaaaaacagtttgccatttttgggttatattcccgaaatctcttttattttttctttcttctcgatatttagggtattttcactctatttatcaatagacctattggaaagaattagaaatgttcaagtggtggattaagaattagtgaagaagccttagttagccaagctaaagttttctcagtatcagctagcaggattttactttatatatcttgagtttgcagtccgaacaatgctgaacttagaaaggagacccttgatgaagctcataccactccctattcattacatcctggtaccaccaagatgtattaagattggaaactctactacttgtggtgtagtatgagaaggatatggttgaatatgtgatcaaatgcttgacttgtcaacaaattaaggctgaacatcaaagacatgcaaggttattgaagcctttgacactttctgaatggaaattaatgggatgatgtcaccatggatttcgtgattggattacctagaaccatgggaatgtttgattccatatgggtagttgtggatcgatttaccaagtcagaaaattttctgctagtgaaaacaacgtattcagtagattagtatgtcgagctgtatgtaaaaaaatagtagaaattcatagggctccgaagttgtaacgtccccgcttcaagcctcca

SEQ ID NO: 111623 - DNA, 7069 bp, Cannabis sativa
  modified_base (1333)..(1334): a, c, t, g, unknown or other
taaaaattattaaaatgaggtgtacttagaaatttttggggtgtaaataaaatttcccatattcatatcactctctctatatatatatataactcctctaatttcgaatcaatttataagtgtctcacttctcttgagtctttctattccttagcctcattactctctttaaatcgcctccataacattctctactttcactctcctaacttttttccttcactttcccgagaaaattataaatatatcatttttttcactcaattgtgaataatatacaaacttatatatattcattatatgcagagcttaacaattttatcaaagcaggaatatttattatacatatttttacaggtgaaatttctctcttttcccacttgttgattcatgcatggtatgctttatacaaaatttttttattaattaatgttgttactttgaaattgtcattttattagtttcaatgaataaaaataataaatacattttttcttcttgtttgttcttcttttttctggttttagtaaacgagtattgttattggacattagtgatatccaatattttttatgtttaacgttctatacttcattaataatattttataaaaaatattttcttattaaatactaacttttcagcaatatgagaataaaattagaagttaaaatttttatagggatgatgatgtggaatatatagagcatttccaccttgaacacaattattgttattattatatatattgactttaaatattttattaataacttttatgtaacgtagacccatttgcatgaaacaatttgtttattataattattattaacttattaacttattaactttactcaatatatactctaataattattaatatatattatttaattagaatagaaattaaggtagatctagtatacgtacttcttatttaagttaatgcatgtatgtaccccactttagaataaatatacatttccacatggagagtggatttttttattttattttaatttttttaaatgaatatatttttatatatatatatatatttatatttagcttcactttccactctttttgctttctttttttttttttacaaataattattattcctttccctttattatatatatatatatgaaactatatattattaattatatgtatttattgttttatttttcccagtacaacaaattgctaactttagtgactaaatgtaatttttagtcgcaataaaaaattatttgtgactaaaatagacaatttagatataaattattactaatttaattttagtaactaaaaatacatttagtcnnaacaaattataatttttgtgactattcaacacctttacaaatataatatgtcatgactataagataagataagatgtcaaataaatttccacttggtgtaaatttgtatatatggtaatttggaattttagaataattggttattaattaaataattgctatatattattccttatatgatttttttttggataatattaatcttcatcgagactgagaaaaacttatataaaaaaattgttattatataaggaaaaaaattgatgaagaataaaattgtcattccaacaaaaatagctagagattgatattaataaaataaaattattagattaagtttgctgttatttccattttaacattcccttaattttgccaagacagttgtaattgatgaataaagtttattcattttttttatttattaattattagaggatttgtcatcccaatttcgttgtctaatttgctattaattactgcaaattaaaaatatattaattaattaagcaaaattagcaattaactatgcatgcattgcatatgggaccagctagtgatttctctctcatcatcataaatgtcctgtactttattacaaccttaatttcctcgatacatttacatacacacatatattatttttttttttgtttgttttgctttctgttttttgtttgttacaaacattaattaattaataatatttatatatatgcaggaaaagggccctattgaagttggagaataatttttctctcttggtttgggattaattaaaataaaaaaaaatgagtggaataataattaataataatagtactatttcttcttcttcttcttcttcttctaattcttcttcagtacatgcaatgaaagcaacctcaaatggggtttttcagggtgataatcctcttgaatatgcacttccattagccattgttcaaatagttcttgttcttatactcactcgatttctagctttcctttttaagccattgagacaacctcgtgtcattgctgaaattgttgtaagtaaatattaattattaaatcacataatcctaattatctttagcttaattactgcatatttatgtttgaagagtttgatttcataaattttcatgaatttgttattatatgtagtttttccatatgtgtatatgattaagacatttgaaaagatactaatttttccaagtgttatacataattattttataaatattcaaaaactatttctatgtatctctataaattatatatgtataaatttatgtttgaagagtttgatttttgttgattttttcatgaattaattattatattattaatttttcaagtgtgacaaatatattaatgttgatagacctataatataatttgttaaatacttaaatagggtaagaaattttatcaatatatatcaaattttttatatgtacaaaaaaatatttaatttttattatattgaaatgactatgttgtttatgagccagattatttgatatgtttgtgtaatttaacaccaaaatatttaggtttttatggttttttgaatatgcatcatttgattttgtattgtagggtggaataatacttgggccttcattaattggaagaaatacaaaatttttgaacacaattttcccagcaaaaagtctaacagtgttagataccttagccaatcttggtcttctcttctttctattccttgttgggcttgaattagaccttaaagccataaaaaagactggaaagaaagctctttgtatagctgcagctggcattagtctcccttttgtacttggaattgggacatcttttgctcttagggcaacaatttccaaaggagttgaaaagcttcctttcattgtgtttatgggagttgctctttcaattacagctttccctgttttggctcggattttagccgagctcaagctcttaaccactgatgttggccgaatggctatgtcggctgcagctgttaatgatgtcgccgcttggattcttctcgctcttgccattgcactctcaggtacatttttttttattcaagcgtttatttattacaatgcataatttgggactcgaacccttgacctccaacacatactctcctatgatcacttgagctaagtgattctctcaagtaccttagtataataatagttttttaaaactaataatagctctaaagtaacttttaaaagtccaatcaaccagcctctatattttattgagcttgttttcacatttctactattttctatattttctttcaggggattcgagttctccaatggtttctttgtgggttctcttgtgtggcacgggtttcgtagttttctgttattttgttattcctccaatctttaggtggatggcgaagagatgccccgagggagagccaattaaagaattgtatgtttgtgtcacgtttgctttagttttggtggccggtttagcgaccgatgctgttggaattcatgctcttttcggtgctttcgtggttggtattcttgtcccgaaagaagggccatttgctgtggatatggtggaaaaggttgaggatcttgtgtctagtctcttacttcctttgtactttgtatcaagtgggttgaagaccaatgttgctacaataagtggggctcaatcttggggcctccttgtcttggtgattttgactgcttgtagtggaaaaattcttggtaccttaggtgtttctctcctatgcaaaatcccatttcaagattctttggctttggggattataatgaatactaaaggtttagtggagatcattgttctcaacattggcaaagatagaaaggtatgaagcttatgctttttttttttttttcaattcgtacttggaacatattctttattgagatgtagtagtactaatcttcctataaccacataaattattcctatagtgtactatgatgctcatgtattaaagcttataattttggttttttatttgattgaattctaacttaaattctaatttgaaagcttataattgaattctaaatattctccacttctatcagttatttttgtaataattatttgaaaataatgatttaggcacacgatcgagcaataagtcgctcatagtatattttaaattaaaatatgtaggattcaatactaaattctactcatcaagtcaagtagaaatacttttttaccaaatactattaaagtattgttatttggcattgatatgatacattgtgagtcattagtgattttctatattatttattaaatcaaaatatgtgagatatgacattaaattgtacaaataacaatatgtcacctcttataaggttaccatttttctatttataattagtatagtttgattactaatattacaaatcattaattgatgtgttgcaggtacttaatgaccaaacctttgcaatcatggttttaatggccatattcacaactttcatcacaactccaatagtgatagcagtgtacaagccaattagaaagacaagtaaatcaatttcaaaggacagatcaattgagaagaagaaagacacaaaaacagaactaagaattatggcatgttttcacaacataagaaatgtaccttcaatgattaatctcattgaagcttcaagaggaacagaaaagaaagaaaagctctgtgtttatgcattgcatttaatggaactttcagaaagaacatcagcaattctaatggttcacagggcaagaaaaaatggcttgccattttggaacaacaacaacaacaaaaacaatgattgtgacaaaatcattgttgcttttgaggcatttcaacaattgagccaagtttcaattcgtccaatgacagcaatctcaactttcacaacaatgcatgaagacataatcaaaagtgctgatagaaaaaacactgcaatgataattttaccatttcacaaacaccaaaaatgggatggaacatttgagacaactcgggccgaatttcgtgttgttaacaagagagttcttgaacaagctccttgctcagttggtatctttgtagacagaggacttggtgggacaacacacattgcagctagcaatgtttgttctgaattaaccgttgtgtttttcggtgggagtgatgattgtgaagctcttgctttcgggttaagaatggccgaacaccccggaaactccttaaaggttgttcatttcttaccaagttcaaaacttttgaatgatgatggtaaagataatgtgagagtagatgttgttagtagtgaaaatgaaaacaacaaggcgattttcgaggtgaaggagaagagtagtaaagacgattcgatcgaatatgtagagagatttgtggatagttttagggatgttgtagagggtgttagagattttaaccgttgcaacttgtttttggttggaagaacagctcaaggtgtgattggtgagtgtttgagtaatagtaatgtgagtgtgaagagtgaatgccctgaacttggggctttagggaatttgttggtttcatctgaattctcaactacagcatcagttttgattgttcaacaacatcaaaatcatcaaatgttttcaaccccaacaacctctaatcccactaatgatcataaggttgaggttgtttctgagtagttgtcctttaaaaacaacaacaatgtatgtttacaaatttcaataatggcatggtctcatgatgatttcaagttttatattttgtttttcacatttcttttcttattagatattttgtggttttttttatatatattgtacgaattaaaacgctaatcacactaactaaattttgaacaatttaacaattagtaatgataaaataactaaatcaaaaataataatcggagaaaaaacaaggatgaacagagtaagtaagaaccaaaaaattattaaagcagtaaaataaagaaatcaacaccaagatatacattggttcaagttcgatagatagatgttatctaactccaattcttgaacaccaaattctctttattgattgagcaagaacaagtacaaaacagtcgagatcgattttctgatgagttctttcaaagtgtttcaattctcatactcttactcaagaatcattttcatctacagaagattcttcttacaaaactcaatcccattctctctcgtttttctgtatctctctctctctctctctctacttcttaatcttttctctctctatttctcaatctcaatatgattgttgtatatctctctctatctctcaatctcagcctaagtaagagtgcctccgggagcgtataagggtttccgaaaacacagttcaaggcactcgttgaaggaccttctgggataggaaagaactaacttaagtcgactatccgagactaccttctaggaggaacaactaaccagccggaacttctttctggaggaaggctagctttcctgaagatccttcttggaaggacaagaaaaccttccaggacctgcatccgcaagtcaacaattttcaggaatgataataattttggaagacttttttatttagaaaaaaactataccacatatataaatacatgaagattattattaaattacagatttgatgattaattttactgattttttttagggaaaaaaacaaaaaaatacaaaaaaggaaaaaaaaattacaaaaatactttgggccggcccattaaacatttatacagtccaca

SEQ ID NO: 111624 - DNA, 1824 bp, Cannabis sativa
acatggccataccaccaacctgcagcacaatttcagaaatagtaagccttggtgccaataaattaagtgacagttcaaaaccgaaactaaccgtaagggaattctttgtttcttctccactggatctcaatatagtcaccaggttttaagtcaggcaaacaatcggaaacatgaagcacgaacggaggagtgttaaccggtggtgctcttagcctatcccaccctatattttcctctaatgttctccgtccatgagacgaatacctgccatatggaacaatttttttctgaattcaacaaagggccttgcttaacaggggaattttctaaactagttacttgttaaaccacacaacacaagcctagatcagtgaaaattgagagagagtaattggtgaagaatgtcattcttcccatcccataccttgcatgaaagttgtcagtttcggaattgtagcagagcagagcatcataacatgagagcatgaagcctatatgaccattctgcatccaaaaacattaaaatgtttataatattatgtaatgtctaatgtagtacacaaactcaaatgctttagacaaatacctctcggttgtagacctgagctgggaaccagaagttgccactctcaagagaaagataccaagccatgattgagtcaactggtaaagtagtcctcactttgcaactcttttctagtttaggtgtgatccatgagaagggccttgaactaagaagagactcaaatagtccctttttcttgtcttgaccagagaggctgggtccattcctggaggccacttgacattgccattcttggtaagctgtatcaccaattactttaccccatttctgcttcaaatgtatctcccataaatggtcactagtacacctctcccttaaagaagagcaaactccagccatgctgcacaaacccgccggtgaaagccgttcaaagatgcactccaaggtcaattcaggcaaatccagaagggaaatcctctcattttcctctacattctctacccttgttgaacacaaggccatctttttcaaaacaagggtcatggggatttggacaaaactcaaagggatcctacttttctggaaccgggacacaagaaatttggaaaatttctcacaaaaccagattgacaacagttttagcacaccctcacataactggagtgtcctttgagtaaaagactcggaaagaaatatcaaagggacacaagatataaagaagcaaagcataggattgaatgagattccaaattttgagtttgacatcaatagtgaaaaacaactaaagaagaagaagaagaagatatcttcagatgaacacaagtgaatgtatccctttctattataaggatgcaaacacaactgtttaagccattacttctttggttctgaattatgattgagtgagaggtccaccaatggaaggtgtcacactgtgctagttaggcaaaaacggacagcttagcacttagcagaggggacctttctaacaaaactcatttaataaaacaagatatatttgtgaacacctcaaccgacaaattatggctgatggtagttaatacgcaacagactgaaactttggagtgatggtaaaaaaaaaatacacaacaaggcttcttcaatcaatgctgaaaagggtatctggatacagtgaattcccacaactaagagaaccaaactatgaggacagtggatggcggctgtcagttcaagattgaaaagatgtgagatacaaaaaaaaaaaaaaactgaatgaaaatggagacagttggatgaagaatttagagatggttatt

SEQ ID NO: 111625 - DNA, 5663 bp, Cannabis sativa
tgcggatcggattggatccaaaatatgaaatccgcacttagtgcggattagatgttgtttgaccaaaaaagtacggattgaatcggatgaacacattcttttcgtcacctctctgctacccaagccctcttctgcccgtggaacaacatgagattcggttataaaattcagtaaccaaatcacacaatttaataaatgtcaaatttccctatttatcaaaatattatccaattttacaatatttatgatggaaataataaaaactaaacaaacaatgtttcagtggttcaaacacatcagaagaattctacaatggtttgcattgaccaatgtcagtatcaatatccagagatttgtgtgtcttatgaccaatatgggtgtttggaacaaaatcataatattagcacaaaaattactagcaaataagacagcagaacaaaagcaattctaaatcatttatcttggattttatttgtgtacaaaccatctggaatcaggtttcataaactacatatcaaataaagcttgaattgaattttattttcaacttaatttaaaaaaatccacgagttcaaacaaatgtaagaaaggaaaagggattaaagacgaccaaattactactctttgttattattttccgaattaaggcccgatggcatgcataccaaatagaaatgaatttaagcatacaactcatccacattacactccccaagaaaaactttgaagccccgcggcgaaccacaggtgccttccgcgattagtgctctgtcatttgcagctatatgggcaataatcttgtaaatcatttcgatctgccacaatttaagttataaaaaagttagaaaaacatccaatccttgaacccctcttttcccatgtcatgatttttagcacatatattttcattgcaatacaaaactaaaccgtacgaagagcaagataaaagagtaaaagaaaaaaaagtacatatgtatacgtacatcttcaggagcgtggcaacgttcggcaacttggtccaaagtcaacggctccacaggctctttacagctgaatcatttaaagaaagaaagcttagtttcaacaatggagcaagatttctggtttttaaaaatgtttctcacactgtaatctcatgctttggcatgacgcaactgcgtcgcttcatcgtaaggacaaaatttgacatcgtacctggcctcattaagtactgccaaaacccgcttctgaagagccaacacttctccggctgccttcttcccagcttccacacctgagaaatcaattaaacacaatgaggtgaatgaggatgtaacacaaaataattttcaaattaaaacatcagttactaaatttatgatgctagagaacaaaatccctatttcacactcaagactcaatatctacaacaactgaaatcatggatactaaccaggttggtggtacgcattaatgttgacaactgaggcatatattcctactgctctttcatagagagctactagggcacctacagttctaggtgtcacttcttgtacagtaaccgtgattgattcccgatcattggcatatagagctgatcttgtgccctgtagaggattcagtgtgtgtgagttactactaaatgaaagaaaaagcatagcaattagcaggcaaaaaaaaaaaaaaggaatgacagtgttttataataaaatataacctgtagcattccaaaaaggtagtcaccacatgtaacacctggttcaagctcccagtcatgaccagggggcctatctcttagcacctcaatgaaagtcacaaaaaaattgtgcacaccatctctcagttgttgtatgtagctgcaggaaagaacagttactatctggctgagaatagagtatacatcaaggcagaagtgaccaatttttgtttttagagaatggaaactcacgcatgctgatctgtgctccctttgtttccatagacagtcaatccttgatttacctataagatcacaagattatttcaggaccaacttgatgttcaagacttgcaacttccaaatgctgcctataagaactaatccatcaagcaaaacatatttcacatgttgctaattttcccaataaaatacaaactaatacaaacaaaagactgcttacatattagtactcaactcttacccgattaccatcaagatcaaattctttcccaagggattccatgactagctgctgaagataccgactaaataataacaggctgtccttgtatggaagcacaaccatatcctgtaagaagcgaagatgaggacaatttaataaacataatcgagaaccaaattgaaaccaaattaaagaataacagaatttagaagagcgcataataaaagaaaagaagaaaaagattaagaatcaataccttggatcctactccatcacaagcccaataccagctcaatgcaagcaatgctgcagggttatctttcacctgagcaatgcgattggaaaggtcatcaaatctgtattaaacagtttaatccaactctttggcatacagaaactatttactagaagttcaacaagttgggcaagaaattggtcatctccaatgacagagtttagtattgtaccatcacaaaacaaacaagaagggatgatcagttgaatgttcaaagtgttatcattagcagaactatcaaatgtgggagtgagatagataaaagaatgtgatctaattggaaaagcatcttttccgtggcaatgtccactttgtctgcttatgcagaaacaacttccatcagacaaataaaacagatcagaaaggatgctcaccacagtggttctgttcgcgtcatccatcaatgctgcacccgcaagcatttctctaatgttaattccctaaagcatagttcagaatcagagaatgtttattaaagagttacggttacattacacaatgaaatgaatgtaccaacctgtagtgctgctggaagaagacctacagcagacatttcagatgtccttccacctacccagtcaaacatgggaaatctagctaaccaaccctcaattcttgcagtgttgtccaataatgaattttcttgtgttatggcaacaccctgcatgagaaaatgatatgataataggtaaagaggtccacacctagggcatatcaaatatcaattcgcatctgactaaaaatgagccatctacccaacaagacatagacagcaccaaagagatttatacatatttagcacgatgcagaaagacacatatttaagcagaaagaaaacctgagattaagacctgttttgcaaactccaaaccagcttcacgaaaggccttttgtacttccaataagccatttctagtttcaggagtacctccactctaagaaaaagagaaaaaaaattgataaataaattagtagcaaaattacaaataagatatatttgttgaaaataaattatattaaataaatacccaattataaacgagagattacgacaagcttgcaaatgctacttgttgtactcattacaattttacaatatggtgagctacttctatgatatagtaattaagtgataaaaccatttaaggcttccttgccaacatatttgttcatttgtttttaaacgaaatataatagagtgacattctcaaacaacatcttgagaacatcctcgtcctcttttcactttaaaaaatgaaaaatacaacataaaaacatagtcaagcaagtctttagtagtttatttacatatatatatatacatataatttatgtataaaatagacaaacaaaacatccatgtgaacctttgagatcactatgacaagtgtagatgccaactccgggccaagctgtgcaatctgatgatcaattcctgctggatctgtattgtctataaatcttatctgccaacaagagagagccaaaagaaaacaatcaactaggagttgggatatctccttttcctttaaagaagtaaataaataaaatatgttcctaggctataggctatagcgctctacataatacaagcttgttgtttaccttaagaggaggattgtcaggcgccagtgcctcggcaacaaactgtggtccaagagcagaaccaccaatcccaacagaaagtatctgagtaaagtgaccccctgagggtggcttaatctgcaaataaatcaaaaactaatctcaacactactactctaattgcaaaaatacttgcataacccaaatcgatggctctgtcttttatttggtttctcacaagtaacaaaatctttatctcaaatcaaattaaacacaataatatttttttgttgtccgggtgttgtcgaaaaatatgaactgtaacactaaactgaccttaccgctgacgacgtcatcggtgaaagcgcacacagcatcgagcgtgttctcaatctgtgacttcaaaaacgagtttggggcgcggtcagggctcctgagccaataatggccgaccatccgaccctcgtcagggttagcaatcgcacccttctcgaggtcgtccatggccttaaaagcggcctgcaaacggggctccatctggtcaacgaactcatcggtgaacccgacccgactcacatcgaggaacaagccaaggtctttatgctggtacagccaatcaacgtacctccgccaaagctcgcgggggtctttctctaatccattgttcttcgtcggaaaggcagacccatcggacttggagaagtcagccgaaatctcccgagccacggagtgagcgggagcgattcgaggagaacgagtcggtacggaaagggagtgcattgggagagagaagaaggcggcagtggctctgaggaaggggtttttgttgggtttgagagatggtgaagagaagcaaattcctgagatggaagccattgaagagtttagtttgagtttgaacagagatcaaaagaaatattttatactactccataattgagtttgacatagaagagaacagagagagttaagtttgagttcgattatggaatattttgtagtttagttttggttttgcagcgttgtacatagttcactcatctattggttggacgtttgaccagaatggagctgtttgtcgggtttaattacaagaatgccctcgcatattccttccctcgtgtcccacgcctcgtctccacctgtcactgctgctactacgcctcacatattcaactacccccaactaataaataaagaggagacaactttttttgtttttgtttttattaaaagcaaattaataaatgctgactcacacctactactactacattttttttaatttattttatttatttattgaacctaccttatttttatttgtctctcatccgtctaatgttttgttaaaatggaaaaatgaataaatccattttgcttttcatttctaacttttgtaatggtttttctttcaggattgtaattggtgacgcagaactgaagttgattttcttttctttttctaataaaaatcataatatttattaattaataaattcgttcaaaacaataaaacgcacttcagtcttccaactaaagcacacgatctgtagagaaataagagtttcttgccaagcaatgagccaacttatttgtaaattgttttacaaaacacaaattgtgaagacataaaatac

SEQ ID NO: 111626 - DNA, 8856 bp, Cannabis sativa
  modified_base (1047)..(1055): a, c, t, g, unknown or other
  modified_base (6500)..(6503): a, c, t, g, unknown or other
  modified_base (8824)..(8830): a, c, t, g, unknown or other
gtcgtattggtctaagttttacttagacaaggaaaggtcaattctgaccttaagactgatattattggctttgttggtgtagggttaaaacagtaaaatcctacagattgtaaaatgacggtattttgtaaatatataattatcatgaatatattgactatttctttattttccgattacctgaaaggcacaatagaaatatttgttctttcttcaataaattctaatatctagtggacctctataatccaatctttaatttgtgaggatagtcattgttgtaaaataattattaaacccaaatacatagatcatttaatgactttcttgataaaaaaaagacattaaaaatttatttgatatatattaaaaaaagatgacaacttctaattagtacataaattggatgcctgctagttaattaagcagcaacagctttttcattggactctttcttgggctcattatctggagtactcatgttttgggacttcatattggtttgatgggtaagtggaagcaacccatttgcacgacatgtatcaacagctcctgtgaacatgtcttctaagctgtatttgaattcgaatcctaaatctgtcagcttcttcgaagagaaatgcacatttggtatgccctcctctatatctttgaacctaatatatataattaattatagatcattaacaaacatatccaagcataataatgcatatttcgcgtaagaagtaactcttgtgttgtttatccttttgctttatttcttgttttctgttttttttttcctatatatgttggatcattggttttatatgtttgaacattgccatcggctaagctagcgtttgggctttctaggttgtattttacaggggatcgttcctcagcatcttggtatcatttgaattgtatagtcaatccattgttatatctaaataaagctaattagtatttttgtccccgaaattttgatatgtaccaaattattctcactgaactttgaagaccgttaaaaatttactataaactattgagattgttggattnnnnnnnnnttgtctaattttagtaaaaaaagtctaacataacatggatgaaagttcagggggcataattttagacatgtcaaagttcgagaggcataatttagtagatattaaagtccgaggagcatgatttagttcatagacaatcatcgaattagttaaattgaatgaaattggacaaaagttcttaaatccaacaatctcaatagttcaggaggaaactttaactggcacaaaagttcaggaaacgtgatttggtatatgtcaaagttcaaggggtaaaaatcctaattagcctctaaataatgacctatttgtagttacattatcctaattttctcgatatatttaaaatattaccgtgaaatttgataataaaaatagtgataagagtatagggagacttacttggtgggaatgttatattcagggtacttgtcttttaacaatttagcaagttcatatatagtagcatcatgtgaagaggcaatatagcggccctcagctttcgggttctcatataagaaaatatgagcattgcataggtcatccaagtgaacgaattgtccttgctttataatgaagtaatgagattcatttcctgattttgattaattgtttaattaattaacatcaatgaaattaatggtgtaattaataaagataaaaaaaaacatttattcaaacctgttattagtgaaagccctgttatgaggcttggaggcatagatggcatgagaaatgggccaatcacaagtgttgggatgatagtaatgaaattcaagttgtgtttttttgcatattcccacgcagcctgctcagccagggtcttggaggtaaaatacatctatagagataataaattagagatcaaaatacttaattgttaatattcaaatataaaaaaaagtaaatttacaaaataaataaaatacccatccagtcatcttgactttgcggcaaaagtcaatgtcactccaagaagattcatcataggttggtttttgaatgggttcaacgttaacagttccagctgatgaggtgaacactagtttctttactgtctttgcttcaacacatgctttcattatgtctaacattccacttattgttggcttaatcacttcattctgtcaatatcaaaacatttttttaaactcaaaatatgaatacttcattacatgaaatcagctactaaaatagaaacgagctaaccaatcaacccttgattagcccaccgtatgtacaacaataattaaagacactaattaaaataattcctatatataatattttcacattatagactttatcataacaatttatggaaatatatcaaagcaatattttaattctatttttcatagcaaaaatttcaaactaccgagcagagtaacgaaatattagctatttaatgttaataaatgggtcaaacaataagggaatatcaatagtggtccaacaaggccatactcataccacttcaaaattagattcaagacaagttatacattgcaatatataaacctaaaaaaaaaaaaacaagaccatactcacttggtcccattttctacttttactaacaaaaaaaaaaaagtgtacttatttgtgaggtgtgttttatgtggatgcaaatttagtattctttacttttagaaatatttattggtatcttgtactttgaaatggtttaaattgggtactttaaacttaaattgataaataaattttcttatcaaaatcaaactgtcttcaactatatcagttctaaattcaagtttaactatttgactgtatataattaagataaatttagttaaattgataaaattttgttcattaaatttaactttaaagtgtccaatatgcacaatttaaaaatacagagcacagccaaatgagtattgttgaacacccaaatcccaaagtacagaaagtgtatattcagaacaatcaatattatctaattaatgtttgagattcaatatatatacatatacactcacacttctttcatcgtatatttatatatataaataaggataagggaaattacctcagggtccttggactcaaaatccataggtgtggcgacatggaacactccattgcagcccttaatagcttcatgaaaacttccttcttcagataggtcagccttccacagagtaagattagtctccgccttaggtaactccaccaaatgcttcaccttcttcaagttggctacacattaatatataaccaaattaaatggtcaaattaattactaattaataataatatgtaatattgagtaactaattagttaattaggaaccgaactggggtcacggacggtggctcggacagtgtaaccgaggtggagaagtgtcctgacgagccatgaaccaataaaacctgatgccccagtcacacaaacggtttcacctttggacaccatcactcctcctcctccttcctacacaatatataattatataagtatttactatacggtagtgttgatgatttaatttactgaatatatatatatatatacacgtacattataagttatactgtcatcatcacctacctacgcagcgaagcgcagctaacaagcacgtgtcatcgattggttgtttgttatgaatattgagacttaactttcaactcaacgtgctctctctcctaacggtcaaacctccatgctccatatattaaaaaaatgataagcctgtgttttgcaacttaaggtgctattcaggtaatttagtatccaatctaagtaattttaattttatctcaagtaattttaattttatgcaataatttttataaaatatcgcaaattaattgtaagataccactaaatagtagtgtcgtcgtgaaagtttgttatttgttgtagttaagttttgtggttatgtaggggaaataatatatataagtcttcactcacaagagtcacattattaatgtgtaaaaaaataatatagaatatataagatgaatgaactatatacatctcattgacaattagttttgagatggaagttcattcaccttatcttaacacatcataatactatttttttttaagaaatgcaaaattcattaagaaaaatttgttgttacagaataattcaaaaatcgaggacaagtatatgtccaaacacactcctaaattagtaatagagattgtcaatgtatgggcaacaccattcgctgatcgtggaatggcactacaagaaccaccaccaacagcaattaataataaagaatagatatctaataaaatagactgaaaactaaaattaacgtaaagcttattaatccaaccgattgtcacagttgaatcactactaataatggagatattgaaaccaaactgatgcgcaaaaactaagcccagacgaatggcaagtagctccgccgcattagccgagaaatcacctaacacatctaatgaccacgccaaccaacaaactacaacctctgcatcacgtatcactccctccaatccaacaaagtccctccccagaatcaccgaagcatccgtagctagaacaaaagattcaggaggaggtggcatccatcgagtagttcggtttacaagtgggttcgcaaggcccgatcccaaatgaaggtctcatcgatcatactccttaaactctgccatatggttattggctaattagaataatatacaatcgtgactatttgttgccaaataatactgagttcctatcatatcacagccaccaaagggttgtcatcatcaattccaaagcctaacgggatagcctgtcaaagagtaataggagaatttcttgcattagcccatatgtacatcgacggagcactgaccacacccctaaccgatgtcacactagaatcaagccagaacagaaaaatagagcatgctcaagagtttcagattcttctccacactgagaagagcaaagaggtacccaaactttcaaaaagataagttgtgtcactactggtaacaccaaataaatacaataaatatatatactaagttaggttagcgcgtactatgcacgtgcctagctttctatattttattttatttatatttttatgtattttcataaataattgtagcaaaaatttatgtaatttaattgtacgtcttaattatagtgcaaattataaaatacatacgttattattatattagagatacaaaagtaagggatacagaccgtatgaacattgccttttatattataagttattgtaaattttaaaactttgtaagatgtcttaaataactataatatacacgattataaaaaaaataaaaaaaaaagactaaaaaattctcatagatgccaaaatagtaggggtgcatcggtacactctttttaggggtgcattgtaaaagccttcagcaatatatactaatattaaattttcaactggtaatcatttcaaaaaaaattagaaaaaaataaaatttagaaaaaatctgtcgttcaccactctaaaagggagttctagtagaccctcttgtttgttttggcatccaggagaattttttatagtttatttttctttatgattgtatatgttatagttatttagaactacctgtaattttttttagtaaattctaaatagtttataaagtcaaaaataaggtttaaatattttgtatatatatttataatattttgagcatattgattttgtatatataattataatataatgttatttattatatagggtatgagttaaatagaattaaaattagttttaaagaccaaataggaaagaaaattaactttagaatatttctagttatagtataaaattaaataagaaatgttcataccaaagatatctaaagtattatgtttgtagtacttaagtacataccaaattattcttttagtaacaaaagcatttaaattataatgcgtgtgtactaaattatttgattagcaacaaaaatattcaacttcttaaatttacaacacttaagtaataattaatttttttttttgaaattatttcattgataactaaaaattaaaaaaatacaaaaaattacaaaaatatatatctacaatatttttaacattttaaggattaatttttttttctttaatttttttacaaaaatacgaacaattattttttggttgttctcaaaacaaaattgttttcacattgctgtatgtttgcaacttgaaaataattatatttttcgaaaaaaaaaatgtaagtgaaaaaattaaaaaaaaaatgtaaaagagaataataaaaaaaagtagaattttaagtatttcgtgtaaaaattgcattattttttaggtattctgcatacgtaatgtcaaatttgttaattgggtactattaatgcagatttctgttaatcaataaatgaaccttaaagtaataaataaaactctagaattaattaaataaataaataannnnaataataataacaataataattatgaatggcaagaggatttttagcgtggttttgaagttaattcttcatagtctacaagtccatcttattttggaatttaataaactgtatacagaatataagaaaatattgatataattctctcttttctcaaattggtcatctcttgttccctaggttctaaccctatttatagaagttttagggtgacaattattcccttgggaacttatccttgtaactgtttgtgaaacatggatattctccacgttttatatttacatcacatggaataatagtaaataactgctataactattctttatatttatctgtaaggagttatgctaacaacactttattaatcttgtaatacaagtaatcttcttaagaggttttattttgatatcagtgcctaagtatactctggataatacctctcgtgtccttctgtaaatgttgagagaagcaaacacgagatattatcgtagtgttaatcatactttctgttgagtattctgtgtatcccgagatagaccttcttcgttggttattcatctcgctggtcccataaaccagtagttagtattaacgactcatccttatctttaaaagggtgagtttgaatatttgtactaattatactatttaagacaagtttattgaatggattagttgctttataacaagaggtggtttatattctaggtttttaacacgtgtcatcaccatattaattgctcaaaatatgggcataacaatttctccctataaaattctttttagaataaaaatgactttctaattactagagggtacaatcgtatttttctcattttaaaggagaatgcatattttattttggcggttcaatacttcaaggtaaacatcattttagcatttattattctgactcttcctttctcaatagttcccatttgtttgatcagtcatcattacgatcgaacggtttctattgtttaggtataaagtctgaacctttcccttatttttccattaccgtttatagagcctcaattttaaatttcaaccattttttctctctaaaattggatgccctcactatccctcacatacttcctttgagtttctgtcgatctttttcctcaatcccaaaattgccacggttcaaaccttcatcttcaggagtgttcaacaaggaattcttcaaaaccatatttctttcaacgaaccagtaagtgaattttcactatatctctttttattgcttttcatatattttttggcatcatttatcactctcatgtgggatttatatgatttttagtaacttagggctagaattaaggttacacaattcgcatgtcctgagttttcttgctctgttttcaaaaaaaaaaaaaattaggtcattttctattttgtgaccaagacaatgtcccaatctgatcaataatatgcacacccagacctggtagaatttgattatccccaatttcaagccatagtttttaaacctcaacatcgtgaaccccaatccatacttgagataaatgataaaaaaattatcaagcacaccattataggattaatcaagaagagacatccactcgttataggcgacttttagataaagttattgagggtaaacgttgttatctacgagaagaaacttgcctaagttttccaatttagtaaaaatctccttagcaagatcattattttcacccaaagtcattgttgcttttccaccaagtgatcttgaaaacgagattatggcttctaaagcttgaaagtataagatgcctcaaaatccaagagttaccttcgaggcagagctgatcaagtctaaggtcagattgattgccccttcataggttaacttttaaggttttccccgtaactcatcttttgaatgacgaaggctacagtatcagcgactcttcaaggataggagattggactgtcgagcatattaggcaggagctgtccttcctctattaggtaatactttaaggatttttgtagctacctcgagattgcgccctttcaactcgtacccaactcttacttaatccttgcatgcctgaagtcactctacccagtggcggacccagaatttaaagtgagagaggcgtaatttttttttttttttgtaaagcaggagacaaaaataaaaatcaaaataaacaataaagtgttgttagtgggttttgaacatttgacctctaaaatatatgtaatctactgtaactattacaccaagcttactattatcatctactttaaccattataccaagtttatgttggaaaaatttttaccaggatcttagatnnnnnnncaagtatgtttattaacaccctagat

SEQ ID NO: 111627 - DNA, 5941 bp, Cannabis sativa
ttttatcattttaaaaaatagatgtacttataataatagggtaaatagcggtataagtacccaaaattttatatttgtaagcggcataaaccaatgcttaaatagagtacacacattaatgtttgtaaaattttaatttttctggcacacataagacctaaattcttgatcattgggtctagataaaaatatgtaatatcagttacttctaaatattattttaataaattcaaaacagagtctgtactttatagactgacgaaactggaagaaaattacagttttacaaacattaggtacttatgtcgctaaaaagaaacattgaatttatgctgcttacaaatataaaattttgagtacttataccgctatttacccataataatattacttttctccttatcggtggtaggcacatctaaatttttagcaagaagttataatttgtttatttttatacatacaatgatctacactttaagtatagtagacattttatttaccttttaaaatttttaaataattaaatgatttcaaagatttaattgcatacatatttatttcttaagacaaacatgatgtcctaaatttaaattctcctaaatatttatatatatatatattaataatcttttaaagcatgcaaacaaatagtaaaacgttgatgcataaagaatatcaatctaaactcattcaactaatattattggttaagtaccgtaaaaagtatctcaaaactgaagcacatgaaaaattgtccaaatatattatattatgatatattaaacgagtttatccaaacatcctaaacattttaatgtaataaaaagccttaattatcccaattccctccccatgtttgaaaattgaaaccagtccactcaagtagtgacataataatttaataaatggactatactctttaacggtgtgaaaacaaaaacaaaatatggtagaagtcataacactaaattattattattatatttacatttttcttttcattattttgtcgttacctttgatttgactaagcattatttgttttcattttcaagagaaaaagtcttcatctttcactatataattggtatgcaacttaattctgttaagctcattcaggcaaacctgttgttgtgtttgtaataaagagagaagtgaattgagaactgagaatggaaagcactatgaaagaaatgagggatggtgtttcagtcctcgacttggaccccaaatccaccgttggtggcggagttgaggacgtgtacggcgaggatcgtgccacagaggaccaactcgtcaccccttggaccttctccgtcgccaggtgaactagtcttttttttttttagctttaccatattaagggtggtgactagtgatggtgatcagagctgatttattgttaattttggagttttgagattatatatttacttggttgaataattgtccatgtttttttctatctgggtttgtgtttaaattcttgggaccctcttaatttggtctaagtatctagaaaaaaaaaatttaacgattgttgggatattgtgattgtgatgtagtggatattctttactgagggatccccaacacaacaaaggacttgcatttactcaaaatgaaagagactcccattacttgcgagggcttcttcctccggctgttgtgaatcaagagcttcaggtttggttttggaattatggaaactaacatttatgaacaaaaagtaaaagtgttgacctttaacctttaattttctcatcaccaggagagaaagttgatgaacagcatcagacaatatcaagttccactgcaaaaatatgtagccatgatggaccttcaggtagcattcttttttgttaaatcaatttagtcgaggtttttcaacttgaaatctgcataatgtgtcttataatatctcctgctaagaagtgatcttttcagaattaaggaaatgggaggtggttttttgtttttttcaggagaggaatcaaaggcttttctacaaacttcttgttgacaatgttgaggagttgctcccagttgtttacactccaacagttggtgaagcttgtcaaaaatatgggagcattttcaggcgtcctcagggtctttacataagtttgaatgagaagtgtgtatagttgtttcattaccctgtgaattcgaacaatttagagtgggggagttcattagactaaatttgaaacttttttttataacttttgtaggggaaaaattctagaggtgctgaagaattggccagaaaggagtattcaagttattgttgttactgatggtgagcgtattttaggacttggggaccttggttgtcaggtatgaaagatgtttaattaagagtttgtttgatcatcagaagaataaagtaggcctcatatcatatgaccttaattttgttcagggtatggggattcctgtaggaaaattggctttgtacacggcactaggagggcttcgtccttcatcggtaagcatttttcaggatatagtttccacattttagttttgatgcattaaatgatccagctttgtaagaaatttgtgtttccttttgtagtgtttgcctgtaacaattgatgtggggactaacaatgaggagttgttgaataacgaattctacattggacttaggcaaaggagagcaactgggaaggtctagtaacttcttgttacattttattgatgtgtaaggttatagtttccactttcaaaatgcagttaaatcagccttgagaatctgtttgcattatgtacaggaatattctgagcttttgcacgagttcatgaccgcagttaagcaaaactatggggaaaaagttcttgtgcaggtaaacatttgattttaaagctacattttcagcatatgcatggatttacttgaggttttcagcattctatttctgttgatgtttgcagttcgaagattttgcaaaccacaatgcttttgatctgctagcgaaatatggaaccacgcatcttgtcttcaacgatgatatacaggcatgaagtagatttattgtcaagcttgtacgtatgaagacttactattcttgtccttttcaacatgtttgaaagaagttggatatttttgttgcagggcacggcttctgttgttcttgctggagttgtggctgctttgaatttgattggaggctctttgaatgagcacaaattcttgtttcttggtgctggggaagtatgaccaattcttctcttcacccacttttcttattcagtaatcgattttacaattggaagacatggataaattttgatgttggattttttttttcttagctttatagttataattgatattaactgacctatttgtggcttcatgattgtaggctggaactggtatagcagagcttatagctcttgaggtttcgaagcgggtaattatcttactgcttcagaattgtgtcatatgtagttttggttaccttggattttagcataatagtttatttgtcacttgtagacaaaggttccgttggaagagacacgaaagaagatctggcttgtggattcaaaggttgcataaagctcaacaaaataatgatcttaattgataatcattgctacttttcttttctgtttcttctcttcgagttttataaatccggtaaactatttatacagggattgattgttagctctcgcaaagattcacttcagcactttaagcagccttgggctcatgaacatgaacctgtcaaggatctcctaagtgctgtcaaggtaagttaatatttaaatacaattgaatcccaatcacaatatttaaaagtagttgatctttcattgtacttttgtacttcttcaggcaattaaaccaacagttctcattggatcttccggggttggaagaacatttacaaaggaagtgatcgaagctgtgtcctcctataatgaggtatccctccctcctgtatttccttcccctgtatttttccttcctctgttgtgttatctctctatttccatctctcttcactgacattgctgtaaatgaatgatttgcagaaacctctcattctggctttgtctaatccaacctcacagtcagaatgcacagcagaagaagcttacacttggagtgaggtattcaacccctacttctatctatcattccttagtcaaggaatttagtttccaaataactagacaagatacaatgccagaggacataacattaacctctcttttggctattgttttgtttataggggcgtgcaattttcgcaagtggaagtccatttgatcctttcgagtacaatgggaaagtctatgtctctggacaggttgaaatattccctacttacactcttacaataaaagttagattctacttagagattactctcaactttgcatttttattttcaattcaggccaacaatgcttacatcttccctggattcggtcttggtttggtaatctctggagcaatccgtgtacatgatgacatgcttctggcagcctgtaagtggataaatatttgtgaaacttttcattaaatcagaaagaaaaggcccaaatttctgtttcttatttagtaataggtgtgggaatgagagtaaattggcaaatgattaattctctttcttcttttggtttctttttgtaaaacagctgaagccttggcaggacaagtttcaaaggagaattatgatatgggactgatatacccaccattttctaacatcagaaaaatttcagctcagatagctgccagtgttgctgccaaggcatatgaacttggtaagtgttccatttctccaaccaagatatgacacacaaatacatatatattatttagtttgtatttaatttgaatttcgtgtgtatgtttatttaggcctggctactcgtcttcctcgtccggctgatcttttcaagtatgctgagagttgtatgtatactcctaactatcgcagctaccgctgagcaatcagactagctttgttctggccctttgaaagccttttcttttaaatttcactatgagagctttatcatggtagtgtgtttatttgtttctaccatctttaatgaataaacatctgaataacaaatttgtaaggactcttataataatgatttgaaagtgtccctttgttcagtgagaggatggtttttgtatctaaactctactatgtataatagcttaaatttaataaaatgtcaccagtttctttcctaaatagtaaataggcaaaccatagacagttttgatcactgaaggcatctccaattcactacatcaaaaacacttttaccttattttaatataaaatatctctccaacccaaaatcaaatttattatcattttaatgtaaatgcactattaaccactaacattagtgtcaccaccatttcatttgagaggtaaataacacatagatactcttatagttgttacaatattatatttatatcattttttctattttaatttaagtttcttattttcaagatttaaaatttataaaaaacaatttaaaagaaaataaaaaaaaaaaactaattagaatttttgtcccctaaactttgacatgtacaaaatcatgccccctgaacttttaaggtagttaaaaatgctccctgaactattaagattgttggatttaaggacttttgtccaattttagtaaaaaaatctaacatggatgaaagtttaggaggtatgatttagtacatgtcaaagttcgaagggtatgatttggtagatattaaagtctggagagcatgatttagtatataaacaatcactgaaatactaaaactgaatgaaattagacaaaagtccttaaagtcaatattctcaatagttcagggagcatttttaacgactttaaaaattcaggggcataatttagtacacgtcaaagttcaaggggcaaaaat

SEQ ID NO: 111628 - DNA, 1708 bp, Cannabis sativa
tatatacaactgacatttgcaaaaacacagtttttcacttagtgtagcaagagaatgaaaactgagtttggacctgaaatcaccgaacttgctgttgttgataagtttggtgaagaagtctacagtttgagctgaggcagggacctgcagtgtaggaagaagaaatgtgttatcctctgccaggagtaggaccactacgattgtactggttgtgtatgttaccaccctgttgcactgaaccaccatactaattgggactacttcgaccaattccaaatccttgcatttgagaaccagtaggattgctgcagatgtaaggattatggcctggatgtcttgtgtgagattggtgagcgttcccctttactaatgtccagattcttggcatttttatcaattcttgcagattgtgccataagcagggcctcgatctcagctacagagtaagcatcctttcttgtagtcacagatgtgacaaacacatcatactctggtggaagaccattgaaaatagcttcaatatgatcttgagccgtttgcttgtggccgattgtagcaagaagatcaacaatgtttttgatcttgagcaggtagtcatttaatgagccaagcatcttcgtatttcgaagctgtattttgtacggactgatatttgcagcattgagagctatgtagtactcatgtaaggcttcccaaatctgaggagtggtgtcacaagtaatcatacaattgatttttttttctgaaacatagaagaaagaagccaaaaaacaagaaggttgtcttgttgttcccaatcctcgaaagcagggttaattgtgttagtacgttcatcatcacgagttagaaacttatgaggaatttgagtagaatcaagaaatttatgaagacgactacctttaatggatgcatgaacttgatgtagccatggcagaaagttgtgttcatcaagctttatcgacaacgaatgtgtaaaagtaacaggataggatttaggaagagacacttgaggattttggagttgagcagtgttcaaacttgttgctgctccattgaaggattttgtaaactccatggatgatcctggagctctaataccatgtgagattagagaggaagagagaaagggagcttttgtacagagaaagacaattctattattgattgtattgaagtattacatgaggatatttatagacatagagaaagcaacaacttctaaccatttcataacaaacacaccaattgtcacaactaacatagtgtaacaaaaataatagaaatttaactaactcccttgacaattactaatcaaaataatcttaataaatgtatatacaattaggagtggacattgggcatcacttttgctctaccgtaggatatttggcattgagagattttaattttaattttaatttttttgcatagtatatattatagttataataaatatcttaaaattctgaataatttactatgtaaaagatatagttaagatagtaaaaaattaaaattaaaatagtcaattgcatatatataaaataaaatacacaagtgtgcaactgattaatattgaaatttttgtaatgtaaattattcaaaatttattgaaaataaacaagatacctattataattataatttctctgtatactaaaaataaaagggaaattttcatatatatatatatatacgtaatttacaa

SEQ ID NO: 111629 - DNA, 2043 bp, Cannabis sativa
tcaacatccaatattttgaatttttcaatctaatccaatccgcacaagtgcggatatctgcactttacgaattgaattggattgaattgtacggtttggattaaatcgactatgaacacccctaactactaataatattatatctaacaagagagttaaacaacaattattttagtataagaggggccaaataaaggacaaataacaaaaaaaaaaatgcaggaaggtaaagagggtataatggtaatttgcagattgacactaataaaattatgatgaggtggaagtgagtagtgaaacacgtaagcagtgcacatgcatgagttgacccacgtggcaatcattaaaaatatcacatgcttattatcgtggcttacttccacttctttcttatttttctaaaaaaaaatcaaacaattaacgacaaaattaatttaataatataataagcatttttttttgagaaaattttgttggttaaggattattttataaaccgattttgaagaaggaaaaaaaattatgtggaaacttatttattttcacaattttattttcttgcaatgtatttttacaaatttattattttaattgaattgacaaatttattaattaatattaagaaaattgtaattttgttaagagtattattattggacattaatagtactcgtcattttttttataagtgaaactctacaattaattaatgatatttattaaaatttatttttttaaaaaaaatactaaaaaatattaatgatatctaacattgtaaataaataatattttttaaaccattctcatttaaagattagaaaatatctcatagatacacatgtttttcggattttacgacaaaaggaaggtggtggaggattacacgacactagcatgggtggggtccatcaataaaataattatcataattaatatatcttagaaagtgactaatttttaaaatttcatgggactattattagttatatttttattattttatgtttatttttatttttaataataatgttgctatactattttgttattgttatgttattttaaaatttcatgggtagggctttattcatttatcatatgatattttagtcttgcttctttttggaacatggaaagattttagtcttggttctttttgggacgtgggaggtatctcaattagctcaaaatatatttgcattagtaacatgagtattcttattcatgttctaatatggcgaattctcatatttttattggctccatgaattatgtgcgattatttcttacgattgttattggaatggttgattgtttcattatttctttttattctagattgaacaatatagagttattattaccatatttttattattcttcgcgcttctttgatacttcaagtgctgacgatttattagtattttagttaaaagtactattacaattttcattcttatttttgtatacaacattatttatctatactattgtttaatatgcttattataagaatttttatttttctcaaaaataaataaatctaagggaattatcctatatactagttttaactttttttttttttttaatttacagtttggattgctccgatagtttttctagtagtttctacgaggattactacacggattttgattgcgatttagattactctattagctattataggtatttctgtatgaaattccgtaaaaatacaaaacaaaaaaaattaaagtgtaaaataaaaaaaaaattaaaaaaaacccataaatctaattgccataatattatcaaataaatatttggctaattaagattttttttcccgaactttcacatgtgtcaaatcatgcccctcaactattgagattcaattttactgttttagtgattatttttatattaaaccatgctaaacagactttgatatctatcaaatcatatcatgtctctaaaattttaatatgtattaaatcatgctccctaaactttcatcatgttagaatttctcaaaaagagaatttttaacggccaaaa

SEQ ID NO: 111630 - DNA, 5663 bp, Cannabis sativa
taaagcttctgtaatatagtatagattatagatagcagttagtgtgatgaagtatattatgtgggttcttaatttttttggttacaaatatgagacatgataagttaataatagtagcccgaactaccatttatatattttaaggaattactacaagtgctacgaatggatacttgaaggtctttaaacataggcacaattttctacagactcatagatagttatgttagttttttatttatgagaatgcagtatgtctgtttttgttttaagattttgactatgattaagcgagtgatttccagtttttcttttcttaacctgtacatagttttctttatgctgatgaaatgacatttgaatcgcaacagggattggcagatcataaagatcaattgggtgcacctctttgtccttgtcggtatgtaattggtattctctgtataaaattttcttttaaatttgtcttcacacttcagcatttccagattcagtataacttctacccagtttctagattaatatgtttattgtgttatttgatcattcttaaacctacttggcataatttttcaggcattatgatgacaaagctgctgaggtgggacaaggtttctggaactgtccttgtgttcctatgagagagaggtaaagatgtttttgttattataaactaaaatcatgaatgaattagtcatttcagcatgtaaatatattcatttcgcagtagctcttttgatttttttctttctaaaaaagaataacaaatgataatttggattaatctggacatcgattgataggaaggaatgccattgcatgctctttcttacttccgacaatgactttgccgggcaggaacaggtagtttactcttgttgatcattaatccattattattgttcattcaacataggacaagcataacaaaaccgtgcttaaataatatgagatcttgagagaaatggagtaggaaaaacaagactttacaaatcgtcacaaaagagaggtatctcaaactgtcttgcttatggtttctgaagttcatacacctgcatatcaattgtctagaacttccccgtgggccctacccccaacctagagtagttatgtggggaagtagaattaagctacagtttgttacttctcaaaatagggttattttgtatcaacaacacctacatacctttgaacctgggcctgccaagttggagagatttttgagttaaagaaaatggagttatttagtattaattataaattactagcactgctgctatctgaatccaatatcttcccttgcaatgcaggccatcactttggaagagatcaaagaatcaacagctaatatgtaactgacaaatgttttaattgtcactgtcatgatctgtatgtatgaatgtatatctcataaaaaccaatctaaaaacgaatgaattttcattactctgcctctgatgtagtccatatttgactcctgctcttcgttctactacacttgaaacacactcatacaggaggttcaataatacaattgaaatgaaaggaaggtatgagttttattctttgaaattgtttcaaactaagctcaaatatgctgattttcttgaatttataaaatagagaaattccaatctgtaaaatcatatttgaattaaattaatgaggagttagacgtagtgcccactttttgttttcacccaccattttaatgataaaactccggcgattctctacaaaagcaacacatgcacattcatgttctcctttcaagctctggttcgtcttcttttcctaccattcttgctacatgttcttcatttgtgatttcttttccatttgtttatgagttttaatgatttttattcaatttttacggttttccatgttgttttagtgtagttgagttgggatgagttatgatctttattatgtgtacatttgaatgagtttcaagcacgtctccacgtgtttaataaaactcatcaactatagttcatctgtttgaaattttttgaaacgttataatttgtcacaattgagtagtaaagcttttttatgagtttgatgatgagagtacagcttttattatttggttacaagtgagcaggatataatagaagggttagttaaagctgatccgtattgtctaatcaattgctctgtatcttgagacattgtttattgtacaatatagtagccacttgtgctcagtttataccagtgttctctgtggacatagaccttaaattgtgtttgcttttaatagtagatttcgtttcatgtttatttgagttcattcatatctctaaattagtaattttgtcttagaagttaggaaatataatggttcacactatgctaaagaaaatgttaaaggacagtttaagatccaacactccaactaagtgtcttagtgggttagtttttggaagcgtttaacacgtattgtgttggaggttggaggttacgaatccttggttatgtggtggggatgtcaacaaaattcttgagaacaaggggttctcggggcagaacgcttatgcacaattttagaggctacagtttgctgtggtatttctgatttggggtttgaaaagcctcctttaacgtggtgtaatggtcatgggacgacttcatttgtccaagaatgccttgataggatgctttgtaactcggcctggacttccctttttctcattctttgtttcaccatatgagttactatgggttggataacaagcctttgagtcatattgtagggatcttatcaaatcaagttgggttaagggtgatgacgcttttgttgctagtgtggtgaacaatgttgaggaggtagcgtcgactctttctgggttgaacaaaaattgttttcagtttcattgttttgatattaatgccaagaaaaaggagctggatcgtctttatttgttgttgtttaaagaaatgtggcctatgttcaaaaaggtggagttatcgtcgtgatattaatgccaagacgaaggaattgatgcatcttgatttattgttgattaaagaaacatggatgtataaaatggtggagtctcaacttgatactttgttataaagaagagcgttattggcttgccctgcaagatcaaagaacaaatggctcaaagtgggtgatcgtaattcaacttactttcataagtgtgcttcgtcttggaaaaagaggaatcacattgcgagtcttgaagattcttttggggtggtgtggatgtttatggaaggtatgagtatggtgcttcatgattatttctctactttatctacttctgatcgctccttgtaatgatgagtttcgtgaagttcttgataatgttaagtcacgagtgactcctgtgatgaatgattttctaattcaatcctttgatgcagaggatattagaatggctcttttttagataaaccctaataaatgtcttggccccaatgggaagacgattgagttctatcaaaagtatttggaagagattgttgttagggctagtttaacacaattgtattgtggggaaaaacagttgtagttgtgttgggagaaaaaataggtatagcagaattgtgaaaaaagctaagttgagtataattattaattttaaagtgttgctagttgttatgattctattataatggtaatggtaatgataattataatgtaattcattataatcacaaaatatataaaaacttatattatataaaattccaatacatatttagttatttttttcttaaagtataaatttatatgcatttgataaaaacataattataatattttcatcacataaaaaaaaaaaaaaaactcaagtatattctagcctggtgtatttggacccgcctacttacctttggctcctcacttgtgtgtatggtcctttaagaagaacttttggttagagattatgaagatgggtgacaaatttggtggcccatggttgataaggcgacacaaattttgtgcttaatgattttgaaagagaaggatctaaggggagagatcagttcatcccctttatttatgatttggtgaactcgtggggtcttattaatttaccaattcaaggggataagttaacttgggataatcatcattcgagagaggttgcgtaaagtcagctttagacaaggggttactcatagcaaaaagagtcttttgatttctttatctctggctctatccacaagggggttgatgctactaatttagtgctcattcccaagatccagagcccgaaaagaactcatcattataggcctatatctatttgcaatgtgtcttataaggtcatctctaaaatcattgcgaacagaattaaccctattcttccaaggctcatttttcttacctaagctgtgtttgtgcccaacaggaacatccaagacaacaatgttatcgttcaagagatcatccattctttcaacaggataacatgcaaagagagcttctttgtcattacaattgatatagtgaaagcatatgataagattagttggcaggttattgagcatgtgcttttatgttatggggcccctgagatctttcataactggatctcccaatgtattagtactactctgaacgtttgccttaacggatgtcaggtagggatgattactccttcttgtggtattcgccagggggatcctctctctccctacctgtttatttgggtagcacaaatgttgtcgagacttttagaggacgccatgcgtattggtgatattaggggtattagcctcagtcgaggcggtccaaccctttcccacatcttctttgcagatgacttaatcttggttaagagggccacttgggggaagctactgacaatgccttgagagatgtttctcctggtccgaacaacaagtcaataaactcaaaacttcgtttttctttagtaaaaatacttatgaaggaatgaaataagggatcatggaagttttggggattagagtaccggaaggcaatgttaaatatttggggctctccttattcagatccaaatagaaggatgctgacttcatctttattttggataacctcacctcaaaattgtaagggtggaaagcaaaatcactttcgaaagctgggcgtgtaactctcatcaaatatgtgggtcattctatgcctatatatgccatgccaactactaagctttcgaattgtgttgttcccaagattgatggcttggtttgagatttctggtggagctttgagaaagggaaccatgggatccatgtgaaagcttgggataagctttgccttcccaaatcccgtggcagcctcgggtttcgtaaaactatggagatgaatcaggccactctggctaagcggggttggaacttactaagcggcagccagtctttctgctgtaggattttaaaagtcaagtatcttaatgggaaagatctttttaactgtaaagcaaaagactcggactcttggttctagaaaagtgtggtgaaagcaaatgatatcttaagaaaaagtgcttgcaaagtggttactaatggaagagatactagtatttgggaagattcgtgggtaggggtgttcattggatcacatccaatgtttttaggcatatccagattcgatccaatcatatattggatgttagactttaccatccgatccgatc

SEQ ID NO: 111631 - DNA, 8697 bp, Cannabis sativa
ggttacatatttaatgtaaacattaaaaccatattcatacatatatatgtaagtatttttttttgtaatttatccaaattaatttaacacgataaagtccaagttaaatacttggtattagtatcaatcaatataatctttggaaaatagtagcaaatgattataaatctccttactgaagtttaatattcttttttaaaaataatatagtaaatgacttttataattttttagtaccgaaaattttcttaattatataaaggtattattcatattatatttattctctaaataaaaatagaagctctgttctaaaatccaaataataaagcctccctctccttcattttttctagtttgtttggagtttttcaaaaatttcttaaaaattactctgattcctctcaaaaggcaatgaaatattcttctctcatctatttattcgattcattcactggatccaattattttctcataattcctcataatcaaaggcgacgaaactttgctcatttttctcttcttctggttttctcacatctccaaattacaatgagtgctcccaaacaacgaccggagtctcactcaaatttttctgtcggtggtatcataataaaaaataaatataatacagtaaaaaaattatatatacataaaacataatttaatattagataagtttttttttccttcatgatataccaatgaacataaagacaatattccgtaatgaaatataactacacctcaaacttaaactaatattctatgtttttttaagttccccctttcgttcattatataccatagtacatcaaaataatataccacaatcttaaactaatatactactttttagtttttttaatgtactattacacataaaaatgatatactatttttcaaaataactataccaaatattttaaaatattataccacaaactgaaaatataccactctttaattttttttttatttctcaatatatcatagcacaaaaataaagatataccacagtgcaaaatcaaatatactaaaaacttaaactgatatctcattcgtagtttttttgtttttttctttcagtcaagtattccatatcacatgaaaataatataccttagacaaatatgaatatacgagaaaactaaactaatgcactttattttttctttccttcattatatactgtatcacgtaaaatgaatataccacttttttctttccttatctgtttcaccaaaaataaattgaagtttgctttatctactagccattcagccaccaacaaataaggaggcaagatgacctggacacaaaatgagaagaatgtagaaagttagggttaattatcaaaggttatagttgtaatttcatcgtcaaaattttaagtgatagcaggccattttgctaaatatttataaaaagggatatttacttacttagtttaggatcattttgcatctcagtcttataatcttttgtagctacattgtttttttttcacctacaaggaaaaagataaaagactcttccagccacacaaaaacattaaagaagaaaaataaaagttacattgtttgttgttcaattaaataaaagttatatatgattcacaatatacatagagtcaacatgacaaaagttatacagtagaacctttatttaaaatatactttagtttagataaattatattctaattgagaaattataactaaataaaattaattaaaaaaaaataattcaaaacactaaaaaaatatcaatgtaacaacaataacaataaacaatccttaatactatataataatataattatctttgagtaaatataatatttatacatgtattacaacttgaaatacaattattaattctacataaatacatttataaaatatatatattattaagatgtaattattcttatatagatgtatactttattaatacgagacataaaaaatatatgactaattacaatttaaaagttattcttatttataatgtgttcaaattgagacttaattattttataacaagttaaaggttattcttataaagagtattcttagataaaggttctattgtatatcagttagtaaaaaaataaataaacaagtcatatatatgtgggtgatattagaattttatattaattatataaatatgattgtataaaatgcgaaataaatcgaacatatacatcagataaataaatgatcgaaatacttcattgatttatgagctttgatctcacaaactttgaatctacacaagaaaaaaaacaaaaaaccaaacaaactaactaaaattgtattagtgtgggtattcagacttctaagctctctgtaaggccatctccaaccgaacactaaaaactcaagtttagtattgtttctcactaaaattaatctaaccgaacactaaaagctatcctatatatgaaattatctacagtatctcactattattagtgagatactgtagactatactaaaattggtttttttttattatttttttagtttttaataattaaataatggttaaatagttaatttttcttaatctatatgtattatttatatttatatgttaagataataaacagtatactttttttgtataaattttagttttgtagttggagtaaagaaaaatttagtcttaaaattgtaccctcttttagtgttagttcaacactaaatttagcttttactattggagtttccctaactctcttatatggaattactacttttcacataataagtagtgaacttggagaccaatatcctatattcataggtgagatactgtatcagtatttgtgccactttaattattaaaatattttaacaattaatttagaaattaaattaggtaatacaatatttggtaaactaataaatagtatattttaaatcaattatcaaataattaattatatatctttcataaatcaaaatcaaatcaaatatttgacttaccagtataaaatattcagttattctctcacttggttagtattgtttaccacttaaactcaacgaccatcctagtcacatagtaaacatatgaatcatagtgataggtcctcattatagagtgactattatcttccatgtattacgatatatttattacacaccaatgtacttaatgtggcaatgcacttaagcgaataaattctatgtttattttgttatcatgaagataattttcttatatgaaattaaggtgcacataaatatgaaaaaatatcgaaattagagtttcattgaataattatagttgtataacaaaaactgcaaaaggagaaattgaatcacatgtttactttatgatcattcaatttatgttgcaacatgccttaagtcaaagatattgcaatcattcaatttagtattgtgtatttaatgaccaattacgcttatctatggctaaatacttaatgtcgatatactagtgttatctatgtttttagaagggtgacatgtggcatctccaaaggaggattaatctagaatgacttaggctaaagcccttctatgaaggcaagcccattctagacggaagatgggctcgagcccatctaaggccaataaggctcatcttcgaaggcaaggcttgtccagaaatggaaggccctcaaccttcccaagacagaataaatgaagccctctcaatgaattgtgggatgcctccggggagagtattccaagaggcgcctttgtaagccctttgtatggtgatgtggctatctttagactcggctcccgcggtatcagatcttgtctcctatgttagaacaaggtagtgtgcacaccaccaaaggaaaaatatcccttttgtccaataacacgtatttgacaccacaatacataggtgcaacatccgcaggacatctgtcccataccgcgtggtccccatctgtatagatacctaaaccccacaagccaaaagactgctagtgggcctaaaattcatgtatttcatgtacttaccctaatagtgggttcaatttacacaaaaccctatcgggtcatggatatgtccatatctgaatcctaccctataaatatccctttataccttcatgcgagggggatagacgattcacttcacatctttttaggttttcttcttctctaagctataaaaacctaagtgagaaaatatagcaagatgctaggattcttgaactggtaatattccattgtaatatatcaaagtcattcgacacaatatattgactcgtggactagggttaataaatacccaaaccatgtaaaagtcctcatctccactctatatttacttatttaatttcttaacctcttatttaaatcatttttaaaaatctcaattaatatttgatgctttcaatgagagctgaataaacatttgaagctatcttgtgcttgcaaaaatggtggctaccaagaaaatcgtcatcgctaagcctactcctccaggccagtacatcatcatggacaacactaacccaccccctcaagggcatgcctagccgagggctataggggatagggaagcatctgaggttggcggctagcagggtgataatacccaacatcatgaataacatcttgaggaagacctcaaagatgatggagaaatagaagaggatagtggtgaaatcaaggatggatactacaaagatagatattgctgaaacccaacaaaagttggtagtgtaagaggcattttcactgtaaatgtagaaaacatttgcacagctgcaagccaagcacggagatacaaaggaggattctgaagacaattttccagaagagcctgtccaaaaggagtaaagggcgaaccccgttgacgctagaacttctactcatgaaaaggacaaagaaaaggggaaggtggatgagcccaatgaaaaatttccccagttcctcctagaaacaacattaacaccactgaccaacctctacacagaaagaaggccaccgatgcctccgagcttggacgctcttctgctctgtgaggtagagttgtgcaaaatgataggcctgtcgcccaggtgcaaaggcctaccattaggggattgaaaaactgccctagtggttatgttaatcaggatgacgaggtgaaaaaaatctctcctaaagagaactggtccactgttgacctccatagatgcctagattccaaaagtgaaaaatccaagggagaaaaagcgtggcctcaaggaaatgacctatggaaccaaatcaatgataagatctatggatgtgagcttccatacagtgacataaaatgtctagaagaatagatagctactttgataaaattggtacgaacatagagtggagcaatttctgactcaaaagatgaagatccgaaaccatgtgtgaggtggatcattgaagatccactacctgaatacttgaagataccatagatggaaatatattaaggcaggacggaccctagagcccatttgtccaagtatgatcgttaaatgtaagtggctagagtaagtgatgattccaaatgcctttgtttcttgctgacgttatctaaatctactaagaattgatggaagtgattatctcctgaatcaaatcacgattgtaaggagttacagtctatcttctggaaatagcttattgctgccatagactatgacatggaggtcagagccttaaccaaccttaagcaacgaccaagagaaagcttaaagaacttcatcccatggatgatggaagaagcagccaaaactaatttcagcgatgatatgaagcttgtggccctccaatccgaactaactgtaggctccttcttgtggagagaaatgcaaagaaagagggtcaagacaatgttcgagttcatgtccagagcccaaggaatcatcaatcttaaagatgcttatgtgtaagctttcagaggcactctagttttgaccccactggttacaacaccaacctatactctacaagttgcagtcccaacaaccatactttttggaacctagtacacaacacctagtgtctacggacccactgcctccgggaatgtgcttatgtagatgaatttttttgagtttagagcgacacaaattggatgtagcatcgctctcgaattgtctaggcaacaaatgaaaatactgaaatcaaatgtgagtcattcctagagcaagagaggtgagaagagccagaaccaaagcaaagctccaaataaagaaaggaaccaatatgaagccaagtatactgagtacactagtttggttgatactcaagaaaatgttcattaggccacatgcaacatggtccactatagaaatcccccttgatgttctgagaggaaaccgaagaaggggcgtgagtaagaaatgtgagtaccatggtgatattggtatagtgcacgaatagcttgtcattctcgaacaatagggaaccataaatcttcccatggggtagatctccttcaagctatcataatatgacctccaactttaccttctccacctgcacatactatcatagttgctctagcaccagggccagggaacccatatctgccaggaatggcttgcgacctgtggatggttatgtggcaactatctccagtgagccaaacatcgttggaagcacccaaaatgcacataaaagatctttcaatgagttggatcataagagagcagtatgttccctagtttagtctccagctaagcatccacgaatgatgaacctttctattacctttacaaatgaggataccaagcatgtgcactttccacacaatgacccattggttataaaggcccatattgcaaacaaaagattatacaaagtcttggtggaaaatggcagttccgtcaacatactattcaaatttgctttccaagcgactgggttaaccaaagctgatgtaatgctatgcccaatacaactacaaggctttaatggagattccctacttttgatggggatatccaactctcaatcactctgaatgcaagtgcagctagaagttctaacgcctctgcattcaagcattgtacgttcatggtagtagactgtccaactgtttacaatgctatcctagggcaccctatcctagttgatttcagagcaattacttccatcaggcacttgtgcatgaagttcccgtgtgacaatgaaagtattgaagtagtcaacgatgatcaaaaaagcgctaggaagtgttataatgcctctacacaattagtattcattgttaaagcagaactcaaagatgctctcagaatgatcgttcaggccgaaatagaggcattctgggaggaagctgaagatgaattggattcccgatttgggataggaataatgattgaaccactagaaaatgttgaggaagtcaacattagtgaaataaaccccactaaagtcatcaaagtgggaagaaacctatctctggtggtgaaagaaaaaatcatgtccacatttagaaagaatcaagacatactgatgtggagccgcgctgatatgactaagctcaatccaaacaccatctgccaagcactggacattgacaaaaatgtgatgccagtttgccaaaatagaacgctgctggatctggtaagggcataaatagtgaaggcagaagttgacaagttaaattctattgagtatcttcggaaatcactataccctatttggttggaaaatccagtgggtttttatggtactaaatcaaatacgcagcgaaagggtttcatattactaattatcattgtaccatatctcaacggatctccagatgtgtgtacattaaatcaaaaaataaaatactagtttagaatatgcctcttgaagactataagggtatcctcaaaactttttgtatgttgtatcccttaatccagatgatcaggatgatgcaactggactcacaccaatgtcttccaaatcgtttcaccacacacaaggaatggtgtgacctattaggataaaatatataggtttgttcttgttgagttctcaacacatgaacaagaacaattgagagataattttttttttctttttctcctcttaatttcaaaaattatagtgttcaagtgttctgatttctcaaatcaagctcctatttatagtaaatccctttaattaaattatatttaattatttaaataaataaatatctataattgaattcggttactgatatttatgagggaatctctcaactacttgagtgaatatctcaaccatattgaaatatctataattacttttcaaattagatatttacctaattgaattaattaatttaaaaagaaaaactgcatagggacaggatatatgctaggcgcctacccttgttgtttaggacaaggatggtgtcttttgtcctgacaacttttttctcaataaatcttgtcttgacaaattttatcttaataatttttgtattttccctatttaattaatttaaaaatttatttatttattaaaaaataaataattactattttgcaaatttaaaatagatttttcaaacgacattatactactctttatcccaacctttgatagtgtttcaaggttgcgatttgagtacaatggacctatcattctaagctctaataaactagattatttattgagtctcatcaacaaaataatccttgtttattaattctatgattactccactaaaaatatagaat

SEQ ID NO: 111632 - DNA, 4336 bp, Cannabis sativa
  modified_base (45)..(55): a, c, t, g, unknown or other
gatcagtgtattctgcatttatcatgcaatctttctgcttatatnnnnnnnnnnnagaagggaaatacttcctctctaagttcaaggccctataaatagtgatgcatactcactgggcaaggggtccagagattttaccctagagatgttatccaaatattcatattcagagatattgttgtaagagttataagtaaaggaacctttctccttgttcttgagtcaatacaaataatgaggattaggctataaaattcttgtgtctttacattgctttactatatatcaattgctacaaatcatttatcgtttactaaataagactcactgttgttggctaaaagcgaggtcaacaaatagtaacttgaaacctgaggtggtgtctaccatttggtcgatctggggtagcgggaaacaatcctttaggcaagctatgcagactcaccatgtcccatttggtttaggtactagaaccgagttttccaaccactctgggtagtacacgtcccagataaagatgttggataacaacttatccacttccttctttagggcgtcagcctttaccgggtctagtgggcatctttttcgttgtactggaggcatatccggttgatgttcaagacatgggtgatcacgtggggacttatcctggtcatatcctcgtggcaccaagcaaagacatccgtagctgcctttatagtgtctatgattgtgctccgctcctctagttctagattttcccctagacggataaccttagatgggtcgaggttgcacactctcacttcctcgacatcctccatgggctataacatcacttcagacctaatacgggggtccaactcgtcctattcttttaccaacactagcccgaactcccgtaccatcaggactgacaaatgtattgcagcattgtaacactgtcttggttctccttagttccccctcactgttcctactccagcctcccgggtagcgaatttaagatacaagtgtcgaatggaggtaattgctccaaaattgactaaggtcggcttgccgaggatgacgttataggcagtggggcagtccaccaccacgaaggtgcagtacttgaagatgctttgtgggggtgtcaggacacaaggtaactgggagtctcacctttctcattgggttgagggtcatcccgttgaatcttgtgagttgtgaacaactgggagaaaggtccctgtgagtgagtaacttcccatacctcctcgtcatgttttagggcccaagcgtaatgctttagctgattcctagtggttccccaatatgaggtcctctagagatcatagccactcttccattaggccgaggtggtagttcgagcgtctggtgaaggggcatccatcgagaggtacctgaccctcaggcgcaacctcgtttcctctctgaggcacaagccttgtggtttgggctggattcaaatgtggcagcctatttttgatcccctcatacaagtggcccaatcagattaagctttcaatttcatccttcagatttttgcattcgtttttggtatgaccgatatcattgtgatactcaccttttgttggcgcccctccaggagctatccatgtacaagggggaagccttccagtaatgcgtattttgtcgggtggaaaaatatatacgttcttgagaatctgtgagctcggtgtattgcgtgtattggggagtataccccctccattgcctcttgtcctcagtctgtgtgctacctttagaagacctcttgctctgggtgctttgctaggatcctccaattcttgtggccggtgcagatttggatggaagctgaacgcgcaccccagaggggaggcttatgggcgccccaaagtgtgatagtgtcggggttaaggtgagattctgattgtatctggagtagcggagaactttattctacttgttcggggagcagcagggggttgaaccccgtaaagttgtgctcctggtgcatatcccgacactcccatcaggttataccctccgtaagccactatttgagcctcctccaagttaatgtatttctggactctcttctgaaagtcttggaggctagtcgctccttctgttgcaattcgttttagaaaggggttcctgtccggctccaggcttggagtagtgccttgaccaatataaaacaactgcccacggaaactttaaagaacttcaaaaagagattcaaggaggaggctttgaaaacgaacaatgtgtacgatggacaacagttacatttaacggttaggtacttacaaattcctaaaaatataactactaaaaattaaacttaaatatttattcctaattaattagaagttaaacttaaatgtttatggccatgttatttttaattaattgcttggacgtgatgtgatagtaaatccaacggtggagtgatagagtgacagtaaatgggtaaagtgtttctactttcttttggcagtggtattgaattgaaagtaggttccttttaggccatttactatagaaaaatgccataagaacgaagtttggaccagttagtcagggacaacgaaatgacataatccataaataccagaaaatgacaaaatgtgcaaaacctcaccttgaactttagtatatttaccttttcaaaaaaaaaaaaaaaaagaactctattatatttaaaatttaccataaaaataaatacaaaagcaagaaagcttacaactcgatcgtaattatgccaaaagtaatttctgtattcttagtgttgggtggttgacagtcactgaagctaaatatttgtaagcaaagttaaaatgttgtcattcttaacatttttcatatatataacaacatattcactatatctttctcccactttgtaaagagtgtagtacttcacaagtagactgtagaaagggcagtgtaaactgtacaagatttgcccacataatattaatggaccactttagcattattactgtacacatacactagtcattagtactactaaattatatgatgacatgagtgggggtgtgtatttaaaaatgaatgcaaaggctaatgttgtacttttttgaaaccggtttcattccagaattaatattataaaatcactaattctaatacaatattatattatccagattacgtacgtactcaaagaaagtaatctacatcagtacaagcaagatatctatgatgatacgagtttatcaaagtaacactattacagcattaattagagagcaatatgctgctatgtacaaatgaaaaacatgcgtaagagaactattggctcaagtcagtactactagtaaataaggaatcaaatggtcctaattaaaactgcaatttgcatagagctataaggagttgaaatgtgacacgtaggtcttggatggggaacagaataacgtattgtctctgatatttgatgttctttaattttgtcaagatatcattggaacagtaacagtagtggagatatatattagtgtgttggtcactttaaacatattcatgcgttgaaattcgaaagaattgaattaagttattacagcgatgattgttgtcgaactaccatatgatcacaaaatgataatatacgaaggtcaaagctataaggggttctttcattttcaaagatatatttcgctctctccatatataccaatcacaatcagataaatggctaatgaattgattcagcttaccccacacaaaggcatagaaaggaatcttcatatatgctagcttgtcaatttcccatagcttagctcgaaacatattgctacagtataatattgcttataaacttaaagctgaagaaaacgaaagaaataattattattattaagctaattaagatttttgcttcctcaattttgacatgtgctatgctctttgaacttttaaggtcgttaaaaatgtcccctaaactattgaaattgttgaatttaaaaacttttgtctaatttcattcaatttttctatttcacttatttatcttattattattattattgataatcatcaatggaacatataaattgagagtgtttatcttattattaaataatatatagattaaatatataagttaacaaaacaattaagtgtaacatacattttgtggagttacaagcttctactattttgaacatctaatatatcaagggaggttagtcaacttaacttttgaaatttaaaagttaagatgaaaatataattttgtcaaaggatataagttttaaactctttggagttaagttgcaatattaaaaagggaaatttacacagattactgtttttttccaatttatttcttttatac

SEQ ID NO: 111633 - DNA, 3851 bp, Cannabis sativa
aatataattcctcaattaactcataattatctaattagggctttgctaatcattttcttaattccgggtattacaacggtgttcataggttcagcttccactcaattagtgaagtattcaacatcaataatagcaaatttgactcctttttccaattggaagtgatcctacaaaatcaattccccatacagcaaaaggccatagactgctcgtcaagtttatctctatttgcagagctatgagaactttggaataacgttgaaattgttcacacttctagacatagtcgatgcaatctttcttcataattggcaaaaaatatacttgacggatgatctttttggacaaacttagtctgaatgtatgatctccacaaaatccctcatgtatctcatgaataacaacacttatcttagttccatctatgcatttcagatatgacattgatactcctcttctgtatagtttccagttgatgagcacatacctcgaggcttgatactgaatctctatcatctgggagctctctagattcaaagaacttttgaattggagccattttaaggaagttgaatgatcaattaatattaccactagtgtttttgtgcttggatcggatagatggacgatggggactaatcgacatttctctatttctagattcgtggctattttgctagcatattcgccaaggcattttgatccctaaggacttgcttgacggaatatcatttgaagttttgcaactgttcccgagattttactacgtaactagcaatcttttctcccgttgtctagtattctccaaaaatttgattgactaccaattgtgaatcactatacaactcaatattttgggctcctacttctttagttaattgcaagacatcaatcatcccttcatgttcagcttcattgttggaagtggggaactcaaaccgaaaaatcactctgaagttgatgactttgcaaagagattagtatgattcctgctccagaacctttctcatttgacgctcctactttccaaatctctagttttgggatgggttctttaggattgtcgtttattcctgtacattccataataaagtttggtaaggcctgaccttttattaaaactcttggctaatagtggatgtcaaactggcttagctgccaattttaagagtcttttggaagactctggtttttgaagtacttgacagagaggatgatttgttgtactctgatggcatgagcttgaaagtacggtctcagcttccgtgaagcaattagcaagcaataggaaactttttcaatcattggatatttggacttcgagcccagcaatctcttactaacgtaatacactcgaagttgtacccttccttcttctcgcactaaggcggcacttatcgcatgtttggacactggtatttacaaatacaatagttctccctataccggtttggacaaaatcggagctttagtcaagtgttctttcagtttctagaaggcgtcttcacactaagcagtccatttgaattcattattatcgcgcaagacattaaagaatgggatgcacttattagatgacttagaaacaaatctattgagtgttgcagttcttccagttaagctttgacatctatacttcggtggagaaggcatatctagaagagcttgaatcttttccgaattggcttccattcctctggaactgacagtaaagccacaaaattttcctgaagaaattttaaaagtacacttcattggattcaactttatttcatactttcggatgatggaaaaagatttttctaaatcttcgttttgatccatggaagtttttgacttaaccagcatgtcgtcgacataaacttccatattcttccctaagacatccttgaacattttgttaactagacacttatatgtggctccagtatttttcaatccaaaaggcatgaccgtgaaacaagaaatgtctttgtcagtttggaaggtagtatgttcttgatttgccacatacatcttaatctggttgtatctcgagtatgcatccatgaaacttagaagttcatatcctgatgtggcgtcaaccatttgatcttttcgaggaagtggaaagcaattttttgaacaagttttattcaagtcgataaagtcaatacacattcttaaggtgccattaggcttggaaccaatactagattggcagccagattggatataaagtttcccaaatgaattctatattatttaatttgtcgacttctgccttcactgcttctctaacagctttctgacggactggatcaactttcgaatctatgttcaaagcatggcagatttcatgaggactgattccggtcatgtcagaatagttccatgacaatacatcactggttttcttagtgttgatgcaattttttctctaaagaccggaggtagattttttcctaccttaatgactttagcaggattttcatcgtggatggatatttcttctacctcctccattggttcgatgattctctctacccgcactcgtgagtctaattcatcttcttcccagactacccccagtgctggctgaacgagtgctccaagagcatcatgattctcttctcgaacagtaagtacaatttggccgagacattgtacacttctcacacttttctgatcaccccttattcttccaacgtttgcgctgtcacttgggaacttcatacatagatggcagatctgaaagaacctagacctggccatcctaggataacattgtaggcagtgggacagtccgctactatgaagatgcagtatttgaaggccaagactatattacacttctagaaatttgtccattcaatgtaactggaagttgaatctttctcattggaagcagagtatctccattaatgccttggagttaaaccaaacaagatgttagattgatttccactaaaccgatagcttgaaaggtaattttaaagagaatgttgacaaaacttctgttatcagctagaattctgcacaccctcttattttcaatttgagattcgattaccattagatcattgtatgggaaatgcacatgcttagtatcatgttctgtaaaagtagttggaaggttcatcgtctggggacgctaagcatgtgcttgtacgagattgcatatttcttcttgttcaagctcatttagatacctcttctaggcagcttccagcaatatgtgggactctagatattgttctcatgtggccatatagtgcttgtggagcaactccaggtggatacggatttcttggtctaggtgcaacaataggtcttgccacttgggcattttgtaccccttgagggacatgtatagtcagagcttgtattccatgaccctcagaaaacctattccttgaggatgatttatggcttcgggttgtccaggaataaaaaagttgtccgtgtgctacttcttgtctgggatagataatgggtatccgcacctgattggataactgaccattacgaactaagccttcaattttgtcctttagatagtcgcactcatttgtattgtgtccaatatgttaggttatttttactattatttttaggttaatttttagtgtgattttaatttagttctactcttgtttggagcaattttatgatttttatcttttatttttgcagatttaaaatagaagaagattaaaaaaaatttaaaggaataagatttaaaaaaaataaaaagatctcacaaaaaaatgaactattaaatagagaaaattgtgcaaaaaaaataaagctaaaacttcaagcctaaattagactatattctggtcagattttggagaaagtcaaaacat

SEQ ID NO: 111634 - DNA, 4733 bp, Cannabis sativa
atctcaatagttcggggggaatttctaacggccaaaaaagttcagggaacacgatttagtacatgttaaagttcgccggaaaaaattactaattactctactcttttttaagtatttttaattttatttttcaaaatatataatcagataaataataaatctataatatataaataacaatgtaaaaatattttcaaaaattaaatataatataaaaatctaaaattcatacaataaaaaacttaacacaaaaaaaaaattaaaattatacatataatcatatataaaaaatatataaatcaattatttattataaacaatccagtccgatttaactgttaactatttattacaaaccgcaactaaattattatgttgtaaacggtccggattaaccaaaccatttaaaatgattttcccgattacgatctacaatgattcatattatcgcggtccgaatttaaactgcggtattttagtttgtatgaatagccctactattaaccatttctgaataataataactaaaaattctataataaccatttatagaataataaggaaatcttttggttgtgcctacaatccacattcggttgttgttcatattttgaacaattttttttttttttttaaaaaaaaaaatcaataatttactatatataaaatagaggtaaaacaatttactatattcatgtcttttttttcccccttaatagtgtgaaagacacaactttttgaaccataatttgaagatagtaaattattagaagatgttttaaaattatagggatgttagatgcattacaaaagtgtcctttgtaaaatgatcagcaaatgtagcagctcattcctttgtgagggcttctatatctcaccctgattgcctgttcaacttggacactgttccagttgagttgttgcctagtttggtaacggagattttcgtttaataaaatgattactttcattttcaaaaaaaaaaagtgccatttgtatattgtatatgcaaatattattcacattaaggaatgaaaaaaataaaacaacttgaaaatcatgtgaacaaaacttacctaatttaaaagaatttaaagtaaactatattcaatatgtatattttgacaaagccatcaacttcagctttgatatataaatacaaatgtgtacaaacagaaggaaaaatttgtttaaaaaaatacaaaagaataaaagaattaaaggaaaacaaaagacaactttggtaaaacttacaattgatacagctaacttggttccaacttttcctcttttgtacatttaaagtctcctccaaggatttatattttagattaaaatggaaaaagaaagaaagaatgtatgtttggtcttaaaagtactcaaaatcaatgtaaggagaatcatcaggagaagaagaagtagtactattattagttttgacacctttaacttctgggattctcttatcagcagatgatggtgtctctttagtagcatactgagtgaaatctacagggtcaggcacatgaggaggcatagcacatctcactagtgcccagttaactccttcgaaaaatggatgttgtttaatctctgtggcgcctctcttgtatgcgattcgcttctgaggctctttaactaaaaggcctcgaataagatcacgagcaacgaaactgacttgtggtgtttctggaaatcttaatggttgtccaacaacattgaagagtgtagcacggttgcctgatcctttaaagggtgttgttccatgtaacaactcataaaggaagataccaaatgtccaccaatctactgcacttccatgtccctctcctcttatgatctctggggctagatattcatgtgtccccacaaatgacattgatctaacgtttgttggttctgccatgagttcaggaagggagccattgacaaagagcccgaaatctgattttgattttctattctttttgcttggtaagattcttgggaagaaagttgatggttgcatacagccttggacagcaaattcatcatctaaaatcccattattactagtgctgttacccccattgcttacattgacagaggatgatttcaccagtgttggactaaccgagcaacgcaacgataaatcaaaatccgaaagcatgatatggccttcatctcttactagtacgttttctggtttcaaatccctgtaaacaatgcctaacatgtgcaaatactcaagtgccaacaatacttctgatgcataaaacctgtttaagaagaaagattacaaatacaatggattgaaatggagaattcaaagataacatgttaaagtaagagacagaccttgcagcttcttcagtgaagtgtttatttggttgcttctgtctaagagaatgaagattaccaccactacaaaactccataaccaagcaatagaacttgtcagtgtcaaaatatgaatacaaagtaggcaagaatggatgatcaagaagtccaagtatctccctttctgtttgtgctcgaagaagcttgtttcgactagctagagatgctttgtccatcaccttcatggcaaaataagctttggttcctctaagttcaacaagataaacactaccaatatctccataaccgagccgtttgagtagtcgaaaattgctgaggttaagtgggaaccctttagaagctgcattaacagcatcccaccttatatcgccaccggtgtgaggcttaaaatgtgtagaggagttctctaagctgttactacgacccctattgatcatgacttgtccatggttatttgtcttagaatttgcaggcatttctcctactgtcccagttgaggaggtagtttgcatattagaatttgggctaggatatgggctatacttagtagtggtggtaatggtggttgaatcagttacaacttttgaatcatgatacacttcttctggtttagatgggtgaattatgatcaaatctggctttgaatttggttttttatcaccatgatggattacatatgatgaattatttgttgaatagacaattggttgattcattattccctcaacttttttgtcatgggaatgatagtttcctgaatctgcatcatgcttggggacaccttgtagtttctttggaattccaaatgagttgtcctgagatcaaacagtttatctgcatgagttaaagctcacccctttacaatatatacacacatttacactatacttacctctgaagagacaggtcccatgatagactttaaagacatggataaagcaaaagtagaacagccctcctcaatgaaaattcctgttcaaattcattactttcttaataatatacaatttaacaaagtcaaacttataaagaagaattgatgataatgaaaatgcattaagaatgaaaaccagtttgtggtaagcacgtaatgatatgagacacacaatacaaagacaaagaaaaggtcagagtttggaataataaaagataaatgacaataagaaagaacaaagaatgatcacaaaccaagatttgataatgggaaagagacccttttgtggcttcaagctgtgtcttttgtttttgttgtcatgaatgtaaaagaaaagaaaagaaataacaagtttgtttttttccaggaaaatgggagagaaaataaaagagaaatggatatgtaagatatgttagaaagaaaatgggagttgggtattgagaatgagtagaagttggtggtactccattaccaaagaaccacccatgttcaggagatgagagaaaattatggaacaaaaatggagataaaattatagtacctactacatttaggcaaaaattattattttttttatttaaatttttaatagaataaaaggattgtatgtatgtttaggtaggagaagagaaaaacagaggagagggttaagaaatggtcatagctaatattacgtgaatgaatgaatggttaggcatgttatcctcttatttatttttgttttaaaaaaaattagtgggtggtggtcaatctcacacttcatcttctaatgtgatcaatcctattttgttcttttacatatgccattttttgtatttttttcctacaatattttagtactatttcacactaaaatataatatttttttttttgttaggacaccaaaatataattttttttattatacataaaaatataataaaattattaattaataccaaaaatattaaaaatatatataaatagcaaaaataattactaatttttcatacatatataaatatatattattatcttattaattaaggggcaccgcagatagtgatagtcattaggaattaagttaggttttgcttcttattttcttcaatatgcttttttttttttttttttttgcatgaatcattatgtatttttatagaagatatttaaattaaatgaaaatatacttaaacaatatataagtataaaattgttcatatatataattcttcttatttttatttatttatgattacaaataatcctatgtgttgcattactaaagtttagaaaatcactttaggatgtaacaataatctatttggtagaaaaaaaactctaatattggggacttttctgagagccccatggtgactattcaatggttacatttttattgtaaccatattgttacattttatagcaagttactaataggtagactttctttttttagatttaattaattataattaa

SEQ ID NO: 111635 - DNA, 7057 bp, Cannabis sativa
  modified_base (6707)..(6725): a, c, t, g, unknown or other
agtatttttgtaaaaaaataataaaaattagtataccatgtaaatttccctacataaaacaaactcgtacaacaagttcttgaatcctatttccacactgcctatcaataaattttttaaattttgcaaaacttacaaaataactacaaatatcatataaagagatgatagtgcagaccagtacacccttttgggagtgcagcaagaactcccatttatacaaatgttttattaattagtagttgtcgtggtatcaaactttgccaattaattaaggtgtgacgttgtgctttcgtgcccataactaagctctatcctttattctcaccaacccccaatctcttctctctcaaacacatcacttttgacactcaactacaactagtagtattatttatatttactaattaataaatactcctattacgcgttccaatctcattctcaccttctttactagcataaaattcccacctcaactcacaaccttcccacgtgtcataatctaagccctttaaaataagctaccatatccaacggccactctcttcttccaactaacacatttgcctacccacccaactctcaatgtcctgataaaaactcttctatataaacaaccatttattggtgaaccaactcaggaaacattttcactttctcatcaaaaagctgaaaattttcctttccaccataccaaatttatctacatctactattttttttttgccttcccattaagcccattttcataaacacatcttatatatacacaaaatatttattctcatacaatattattatggaacttaacaatggatcatcatcatcatcattatcgatggagttttgtaccagtactacagtgggttatgatcctttgaattgggttgcttcggctgagtcaatgaagggtagtcatttagatgaggtgaaacgtatggtgaaggagtaccgtaaaccggtggtccgactcggtggagagactttgaccatttcccaggttgcgtctatagcgaaccgcgactcgaaccgggttcatgtggaactggctgagtcagctcgtgctggggttaaggccagcagcgattgggtcatggatagcatggacaaaggtacggacagctatggtgtcactaccggattcggtgcgacctcccacaggagaaccaaaaatggcggagcccttcagagggagctaattaggtacgtactgtatcattaattaacaagtaaacgcattatttattaataataactcaattaattaattacttaactgttacttttctatacccattaatttaattatgtgtcatttaatatcattgactgttattatttagtctctttaggcatttaacatgaattttaatgattattgattaaagggtatttccctatatttttgtttagagcattgttattgggtaccagtggtgcctagcactcttaagacgtgtcgttttacgattggctagcgatattatagcgatattgacacgtaggaaggtgtttgacagtactaataccttttagcatttctcttttgtttaagcatttaagagaatttcattatctataaatttttataaaattgtgaataatttcctatatttcattatttaaattttttttaaaaatttacaaataatcttaaataattaatacatatataattataaaaaaaatagattaaaaaactttttttaatatgtcaaaatttaccaaatattttaaaaatttagagtaatttataaaaacatgttataaaaatattgaaaaaggttgttccaaaaaaaataatgtaggtagtaggtggatattttttccttgaatgagtagttaggtggattcttagtgatctaccatataccttatatcctcatgattatttatgtcttttaattattattttaaaataaaagtagaaatttgtttgggaaagtagcggggacaaaaaaaaatatacaaagaaattaaattgaaatttcctgtaccaattattttggtttgtggatccgacgtggatatctatatattgataccattaatgacaatataaacgcatattctataatattgttcaccataagaataataatttggttctaaaactcataaaaatcctaaggctgttgaataacaactcaattcgacatattaaaaaaattaacgtaattatatatttgaactagaaaaaataagtaagaaagctagtctctttatggtattgatgggcttccgtactgaataattgaatgtgatgagttgtctttcatagtaattgcttgtacaaattaaaactacgaaaagataatattcatgaattaaatgtgtgctgcttctcgtgacaagattgtggggaggaatttaatacggtttgcagcaaagtcatatataatttttactctttaaattttaacatatattaaattatatttcttgaattttttttaccgttaaatttttttttcatgaactattgaaattattagatttaagaacttttatttaatttcattcaattttactatttcaatgattgtttatatactaaactatgctccccacactttgatatctatcaaatcatgctcttcgaactttgacatatactaaatcatgtctcttgaactttcattcatgttaaattttttttattaaaattagataaaaaattattaaatataacaatcttaatagtttaaaagtatttttaacaaccttgaaaatttaaaaagtattatttaatacatatcaaattttggggaataaatatcttagcttataaataaatatgaaatagtgttttatggtgtttgaatcagtttgatgctcttatattaaatgatatttatttattaattttttaaggagatgtacttattcataattaaaaattgagtgaaaattaagtattgacctattccattgacacgacttcttcctcgttataagttattacgaaattctgtcttttttttttatatatattatttattttcccaccctaatttttcttttaaatcaagtgtttcatttttcgtccaattttgacttgtgtgagttgtttgaaatgctaattttgtgcaagcttggtgtcacgtatgtaatcacttaatatgattttttttcataaaaaaaagaaaagaactgaaaaggagagacaataacatgtacagtcgtagagattaaagttttcttttttctttttccttttgtggtccgaaactctaactagaaatttgtggtacgaaacatactgaaataacaaattaaaactatacaccacagactctaaagttagtattattggtgccaggtggaaaattaatgctgataaaataaaaaaatatataataattattcagtagccatttaatgaattgtagcataatgtatattatttatataatattatagttaagaatttataattaacggaaacaaattttgtggtgtaacaggttcttgaacgctggaatatttggtgttgggacagaatcatgccacacactgccgcactccgcaacgagggcagcaatgttggtgaggatcaataccctgttgcaaggctattcgggtattagatttgagattttggaagctataactaagcttcttaaccacaacattaccccttgtctaccactccgcggcaccattactgcctcgggagatttggtcccactctcctacattgctgggcttctaataggtaggcccaattccaaagctgttgggcccgatggggagatactcaccccaactgaagccttccaaaaggcccagattgaaagtgatttctttgacctccagcccaaagaaggtcttgccttggtgaatggcaccgccgttggttctggtttggcctctgttgttctctttgaggctaatatattggctgtactttcagagatcatgtctgccatttttgctgaagccatgcttggaaagcctgaattcacagaccatttgacccataagttgaaacatcaccctggtcagattgaagcggcagcaataatggagcacattttggaaggaagctcaatacttaaagcagctgcaaaggttcaagaaatggatcctcttcagaaacccaaacaagatcgatatgctctcagaacttccccccaatggttaggtccacaaattgaggtgattagaactgcgacaaagatgatcgagcgagagatcaactctgtgaacgacaatccattgattgatgtttcgaggaacaaggctctccacggtggaaacttccagggtacgccgattggtgtctccatggacaacactcgtttggctttagcttcgattgggaaactcatctttgctcaattctcagagcttgtcaacgatttctacaataatggcttaccttctaacctttctgggggaagaaaccctagcttagattatggattcaagggttctgagattgccatggcttcttactgctctgagctccaatttttggcaaacccagtgaccaaccatgtccagagtgctgaacaacacaatcaggatgtgaattccttgggtctgatctcatcgaggaagacgcaagaggcagttgagattctgaagctgatgtcatccacattcttgatagcactttgccaagccatcgatctgaggcacatggaggagaatctgaggaacacagtgaagaacacagtgagtcaagtggcaaagcgagtcttgacaactggctccaacggcgagcttcatccttcaagattttgtgagaaggatcttctcaaggtcgtcgatcgtgaatacgtctttgcctacattgacgacccttgcttagccacatatccactcatgcagaagctgaggcaggtcctggttgagcatgctatggagaacaataatggtgagcaagagaagaacgcaaacacctccatctttcaaaagatcgcaatgtttgaagcagaattgaagaatcttttgcctaaggaggtggaaaacaccagaatcgagatcgaaaatgggaaatcaacaattccgaaccgggtcaagaactgtagatcgttcccaatttatcaattcttgagggaaggactgggtactggattattgaccggtgagaaagttcgatcacctggagaagaagccgataaagttttcacagccatgtgccaaggacagttgatcgatcctattcttgcttgtttggacgagtggaatggtgctcctcttccaataaaccccaaaatgatttagttactcagttattgtggttttctaatttttcagagttttaatatctatttttttaaaaaatttgtttccaatgtaatatgtttttttgctttataagattttatagtgaaaacactcatgaaaatcttataaagaaaatgtgatattgtccagtgtattttttatttcttttaattgaaaacttggaatgtatttttcttaattttctcttaattatatttctcttggatttacttctatattttcctcataaatgaattcaaaagtttttttttaaaaaaaaaaaaattaacctaccatttgttggaacttattttactagaatttagattttctaacatgtatgttgattataaaactataatctaacatcctaaatatgaatttcttaaaataataaaataaacacatataaagttacaaaaaacgttacattagtagcagcgcaatataatgactccttccgttcagatctctaactgtgatcaagatctgaacttagatatccttcaattgacagtttgaactacacaatcttcctcactatgcaattcgaaaataatgatatctagagtcatcatctgaataaaaaacccttaatattctatttatagagattcattaggtttacggttaaagctaaatgggctaattaaaaagattcaatggcttagaatggaccctcgtggttgaatcccttatgaagcccatgagttagaattttgccattattttgcttccttaatgaaataaatttatctttcttcagtaatgccatttttctgctccaattattttaatactaatcctatctatttaataattataattaattatcaaataaaattactatttaaatatgtttattaattagacctttcaagatctcttaattaataaataaactttaaattctctattcttctcaattgtgcccttccttagtaaaattcacaaataagacatagtctttatttagaatcataattgattaattaaatcaattaattgagactacaaaataatattatccaagttagtgcggggaccatgggcctacgtaaccaagctcccaataagtagatttgaaatttactaagtaaatttccaaacttattaattcatcttgactccactatagatttataattgcactcctgattacataaaacgctctatatttaccaaatatatatacgctatgaattatctattgtttcaatccaaataatcagagatcctttatagatgatttacatcgagtatgtacaaatttactgttctacccttcaatatattttatccttaaaacgcttagctacttataaatgatatttctgcaaactaatataactactgaaatgagcactctatcatttatcgtgttaagctaagctcaaaagaaattattgtttcacttctaatagttatagaagctatggaaatcatatctatgattagcgctcccnnnnnnnnnnnnnnnnnnnttcccaagatgtaagtattgggccaatccaattggtcagctttaacaaacaagtcaaagaacacaaataatatatttaagctaggacctaactatctcaggattaagatctattgacctaagatcaactaagtaatattaacttagaaaagacatagcattaagtgtatgatatcttttccactattaatatcggtccagtctaatgtatacccgatccatctgatactagtatactttgctaatgccttggaaaagatatttcacatatcattgtgtaagtaaaactttatagctaattatcacgtaagtgtaatgttgggttttatgccc

SEQ ID NO: 111636 - DNA, 1357 bp, Cannabis sativa
tctttctctcttcatcttctacttctttcttctcatctactttatattattttataacattttttaattaaatataatatttttatattattatattattaaatatggtcaagaatatatatatatttaaaaactataatattatataggaataaaaaaagtaattaataaatgaaaagaagttttagtgtggtttatagtgcctcacaaaatttgatgagatactataaacaatattatatataagataggttttagagttgggttgaaatgaatttaatgctaaatctatacaaatttaacattatagagtttatttccattggagatgacctaaattattaattactataaataattatgttttaactacagcccctagtctgaagagtggctccagggggatcggagtgggagatatttggcttcaattttttggatggtatggctcgaagtaatttttcagatgcgtttgttgttgatattgtaaacgcaaaacttgatgctttggctgatttttgtttttgtctcatatttgagtaaaatttatatagtttatttgatggtaaatattatttcgtaaaagttaacgatcggattttttattttgttaaataataaattagattttatatttttcaaagtagtataaaatagtatcatgattttaatttgcgttaattttttttaacataaattacatgcaactaatttctagcatgaacacatagaaaaatgtaatcagtttggtcatagacacctctaggttaagttattattaagttttatttcgataaaaattaaactcaagtactattttgaaaattacaagattcaatttgtcattttactaaacaaaagatccaatccataatttttgtaaaatacaaaatccaaaacagtttttacattttaattgagattgattgtatagtttaatttgtacaatatcattattataatgtcaatttcttctccaatgtagcactaaactcttcattattttgatgtatatattatagtgcacggcatactatagcacacacaccatttttttttaatttcttcattatttcattaatatatatttatattattatttaagtttataaaattaagaatttaatttagtaaaattttacaacgcacttcactttatgtgctgatgtacccctatttgtttcggaatcggagagacttttttagtctaattttttcatgttgtgaactatagcacacacagcacatcatacacttatatatatactagtaaacaggccgcgcttcgtgtgcggctgtttatataaattttaaattatatatgtgaaaattcattgaataataaaattgtatcaaa

SEQ ID NO: 111637 - DNA, 4604 bp, Cannabis sativa
aaataaaaataaaaatatatagcatgctaataaaattatatttattaatttgagctaataaaaatatcacccaagtatcaaaaacatgacaatttcagctagcgcccgccagctgaactcaacagcctgacaagtccctagctctttgctatgtggggggtggatctaataggagcactgccgacgagtagagcaggggcgaaggatgaaattgtggcagtggactactacaccaagtgggtggaagcaagaccattagttcacataaccgtcaagaagtagcctccttcgtcaacaagtttattatttgccggtttggagttccttataaaatcatcactgataacggtattcagttcagagacttactaggagcatattgtgaggaaaaggaaataaactctcacatggtccagacattcgaggaagtaaggaatgaggaggcattggtggagagcttgtactcggtggaggaaaaagggagaaagctcagatgaaggtagtcgtgtaccagcagagagtggcctaatactacaactctagggtgcgaatacatgcctttcgggtcggggaactagtgttaagaaaggtccttccaaatacaaaagaccccacagcgggtgtgctgggaacaaactggaaatgtccttactgcatagcacaaatcattccacctggaacgtataagctagcctacatggacaacactgtggtaccgcaagcctagaacgccaagtacttgaggaagtagtacaaatgagactgtgatgaccattgtcggaaacgaaataagaagtatgttatttttaagtcctttaatttcaatcaaggaagagatttgaaatatcttacatgattatgtaatttgaatatgatgtaacttaaaattttgctatcatatatggtatgacaagttttagtgagacaatcatgcaaaacattctaaagaaaacaccacatacctcaagcgtctcctcgcatcaatgctagcaaaaaaactctcgatgactatggcgattagctaccccactagtccaagaaaagagagggcctagtgataaccccaagaataagggcacacaaaaaatgtgctcattagagtactcaaaccctaaaaattaccacattttagaaagaaaaaaaaatcaaaacctctgctatttgtgtaagttcattagtaaaaatagtaaaaccaacagttaaaagcgttgttactttggacccagatccatagtaaattacctttaatgagtaacaaaacagaatcaacgaaatagtacaagagcagctgagcaggcccataaaccttccatgtttatcatcaaacgcaggcaactgtaagaagatttgataatgaaagagcttttctctgctacaataataaagagctattatacagagtaacccaacctatgcactggaaggttacagaacaaatattcagttaaaaaattataaaaggaaagaattctgatgccaacggtgggagcttcctcaggcagtcaaactaatgtctgtaaaggccaagcaatgacttctctctctcttccactctcttctttgcagcctcccttgctttgagtgcagctgtttcttctttcgataccaccttcggcctcccatcttgcctctttcttttgccaacagtaagagatgacggagcacctttaacagatctcatggggtttaaagaagctgaaacaactcgcccaggtggaggcccttcttcacctttagcagcgtttgtatttcctttagctatgcctgacgatgaagctgaagctggctttttaaaaattgattctttatatccagaacttgaggcaaactgaggtgtcgcatgcgcctcttcttgtgacacccacttccctgtaacatttatgcaaaattgataatcaaaacatatatatgagaccttttaaggaaagtattacatatcatgtgttagaaataaagtttaacaaccgtagttatgtacctatactatcagaatagtagaagcctgaatttggatcgtaatgaaaaccatttgtttgattgtagtaataccctgaagtgctgtcatactcccattctgttatcattcatagctgtttcagtttaaacagttccagatcaaaataaaaccatgcttgtttgaatcgaaagggcattgtaaatctactgttcttttttcccaataaatatatgcagattgcaaacttactctcttgatcatctacatctaattcatgagaatctctagcctccttaaagtttgccacgtccttctgatagctgcgcttagctttctgcagacatttaagattaaggtaatcagcatttaaatttagaatacattaggcaatattatgctaaatctgattttatcatttttttatgatctcaacctccatgatgaaggcgcatttccatattccttattcaaattaactcacattgacaactgtctgtctataatacattttaataatttcctgctaattgtcaaatttcttttcgaatgtgtctgtgttgacttgaaatcactctcacaatttctcctgcaagtagttcttaagtagtcctcactactgagctgatcatagttacttgcctggaatttcaaattcgttcggttcatcttatacacaaaacaagctctaaatgcattctgattcctcaataaatcgtcaactgtgccctatccctattacatacataaactataaaaaaggccagaagttttttctgaagtttcctacaacgagagaggtttgaggaatgaaacatgtatataaatatatgctatttaaaaatatagtgtatgcttattatggatgcataatttcatccaccagcatacaaaatgaacagaacacattaataaactacaaagaactacaaatgttactttcgtccccacactagctaaattgttttgtaccaagtgattacaacaacatagaacaatctaaaccacattctcatttcttagttaaattgtcaacttcctttaaaatatgtaataattgatggaaaaggccagatttactcgagtgtactataacaagattttgtctaccagcatatgaagaaattaagttcttatcagcaaatatacttccagactagaagcagtcttagtcacaattgataaaacagtaaccaaatttgtcagaattgatacaatgcaagcattgcatcaactataacaaagccatttatctattgatactcactgtttctatttgctccaggagccgggctgcttccttttcttccttctccttagcagccttgtctttccgcgtatctgcaatcttcttggaaacattatctttgtgacgctgaccaagttcatggtttctaatgctgctcgggttattggatatgtatattttgcagaagtcgcaccatttgttaccctggctaacccaatactgcaaaatggggaaaaaaccaataattaaggaaagcaattggcaaagatttaactctactaaaggggctactatgggtgaaatgaacttaaagagaaatataaataaacaaaatttggatgcctttgaattgaaaaagaataactattgtcggcagtaatacaaaacaaagatattcctcatctatttctctcggcaaatataaggtgtagagattgcattatgatcaacacaatcagtaaacaaggttgaatttttcttctaatgaattaacaaatttgaaacaaaaaaaaattaatcgaattcaacataaagaacaaaattttcactcaaatataggtcaatttactacatcggtaacaaacccaattcaacaataaatttggctacatctatataaacagctcgtatgaaaccagagaagtaagtaatagaaagtggatcgcaggagatacctcagtcatggttgcgaattgggtctgctaaatcagaccgcctagggcggcaaaccggagattttgcaaggctgaaatacaaatctgggtagaataacaatgaaggaatcgcagagacacggcagcgatagtagtggcggtgagtcaggggggttggatttggatatgcactatccgaaagtatcagagcgggaatttgttgactgccttcgaccaaagtatatggtttaagtttacaaaagagaagtaattaacccaaaatcgtgtctatggcgtttaaaaagtgtaggaatataacgtcatactagggttgagtaacacagaaaactacgactgcattagttgaaggtaaattagtatttttgttcctgaattttgatagtattaacaaatcttatttcatttagtacatatcaaagttttcgaagggcataatttggtagatatcaaagttcatagtttagtacataaacaattaaaatagtaaaattgaataaaattagacaaaaacatttaaatccaataatcttaataattcaagagtatttttaacgactttaaaagttcagggacatgatttggtacatgttaaagttaagggggcaaaaatctaattagccttatttgaataatagggaataatgttttgtaaaataattatatttttatgttcaaagaatatttttttttatatttttacggttttccaaaaaataacacgaaaaca

SEQ ID NO: 111638 - DNA, 3431 bp, Cannabis sativa
  modified_base (2469)..(2485): a, c, t, g, unknown or other
tagcagcgtcaacattaaccttaaaactatctccatgtggtggctgccattgctcagcaccgtcacctggaattagaccaggattcgggtatgtaacattagaacaatcagaataggtttagtccaatggacaaataagttattagaacatttatttagagtgctatacatattaatggcccgcaaagtttcatgcctattaataactcacgtagtgctactaagttcgaactaccaatttcatctaaacaagtaatgttactaaagtgggtaatttgtagcataaatatttatatttaacttttggctttaaataaatacttatatttaattttttacggtaataataactaagttatatttgtagttatcagggcgttaagtgttaagtcaatatccatataaaagtttttggctatccttgtcattaaattttactttttatttgaaaattaaattaagtataccaataagaaaatgatacgtataaaatgacttgacatataacaataaaaattttaaaaatataatttaattaatactgtcaaaagttcaatttaagtatttatcttgtttatcttgacatataacaactaagtacttacaaaaattttaaaaatataatttaagtattaatactctcaaaagttaaactttaagtgtttaagttgtaactaaattttatttgcccaataaatatggcgggagggagatggaataagatcccatttaccaatccaaaacttattattattgttatcaattatcatcatgatcacttgaagactttcttttgtccttttttgtttattattattatgataaaaatggacttatttttgtcctattgctatggtgtaaaaagactgtttttcatttatattttattaatttcgtggagggaataatggaggttgcagggtctaattagtaattattgattaggtgagtgagaattagggataagccatagaaactcaatgaatatgagccaaagctgttactttcaatgaagaggggaaggcgtggctcttgcttggccagacctataagccattggccaaactttaataaaggtcaacattaaagctccatcacaaacgtacataattgtacacactttgtacttaaatatatatataattttttttccctgtatttttgcattaatcacagagttggttttgagttttaacactttatttttctaactatattatttttaatttaaacaaagtaaatggaaactatattgcagtaggagctcacataaattgtgcactattatattcttgtcataattcatctatttgtattgagcacgagtgttcattttccattttcatactttataaacccaatattgagttgagtcccactaagaaacttataatgctttcaaaagagaaaataataagaatgtcctttaaatgtatctctccaatattatcattattaacttgatacacatatattaatgatatgatgtgaaagaaaatgtaattagtaattttaatctgccaactaattaaggttgcttaaactatgtaaacttcaagaaaatggccatgcaccttaataaatgcatgttaagcagtggagtcagtaccaatttgtgagcttgcaaacgacagattaattcaaaattttcaaatattacaacctatatatgagccgaattacagcagttgttttaattatgccaatcaagagactggcctaggtgaactcattggattagtaaaattgacacattgatttattaatctgttggaaagtatattgcactactatgaaaacgtcctattccattggttcagattcgacatatctaccaattgcttgaaccagtgtatattctactgacgtatttgcttgagcatttgcctcagttctcaacttacacttctaaagtggcgctgttggttttaaaacaacacaaaaagataaaatatgaatattttctcacacatttgcgtcgattttacacagatacatctaaaaaaacaaattaaaaatatcatatatatatgcgatcaaacccagtctagatcttcgatttcagatctgagatatacaactagaaacaacaaaatatttttgggtttgcttggatatgcaaaaaaggaaaataaatctcagataagagccatgccaagagcaccacgagggacccaaaaatatgaaaatgaaaacaaaaaaaaaaagagagtaagatgagagaaagaaaatatgaaagatatgaaaatgaaaaaataggcggcggcaacgcttacggcttacatgacaaagaggagcaatagaataattatataaaaaaatagggtttttttcatttttacacttcaaaccagttttttttacatttttacgaagttctacatagaaatttctattgcaactagcattgcaacctaaattgtaataaaaaatcgtatagaaaccctaattgcaactagcgctgcaacnnnnnnnnnnnnnnnnnccgtaaatttaaaaaaaaaaagttaaaaaaataataaatgtggtaattccccccaaaaaatatctatattaattttaattaaatcttatttacaataaaattaacattttctcacgtcaaaaaaaaaaaaaaaaaaaactagcattttttgagtgttaagggaactttctatcccactctattttgcactctctctttaatatgatgacaaatatcatatttttagtaagagttatttttacttaataattagttatgatattctcatgttattacaattgtgccattactacttctaaaataattattctactaactttttgtttataaaaaaattgaccacattaagaataaacataaaaaaaatatatacatacatagaagaggtttcaatggttacatttttaaggaggtgattttgtcccgttatgccaaatgagggaatacaatccctgattgtactgtagccgttggattaaattggggcatgatctaagagctgggtttaaagtaagggtagttagggtgcaaaaaatggtaaccggttggtattttattttaaaataattaattttaaaaaaactgacagtgattgattgattgatgttacttgacagttaccatttttcaaaatacataagtctttccttcttcttcgtgggttagtggattcaaaatacattcataacagttaggtttcttttagggcagttctccacatttttttcttcttcttcacattttcttcttcttcttcacattttcttttagggaataaaataaatttaaaatttgggagaggaaactatagtagtttcagagttggtgtacttggttttttgtatctccagctccgtctccaaccgcggtgggtttgtacaagtaagtgtctccgaatgtacaaattttcttcttcttttgcatgttgttcgttctttactttgga

SEQ ID NO: 111639 - DNA, 3713 bp, Cannabis sativa
ggtaaacaaacaacaggattctcctccctattatctcatcttgctcaactttcaactgtgttatttaagttttctgaattactttcattctttttaaagcaatagtacacagaatttggtgtttgaaacgcaagctaacaccattattgaagtcctgcgtaaggcaaatataattccacagccaccgccttcggaagtagacaatccatttgcttcgactgttgtagctaatgcattagacgttacaacgctagcaaagaggtcggatagaattgaggctcaatacattgccattccactctcaccaacgaatttattggatagccaaactaatataatgtgcttctttctggatagtcaaaaagagatgaagtagtttttgatggcttagttggccaatgtggtagcattattgaaggagaaagttggggaaccataaccatcccaaccaatagatgaccgatctcatgagtgattatgaagatgtgctcccaaaacattgggaaaaagatgatgatgaggcactgtctactccaatagatgtcattatcatggccattggtgatacacagtcagaggacgatgtcctactcctaactgggccccataaggggtaccatttgtaagaaagaggaagaagccttgctatttactggactatactaaggaaaaaaaaggaagaagcgacttcttccagagaatgtttatccagaaagaccaacagattgtagattgctacgtacgttccaaagaacgttgatcttgaaagaccaatagaacctataagcttgctaccaaaattcttcatttgaaggctgcaacactcaaggcgagttttgaggcccgtgtgcataaaaatcaaagaggaatatcgtatacaagacacgggccgcgacactaggcctctagtgttgcaacccgcctaaggaaaatttgatatttttccatcttttgtatccttttttggctatttaaaggagtggattttcacactttttggcaagcaattagagagtactatcagagaaaagaagtgaccgaggaggctttttaagagaatttttcaataatttcctctcttctatttcctttttatgttcataattgatttgtgtcgaattgttataatgtataggaatagctataacaaatattaaggtattgatatggagattgtttgacatatttttatggttttaattctttgttataatcatatataatttaaaaattttgtaaatattatataattaaaatataacatttcccaaaaaaactaaatatttaatatttaaattcagagatatcttccatttaaattaatcttaaataaaataaataaatgaaccgtaaaacaagtaaaacttatatggatataattagaaaaagaacagacatttttttgttctgttattttaaatgaatagtatttttagagagatggcttggcattagcggcgattgcataagaagacatgactgataaaatggcggtgcataggaatgcaatgaggacgagactcgccgatgcgtacccctttgagcaaaattcgtcaatttcataatcctccaattgttgattgaaaaatgcattcaaatctttggttacagccaatcctgcagctgtacccgtggctaaaaagtacgatataatctgtacagacaactttagtattacttctcaagtttataaaatatttattatcttactagaaaaataatgacattctttctctttttatttcaatatatttaatgattgataaactaaaatcgcaaactcaaagattaattgtgtagatcattttctgaaaatcaacattaattctaggctacttagatttatatcgaaatatcacaggcagagaggagatcgtaccagcacaactgttatcaacaaaaatataagtagcagactcatcagtctgtgacatcattttttacatataattaactcttgtccaatgtacatactacattgtgcatatatattaagtaaatctaactttaataaatagttattagctatttaattatgttagtgatcatgaataaaattaagtaaaactaatactaagattcaaatgaattcaccttgtcaccgtagaagtctatcaaaaagtatcccttcacattggctataaaaaggtagattgagaatccaagtcgccagagggaatataccaagccaaacacaatcacagaaagcatgtatctgtatatgttaaaaacacacgtaaaaatgtcaacatcacaatcataagaaaaatataacatgttcacatatatatattaggttaatattagtttttcatttttatattcttaatttttcttagtttcttttgtaaaaataatgttatatttttaatttttattttagttatgtatattttaataatatatattagttttttatttttagatgttatttaataaataacattatttttttattaaaacatatttgaattaagaactatttataaaggaaaatataataatattcaaaatttattactaattataattttaatttaatgttaatacttttaattttatataatatttttttgataaatacaatagttaaaagcattacaataataattatttaagaaacataaatatttattctattttattgtttaaaaagaaactaatagtaaaaaaaaatttaatatgaaaattggataaaaaatgagttttaaatttaaattttaatattaaaaaaaattcatgaccatgtttaatatatgagatacattgattggcgatggcgtatatacctgtaagcatatagactctgaaagttgagtgtgagttcatggttggagttagtggcaagaataattaaggctatcaagaggagaatagtagtaaagaaccataatccaaggcacacaatctgttttaccgtagacattaacactaacttttgtgatcctctaattacggattcatgcttattaatattactactaaccacaggaataccactctcttgatcactgcttgccattatctactgtttactgcccttactatattagatcactacccttataaatttcatttattccctaattaccttatatatatatatattgagataagaggcacattcatatacgttaattaggcaggccttttaagttgtcaattttaattagctgcattaatatttattaatgtgctttgttaccaagtacaccactatgtttcgatactcaacttttatatataactgctattctacctaattggttgtctttcttttctttttcttttgttaagctttgctacaaacgtttacggattaaccaaaaagccattaccattttagttcataagacataactatataaattaattttaacgctatggcttttctgtaacaaactttggttgtgtatgctggtaactggttaaattgtatattttgacaaaatttgtctcatacatacatgtagatgaataggacacttctcaagtgttacctattgatggatactaaataaatttaaatataaatattaattttaaaaatatataatacccatatataaatagatataggtaatacccattaagagtgtgcacccatatatacatatataaatgtactagcaaaaagctacgtgcgaggcacgtatactaaattttatggtagtttttttctatgttagttgaaagtgatacaattaaaaatt

SEQ ID NO: 111640 - DNA, 5957 bp, Cannabis sativa
tctctctctctctctctctatggtttggtttttctaaaactagacactaaaaaacaggagccatcaattggggcatattcaaccattaggaacttggtcagtggctttgacaagataacacttcagcaagctttccaggtaccaaccaaccccattcaattaacttagtaagtattgtatatgattctacaaagctatttagagtaagtaatatgtataatcattatctttataggcttctgaagaattaatagaatcaataacaagtgcaactgaaatacaaccaatagttcatgccatctcaacagagaaagaaagaaagaaaaaaggcttatgggaaattgaagctagattcctaaaagcctttattggaggaaaagaagagacgatgatgatatcaatgaacaagaagaagaagaaacaacaagaaacaaaagcctttaatatccttgaagcaaaacctgattttgagaactgcaacggtaggagtcttacagttacaaggaaaaaagctggtcatcttttaaagggtaccaacattggcctctttatggtaaatttgaccaaggttagtgttcaaaaaccatctctttttcaacttagctaataagctaagctaggtgttcagaatgttgtgattctgaattgtgcctaatgaattagttttttgtttgatgtgattaaaaacacaaaaagggttcaatgatggggcctcactggaatccaagagcaactgagattgcagtggtgttgaaaggagaaggaatggttcgagtggtttgttcaagcaagaaaagtatagggaaatcagagtgcaaaaacatgaggtttagggtcaaggaaggtgatgtttttgctgtgcccaagttccaccccatggctcagatgtcattcaacaatgattcatttattttcatggggtttagcacagcaagaaagaacaatcatcctcagtttttggcagggaagcagtcagtcctacaatcccttgacagagatgttttggcattgtcctttaatgttgggaattcgaccattgaccaacttttggctccacagggtgattccatcatacttgattgtacttcttgtgctgaggaagaggaaagaatgatgaaggaagaaattgagaaagaaaaagaagaagaagaaaggaggaagagggaggaggaagctaagaagagagaggaagaagaggaaaaaagaagggaggaggaagaggagagaaagaaaagagaggaagaggaggcaaggaagagggaggaagaggaggagaggaagagaaaagaagaagaggaaaggaagagagaggaagaggaggcaagaaagagggaggaagaagaggaaaggaagagagaggaagaggaggcaagaaagagggaggaagaagaggaaaggaagagagaagaagaagaagaggaggaaaggaagagagaggaagaggaggcaagaaagagggaggaagaagaggaaaggaagagagaagaggaggaaaagcaaagggaggaagaggaagctaggaaaagagaggaagaggaggcacgaaagagagaggaagaggaggcgagacagaaggaggaagaagaggaaagaaagagagaagaagaagaggcgagacagagggaggaagagaaggaaagaaagagagaagaagatgaaaggaaaagagaggaagagaaagaaatagaaagggagcaagaggcggctcggagagaagaagaagaaagacataggaaacaagaggaagaggaagcaagaaaaagagaagaagaagagatggagagggagcaggaggaggctgagagacagagaaaacaagaggagaaagaagaaaggagacaagaggaagagagacaaagacaagaagaagaagagagggaaaggcaaatagaggaagctagaaggcgacaagaagatagagaaaaagagagacaagcagatagagaaacaaaaaaacaacagccagaaaaggaagctggcagagaaccagaggatcatgatacaaaaaccacaatggacaagaaagagaagcaaggtgctgccggagttgaaaatgggaaatcttatccgaaattgagagccgtctgatccatatgacagaagctgcttttactagtttgttctgcaagactaaacagtgcaacataaataattgcatccctacagctctacttttcctaagtttattgttgatagtaagctatatgactatgttttaaaccttatttatgagtttatgtttatgtttatcactgtaataataagtgattatttttcaagttttctttgtaactgaacttatgcctacttaaccaagcaattcctctgaagttatagagaccttagtataaggaaaaacagctaaaattgcaaaaaccaatgacaaatcaaattgaacttaagaaataaatcgaagggcatgttacaaattccattcacaagagacttgtcttgagctttggcacataaaaaatgacagtttaaagttaagattttgtcttatattaaaactgagagctctggacagttcaaaattctttttaacttacctttacatgacatagtcaagtaaatcacattctaagagttggcacaaaatgaaaacaaaaaagaactaaacacagctatcaattccatcacacgagacaatatttaaacaaaaattgtagactagaaaaagccattactaatccttctcttggtttcaggcaagaaatgttaaaatgggctttcatgcccccacttgacttgccatcataaagcagaaacgaaatatacaagtgatatggtatttgctactgttatcaaaaagtttgctctcaagcattgattgaacttgaaatatatgacacaacaactgtaatgtcgtcaagcttaccaccataataacgaaacccagcttcttgagcagctgttgagaacggtgtctgccgggttttgtctagtgctctctggcgggccaaagcagctatcttctgagcggtcacctgaggttctaggccagctcttacagcgtgcacaacaacagcagtaacttcattattatacaagttgtcaaataacccatcagttccggcaataataacgtcccccgaagaaacaggaattctgaaaacctgagtattcaacaaaacaaaagagaaaatatacttagtgcgtgaaaatccaattttcccaattaccattaaatgcatagaacatgagtagcgcaatcacttaattcgcaattttttctagatatagcctccaggtgcaaaaattgggaattcttagcttcataatgaatcaaagttcaaaacttttctttgtgcacaagttcttgagagaacataacataattatgttcaaagtacttgagctgtttaaatgtttgtgcactctttctttggtagcagtactttagggaattacaatagcctaacaactgacctgaccagagctcggtaggtcaccatctgtgccactctctaactgatatgtaaagttgaaaccgtgttgttgtactggagatcgaaaaatagtgcatccatctctaactactatgaaaccactatctcccaggttaattgcatggagttcctggtgaacaattagacaaaagaacaacatattacttatagtacacgttccctgatttttcaaacataaggcaaaccattaaaaatgcacagaacaaaataaattcatgtagttttcatagcaggaaaaaggttgtcttatttcaaaaactgaaaatcttcatacaccctgcccaagatttagccacctaacaaggaaccatttcgaagtattgcataggcttgggagttgggatgagagaccaaacagagaaacgctatgatgactctctagcaattcatttataagattggtcaataaatgattattcaatgcatgcagagattggcaaagaacattctttttttctttttcatttgcactttgtagtgtggtaagcattagaagtttttctaacctaagagattctcaggacaagagacaagaggcacagtcactactagtgaaatgaaatatctgtaacaaaccttgtctgtgagtgtaatgatgcaagctgttgaagaaccccttgcttttgtacctgagtgagccttttccaacactctggctgggtcaatagaacccttaggctcctcatgaatggctgaaacagagttagacataagttcacgagcgaacaatccagcattcacgccaacatctgcccaaccaccaacaccatctgctaccccaatagcttgttcatctacacaaataaagtgagcatcttccccacccgtgtcttccttatccggatgaggcaggtaacatgatccagaaagaagcttcaaacttctgtctccaacaagagttctgaaatcaaacccacaataatgaatagttctttcctatatagacatatctaatacatgaaaattcagtaattcatctagattgctaaactcccacttataacttattgatatgttttcagaactaaatcttgtttcaattcactcctaaccttctcacaaagaaaatggcaatggtcataaatgaaaacactgtcaaagtaaacataaagtaagaggacatactgttcaggtgaaatggtagtattagaaagctgttcatcccgagagcctccatcaaacgacacatcatgagcggcaccagcagcgtagcatgctaaggaagaggtatggatattcctcaactgaggcccaacaacaacattggtgttgcaattcttcctagttacatcagcaagaaagtggctacaagttagttgttggctattggacaattccattcttctgaagctcaggctagctctctggcaactactacgagttttatcattgaaaaacactccggtaggttttgataactctaatccattcccacaacttgagataacatcatcaacataaacatcaccaaatagagatttggaattagaagcagccatagttttaggagcctcacccgggtgatttactaaatttctagaaaacaatttccctcttccaagaatagaatttatagaatttcgtttcccagatactgccttctcaaaaccagaaaacacagaaagattcagctttgagagaaagctagatggcattttagcctcttaagcaaacgactctggattcaaataggaacaaagaaccttttatattgaaaagtatataaaagttcattactctcaacacatctatatacccagaaaagaaaacccttttaatcttcttcaccaaccctcaaacctgcaagcaaaacaaatatcagatatatatatatacatatatacatgtaagaaaacgagtagagctatattaagtaagaaaataaacttagaaaaacaaaaatcccatttcgggattaacaataaacattaatttttgaaatcaaaatgctaactttcaatcctatttcttatatgtatccagaaacaaccttcccattaacatttggagaccctgaaacgaaaaagacaaacctgttcaaaaaggaaatggaggaaggagattaagaagctccgaaatatgaggcgctataagaaaatttgtgagcctctgaaattgagtgggttaggttctactcttctgcgtaagggttcacccacccaaccaacgagcttaaacacgtggggtgggatatccgaatcccaatataatcattttgaattttggacgaaattctcctttccttttatcacagtttctgtagagcgttaagggtattttggtaataatcagatttacaaaataatttttattttatatagaatttatgtttttaattatattaaatttttttaatttttttctttcaatttatattattaataaaaaaatctatcaaataaaaataaattatattttaaatattattaaaaaaattaaaataaaaatttatatgaatttttttaaaaatatatatacatgaattaa

SEQ ID NO: 111641 - DNA, 2900 bp, Cannabis sativa
  modified_base (60)..(67): a, c, t, g, unknown or other
  modified_base (1489)..(1493): a, c, t, g, unknown or other
aaaacgcaaaattttaattaatcacgtttttccataaaactcgttgattagcaacgagcnnnnnnnnatgtttaaaaatcacgtaatacacctatgctagttagggtgttacaatttatattataaattattaaaaataataattataaatacagtatgtatcgtggcatattggaaggaacttaatttatttatgtaatgtaattttcttttgttttcaacactgtaacgttgatgggtgcgaggtacaaacgatatcaatttgttgtgttgggttagaataacaagataaatgccaatggtttatgagccaagtaccataggccgcctctccattcgaccactattggtattaaatactattaggggcgtttggtaatggcattccaaaataatttcactaattacaacataatgatgagaatataagaggttgtttggttttataatttaaaaattatttttcattttttaaaattgaaaacaacttttaaaaaataatagagttgtttggcaaaattttttaaaacaattttttaaaaaattaagttttaaaaaattaaaaaaatatcaaaatgttattaataattttcaaaaataatttttttgtctaacattttatatttttacttacatactcagatcctagacctggaactatactcgaactcggatgagtttttgtcatggtatggtgttaaaatattgattttttaataaaaaaaatctaaaaataattttaaaaaatttgtgccacactattaaatttttaaaatgaaaaaaaatattttctattcttactttcaaaaacacaattttaaaaactgaaaactgaaaacacaactaaacatactctaattgtctgaaacttataaatgtgtatagttagtatctactctagttagatttactaagaataattattgttagattattgttaattgaaattaacctgctgcaccctaaaaaatacttaaatataaaaatctcttaacaatgagaatgtgaaaaattactatttacatttatcaccccaaagaagagtcacatgggtaagatttaagatcttgttcaggtgggagtgggacaatcataaataatatttggaacattaagattagacgttagacggagttatagtattagactattttactcttaaagcttaagcttacttaaggatgaagtaaagagtaaaaatgagattttgtcctttgtgtattggtggaataattccttttatttctgttataggataagttaaaattaattaatacttatctctttacttaaacaaaaaaaagaataaaatattagaaattagaagataatcttcaaagtttagagattgtttggtttcataatttaaaaactaatgggatcgtttagtaaatttttttaaaaacagatttttataatactagaaaacagaaaacatcaaattgttactttaaattttcaaaaataatttttttttgtctaacatatnnnnntttacatttttgctcacatacttgtatccttaacccgaaccaaacccgaacccggactcggatgggtttatgtcatagggtgttaaactattaatttttttttagtaaaaaaaaatcgaaaaaatagttttaaaaaatttgtgccaaaaatcattaaatttttaaaatgacaaaaaattattttctattttcacttttaaaaacacaattttaaaaactgaaaattaaaaaatatagccaacaggctcttagtctttccctctccattttggccctagaaagaactagaaaatccaacatgtttcttcatcatttcgcaaggattttagtttgaattgaagaggaattggaagctagaacctaaggaagttttagttagatttaagcatgcaaaaggttgaaataggttctgtctgagttgtacaagtttgggaatggatttgtgggttaattttgagttgattgatgcttatttgagttggaattggtggttagttaagttattgagtaagtttgagttcaagaactcaaatctggctcaacaatggtaacttttgtaatattgagttatttctgtttttactgcttagagtatgcttattgagctatatgtaggtgtggtggagagttttatcaatttggggttagtttgagctcaaatgagacttagtatttttttgcagtagaaaataacatacatttttttattagcaaattcctatttaggcaatttttccatagtcttgtttttcgtatttcctcgatatttacattattgccatgttatttatcgatagagtaacttctagttttgagtttagattccgaaaaaggttttagcaagttgttaacccgttttgcataattgtgacttaggacctctgttcagcgcgtggacatccatttcggttgaccgacatatttaaatctagaaacaatatgtatacatatatttgtacgtgtgttatatgcatgttgtattatgtgatttgtatactaccaatactagtacaattgcggtacaaagtgcattgatacaatatgatgttaaaatggtatgacacagtgttaccaacactaacacgggatgagtataaagtgcatatggtacaacactcaatggtactcgaggtgtggttgttgcgatattttgcacacgcaagtgtacgtatcgttacaagtagtaaactcaccaggagtgaggtcgatcccacgagaattgtagttaagtacgttaaaattaaacttttacttctatttagttaaataaaaatcaagaataagttaaaactagaaaaataataaatacagtgataggagaaacaatttaaggaaataaacagttaataaaaattagggcttcgatttcaattgtatctattgattatggcctaatatggttatttt

SEQ ID NO: 111642 - DNA, 11119 bp, Cannabis sativa
  modified_base (57)..(58): a, c, t, g, unknown or other
  modified_base (1260)..(1264): a, c, t, g, unknown or other
  modified_base (1341)..(1343): a, c, t, g, unknown or other
  modified_base (1471)..(1472): a, c, t, g, unknown or other
ttaggtgtgtaattggatatccaattaaaaaaaccgatccaatccaattagtaattnnattggattggattggattttgaagtttaattggattggatcgagtgatgatttttcaaaaccaattactgattggattggatctaatgaggaaaaaagtgtaaattgaatcggacgcccacccctaagtagtagcacacacaatgatatgagtagtcttacatttattttaaatcattaacttttacgttaaagtgtgacttactattttcaccaatattttaaaataagtttatgtcaatagttaaaattataacttatgtattgttgtgttatctaattttttagtcagttaaaagaagttcttaaactattactaatgttttaaagtagtttttttattaaattttgacacgtgacaaataatatgtgaatgtgaatattttgattattgtcaataatgaaagtttcgtaagggaaccggaacagactaccatgagagattttttttttttttatttgagtaatagcaatgagattctccaatatcatgttaagaatagctagaatttttcagaagaagatatcattagtttgatgagaaataaaaaggaatatcgaaaatttaagtggttgactttaaaataaaaataattaaaaatataaaaaaaaataaatatttaaactaaaaatcaatttataattggaaaaatacagtaaaactattattaaaactttaatttttttttaaaggaatgagacatacatttggcatgacaatagaataaccaattatatattctcttagtcatataatgtgacaaaatttaacaaaatgaaccttttacaagaggggattatttttaacgagttgaaaaattaaaataagtaattagaaagctataatattttaaaaaaaaaaacacaaaatttatatcatcatttaaaagaatagggattcactcaataacttttgctaaaaaaaaatacaattatattgtatacctattttattttatttgttttaatttttactttatttctacatttttgtcagatatatccacttttataaataatgtcctcattatattttttaagctaatgtaaattatatgttaaatttaagtgaaaagtaaatgtacattaagcaacccacttacaaaagtaaattcattttaacgaattataatatgaaaatatttttagttaatggatactcctcaactaataaaaaaaatgttaattaggatttttgccccnnnnnctttgacatgtaccaaatcatggtccctgaacttttaagttcattaaaaatgcctcctgaactattgagattattgnnnttaaggacttttttctaattttagtaaaaaaatctaacatggatgaaagtttaggggccataatttagtatatgtcaaagttcgaggggcatgatttggtagttatcaaagtctggggagcatggttnngtacataaacaatcactgaaatagtaaaattaaataaaattagacaaaattccttaaatccaacagtcacaatagttcagcattttaacgactttaaaagttcaagaaatatgattttgtacatgtcaaagttagagggacgaaaattttaattagccaaaaaaaaaaaaaaagtttaagattataaagtagaatgcaagcaaaggcgtgggctgatgggccattgctagcgagcgtatgaacatttaaattttggttcggcttttcgatagggttttcgaaaatcacaacaactattttatttcaacaaattcttaaaaactcaactttctcaattttgttcctcccttttactttcctctatcagattttcccggatttttatttgaatgtggtgccatttccatttttcaaacttcacacacaaactgagccaccatgaattcatcagatccatctctggcactactggccgcgagcggtggtgacactgtcaaacttttcgatgtgtctggtaagcctggcgatccttgtaccttaagctatactccatctcccggttgccaagtcaattctgtcaagtggaaccacaccagtgagtacctacttattgtatttcgtatacacacatataaatccttttctgcaattgtattgattttttttttctttctttacgaagatccgtctagttttagtgttccctctttttgatttttgtccacatcgctctgtgaagagggtcgatttttggttgctggaaaaaaatgaagatgattctcttgaggtggtttctgggttttctttctttcattttttgttttatcatcatttcgaggatggggtgggttaattgttgttagtaggatatactcattgttgaagaattattggttgagcttatttatttatgttttggtatatgattagtatttttgttgctggagcgacagtttatgtattaacagtggtggggtttgattgctgcagatttggtggtggccagtgctggtgatgataagaagatttcattatggaggaagagtggacagagcatggggaccattccggtttctgggactgatagtggagacaacattgaggttagtagtttatgaatgcagtctgtgtactcttgtaaatgtaattaggccagcacttagactcagtgtactagaattcaaatatatgtggatcaatcatacaaattaactacgagcacattttgagagatttgaagaataagagatggtttcttctggtagttctactcattggataataagaccacatatgagctgtgtagaatgtcaaatccgaacttatatggaactttgagtaggtcacacctgcaaaaatagattttttacagtctttataaatctacatctgcaggcttgaatttccttttttgtgttttagttaatttatttctggttaattgctttgtccaggagtctattctagctatcagtttcagcaacaaggtttctagatacatatgtacgggtggaagtggccaggttgttagaatatgggatttgcaaaggaagcgctgtattaaatggttgaggggtcacactaatacgattactggtgcaatgtacaattgcaaggatgaacacttggcttccattagtcttagtggggatcttatacttcacaaccttgcatctggggcacggactgctgaactcaaggatccaaatgagcaggtagattatgatgtttcatagttttctttcacattgccaacttcacgtgtatatttttcttatatttctgctggattttaagaccaggtattgagagttcttgactattcccggattagtcggcaccttctagcgactgcaggtgatgatgggactgtacatttatgggatactactggtcgcagcccaaaggttcagttctttttttttattatttttcttcttctaaatcttctgcttcctctcaagagaaatggttatagagttattaatccattagttatttttatgtatctatgtgaaaaatatctgaagttttagaacgctcaggccacttttattcatcagattgatcattaatatttgcactaaaattgtcttgatgcttcctgcatttgattacaaatttccagtgaagtattatctttttagccaattttgaattatggtttgtactttatactgagtcatatttgtggaagtatatctctacagctctctttgcttgagttttaacactttaattttttgtcatctaaatttaagtatctgattctctcttttattttatttttttttacaaatttgatcaggtttcttggttgaagcaacattctgcacctactgctggtatcagcttttctccttccaatgacaaggtctcttgttatgcatatgcttaagcatactaagatgcgtattgactaatattggcattgtatttacatgattcttaatgtatgaataacatgacttacaatcatatgcgctggagttgcaaagctgctttgctgtctgaatattagtgggggaacagttaatcattttgttatttcattctccatgacagacaattgctagcattggtttagataaaaagttgtacacttacgactcaggatctagaagaccttcatcttgcatttcttacgaagtacctttttcttcgttggcatttagagatgatggctgggtactatcagctggaacaagcactggtcgtgtagtcttctatgatgttcgtggaaaaccagagccattcactgttcttagagcatatagcagttcagaggtagctttctttcttttccttttacccctattgcctgtctatatcttattaactaaagtgcctgctcattatgaacgaaaaaaaaaaaggaattgaagtgccagcttaaatgcttgttttccaaatttctataaaatttaattgtatacccgtagaaatgaacatctgaaaaggtgggattacacctttttggtagtgtcttttttctaagttgaatcatcaagactcaagaaaaaatatgaattaaatctagattcatgagggttccatatgttgtttgcaaatgagagacttgtcatttaccctctctttttatttgtatttttccttttattctttaggagaacagaacttattttgtgtatgtaaacaatttcaattctaataatcacttctagtattttttcaggctgttactagcttatgctggcaaaggtcaaaaccagttattgtaaatgaaagtagctgtactgctgaaactgcccttctgggagatgctgttgaagattcaattcttatgcctgatccacttccctctatgacctcgtctagcctctctctatctacagcagtaccaggttctcggaatcctggtcgttcgggtccctctcttgaaacaccttcaattgcagcaaccagcagtggatttacatcaggcatgctacacatgccttctgcagaggaaacaccacagcgaaaccatttgtggccaggtggtgcattgggtaggttacacgcccctcgtacaagttataacttcaaggatgaaatggaggtgttctctcctcttgtggatgttcaacccatcacacccactcttgacaagttctgggatgatcctgagaaatcaaaaaaagagcatttgctattagacaagaagccatcgtcacttctgtttccttcatctacaagaagatttcctttttcaaaggatggtggcattgatcatccaatatttgattggaagcctaactcaacttctgaacaggtcttagtctttctttagcttttattttcttagctgaccatgtaatccattagatgacaaaattatcttttgaatatctggtcctgagttctttatcttttggcctgtgtctatattctgctctaatttcttacaagttactttcttgtataaattctccatttaatatgcttttctttagagcatttataaattgatagtattaatttactcttgacatgttctaggatgatctgatcttgtggatgttcttaaattgttcaattaagaagttatgctattgtttttgtcacttttttgtatcctgttaattgatataagtgaacagtttaaggacgtattaaaaggaaagtaaacaaaaggtatcgagtatttgcttgtttggtcaattctcttattctcagatttctaacaaaataaaattgtgggttgaaacttgacagtactataaagactctgattacttttcttatgcttgaatttagttgtagcatttgtttttaataattttgagctctgtgtgtgtaatgtgtgcatcagttatatgtttccagtgacattgatgtggcggctttgattccttcttgactcttctatgtaaaattgtatgttctcgatcagtatttcttctttccacaatgtgcaggatgacgccaaatcttcatttggagtaatgggttcaacaccctctccatcttctaagagtgaggactcctcatccatcacacctccagaagcttggggtggtgagagaccatctgataaatatgcccacctgcgcactttgccgtctcgattgggaatgtttgcgtctagtagtcagacaaccgggtcagttttttctggattacccgatatgtcctcaacaagtcaagcaactattagctcctcaacaaattccaactttagttatgcaaacttgcgaaataaagatatttctttaaatcaagagagttctatagcccttccagaacacttgacctctagttcaatggctgtctctcctagtaccaaaggcattgtaggacaagctaaccttgaaccattaggttctccgtcccttcctcgaagattttccacttacgcagagagaataagtactacatcttccttcagtgatggaacatcactctctacgggttcgccaaaaataaagaaaacaggagttgaaagagaagaactatttagcagcattttatcaaagtcagacacatcagctgccttagaaatgggaattcatcccacagtaaatgtaagaatttagatgtaatggactaatatttgcatctaaatgttcaaatattgtttttatatttcactcttatgagcactaaagttacagttacatattggttgatattacatctaagctgatatatctatcatgctctctattatgcatatttagattaacatggtcaaattaatttggtgcaggggggaaccttgcaaccacagaagatccctcagcaggatgcacaacaaggaacttcctttacactacagctttttcaacgtactctggaagagactctaggttcctttgaaaaatcaatgcatgaagacataagaaatctccacattgaaaccttaaggcaatttcatatgcaagaggtatgtgtgtgtgtgtttttcttggagtagaatttcttttacttttaccttcctctcctcctgaagttgtcacggaatcactttgtccagatggaaatatcaaacgcgatgaatgttattctggaaaaccaagctgagctgatgaaagaagttaagtctctaagaaaagaaaaccagcaactcaggcaattgctttaaacattggctggtcaagagttatcattctcatatacattcccaatcaaagatataaggggaaaattggctatcaaaggtggcaggagagaaaaaatgtgaagacagaagaaaatttcatgtacagcaactatgtcagccaactaattgatgccttgagttaagtgatgcaaattcaaaattttatatagaatgtgttttgttcagtgaatctagaaaactttgtatgttatttatttttttatttttctattattattaatgtatagcaatcagcgagttcgagttttaaaaagagctccattatgaacttggaatgctttttgagttcttgaatttgatcttttaggctttgagtttggttcatttatgttttgccatgaacatctcgtaaatgctgatctagtttgatttgattacacatacttgaggtagcttaataaatgccgggcttgcaaattgaaaaccagaatatagaatttaattttaaacatgggattttcgtaaaatttgaaaaatcttgaaaattaataataataactatagaagtttaaatgaaccggccaataaccacccaccaaagtgtctaaaatattccaattcttgaagccgtcgttaatgaaaaggagaactcattttatgagcatccgcttcaaaacttaagctggttttagcaatcaaaaatttccttagatgatacatttagaagaaattatcattttattcccttaactctaaacgttaaagcccaccattgaattttgtgggattatttcctccaaatcccagctgtcttaattgccaattattagatcagctcttggcctatataaagtcacttcattccacttgttacacaacaaggcaaagatgccaaagaatgcattttagagaataacttaaagagagacaagacaagttagagaaagaagcggagagactttctagttagaacagagacaagttctgctgcaccaatcaagattggagtattgagagtgtgtgaactgggtttgggacctatattgagaagcacaattgttgtgaaagttcttgctcgggggaatgagagataaacacctgtgagattgagagtttgagtgttagacacaagattgttcccagaagctcgtgtcatgctttctgtactcgtctcattgattcaataaaaaaagagatagtggttcttaaactagaataggatcacgattatattcatcttgagtccaaaccagtgtatgtgttgttatactttctttatgcttagtttactaactagtttaataattagttttgttgtattgtatttgtaatttcaacttaagtactctgagttacatctaaggttgttgaactagttaatctttgcattattttctacaaaatcagagtatttttaacaaattttaacttgaattttcaaaaaaagtcaaaaataaaataataataataataatttgttttttcaattagagggaaatagccagcatatttttagtaaaaattctatttatagacaagacaaatatcctctttcaaaatgtatgaatacatttaatttgtataatattagactatttatattttataataaaagaaaaggtatgaatgttttgtaaaagaggaattaattttcacaaaatttactcaatgatcagtactattgtaatttagcattatttaaagcacaaatatatatacatgaatgattaactaaaggggtaaaatagtgtacggccatactttattttatttttctatctaagaaaaaacattatgatcaattcagtagttccatagattttgacgaaagaattataaatttgcaacaaatttaaaatctcaagtacatagttgataagagctaaaataatttctctaaattgttcaataaattaataaaatgtgggatattcctgtcaatagatttaccaaggtgatgaagcaacacaaataagcatgaggtcttccaaggaagaaaaaaagaaggaatatgttactctcattcaactcaataacataatttgaccaaagaggcacctgagctgaaccaaagtgaattgataggggtgatactattctccagcctagttaaggttagaagcacctactgtggggcggggcagagcagggctagggagaccaaccaatcctcttcctgcttaaatgccttatttcttgatcaatttcaatgcatcacccacaaggtgtaaagagccagttacaaggacctgatcaaagccagaagagaattggaatattattatgtatataccggatagttaatatttcattacatctttcttagtgtgatagagagtcccaaaagaatcagcattacctggaaccgaacagatcgattctgttggacagtgtcccggagccatttaatagctaatgggagtgacgaaaatactgcactagtttcaccacttcgaacgcacatttccgagtcatcctttaagtcttcactgaaaacatctgtcgtcttgtcatcacctcctggtttataatgtgttttatagttcattcaagagaattcactttgtactcttgaaggaaaaataaaagtggttacaatgattgatttcttacctttatttgagtgcatgatgttctcccatatcttttgaagagcgaactgccatgagaaatcaacttcagtcggtggcacagaatgaggtccgaccttgaaatagaccgatgtattaggtacaaagagcgccttcttgaaccgaacacctaatatatcaaacagatactattcaattaaaaatatctacatacgtctatttagtctatgttttccaaaatttctcagctttcaattcaggatgcattactattcttgttaaaggaattcatgttggatttagaaatttatgttatttagtttgacaaagttaacgactatcacatctattcaaagattgtcttggtcaagtactcaccatgattggcacatgactccatcaggcgaggaagaagcacttgaggatcccgcactgacatgcaattaaacagcagtatctgcaatggaatacatcataaatttgaaacattgcgggtgtaagagaatggagctttataaatatgaaagaaagagaaaaattgttgcacattgttatatagaccaaaaaaattaaaaataattaactcataatttttctcagttctccatatttgtgggtgagtacaaatactgaatttgaatggatgttctatattcatgaattgcataactaagaacagttttgtactccacctgtgtggtttgcttcctgactctctcattcaggtgcttgcttacaaactcgtgtgatgacttatcttgtggttgataactcaagacttgttgagaaaaccatttaccacacacttctaagctttctgggctatgagctccatccaaatagaaaaccagatccccatagttgtcagcatcaaaacatcgatcagggacaatctgagctcgcccttgcaaactggctgttgttaatccttttatgaactgctctggcaaagaatcctactccaagcacaaaaagaaaaacatcattcaaagtaaaaattggccatatacagaccgcagtctcacttttagaacttacggtttgttccaggtgtgcagcttcaggacgacctgtcctctgaagccaagaagagcacagtgctacggcaagacctgcattaacatattggtgctcaccttcaagtccaagttttaaaccattgagcatattggcatttaatggtggaatcacttgaagcggtacctggtaatcagcaagatttcctcagcacattgaagggtacaaataaatgcattgaaaacatctatactcattttaattttctagatgaacatcttatcttgtttatagttttaacaatacattaaacttggaatattagaattttacaaaacttgtgacagcactatcatgcatgaagacatggaaggcacacctcaagtcaaaataaaatctaggctaattagtaattttctctcccgaactttgacatgtactaaatcgtgtcccctgaacttttttggccgtta

SEQ ID NO: 111643 - DNA, 1178 bp, Cannabis sativa
gagagagagagagagagtgaacaatggaagatggaaagctcaattgaattagctgagagtaaactttgatatttatacatgttcatggtcagggaccttacaacagaattataacagaaaagttacaactagacagattaactaactacccgatacacctacttgtatcttgattagttaagttcgttattttcctgtttgtttatagttacaatacggtgacgcatctgaagctccaatgagtgttttagttagcatggagctaacacaaacgacataagtaaaacacatattgtgactgttagaaagtgttgcaaataagtcttttgttatatagcttccaattgacacaaaacctttttttttagtggtgagagaaattataatttatatatatatgtctttaagtggttatataacaataattcattttattttttaaaaaaattgttaaagttaatgtgaactaaacgtgtgacattaactttcaaacaatatttttttccagtgacgctgatgagaacgtaactcacaaaattgtggtaactatagtgactcgtagactaaaaatgaaaacaaaatgaaacagcatccaggcggtagagaagttaaggatccaggtaggtgtacgtgagcaaaaatgtaaggaatatgttagacaattttttttttttaaaaaaaaaaatagaaacaacattttgatattttctgttatctagttttttaaaactcagtttttaaaaaactatttttaaaaaatttggccaaaaaccccctattagtttttaaaagttgtagtttgtttataaaaactgtaaacaatttctctttcctttatttctctttctatctctccgctcacccaaaaccaagaaagaccaaaatctttctaatcaaattcttcacgaccaaaccattcagaattattgctagagattggtgttaaagtggtaggaaagaatcaaggcaacttaactcttctttttccctttgaattttaagttttagtatggttttatatgagtttttgtttagttaggtcctgtaatgtttgcatgagcttaggattgtctttggattttttgttgggttttgtccctaaataaaaccctatttcaatgtaatcttgaatattcatttataaataaagaaacagatttatttcattacttgtttaa

SEQ ID NO: 111644 - DNA, 4707 bp, Cannabis sativa
tatgatatataatccaattcaatataatacaatacaatacaatacgacccaatacggcgttccaaacgaggcctaaaagtgcttaatagatacatatataccttcaatggatcattgtagcgtgggaaacgggtgatcattgaacaaaatttgcatctgagaatattaagaagcacatgcaataataagcatccatttttaaaaaccataaccaaagaaatgcttctatcagctgaaaagtaagacgcaaacttcccattgtgaaaagtataacacacaacatatagctaaaattcggcaatcggggtaaaatacaatgttactgaatcatggttcttataaagtagctgcaaagcattatataaaatacaatacatgtaagacaatgggagggttcgtttccagttcacatacaagaacacaagtataaaaaaaataaatgaaaagacagacccagggaatgatttatgagacctatcaagatatccacaaatcatataattgacttaaattttggtcaaccttacaacatgtaaaacagagatacgttaccttttgaagataaaaaatactaagaaagtagcaaaaactcaataagtaaaagtaaaactcaggaaaaaaaaaactattttctcagtaagttttacctataaatttcaactcgagaacctccataacgaagttcagaaggaagtgcagcagccataccttggcttatggtttccttgccacaactatcgcaaggaggtgcattaacccaactacaacaatcacaccatggagaaacagaagataaagagcttgtaaaataataatagtatcataccaaactaaaatgataactgatatgcttagcaacagcaaaaacaattgtaacaagcttagctagtctttggcattaaatttgataaagaaacttgtaacttgtaatttgtaatcattaacatttcaaataacaaagttaacacacctgaaggatcgcttgaaccagaaaagaagctccagcaggaaagcgtgatctttttctgctttagacggattaaattcaccctcctatgacatgataatatatataaacaaatatccagcagctatttttggcttgctattattttttatcatgaatttctaaatcaaaaccgattggcaacaaataaagtaagtcatgttcttacatctgtacactcttatagaaagttaagattcctaatataaattgtggttctctcacctttgccaaagaaaccaacgctttctcctggagctcatctatagggactgattgtcgagcaacctcctggcgcattgggtcctcgtactaagcaaaacaaacaacaaactcaaatggaaaagaaaaagaaaaagaaaaacttaaacgaatccatgtttgattgctggtaataattttagtaaaactgttagtttatgcatttattcaaattcagattagtttcacaacattctatcaaacccaaaaaccagccaaagtacgtaaagcattaccaggcgaacttgctcgatataaggccgacctctttgctcaaaaatttcgttattttcagccacaacatactgctgaaacaaaagtgcctcgtcctccgcctgtaaagcaaaaccatttcgaaaatattattatcagaatatttctaaaaaccttttatttcaagcaaaaaacagacagctgaacctgcaactttcgagccaattcctcatcggatttaaggaaatcagtttcatttccagtacttgattctccattctcttcttctttgtgatcctcaattatcgaaaccaatcggagtttctccgaaacggtaacgagatcggaatcgttggagaccatgtgatcatcatcaattccgataatctattcaatcacataacatcaatttcacctactgtacacatacgaatttgacaagagcagataaaaaagatgagatagcaaattggaattggagaccttttggtcttcaggtgggagaagagtgagggagtaaagctggaatttgaaaacctgcaaacacttccatattagagagagagagagagaagagaaattaagtgagagaaattgaaaagacctacttcaaagccgtcgtcagtgtcgtagtcgacagcgaagtctgagctattgtggcgaactagaaacttccgctccaccattttttgtgtatctgctctgtatataattaagtcaccatttatataacttataaatgtatttttatttaggataaataaaggtattacctaaaattttagatttatatataaatttaatgtttatttttagcgacataagtaataagtaaaattataattttttccaatttagttacttctaactctgtttagaatttattaaaaaaatatttaggcgtaactgatagtatatgtttatgtctaaacccaataaactaaaaattagttcttatatatgtcatgtttaagacaataatagagtctgtatgacaaaattaaaaaaaaaaattacttgtgcgtcactgtctcggcctaaatggggttcctcacctcctcatggcatttgagaccaaggaggcgtctccttggtacctcctcaccttggacaaaaaatgaaagtctcctcaccaatctccttgtaacgccctcaccttggactaaaaaggaaagtctcatcaccactctccttggtacctcctcaccttggactaaggaggcaaatcctcacacctccatcatctcggaccaaatgggggtcctcacctcctcatgtcgtctcggctcaaagggggcctcatgcttccatcatctcagcccaatagaggggcctcacctcgacacatgtctctcacgactcaccaacattacttgaaagacacattcatcttttatcattttttagatatttattttgaaatgtgacttttgtattttaaacctaacccgaccatagttataggaaggtgctcctgtgattaagagattgtaaatcatagatgaaaacttatataaggggagtggagtcacttgtaaagggacctcaattttgattctcacgaaatcattctcttgtgctctcattctctcgttctaaaaactcacttgaggattgaactcatggagaacataactctggagaattatccttgaacattaagatcaatttcactctaagtggactagcctattaccatcgaaagggggtgaaccactataaaatctccgtgttcatctttgtcaaattttatttcacaaaccggtttactttgataactagtatatttatttttaacccaaaaacttttcctggtgacatggacatcaatgtttgacatgtggcatgaagaatgacatcaaagagttgagtagacccgagtcatagcagtcgacctacgaggggaccttagccatgcgcccaggttgatttcgagatctgcaggatggaagttcaaacttcaataacttgaatccaactcactatcttttagtattatataccatgaagacatagagcaacctaatccaagatccgggagctaaaattacatgaacctacaactttaaaagccagcttgggcacctaagatttcacccagcgcgcaagttgacatcctcaactaaggtttcaatttttgggaccgtcttagtgcaaaaggatcaaaacatgcattaggacatcaaatagacataccatggacatatttgaggcatctgaattagaatcagaggaagttgatttttgagcacctgaggccccaagcacccagcgcccaggttgacaatctgtcaatctgggctccttccaagtatttgatcgaagatctggctttttttcttcttcatcaaaaatagggaaatataggtcctttaaaaggaaaaacaacacttcctgggtacaaaaaatagggctagcgcctaggttgacacctggggctggccttgcgcccaggttgaccttttgttaacttgggccatttcaaatggagttttcaggaattcttttgagaatcttctttgttttaagaaaacattgagattcaactattttcagggaccaaacgttatttctagagggccgaaactaggacccagcgcctaggttgacatattgtcaacctgggctgtttccaatcaagttcagcaaaaagtgttccaagaatttttttccttcattagaaataatgaagattcaagcaaagttagagaaaaaaccataatcaacctgggacgctgccttcaattgcttaaatttcaaatttgatgcaaccattgtttcaggaatggtcaaaaacagggtaggagaccttgccctcaagttcagaagccatagaagtatcaaaaatgagatcccagaagctcgggagtaagtaccaagcacccacgttgataaaaggcctggtgtggtggcatctacttatccgaatctgatgtcgtttcaaccgtccatctagtttttcacaatgacaaagatttatgaactcagagaagtcacattcccaaggaaaatgaagagtttcgagtctctcatttccacaaaataacaatatctccaagaaccggtgaccaactttgctagaacacataaatagactaagtgatgtcaaatatcacttaagaatcttaaagtacacccctcgaacgtttttacacttacctagcgaccaggttgatgtcatattgttgtgataaatccaacacgcaagtatacgtatcgttttaaca

SEQ ID NO: 111645 - DNA, 4500 bp, Cannabis sativa
tttttttttttaaattattatttaaataaaatagaaaagacaaagcaaaaaacaagaaaaattgagtggaaggaattggaggcattgaagaaggtgtggggatcatccttgacttttggccaaatcatgttatgcaataatagtattctattacatagctatcactatttctaatattgaacataaccacatattaaaagaaaaagaagaaaaaagcatcatatctttattacctaattgaacaaaatatatttaatttgtaatgcttgacagtagtatagtacaattcaaagaatcaaaaaaaaaaataaataaataaataataaatgaaaaaaccttttcttttttcaaaataatattttgttcctaattaataaagaaactaattcattggattatgaaatgataatttgtacaagtcattccaatatttggtttgtcaatcaaacaattgaatcataattccaatggaataattttttttattggaaatctcaattttaaatctccactattagaaaacttattccattcttaaaattaataaaataaaatttcttcatcactcttatattaatttaattccaaaatatataagcaaataacattaatattctcgttactatattaatttgttttattatactattattctaattcattccatcttaaatatatataactttagattttccaagcaatgtaataaatatttatgagagtattacggttaatttcttattaacatttttttagttaatttttgtgttgaaaatacatgttgaaatattattttttttatttataacggtatttgttatactcacaacatcatcctcgtacatttttaaaaaatttacagtgtcgaaaataaatttaaaattttttaaacacgtctggtaaattagaatattaaaaactctatttccaggattataaattcttcgtaattttttaaaaatttacaaaaataatattgtaattataataaatactataaaatttgataaaaaaatatttcgagatataatttcaaacctaaaaattaattaaaaaattataattaacactcctctatacattattatatatacactttaagtatagtttaagtaattcaattaatttaaattgtcggtcgattcaaatcccataacatgttatggttatttatttttatttctttgaggagacataacatgttaaatttaaaaatttattttttattttttaaaaaatttactttattattattattattattattattattatattttgggatgaaagctttttccctctcattgacaaaattgattgctttctttagctttatctgccgacacaaagcaaggccataaaaggcacatatataaataaatgtgtttatatacaaatatataatatgaaaccaacaactccaaaaccccaacattgaaatttattttcataatattttctatacacaaaattttcaatttcttcttctttagaggcttttctttcactccatggatatatgtcagaatgaagaacaacacaataataatctcagcctctacagctcttcttcttctagccctgaccaacttttctcttctcaaaacatggtacacacttttttcttcttctttattttcttcaattattgcttgaaataataaagttttgatttttaccaatttttgaacttaaattgaaaaagggtatttttcaaaatctcaacaggaagaggatttaagcttagaatggttatctgtgtttgttgaagattgtttaactagctcaggtaattgtctcccaccacaaccaacaacaacaacaaaaacaactactaatagtactataagtgtacttgaaacctcaaaatcttcaaaaccacttgattttcacaaggcccaaaagaaacccaattcactactagagacccttttttcaattccaagcaaagctaggagcaagagaaagagagttgttttgaccaaaagaagagaccctttgaccatttggtcaactctaaaaatgcccaaaaacactactactaattttgagtaccctcctctactcaaacaaacatattggttatgtgatagtgagttaattgtgcccaaaaaagatgtggataagaatgaggaggagagggagaaagagaatggagatttggtcaaggagatagatgaggatggggaacaattgggctttatggcccatgggcttgtggcaaggagatgtacccattgcttatctcagaagactccacaatggagagctggcccattgggcccaaagacattgtgtaatgcttgtggagtgaggtacaaatcaggtagattgttgcctgagtataggcctgctaaaagcccaacttttgtgagctatttgcattctaattcacacaagaaagttatggagatgagaaatgggtcttagatgattgatggtagtactaatagctagtagttaaaattatgttatatatagtattaaatatatatgtagaattattagttgtaatattgtatggagtatagtagtgatagtagattactaacccttcatttgttgtaattgctttagtcttataattttcagtttagttatgtatagtgtttaatggattgatatagtttttataagttttttttttttatttattatttttcttttggaaagggacttttgggaatgggaagtggtgtgctttaattcatgagcattgatgattttgggtgttcaagatgatgtttgttcatttattattttattctttttcatttggaataatttgaatgagaattgggaaatgtttgaatttaaaacatgaaggaaagaaaaagagagaaaagttgtaacactagttattaatttgattttaaataataatgaaaaaaaaacttttttatttatgaaagaaaaattattaaaaacataaaatgaattagaagttcaaaatatgaactccaatcaaacttaggaatcttatgttataacaaatcaaatttgtaatcatattgttcctcgtaattgttcaaatccactcatgtgaggtattgttgtagggacgacacatgtcacactcaaaataaataatttaagcttgagccgatcttgaaatttagtgcaccatagaaaaaaaaatatttttaaattctagtttagaaaaaaaatataatactttttaaaaccagtaaaaaaaaatataattttaaaattaaatttctgtgttaggtggacttagcccgcctattcacaaaatcaggcctgactttaagactgtctaactttttaagtagacaacttatgttaattgtgactcactttaagtgaggccaaatagctattaagaaacaacttgcatatggagttcgtcaagaacaccaactactcaaattatggtaagagttcatggagaagtcacagtgggaaaattacaagcaaaaagaaaaattgaagacaaaatttgaacatgacaaagcacgctcacctcctactcacatcttattcgtgggtgtaggagaagaatggatctcgactctatacatttagcaatttgaaatgtcatgagacagaatcacactcaagaagggaaggttgtgtttcctaatacctcgtgctaattcccaagattttattgtactatgcacaaacttagccctccgagcaaccccagttaaggctactcgagaacccaattgaccaatttacctttttaacattagaaaccattcattttttgtgcactcagtgtagttttcccaattttttctatgcatgttcttaccatatttattaggctataatgtaactcctattaaagagagctaaacattcataatggccaataaataaagtttggaaataattataaagatattattattaatacggtgatcttagattaggattcattaatatttaaaccacgcacaaattctcatttaaatagattctaactctttaattttacaaatattttgttgaagaaaaatatatattatacatcgaaaaacacgtttttgtgctcttcaattctaaatttcagaaaaataaaataaaattacaaattacaaataaatatttatataaataatttacacaaatatacaaaaacttcaaaaattatataaggctaagtgaaagtgttaagaattcaagaaaagattttttttttattattttaaaaaaggttatttgcccttattttaattagtttttctgccttttggaaagttgtgttaattaaattttttcctttagaaaaagcatcattatttgtaaaatgaatcaaatgacatcgaaaatgactagaccaaacacatgtttgtacccataatatgtaagacataacataacatggcaacccattactaatttctaactttttgatacaataaaataaatcatttaaggaaaaatgtaaaagaaataatggtcacctattgtgatccgtttcacttcttaaaaagttatgtgaaccaccctttcaaaaaaaaaaaaaaa

SEQ ID NO: 111646 - DNA, 7038 bp, Cannabis sativa
aatttaccgaaattagtttttaccgaaattagtttaaataaattagtttaaatttctataaatttctaattcacccccctcttggaaacatatcttgggctaacactgtaaacattaggtgacttatcggggggctctcctcaaaatcttaattccttttgtgtctcccatttcttgtcgtttaacaatcaactttgataagacatcatggcaaagaagaaaaataaaaggtgataggcgatctccctaccgtagaccccttttaggaaagatcttctgttgtggaacaccattgataagaaccgagtaagagatagtttcgatacctgtcattattagatttcgcacatgactgtcaaaaccgttgccgttggcctccaaaactctctcaattaagccccactccattctatcgtaagccttgtgcatatcgagctttagagccatcaaacctccattacccttcttttttttaatagtttgtacaagctcttgggtgagaatggaggactccgcaatccatctaccgagtatgaaagtagcttggaaaggtgacactagtttgtccatgacgcccgaagtctggttgcaataatcttagaagtgattttgtatgcaaaattgcacagacttattggtctgaatttttcaacagatgtagcatcttctcctttcgagatcaaacagatgaaagtgtagtttaattggctctgaattctcccctcagagaagaaagattggaccatttgaataacacttctaccagtaaagtcccagtagtttcgataaaaacatctaggcatactgtcggggccggagctttgagcggatgcatagcagtaacagtgttggtaatttcttcctcccctggtatactcctgagcatctcattctccccctcagtaacgagcggtgtgaacaaatcattaaaggcttcattaatcgaaggattgcttgagctaaataagtcaataaaaaatttgttgaaaacctcccctatcttcttttcttgcgtgacccaaatgccttccttgtttttgatcgaaaggatcttgttacaataataattatattatatatatttagtgtataacatatatgttcggttggttttcggtttaatcgatcagcttgctattgacactaaaattaactgtgcaaatgcagttttaacccgaggcagttttatcaattttcaatttgttcgatgttgattttttcggtattcggacagtcggcgtactcagtttgttcggtactcaatttcttttcgatttattggatttttttggtcagccctctaacaaactacacgtacatgaaagcctactaagtacaaactagaattttccctagagaaaaacgttaaaaccgacacgcgcgaaacaaacaacataacgtcataacgacatgcttctcttcctccctcacttcataaccagatgcagatggaaacaacatcgacttcaacatcttcatctcccaatccgaagttccgttattacacatttacttctcttgccttcctctttttcttccttttgagtattttactctttactaaacggactctcgaccccgctgtttcaatctccctctacagagatttcttttcccaaaccccttcttcttcttcttccaacctctcccttccgatccaagaacccatctctccaaattctgagcccgacccattagatatcgaaattgaccctaaaattatcaatgacgagctttcagataaaaacgatccaggttcacctcctgtgaatggagtttctgaggaaactagtcctaaattaatcaagaacgatctttcagatataaaagatggatacccggtgcctgctaacctagtgtctgatgagattgatgctaaagtcagcaatggcgaggtttcaaataaaaatgaagaagtcccagtttacaagaaaagagtttctaatgattttggtgcaaaaatcatcgatggagagctttcagataaaaatggtagtgacccacctcgtagttttgaaagaacggaaaacaagtgtgatttgtattcggggacctgggtgaaagatgaggagtaccctatttacagaccagggtcctgcccatatgttgatgaggcttttgattgccaaactaatggaagaagagattctgaatatctcaaatggcggtggaagccacacgcttgtgatcttcctaggtaactttttggctcttttaagtttccattctttttcttcatcggtttgtactttgtagtggataaaatagtggctttcttgcactcgttggatattatagtacgatttgtttgtaatctgttgcattgaggtatttccttggcattaataagtaggtgccctgtttcgtggtcaatgcatgcattatgcattcaccgattttcttatgagctgagtagttgaaaaactacctacattgtatgccaacaaaagtgttggcttatgagttgcttaacaaagcaattaacacaaaggaattcaataataataataatgaggataaagtagagcagtgcaagccttcacttcactgtaatatgaggagcattaagacgaaaggaatttaatgagaaacccaaagaattcttttagtcaagtatactctaacccagataactgcaagaactagaacgaaagaaagatttgggtatgtttggttgggagaaatgaaaaaacagagtaggaatcagaataggaacgacaataggaatataatggaatacaatttagtgtgcacaaaaagaaattgatataaggatatgaaaatagaaactaaaggatgaatgcatcccatattgcaccaagtttttttattaacttatccatcgaaaattccaaagaaaagaagaagaaaaaaagaaaagacagaatgattttcatcatttcgttgcccttgcattgtgcagaacaattcaaaacatatataatgaaacttttgacattgcttgagatccagaatacatgaacttttcagcaattttgggacacaaatactaatgtacaggtaacaagttcatcactggtgcatcaaatctttcactaagtccaggttttccatgttgtatctattgagttttaaggtttactgcttcaatttgtaactgatagcggcaataatgtcttatcatcttatggtttagtttgtaaatctaggagcagccatgactgattgcctctgttgactctttcctttgtgctactgtaacattgtttgggataattttctgtatttagttatataccagataaaatttgtctaaagaaactttatgactaatcacttcagtggatttatatttctttactgcatcactttttacttgtaggttcaatgcaacagacttcttggtgagaataagtggtaaaaaactaatgctggttggagattctgttaacagaaaccaatttgagtctatcctatgcctcctacgcgagggtctccaaaataagagcaggatgtatgaagttaatggccataaaataactaagggaagaggttactatgtattcaaatttgaggtatctttatttatttcttccagtatatattgttttagattaccacagtccaaattcaagacaggagaaatctatgaacgtcagtagaaggattttacgtgctgtttttttatacttcacatctttgtattgtgatttaaattgctttcatgcgactttttcctgaacatagaattggctcttcaaatttattcattattattttgtaggtgtaataattgtagcaagtgtgcttgacaacccttggccaaattcaattatatctcttagaatttatctaactacaacctaccctgccaaatacatacgttttctctttctaagatttgttgagattagaggaaagatgacaaatatatagtgccttttttgctttgttagctaaataagtttatctcggacaaaatctatttgttgcccaacattttaagaacaattttccctttatatttatgtgtatgtttatgcacgtgtgatgttggcaaccaagaagcaatgtaaaatggcaaactgcttaacagtgtgaagtaatgttataggcaggctttagtgggctggcttgttggcacgagttgtattaggcagtgattgggtatttgatttgacctactcgtcgttatgacgtgttttatagagaaggacagtaagaaaaagcattaacaatctccatattctgttgattcacataagaatacgagtgaatgacatttatagttttgttagataagtaggtttcactcgtctaactttggcagtctataatatgtaagatgagtggaatatgtaaaaattggtatccttggaaaaattaattagtttaggacgaatgtgttcactgcctcagaaacacaattaaaagttacttcattttaggataatcaatgctcttatcgtatcaacatatttattgccaattagatggacaaattcatagttaatatctgtaatcattccttttctgtgatcacaccaacttatcactgaattgtgcttctgaatatttgttcagtttaatggcttctctctcataaatcatcttcctaagcatctggaaccattaaatttttaccatgcatctctaattccactggaaatcatataataaatactcccacaatagcctgtttgcatgctatacatccactgctgctgttcatattgtcaagagagaacgtttcacttccttttgggacactgcaagactgttgcctgaagtgaacttatggtctattaaacaatactcggtaaaatgtcttgtaaatgcaagtttcaatgtgttaaaatgtaataaattcctgctactttttcttttaatactcgggttagatgaactggtttggtagggagtaagtgtagttgatgagggttcaagtcttgcaaatgtctcttaaaaataaataaatacccataacaaaagtctctgtttttgtcctttgcaatacagtaatgttagtcacatattcatccaacgaattatagaacaattttagttttattagtcaatgctgttgcatcattttttttttattaattcctggtgttcccttagatggtagggagagctttgaatttacatgtgcttggtaaatggttttttgagactgaaagtttgtcactctttcaacccaaataaacttccatgcctgaaattttaacacagttctcaatctcatatagaatctttctatatctctttttattaacaagtaaattttatccaacttcggtttaacgagttatagaggtgaatagaattcatcaaatttgtttcaacatctatgactgactgtcataataaactttcttgcaggactacaattgtactgtggattttgtgaggtcacattttcttgtaagggaaggagtccgcatgaatggtcagggaagttcaaatccaactctttcaattgatcgaatagacaagtcagcatctcgttggaagcgcgctgacattcttgtcttcaatactggccactggtggactcatgggaagactgctagagggtatttctgcaaccttatctatctacattggttccccaattcagtatggtatatttgttggtattttccttgcaatatgaaatttgttattcaagttctttgaaaccactattctaggctctttgcagttataatgaaatcaatcttagactaactaacagtctaaaccttcacatgaaaccaaaaacattatttggattgtggtttggtatatttttataccagttacttagcagatgtgcacagttcagtcactacccatgtgggaaaagaataaaaaaatcttttatggtgagcattgtaagatgttagttacctttctacaggaaaaactactatagagagggagattttgtatatccacaatttgatgctgttgaagcctataggaggtccatgaagacttgggctaagtggatcgataaaaatgtgaagccggagaagcaaatggtcttctaccgagggtactctactgctcatttcaggtaagttattgccaattaacttcagataaccttgattcatgcattctatgtaataaagcatgctatgaataatttttcttcaattttatacatcaattaaacaaaataaagaaaaggatacaatctgttaattgattagttaagaaaaaatgattgcagaggcggagattgggattcaggagggtcctgtaatggtgaaacaaagcctgcttttagtggagctattcttgaaaactatcctttgaaaatgaaaattaccgaggaagtgatcaaagacatccgtgtacccgtaaaactactaaacgttacaagcttgacaaacttccgtaaggatggccatccgtcaatttatggcaagaattcaactgcaggcaagaaggtttcaagaagaaagcaagactgcagccattggtgtctaccaggtgtccctgatgcgtggaatgaacttatttatgcctccctagtttttcaccagacaaattcagttagtaatacttgagaagattttgtcttttatgtatttaattcattacgtgcttatgtttcttcaaaagaatcactacttgttcgtggagtttcaagcatgtatgtatttgatggtagggtgtgtttagaaagttaatagggaattagaattgggtgtaattaaaggtaattacacatttttgtgtatttgtctaatcatatactataaccatttaagtaggataatttacaaaaaagactagatttttacctaatttttacaaaaatactaccacacggtaaaagtaacttttatactgttttgggatttttttttcttttatactgtaaacatagaaaataaaatacgaagtctccatcttccacacccacagacagaactaccacaacaacactaaaacaaccggaaaacaactattaaatccggtgagatgaagcataaacattaaaagcattaatattggggctgtcatgatttttctaatgttgtttttaggttgtttcactattgtttcatatgtttaaca

SEQ ID NO: 111647 - DNA, 4283 bp, Cannabis sativa
tacatataaatgtctaacactttatatactccatgtttagatttgaaaggagatagaaaaccattaatactaaatacaaatatttttttcatatttttatcttcattttaaatcttgtgtttaagctttgctttttagaatataatttagttgagagattctaccgccagcataaaatattttattcatttttaatatttatttgacgatattaatattaaactaaaaggattatttatgtattatttaaaaaaaaaaatgacctctgagcactcaaattataaacattgcttatctctcacgcctaagactcggttggtgacgtaattttttcttgtaatgctgcctatatataattttgataaaatgaaaaaaaaaaaaatgtatagatatgtatgtattttcgcaagacttttgtacatctatgaacatattaactacatttatttatatatccaaattctaaagatatatattatgattccaatatacacaactcccatatgatgaaaacctaataattatatatataaaaactcaataccctgtagcctacgtaagaaaaggctaaatattaatccaataacaaaacaatatatataaactatatatatataaagtaagaaaaaaaaaaagcagtgaattgttttgagcaggcagtgtaatcctatagtaaagtttgtttgtcgattgacatgagtaataataatggttgtgtatagccatctatctaatgaggggaggggaaggaacgaggggggtccaacgttgaagataaagagaagtgatggcgaaaagactagttgacgtgaaattcaaaaggtgacccactaactctctcttttttcttcttcttatcctaatttgtccttgaaaaactttttgggtaaaaatatatatagttccaaggagcaaagtcactcatttaactctctctctctctgtgtgagaataatttcaactatggtggggttgttgttattaatcaaacaaaggatcgatgttctgcggattggacaggaagctttgttgggcattttctgaagaaagagagtggttttgatcacagtgaggaagacctagagtgagtgaaactgatccattattattcccatggtataaacttggagccataaattcatgatgatgatgatgatctcttgagtgaaatcttgctaaatcaccaactgggtatgtcccaaatccaattgggtacgtactactcgatcttccaaatccaacatcaatattaatattattaatattatgatctgttctgttgtactgatgatcatgatcagtaataatacctttcatgatcatttcatcatgagtaatactactacttctcatcggtttctttggagtagaagtcgaaaacgatgaactcatcaacatttgatcagctgatgatgaacactgattctttgatgagaattggaaggggttaatattacttcgattatgatcatcatgatgatcaatattatcatcatcatcattatcagccgttgaattttcttggactcttgtggtagattctttgattgtatctattttgttggtagtagtaccttttagttgatcttcatgacttttggtttcttcaatgtacatttcttctaccattggcttccatagccgaactcgagcatttatgaaccagttggaaacctgtttataatataattatacctttgtttacatatatatttgtggaatatttttataatagattaattatgaaaaatatataattaaaaaagaaagaaaattaaatgatttatagatacctggcttcgagtaagccccgtttgtttggcaagcataactttgtccgctgtcttgggatacctacaaagcagtaatattgtactgatgctctgagaccaaacatatatttatatatatacatatatacagacatagtatgtatatgtgctacataattgataatgtcacctattatatatatatatggttgcatggacaactaggttagtatgatcagagaaaactaattgttgtttatagccttgagctaaaaatctaatgataaaaattgttttatcatagaatatatataatcaaatatataacattgttatataatatatcatgtatttttcctttgtttgtctcttcaatcaacataacaaaatatatagatttagaatagatataacttatgcatgtgcatggattttattgagtatgtatatagtactgtcatgtgtatatatatataaataaagataagcttatcatattattatatattaatatcaatgtattcattgaagatgcatgtacttataaagaagactcgaaaattaagaaaaaaaataaagcaatataataatttaatatatatatattattattacgtacgggtgaagaaagtgctcgaagagccaagcacgaagaactgaaacagctcgttcaggcaaacctctctgaggtctccaagcattgttattatgttgtggcatcattccaagctgttgcaacgcccgttgctgccgaagatgatgatccacaaatctcaatcttgagccctcaatcttcacacccaagcattcttcctctcccaaggtcttgcttgtggccttaatttgagctgagattgcgtctttaagacaccgaaattgcttcgaaatcgtcttgagagccaacgcagtgtaagattttgctgacccatatcccactgcctgttcgaacgatgagatcacaacgttcatttgttggtggtactgcctgtacctctgctccacctaattcaataagaaaatatagtaaaaactttagtttcataatttttacgtatacagttaaactttttatgttgttatacattaataattatggggtctagctatatatagtactaccctacacctcttgggaaaattctcctacttaatttcatgaggagcaaacaaacaccaatggtcccaaaccccaccaacaattgctttctccaacactatagattcttttttttttttttctttcctttaagtgatttaagaataactataccaattcatggcataaatgaaccatgtgatgcaattatattttctactttcatattcactggcctatagtcctttatcaacaaattgtactatccaattttaattttggcttacaaaacaatacatcatcacacatctctcctaaataaataattatagtagaagctatatatatactcaaattttatcgaacattattaattattaaactaagtataggaagtttaattaattacctcatcaagcatagtagctagtttagctttctttacttgcagctcttgtctttgcactgtggaaagttcagcacttatcttagaactactactctccccaccactatttcgactgcctcccaattcgggtgtcggtgttctctccccgttatttttcatggcggccttgtctttagagccaaggccgccaacattactgcaattaactgatgagtcaattgttgtgttgtccttttcttcttttcctctagacttgaaattattattattattaccaacattaacaacttcatctaaaagctcttgtgcggccttcaagtacttagaccccaaaagcatgctttgaacttgaccaagacttgttccaatcccactattattagatactatcgtcgacgacaaagaattcccaaaacttgtgggcaatacagttggaataacaacttcattattaatatctccaccagaaaaggatgatgaggcaacataagctgcagcctgggcgggatgcgtcgacgaaagactcagtgacaaagcttgttgttgtgttgtcggcgaaaccacctgatgccttcgaaaacccatttgggttgcaaagtcaggtgccgtattccgttgatgatgatccatattagatccccaaatgttgtattgaagatgaggaaaggctgaaatatctgcttcgttgttggatccgggaccgggggaggcggtggcggctgagattggtacaccggccaagtgtcggctgtggtggagttggtttgggttgagaaagaacatgttgggagctggcggcggcggcggttgggatgttgttgttgtgtcagaataggtttgtacgtacgtagtagttgttgttgttgttgttgttatttgggttcatgagataaagggtatgcaacccatcaggaccttggatttctgaactcccatgattaaagtacgtcgccatatataatcaaaaataaccaaagtacacacctaaattaaaaaaaaaaaaaaa

SEQ ID NO: 111648 - DNA, 8180 bp, Cannabis sativa
  modified_base (5954)..(5969): a, c, t, g, unknown or other
tatacaattttcatgggtataagtataagctatctcaaccacttgaggctagcttaagtggccataggtgagtgcgtgttttggaggtcctgggttcgagtcccagttaaaacatgattgtaatatataaacgcttgaataaaaaaaaaaaaaatgtaagctatctcatgaaaaattatacaattttcatgggtataagtgtaaggtatctcatgaaaaatgatctgtttgatctaatttcaactctacaatgtatgcagatgcaacaacttttataccatccattccgccataagggctagcaacttccaataaaatggcattaattcattgaaccaaaaagatgttggtgaaagaaaaggtgttatggttagatagatgaccattattatggggtactttatggtgaaacttatgtgaagctcgccttgattgatagatgaccataatataaaatatgtttaccactgtatgcatagcccacctatgatacataaccataacgtgttagcatcgtgtgcgagtgaccgactcaagtattattccacattctgcattaattatgtagtccccacaaactaacctagtacagattccatctcaagggggcaggagaaaaaggaaaataaatgggtggttcataaaagcaattcccaactgtaatgcaattctactttttttttttcaattgattgatagaaagatggcttctcagagaagcaaaatctattttagtttgattttaggtataagtggaagtgagactgcaaaattattggcaaacatttgggtccagtattaaattcaagcatgtatagtacaaacaccaaccaacaactttaaatttaaatagtttccttactcatcgttaggtctgcgttgctccttctctcttttgtctctcttcagcttgggtctccagaatatgacagaaaaaatggaagacagccgaagaccacagtgctcccctttctttctttttactataaccatgtttgactaatttatattcacctaaaaattactccatgtcactcaagaaaaactcatctatttaatgccattaccacttttagtacaaagatagactagctcttttccaatcggatcaaaattgtataatcttaccaaacacgccctacgtgaaacctaccttgctaggcgttagagctatataatagtacaaagatttaatgagcttccggagaggactataagagctacctttataggtgacaatcaacctcaataaacttcaaaaagaaaactcacctcaattaacccaaaaactctcttgcaagtaaattcttcttcatatgatagcatataattatgaataatttattttttagcaagaccaagaaaaggaattattaattctgaagagttcctttaataggaacttcaataaatctatgtaatgtattgttgttaaatacagtgctacctattatctgttcgtgtgtagctcagttgtccttgcaatttcttgagtagttggatgaggacaatctggactgtgactgaaaaaaatcaaaaggcggaacggttccgaaagatcttcgagtggcatttggtgaatctgataataggggttcgtaaactggatttctgttcttgggttgagttatggacaaaggagcaacatctttctctactgatcttgcttggggctcaatgatgttgcccagtgacagaataggtccacccaaacgttcagcttgctgaagcgtattgattttacttggtctgtacgtataccggaagaactttatagcaagaataggacccatccctgctgcaactatgagctgtaataaaaaaaggaaaagaaaagtttccattagtatataaaactgcaatgcaaacaatgaccccccaactttgacttctctaaaatagaaaattcagttaccaatctgacgttgcatcaaggaagatagtaatcttgtcatttgcactattattaactgaaaattgaaatcttctttcttgccaactaataagaaactaggtctctatagttgactccaaattattggttcatggttgtgtttcaagcaaataaaaaattgagtaccaaagccattctaatttctaagtagtcggatagatcgcctccgagaagactatctgggatttccaatcctcaggcaaacaaaaaaaaaggaaaaataaactatcctattttcatcaccattgaaaacccagatgttacgaagagatgggccaccccatttccaaaattatgcaagtccaaattatatggttaagaaaaacttacaatcaaagttatccaataagacggttgtctgcacaagcgaaacataattgtatacatccctgatgatgggatggcactgaagatcgagttgatgatataaaagccaatcaaattcccccatatagcaagatgttgtagtatagtaaaagagctgcaaggatcaaagaaaaactcaagcatcgggatgaaataaataacatagaattttcttctttagttctaagctgttgtcaagtcagaacattagaatcctagcatgccaaatattggataaagcatcgatatattctttaaatagaatactggactaagaatatcattcagtgtttataagataaagtaacaagaaggcttgataaagagtcaaatttgaattaacaagtataattaatagaaagaaacttacttagtttccaatatcattacaaaagcctgcaaccaaatacatccagagagtgcgaccaaagagatctcctccatttcacttttttcataagcataggcatgtatgctgattacaaatacaacaattgcctggacatcagtgaagcctggaatcagtatcactggattaaaagcaactaccatctctatagttttgttcaatgtaatggctcttaaagtagcctctcgatttaactcaagttttgtcaaagtgttttgaactaaataactctgtaggccagaatataaaagaacaaaagaagcgaaaaataaattttcaggagtggaactattttaacaaatacagctcacatgaaaaagagatcttccaaaccatccagcgaatgtactaggattcagcagtctgttactcccaacaaaaaaaaaggtaaaaattagcaatttaggtagtacagtaaattcaaaacaacaattctgatgggaaaatgtctcaaataaacaaataaggatcaagttcaaggtgaatgatattacaaagtaccttcccgcttgacaataaaacaaaatttgtggatgctgcatcactgtttcttcactaagatctttgtccaggacactgactagaacaggaacacttgtatagaaaacattataagccatcaggctaacagaattaaaaagactagtccctgagacgcctgaaatgaaagagaagctgaaaacatacctaagtcagtacacaagacattttaaaataaaaaatataccagatcagaaggaataatatttacgtgtcaattatgaacgatattattgcaagaaaaaaaaaattacgaaagatataaaagttgaaaataaatcggattgttcagaggaactcacaagatctggatgaaacatatcaccagagacttgtaaaatgagtactgggatagaaatgctgttcgattgtatgagtaacgtccatgaacaagtaccaatcttttcagaaacctaaactctgcaaaacaataaaataataccaaaacaaatcactcaaccctgtttgttctgtaaagtttccatgcagagagaggaagtgttacagtatcagcaacttactcccaatactataatcagctgctcttgctgcctgcagcccctctctcccactgattccaactccgatatcagcttgttgtatcatccttacatcattacctccatccccaatggccaatgttctataatcacatgactttaaaatctccacaagctgcaaatagtgtttaaacacaacatgtaatttagatattcaacattttatgacagcacacgtaaatgtaagagcctttaaatttgaaaagcaaggactctaggatgacaatgaaatgacaaaattagtatatctttttttttctgggtagatctatcaataaattacaatttagatgtatgaagatcattaactatcctagatagcagaagggttcatttgctaaagcagcaacatcagcaatcaattttatgactcaatagtgttccccagcaaaaactttaactcctggaaatatttttttttgaaaacatctgatatcttttctagctttaaatcatgcaagtgaactccaaccctcatttaacagaagggttaatttgctaaagcatcaacatcagcaatcaattttatgactcaatagagttccccagcaaaaactttaactttaactcctgaaaacactttttcaggaaatcatctgatatctgttctagctttaaatcatgcaagtgaactccaatcctcaagttcaaaagattaactcccctcagagatgaagagaggaaacctaactattcagcataacagcttcatacaaattggtgagaaaaatattatagtttccaccttggtaatgtgagcactgagcacatagctaatgtctaccagatccttctatgtaagaataaattttaaaatctaccattgttcacaggtccagtgataacatatagaaggattacctgtgctttctgtgatggtgttacacgacagcatatagcagtccttgacaatattgctaattcagtaaaagctgttcgataatgcttaagtgcaatttcaagagcccaaccatcaacaacaaatgccacatcctgttaaaaattggaagaataataagacaaagaagctcataaagtacaaaccacaaatgattaaaaaacagaaagtagagagaaaaaagtaatagcttcttcacaaaaatattccaaagtctacaacaaacaacacatataggtgatgtttggtaacaattaactaattacttttcggtttatttaatcaaaaactatgaatgtttacaaaaaaaaaaataaataaataaaaactatgaaggaatgagaaaattttgtttagttgaattgaataataaaaatacaaaaagtaggagttttgccgaacagcactatagtgtcaataactttatcaaatccacccacgtccatcacagcaattggaaccaactagatctatggcttagaaaaacttttgaagaagcctacactttcaaaccatttagtattaaaacctacctttattatgcttttttattatgtgccattttatgaaaggctatgttttatatgaatctatgcttattcttatttctcataattttacgaccttatttttttgttattcaacttgcaccttaatcagatttgaaacctacgtttcgattcgatagaggacattgctttcaatcctgatatagttattttttaactttttactagaagaatgaaattatacttgttcacacacaacccacatatagatagagcttgaatgaatcttaaactgtcagatgtaacaacattttaatgcagcttataatgttaataatgacatagataatctaaagtttacttcttacagctaggagttatatataataccttgggttctgacgttgtaatcctcattgtaagtagaactctctctaaacttctgccgacttcaccttctgttttgccattaattaatagaagctgtccttttggctctgtcaagtcagaatgcatagaataaagcatatgatatttaactaaatattgataatattgaagagaaggaagaaacatatcccttaaaaagctatggaatgcaacaaaatcaaaccatcagattaagaaatagagctaggtagagcacaccatatgaagttactattgtgaacattgtcccacattgaataaatggtaaagtattgagccatatataagnnnnnnnnnnnnnnnnctcatcaccaattagttttgagatggaaaaccttgattctcaacagttacagtcatctctctatttacgctacacaagtcaatcttcaaccccaattgtcacaaaccaatatatttttgttatcttttcgattaagtaaagagcattgtagaaagaaataaaaataaaataaataataaaaacgaaggaaactatcaattgaaaaagttggtaggcagcggagcaaggtaattatctgaaacaactagacatattaagtcctggtgtcaatctcatttcagataattcactccattctcctttgtcctgctccctcattacatttatctacaacatagcatatgggctaatagtacttttatatagaaatagaaagagagacgggaagacagagcaagttaataatccaattagtttgactacctggtgaaacaaaattgcaagaaagagcaatctgtatggcagtattctgcttgtcacccgtaagcatccagaaattgattccagcttttcttaatgtctctattgtctctggtacaccatcctgagttaaagtttaatacatcataataaatatggttatgggaaactccagtataatatatgtttaagcattttttttctttatttatttatgaaaaagaaataagtgcattatgtcacctgtaaacggtcttctattgcagtaactccaaggatcacaagatcatgttctaatctttgacagacctcagctagtctccactgcacaaagtagtgaagttaagggagtggatagacagacagctcataacatgtgaatgagtttgtgtgctttaggtgtttacctctctatcaacaaccatactactggcctctttaaacatcaaagaccattcctgatactcatcttcctccaatacacgccaaccaagacaaagtgtacgaagacctaattgagcatattgttccacagcttcaataaatgtccttgtttgctgcgctgaggtacattggaaaacatcatacaccaatatgcatcaaccatatgtttctagataactagtagcatataacattaaataagtgagagctaatataaataagcagaacaaaagaatcaaaacctatttcatgggattatgtattaaaatgagttataagaaatcaattagtacaaattcaactataagtatataaatcccctgagccaatcacacccacatatatttcaccttataggtgactaagggagggattttagtaaaaagaacaatcagttttaccagcacttgcatacggaagaatcgcttcatctgcacccttcgataaaagaataatattcccattctggcaatccttcaccacgatcgacattcttttcctatccgaagtaaactccagagtttccaaaacctcatatcgaagtgtagaagcattaaatttgatctctgtaatatattgatcaatatcacataaccaaacctaagatcaaaacagaatatctaaatagccaagaacaaacaatgtaccaagaatatttccacttttattgaagaaaaccatatgaaattgagcagcagcttggacaagtgcatcctcatcctgggactgtgccttgtacatgatagcaccacttttgctacaaagaacaaaagaaggatgtgaagatcagaatctgtatataatttgcatttattgtctttcatatcttctacatgctatctcaataaatggtattcttcttaatctatgggaaaaccaagagttcataaacccataaaaaatatatatacatgtataagcaaattcacctctgtaccggtataactgtattacatattgccataactgtaaggaaccttataacatcaggagagccacttgcaacagcattgagcagccttgcatctttttatcataaaacaaaactaatcagaatacaaagttaaatcataatccaaaagagtcctatgattgtcaatgatgacaaatcaatgactgaaatatattagccaatcaccaagcccatcattaacatattttgtttattacttatctttccactgaacctactccataacacgagtaattgagctatgaacataatcacatagcctaacattcatagatcttaaacagatcatttagggctcgtttggaacgtcgtattaggtcgtattgtgttgtattaaattggattatatattatatttttatatattactatgt

SEQ ID NO: 111649 - DNA, 2541 bp, Cannabis sativa
  modified_base (2198)..(2198): a, c, t, g, unknown or other
agtattaaactagtttataaaatcacacacgtggcgtccctatagattagagcgttacaggatttgtaatgactataaaatcatgatcgtcatggggtaaggttgaatcggttaggttttgagtgagttcagacaccgttattagaattgaagttttttgagtttagataaatatggtattacaatatggaagggttatttcaagatttcaatgctttcaaaagagctaattaagagaaagtagcgatctatgtgggcagacaaatgttgaactggtttccaagagctgaagttatagttgaatataacttcagtgttagcttggtcatcaaatcaaagaagttcatggtctattgtgaggcatcaagataggatctggaatgcgttctaatgtaagtcgatagggtgactatttattcaccttgtcaattgaaggagtataagtagtactactcaaatcattacctagaacttgtgaatagaggtcttgtacttaagaattggcagagctatctctatagagaaaatttgaagtatttagctacttagaaagtggaatacaaattagagacagtgattggaattagcttaagattgggactacataactttttattatcctaagacagccaatgtagtggcagaagtccttagtaagaattgtttcgggcaagttttctatacaaccatggtttttcccttcagttagtgattgtcatggtcgaagttaagtttagattttgtgttagacaaactcagtgagttaactcttcaacaatgtttatttgataacaacagaagtgctcaattgatggatataaaattcagggaaaatccgtaagaaagccatagcaggctagctcagagataacttgatattaaatcatggaatgttatgtcataaaacttaagtgtgtattttcaagtaatgctaagctcagaaatgatattctaaggaaagtttgcaccactctttagttgttatactatggtattattaaggtgtatgaagacttgtaaattctacttatggtgtagaatgcaaaaaagatgtggtggacaaggtatttagatatttagtttgttagtagattaggtttaaatcaccaaaaattggtaaggttattgtgatcggttatatttctcaaataatatgagatggagttgctagaaatcttgtagttggattacctagaaccatgagtatgtttgatttggtatggtactacttgggtataagagctagtatggaaaattataagggagatattatgactctgtgcggctctaaagtctattattttggatagaaaatcgaaattcatctttaggtgttagcgaaatctatagaggaccgatattatgcagttaacgtttagcacagtttcctacccttaaacaaatagctagtctcgagggactattaaaatatgtatgacaagcttacgcgatgaattacaagagtttatggaataaatatctattgtgattaagttctcgtgcaagcaacacatatcaaagtttaataaggatggttccttatatgatgttaaacggtgtgaagtgcatgtgatttcttgttttgaagttcgaaacagaaaatatctaaatttgaagtcattttagtagactaataagcatgtagagaatattatggttagggtacttgcttctcaacacaaacaataaagttcatgttaatccgaaactcataaacgtaaaattcctagataggagaaatattgtggtaacaagagtaagatatgccttagattcctaggaattttagaatttcccgggaacattaggataatagttttttatttaatcttacgagtagcatttatagcacaaaagatgttttcatgttgtatgttggaaaatttaactcatatctttagtctcgagaacatcagttagacttatcctatagagagaaatgggttaagatactcgataaaaaaggtaaagttatctgaagtagaactatagtatttgtcaagatacttaaagatacaataagttgaagggaaacacctgcagattagaatctgacttgtgggctcagtgtcctaagtttttcaaatttgattttgaggacgaaatctttttaacgggaggttaattgtaatgactgcatagttaaattacgggaattagcaaataattaagaggtttaattattattattattattnttattattattatttattttttatgaatcaagttgttgtattgctcataaaactcatttgtacaaacaaaatagcatcctcatagaaataaggacgtatatgaatcatatatgatctatcttttttatttacatcaatgctagttactctatctttaaaatttataaaaccaatcttgatccttttccttaacatccttcggccaaagcaccagaatttgggctcttactatctccttggtgtgctgaataatctggtttgtgtttactgtcttcatgtcccatatgtgttcattccttgctttccaaatgttataaatcaaagaagcaatggctgctgaaaa

SEQ ID NO: 111650 - DNA, 3251 bp, Cannabis sativa
ttatttaaatatatttaggtaactttaaaaaaattaaaactaataaattgccatataatataacaagatactatttttatgtattgattattttatataattttttgttattttgttaataaattaattatcgtagaatataatataattcaattagcttaattataaaataaatgttaattaagatttaaaaaaaaattataaaacagtaactaatcactatattagtaattaaataattttttttctgaaaattaaaaaaaaatatgttactcatatcttaaaatgtttacattgaagagtagatcgcaattatatttttttaggctcatccaagtaacggcatgatcagaaattattttaaaatttaagagaagagaaaaaaaataaaaagaatagagaaagaaggagagaaagaaaaagaaagtaacgacaggaaagagagagagagatatatatatatatataaataaaatattcaaatatacatactaaaataaataaaaatattattcaaacttgatcaagtcatttttgacaattagatcaaaaataagttattttaaacaattttttcttaattatattcctatttgtattggtaaaaaaaatcattaatccttagagattttttttaaatgatgtttagagttaaacgtctatatatatgtcacacatatatatatattgaaatctattaaaaaaaaataatgatatttgtattgtgttatgtaatgttttgtacagtgggtgggtgtatacagaggatttctatcctatatttttgagccatttatgtcaataagtttataaattaatttttttaaatgcatcaataatttacttttaaatgtcaaagaaataattttattgtgaattttactttaaaaaaatataaatttttattaataggcaaattagataattttcaatatacgatggtacatcgcttaaagagttaaatcaataatatagacaaatcacgtcgtttacaaaaataggaaagaaaatcccaataatacattcaactaacaaactaatatgttgtcagcaatgaagtattaaagaagtgcaaagaatgctagatctccgatccgaatgaatatatgacaaatcacatctataaatgactataaattaaaaatcaaaaatatgaaaaataatattaataattagtaagcttgttaaaaaaaaatattaagcttattcactttttttatgttttatttttttattatattcttttttattttagagaaggcttatagacagtttctcaagctagcaatggtgacgttggattggtctctcgagatagtatttttttcttcattttttttaaaacgtattgtttgggtttataatagtactagtttactttcagctttttggaacgtctctaatttatgttcaaaatatggcatataacacttctcataaattagtagtatatgcactcagaaaggatgctgaactaatttaaaggatattttaccatcattcttttatgatgtacttaattattattttcaatgaagtgatcattgttaaatacatatatattatttatttttattattcacttttattttttatgaataaaattatttttcttccaaaagtttgaatggaattttcggtcacactagtaattatttgaacttaaaaattataccattgcaatttatttttcaagatgattattttcatgtgtgagaagcatatatttttttcgttaacacaagcgtctgttaatagtacccattttgggaacgtctagtgccaaagtgagtgaatgggtaagtccctaatccttaaaatgaactatgtaatgtactttatttgttggcttgggcattttaccaaaagtttttattgtatcatatcaacccttgtgtgattcctattaaagcatatacttggaggtgggtgcatggcggacgatttcaaagcagactccccatttattagaggataccaaaataaaaagtagctttcaatgtttatttttttgttaaaaaaataaatcttttattaatcaaaggtcaaaagccacactctatgaccaaaccaaagaaactaacaaacaacaaccacaaaactcctcatgccaataaacggctaatcattctataattacaagtattgtgtttcatgtgcagtatactatacaaaagacatatagtgactctttgtatttccttaaatgtaaacagtataagaactattctcatggatacaattgtttctattcaactaaagatagtaagcagttgtagcaagagtagcaaaagtgatgtcatccttggtcttcctagatatgttagagatcacattcaaccacccttcaaactgtaatggctaggccttgaaaccaagtcaattaaataaacaaagcttgaatgactcgaactgaaaaatggatagtcaaaaaatagatgattatgactctcaatgctcaacccacaaaccgggcaatcactcaaagtaattgttatgccaacatgagaaagttgaccacgagtgagaagatgcttatgaaatgcttgccagagaataaatctgtgcttggatggattctatctacaccatatagctctagaggagttgtcttgatcacaaactagcaagctactatagagtttagaagctctaaactaacttttcccccagctgccttcacttgctgcaagctaatgttaatttttatggtactaaattaggtacgcaacaggaagagttttgtattatctgattatcatcgtaccatttttcaatgaatctccagatgtgtgtacattaaatcaaaataataaaataataaatttagagagtatacctcttgaagcctatcatggtatcctcaaaacttctcgtatgttgtatcccttaatctttctggacttcccgttgggaagctcgcgctaaacgccctttggtggtctctcttccaaataatgaggaaattgtaattagactcacacttgtgtcttctaaatcgatccaccacacacaatgaatagtttgaactattaggataaagtgtataacctttgttcttgttgagttctcaacacatgagcaagaataattgagagaaaaattaattttctttttctctctaaatttcaaaaatttaatgttcaaagtgatattttgatttctcaaatcagacttctatttatagtagttaaattcctttaattaaatcaatttaattgtttaaataaataaatatttataatcgaatt

SEQ ID NO: 111651 - DNA, 5794 bp, Cannabis sativa
gtttctgaacctaatcctcttaaagatattgtttttctatctctacactaggcatctcactttaacctattccttttgagggtgtcactcacaaccatgccatgaaataatgatgtatatagtaactttactatatgccaattttttttctttcttatataaagaaatatgttttcatttctttcttttctatccctcataaattaatttggataaattaattttctttccatgccacaaaacatagtgtaaaatcagatattggaactcccaggaagaaaataaaatgtttttttttttaatgggaaatgcttataatttaaccaacttggacaactagtgaagcaagcataacactccacactttgttgggaaaactactattactatacaaagaattatccaacgaataccattttcaccccttactcatatatttcatcccaaacaaatttcataattgtacaattgaagctttaccattagaagattgtctctcaccgttctaactactacttcccaatgttagttttatattatatatagtgtacctttttgtgttcctatcatccagatatctctgtacagaagatatgaccatgaacctgtatatgtacaaaaatagttacttactaggcaagtaacttggtaggattctgatcattcattttgcaatactaatgcgttcttctcaattagcttcctctcagtattttctccataatcttgtaacctctggcccacacagtagcggtcgtctctgatcctgttgtgcaagtaaattatgaatgcatatataatcttggaactaaaccacagtatactgaaggcaaaacatccaggcaagaaaaaccggtgaatggccgagttcactggaaagggatacccaagtacagtaaatgccaatctaacaagcatgtagggtgtacaaactgcaatgagaagccttgtcatagtaggaaccaggatctcttttaacaaccagagggcaggctgatgagcaagaccatcattaactatcccttgaagcttcaccaaccacctctcgtcaacagaatgcacactatcggccattacctgtggtgcacacaagacattgagttcaacaaaacagagtttatttgttaatgaatgtgcttttgttagaaaatagcctcccaagatactactatgtggaagatgattaacgtaagctgactgagttttggattcatactactgtgacgccttttcggcaacataatagtattgctaatacaaagccttggcttgatagaggtcaagtgaatttccataaaaaagtttaacagaatttccatgcagaaaatatacatcaaaaaggaaaaaattaatactaaaagttgtacattgaagaccagttaaatttgcagcacccttagcaaatcaagtgttagattcagtttttcaccttggtcgtttgcattttgtagaataaattacattttatacaacatagatttataaattttcaaagggctctcatcctaacaacttggaatcacctaaacatacccttatcagaaactaatcgagatccttatggaaaatctattttccatgtgatataagtatttactatgtccacaatcatttatgcaactttattggaacttttgcacgcaaaagctttcctttatttgcacgtatcacaatctaattatataactgtggctatgtaacaggaggatttaacacttaccagcccaaataaagttatcaggaagagccatcctagtacccagcattgaaataaggtgaaaagtgtgccttcatagaaaggtgatggagtgggaacagccaccacgaggtcgagaagaagaccaatcacaacaggaatgacaaacatctgaaaagataaatcagaaacagaatgaaaacaagcttaaacattttgaagcaaaaaaaaatggaaaacgggaaaggaagaataagattgcctaccacagacgacacaacagcacagaatttgaaggcactcatacaagaatgcctcatttggctgaaaagtgcccccacacctcttgtttggacatgccctactgcatacttggcacagactataacagcccgcatcgtgcagcttccaataataaaagaacaaaaatctacagaataaaccatatattcatttatattcctttttaaaaagcatgagacaaggtagacatcataggagagcaatattaccatcatacttaaatccataagataaaagtaggtgagaagctgctttaaagagtgttcggccaagtaaaactggcaaagccatcattaaggaattaaaaacaagtgtcgtcatccatgccaacgccaacaatattatgatgcgtagcacaaatctgtagcaggaaaaaataaaacagcttttcatgattatagtaataaaaaataatctgtcttgaacctcttattcatcagaccaactaacatgtataagccagcaaaatagtttagaacgttaaaatagttcgtcagatagacccttacatgccttgagaaaaaaggaaaatcattttataattagatacattaagaaagaaagaaattaaataaaaattcttcaatctgtgcaatctatggcagaacatactaaaataaaactaattgagaatggttttgcacgaggaaatctgaaagtacacaataattaaaacaaatcagcagcagcaagaaagatggaagatgtgttgctactatttatcagaattaagacataccagagaagttgaagtataaaaattaaaactcaatgtataactgtatcagagacatatcaaagtagagattaatagttaccgagagtcagcttcctggccctcttcacccttgttatcatcagaaacctcggatcctggacctgaagtacgtaatcccgcactctgaccttcaattagggcaaccattgatacattatgtgctctttgctgcctcaagggctcaacattcccatcaccattctcatgtctaggaagtaaaagatcacttaagctgagtagtgagcaagtgacatttagccacttttgtacaaggactttaaatgttgctgatggatagtaaaagcgtatggtacatgggacaccgaaatgaaaaagacaccttcgcagagaaaaagcagcaacagattttgcttctgaactactgcactcaagtgtagatcactaatagttatagagcaagaggaatatgaaacaggagaagaaacaaagcaagaggaatatgcaacaggagaaaacaaagcaagagacatatgcaacaggagaagaaacaaagtcgcttacaaaagattaagggggaacacagaaggtgcatataaaatgactagcttgataggtaaaaacaccagcatcacaatcaaactaccatgaacaccgacaagcaacagaaacccacgagcatgcttgaacaccgggcattcaatcattctactaaagtagttttctggatcagcaatgtctggaaaaaagaagaaaactccatctcgcaatacctgtcacagataaatatgtaattatgccagccatgtcacttagatgaagtaaatacacagcagaaatcatacctctttcataaggttcacatgaatgaaaacatatatgaggtagaaaattccaacagtccagtaggccaatgacatcagaataggattgtttacaaagaaagcaacccttccagtgattgtctgtccaaaaatcttcaaagtacaaacatctaaccaccacccacaaatcacaggaaaaataccaaaattcactccgaatacagcagaaaccttaacaatagccaggaaatttctactaaccatcgtcataacctgcctaaatagtgtaaagaatcttctaataaggaaccgaacagcatttatctttgaagcaattccagataacctctgcaaggtcaaaggctcgcctctagcataacgcatcatagaaacagtcccaaggtagagcaaaacaaatgatagtataactatgtatccggttaaaagagtagcatcatcagataaaattggtgttccttccagttgttcgttaaggaggccagctgaaactaggccattgacaccaatggaggctttgttcatctctattatctctgtattaagaatctccaagtccccttttaaaacttggcttggtatgctagctccacgatggtataatacaaaatatgtgatagcatttagtgcatcctttgttgtagtacttactgacagaagagctacctctatcattgacacaactgatgacagcgtttctccagtattatgagtgaaaaaccaatattgcaagaaagtagttgtccgccctaaacaaaagggtaaaaaaacgagaacaacaacaaaggccatattgctagcaacaacctacaaaaataaagaaaaaaaaaatattaacccatactgatctaaatgaataaccataggggtggaccatggatcagcaatattctagtagtaagatggaaatgatttcattcaattacatttgttccttaatatattatagaccatgaaatatatcaattcacacaacttcagcatatagataactttgaccaccttaatagtagtactaaaagaaaccaaaactgaaagatgaaaacatacaagataatgattacattagactcatctctttcaagatggcataaatatttgagatttgaacttacaactttattcagaccatcctattaagatcatactccagtgatccattacatatattaccaaaattaagggcacatttaaaatcacaaaatgacattgggaagaaaaaactagtgcagaagaagagatacaattagaacacatatatatattttataggaactgctggttcattcataaggagaaagaaaataagaacaataggatatgataaaatactgatattgaaatgaataacattaaatggtagtttcaggaaagaggaaatgcttacggcaaatgcattctcatcaaaaggaaactgcatgttctcaaactcatttgggggaacaatttcaatgacgcccaggtaaatcacaattcgagaaatcaacaccttccaccagtgagaaagaaatgctacaattcttttaatgaactggagaacagccaaggtcccttgccttctaccagcattttcaccaatctcatttccggctaacatcctattagccaaacgtggagctcccattggttcttgcagaaaactaatcctaataaaagaaatcccaagaaatatatatgccattccaagtgaaagaagaaagccatgcatgcaatcagcaaagatcgcagcaacagtaagacgacttgtaaaaagaatttgaaattcactaaaacccttgaagaaagcaaattcccaaatccaatgtgtaacaaatggaattgcaatgagccaaactacgagcaaatacacaaagtgctgcaaaatttgtaacaaatgaaaaagttttgctgcaagcccaattacaaactcctggggaggaagccttgctggagcatcaatggagtagacaggggcataagaatattcatgcttacaaacctacaatttccatcaaatttaaaaagaatgagataaatttccggtcagattaaaactacataccttgattccttaaaaagactcctattgaggtatatagctcataattggccttaaaagggtaagatgcataaacaatgtttccttttataatccattcatgagcttcactataaatttaggtggcgtttggttggaggtaatgaaattgaatggaatggaaagaaaataatttttat

SEQ ID NO: 111652 - DNA, 5171 bp, Cannabis sativa
  modified_base (4298)..(4299): a, c, t, g, unknown or other
ggcataaagacttagccaatatttttggattgtacattgcttgatcaacgtgtccttgtttggttggtccacgtacattgggcaaaatcaggggcaacacttattttaagaagtgctaattttaatctcttattacaattttttaattaatctccacgctcaaaatcacatgatggaatatttttttcaattttttatagcggtattcattatacttacaatatcatgcctgtaaaatttttaaaaattttcgaatagtttacaataccgaaaacagagttcctgatattccagtttaccacgcacattcaaaaaaatttcaaatatattttcagcacggtaaactatttgaaaatttttaaaaatttatagggatgatgttgtaagcataacgaacacttccatgaaaaaaattaaaaaaaatatttcagcgtgtattttcggatacaaaaattaactaaaaaattgtaataaaaagttgagagtaacactattcttctattttcattgtggagaatttttaattagttaaaaaaatttgaaacacacgatttaatataggtcataattgaaggcaaaaattctaaatatttttaagtatgtttggaaaggcacaatgtaattagatttgtgtataattagaggtaattatacaatttggcatgtttgtttgaccatgtaattacaccgtaactgtgtaatttgaagtaattgaggggttctaattacaccctccaattctcatgactctcatgagaattgaatgtaattacactgtgtaattactaaaaaaatttcatattaaacattaaaaaaatattatttttccatgaaattattaactattttgtcaaacaagatattaggaattaatatgcaattaccaatttatatcttaacacattttatattgtgtaattactaccttaataattattctatttaataattatacagttacttcaaaacaaaaaatttaaagtgacacgttcaaaagcactctcaaatctttgaaaaagtattccataaaataatagtaattaaaaataaatatttttaggcatctccaagggctgtcccactattatatttttcttctgttttttttttctatttatttagatatagtaaagggcagggtgtatatttaggaatgattctatcatctctcttctctctcctgacacatgtagggtggcccactatatttttgggcaacacatggacaaccggtgcacatctcttatgatagacaaaagtatcaaacatcggtagtgtatgatcctgaccgtcgaaagttcttaatgatatctccctcgagagaggtggagcttttttgactggaccgatccttggtaaagtcacgacgcttcagcttcccatctccattgtcaaaaaagttggtcaaaagcccttgaactgtttccggactgaaatacgacctccctctcaatgcagccgagaaggagttcaagaattcagtgtaagaagacaccaccagacccattgtagattctctaatctgctccctaagatcaacgtcgggaatgctataaacccttttgtgcatatttaaaatctcgttgagtcctctcgtgaaggcctcaactttgtctcgcaccatgctccctatctcttctttgctctggctaccctttagatcttccttctctaaaatcctcactagaggtccccaagcttgcttttggtacgtataagctgattcctctgccacgattttgtacttctttttcatgtacacatcgcccaaaagctttcccagctcagtgtttctggttctcatgtatatgtaccagtacgtgttcatggcgtacacatggggaaggattttgtccttgtaacgacaccgttttgattcaacgtttctctgtagagcttccatgacgttgataatggcctctctgaataagttctcttcgttttcgggctttgataaaatgcccatcttccatttttgctctgtttggagaactttagccatggggccactatattcctctgagacaaggtacttgaggtaattaatggcgtatctgactattttcgggactgacccatcaacaggaggaggaaaaccgtctgtgtttccttcgatttggaggccgaattcccagtacactttgctggaagcatgaatgagaagctttacgagttctctgaaccgagaacaaatgtcgacccctgattcgccatcgaagacatctgagaactcaggtttgagcttctccaacatatcaaacatgtcaagaagcttgaagagcttttggggctctttactgcttctggtgacgccttctccgaatcggaagaagacggccataattttatcagcgattttgacaaagcactctgaccagatcagaccctccataagacccccaaggacataattgcagagctttttttctgagacgaagacggttttgactgccaggtcgaagtgttggatccaaagagctatagctgtttctaaactctcccactcgatttggtcgatttcttcttgtgtatacgttcttagatagtcagggtttagcctcattaatgctttcgctactcttttgtatctaacctgtaacaaaataaattgttatgacatactactcaaaaactaaactaactttatattttgcctaaattttatagtaaaataaacttataacaaaagttctaaatttttattaaaaggatataaaagttataggaaaattttataatgcacctctttaaaaagaatttatcaatacatttctatccgttttaatatcccaaataattttttaattaaattttttctcattgtcatgtaaattataattatttaaaatatcctgcaaaattttaagaaattaaaaaaagtttaacacactgaaaattacgttcaaacagtgtgttgcacgcaaaaaattcttctgaatgccgaaacaaatagagagtacaccattacatctcttttaagagaatggtgcattgtagaaacactcaaaattatattaaatatacaaataaaatgtaaagagaggttagaccatctccaatgattgcactattttgatgtatattttttactaatttagtataaaatctagtaacaactcgaataatttaacataaaatatcacatcaaatatagcttaattaaaatatttatctcactttttttttattatttctattaatagccaataataattaatttatgatataattatcatattgttaataattaatttatgacttctttaataaattaaaaaaatattaaaatgaaaataaaagttatgtaataatttggtgtagattcaaaatctaataccattaataatgtaaaatttagtgcacactaattcggtgtctccttagagtgaaatagtgtgaaaattctataccaatatagtgaaatggtgcaccattagaaatgctcttaatgagggacaaaaaataaataaaaatgtaatatttattgcaatttgtcgtgtaaatttaacattgttggagtttgatttaattttttttatttatttatctatatttgtaaagctataatttctttttggataattattaattatgtgaaaagaaaattcttagtggccaagttttgaagagtcttctaaagaaaactttggaatgtcttggttcccaagttgtcttggtgtccaagtttatttttcctataaatatgtattttcattttgtgtgtgtgggtgtgtgagaagaagagtaagttgtgaaaagagaagtgagtaagaagcaaagagtgtattgggatttaggtgaatagattgaaatagtgagtgtatgtaattttgaagttataagtgaatatatctctctttgtgggtttggtaactttaccaaattaagttaattttttttgcttcgtttctttattattttgcagtgcttgaaatgtattatttttttaaacaagtagtatcagagccaatgttcagatctacaccgaaaatgtcaaagatggtatccttcaaaaaatttgagatcgaacttttcgatgggaaaaaaatttcagtttatggcagaggacggtcaaagatgtgttggtacaacaagggttcctaaaaacattgtagggaaagaagcctgagagtaggactgatgaagattgggaggagttgtaggtgaaagcgataagcactattcgtaagttttgttcttgaattaaagtatagtgtattgaatgaaaaacgtgtccctctgagttatggaaaaagataaaaaaaagttttatatgtcaaaatccctaacaaatagannatatttgaagaaacaattatatgagttgaagataatttaaggagatgatgttagggatcatataaatagatttaataagtgcataactcaattgttaagtgtagaggtcaaaattaataaagaagataaagctattactttgttggactctcccgtcctgattgtacaggttcacttgtcctcgagatcctcctactagccgaggaggtatatcatctctcctcccctcaggtctgggtcagaaattagtctggtcgtcccttacgaggtagtggccaggaaaaacttgatcatccacgggttggccgacaatttggtcttggggcctagaatttaacgtttcgtcctacctgggcgtctgcacatagttggttggacgttccttcgactgatattcttgtcctctgcttgagatgtaggaaccttttctattgttgacaactcgtctcggtggctaagattccttcctttgtccccactctgttgggtaaatcacctgatcaagttagtagactctttggaacgacggtttattcttcttgatgggtgcatggattgagcttaatgttccatgcgcttttggaattcacgttgttgctactcgaacgcaaagttcacagtggcacgggtttcctcctggttatggtggagtgtgttggtacgcgattggacttaccctagtgcgtctctcaggttctccaaatcagagttgtctaccaaatttactcgggctctccattagagggccgaccaatgcaggcccaatctctccaacatatgtttgactggcagtagggctgaacattttgaacgggtttgacccgaacccgagcaacccgcccgaacccgaactagtgaacccgcaaaaaaaa

SEQ ID NO: 111653 - DNA, 2237 bp, Cannabis sativa
  modified_base (54)..(62): a, c, t, g, unknown or other
agatataatagtaagtttatgatatcttattcaagatcaatatcggtcccttcnnnnnnnnnctccatacatccgatattggtaaattttgtccatatcctggaaaggacataacacttatacaaggtgtaagtataccttatcgtcgattatcatgtcagtctaaatgcagtgaactcacaaatcatgagaattaaacttttgaacatacattcaatttgggattcaagtaggccatcttctccttcgtgaatgagctccaaatcttcttcgctgattcctagtgttcttcctgatcagcaacctgatctatcacatttttcacttcaataacccaattcataccctctgttatcggcttctcaacttcaaggatcgcatcaggacattccctcagaatatcaacaatcaaattcaatctagtattcatagtcgcttcatcgatttccttcccttcttgtggatccaggcagatttcacgattagccactcaagatactgacttttgaaccactttctttctctttgctatggagagagaaatagagggttacgtgcgccttttctctgtttgtggccgtttagtttttgtaggaggttatctttgtctgttccttttgtgttttcaattaaatctttttttaataattttgaaccagttttaatctttagttcatcactaaaatgattttatttagttttgattcttagtttgtgttgggttaaggttttgcttttgctgccttaaagatggcttgtgttaatgttgtagcttgtcggttagtgctctgcatcaggtcagctgagtgatttggccactctttttctttttaaaagcaatgtgttttgtcattttagtagttaaattgtcgaagtctttgctcaaataattttatttctcctcattgactcatgttttatttagatcttagtaaaagtgccaaatgaaattacttggttgagctttgaaactttgtaacgactttgtgtctgtgttcatcttcttatagaattgtatttgaactttcttctttctattattaataaaaaaaaaataggtttctctaaaacaacaacaataataataatagtaataaattctctcttattagaagcaaaattaattaagtgaatctcaaattatgtcgtctctcttttctctattttcttacctgaagtttgaagaataaataaaaaaaaaaatagacagtattttagaggagagatagctcccttgtatgtaattaatcttgttgtttatttatttattattattattattttatttaagtgtttatatattacacaatatttaatttaaaatttgaacccagaacttccagcacactctcctagcttgagctagtctcaaggagtttctttcatttattttcagtcatatataaatagactgaggatatatttcaaaatataaagtatataataagtggaccatttcctcaaagtagaatgctcgttagcatacataattaaatagttagatatataaaaatataaatttgtagtctctcttgtctagtatttgactcaatatttgttactatcacttgccgttggatagcactttcttttgtaaaaataatttagcaactttttctttaccaaaaaacaaaattagcaattttttttttttttttgagaaaaaaattagcaactttttccatactataaaaaaatattataaatctatttctactatttgggagtttaaaaacttttaataattatataattaaccaagatgcttttttgtggtccatatttaggaacatatcaaaaaataatgatgataataattataaatgtttactccgatcaatttgtcattaaattttttaattttacttttgtattgcaaattattcaaatataatttaaaaattatagatacatataaataactacaatgtgttcataaaaaaaatatacatataactacaatatacacaattattaataaaaaacctagaatatacgtcgaaaacatcattttacaagggtgttcaataaatttttactcaattttatatatctatatgtatatatcgaagtcaaactatatttccacgtaattatcaagtgtccaaaaaagtttgaaaagtctaagtggaaattgaagaaaactatagcttgataaatattataaatgtgacaggcagtagtcccgtgatccgtaaggggaaatactgggtaagctgtgcaatcccacatcgcct

SEQ ID NO: 111654 - DNA, 1384 bp, Cannabis sativa
  modified_base (61)..(93): a, c, t, g, unknown or other
ttttctaactttatatgtgtttattttcattgttttttgaattcatattaggttgttaatnnnnnnnnnnnnnnnnnnnnnnnnnnnnnnnnnaaaataatttccaacactaccatgacaaaccatcactgcaaaaacttcctgctttccactttttgtttttacacatcaatctatgtttctatagccacctgaaattccaaagctacaccagaatttccaaaatctcaatgtacccaaactaacccactcacaccaaataatccttcttccaagcagctaagacactaacagaatcaacaacaaaatatttagcaatttatttttttctttgacaaaccggagggattgctagtggtcagcggatccgttgagtttgttcgagacgaaggtggaattcgaagtagtgactggagctggttcgtgctggttgtgtggtggtcgaatgaacaatgggtggtgatggttgaagcttcgacggttggaggttgaaggatggtgacatcgggtggtgcagggacaaagtgatgctcctaagttgggcaaatggaagctactggtgctagtaatttggtgtttgaagggaggttacgggttcagatgcggttgggagcgatttggtgaatgagggttgctttctggtgaaagtcgactggaggtggtggctacaggtcgagtttgggagctgggggcttcggagttgagttgttggttcggcttggtgagtgagttcaggtggaggtcgactggacagtggttcaaagatggtgaatcgtgaaaggcaggcggttgggaatcgtgaagagagacgaaagtgatggttagggttgatgatgattgacttggatgttcctcattgtgggctaactaagtgtgagggtcaacacttgcttgggcccagttgaccaattaattgggcccaaaactgattaactaaaagtaaaatagggtccttgtctctccataatcggcttgggctctcaaaattcaaaatgaagtacagcctcaaatgatttgtctaaacaaaaatagacatccaatgattgcatcataaacaacatttcaatcacatgttctttttttatcagaccactcactcatttttttttttaaaaaaaaacccattcatttgatcagcccaataccaaaacaccttttgctgccaaatgacgtagttcaccgaaatggccaccatatggggctgaatgacaatgctccaagatgcttctaacttcacttgttggcacacatctctgcattatacaatccggacattgcttgtacaagtatgactcatcccaaaaataaaacttgctatcatgaaggaactttttgagctgctgcttggtaaaatcaggtggatgggcacctccaactaagtaat

SEQ ID NO: 111655 - DNA, 3692 bp, Cannabis sativa
gagaatcttcacccagatgagttaaagcttaaggttggaaatggcgagttggtatctttcaaaaaaaaaaaattaacatattttttaaaatttatataattagaataattagttagaatctttaataagattattgcaatgattaattgattttcaccacttaatttgttaataataatcttattgtccaatttaattttttgtaatcaaagtaattaatccatgtaatttttactacaattgaaaatattcattaacaatttttgtcattaattagtttgttagtttgttaccatgaagtgtgataactaaaatataagattgtgaaacttaaatctaaataaatgtatcgagtcttctttgatttttaccattgatttatgttagctaacaaatctgttaatcgttttttagttagttgatgttagttaagtgttgattcttgtttgttatgtatgttaaaatatacttgtactctgtatcaaacagtatataataaaatgtctctagctaactatttctagttaaacttttcttggcatcaaattcttggttctgacttttgctatgcttttccttctttcttctttaactctgttttctgccattgataagctactacatggtatcaatcgccattgatcactgtcactaatggcatccactggaactaactccggcgttcaacttgatccttcaaactccacggctaccgctgctactactcaaccacatgctctagcacactgaaatcctttttccaattctctctctgcctccctcactgttgagtcttgtttgttatttctgttaaaatatacttgtactctgtatcaaacagtatataataaaaggtctctagctaaccatttctagttaaacttttcttggcatcaaattcttggctttgccttttactatgcttttctttctttcttctcttactctgttttctgccattgataagctactacatggtatcaatcgccattgatcactgtcactaatagcatccactggaactaactctgacgttcaactcgatccttcaaactccacggctatcgttgctactactcaaccacttgctccaacacactggaatcctttttccaattctctctttgccgcccttactgtcaaaatagatcgtacaaacttcctggcataaaagtctcaggtggttcccactgtcatcagacacgatcttgatgacaccctgttcactggagttcctcctcctcaaaatcttgtcattggtgctcccaatcctcagtatctgcaatggaagaagagcgatcaattgcttctctcatggttgtgatcatcaatgatagaaggagttcttgcctctgtggccaattataccagttcttactcagtctggagagctcttgagcaaaaattcaccagtcaatctcgagctcgacttctttaactcaaaggtgaattttctcacatcaagaaagggtccctgtccaattctgattatgtagacaaagtgcaaatgctctccgattcaatcactaccactggttctagtgttggaaatcaagatgtcattcttcaattactaaatgggttaggtccaaaatatgacccagtggtttctggaataacctcaagaagtgatgaactaaccttggaagaatttcaagcccttctaatggctcatgagagtcatcttgatcaccataatgttgtgtttgatctcactctcaagatgcaagtcaatcttgtttttggagcatcaagaactggacattttaggccacctacgaacaatggaagaggaacaactactaacagtcaagcaagaattccaagaagaggatctggtcgtggttcatatccaaattctaagctcatctgtcaagcatgtatgaaatctggtcatgtagctgctgtttgtcactacagagttgacaaaatgtgatgcagacactgactctcatccacataaccccattattctccttgattttggttaaaaatcttgagacacttgaatcctccactgcctatgttggtccagaagaacttgttgttgcagatggtaagaaaatctatatctctcattttggttctaccactttaccttcttttactaattgtcctttgaaattaaactctgttctacaaattccttcaattagaaagaatttagttagtgtttccaaactaatagaggataataatgtgtttcttgaatttcataaatactattgctttgtcaaggacaaggacactggtcatgtgctgctcaaaaggaaggttaaagatgggttatatcaattgggagatgcctcttcttcatcttcttcagctacactacagtgcaatcttgtgtccattcagttttttgaatttgaatgtgtctgtaatcaacattgtcaaagtcaggatcaacctgaaataaataattgtactcaatcttcaataaataaaacatctaactctcatggttactctatcttgcatcttgagttatatcatacatatgctaacaaagatgttaatacttggcattacaaatttagacaccctgcaatcaacactataatcaaacttttacccaatctaccccacacaggatctatcaaagatttgacatttttaaatgcctgtcaacttggaaaaagtcacactctgcccttttctacttctgaaactaagacaactcaaactttggccttgattcataccgataaatggggtccctcacatgttgattcaaaacaagggtacaaatattatgtgcactttcttgatgactacaacaggtatacttggatttttccactcacgctaaagtcataagcctttgaagtgttcataaaatggaaaggcctaatggaaaaacagtttaatctccctgttaaatctgtccaagcacactggggaggagagtacaaatcctttaaaaggtttttagaggatcaaggaatccattttcaacatccttgcccaagaactcatgagtaaaatgggagagctgagagaaagcacaaacacgtcactaaaatggcctaactctcttagcgcaatctggtttggatctatcttactagtggtatgcttttagttctgctgttttcaccaccaacagattacctacaaggatcttaaactatctctcaccctatgaaactctcattcacaataaaccagattacaacatcttaaaatcatttgggtgtgcttgctttccctacttgaggccttacaatatacataaaatggggtatagatcacaacagtgcctattcttgggttattcacctcaccataagggctatatttgtgaaaattctaaaggcagactatacattgcttgaaatgttgtctttaatgagcaacactaccctgctaaaggctcctcatcaacatcaaaggtacattcttcaatgtctaactcaattccttctactacttttactattatgtcatcacaacttcccactaatataactgttgatgtttatgtacctttaaccacacccatccaccatctcccacttctacttataagccacaaattccaaatccctctcaaagatcacctcacgctccccaacaacaagatgaaaatccatctggctccttacctacttccccacatattgctcctgaaccatcaatcctgcctccatctcagtgttgggttttgtgccctaaataaaacccattac

SEQ ID NO: 111656 - DNA, 9429 bp, Cannabis sativa
  modified_base (8605)..(8606): a, c, t, g, unknown or other
tggtaaaacatattccaacaacgactacaagtgaactacgataatgacaatgatgaaatatagtgatgataacgggtgagatatgtgatgaaaataagtgagatacaatgagacaacaagtgagatacaataataacaatagttttgaatatttgagatataaaaataatgcattatgggaacaccgtaatttttttctacaccaccctatttatttatgtttctaaaaataatttcttttaacaaagtaatttaaaatactacatataataaattttaaattttttaataataattttaaattataattaataaaattgtacatttaatttttaataaaaaattattaataataatataaagtaagataatatatttattattttattatataacaggactatatttttaagtaattatttattataatattaaaaaaattaaattaacgacgtgaagaacggatatattagttaatttataaataaccacggtgcaatttatatcctactctatgtattaggaagattataattactaaattattactaaataatcatttcaaaaaagactatcactacaaaaaaaaatatataagaaaatttgtaaataaccacgcaaagcgaagttatatcccactctaaataatattaggaagtatctgtacgaaaatatcccaatttttggcaattagcatgtcattatcttctaaccaaatatggaaagactaaataagccacgtgcaaacccttgggatacgtgtcatgcaattgcacctcatacaacacgtgtccgattttgatcaactccttagaaagataacaaattgagataagctacaaagacaatcctatggacacaatgaattctacagcaaagactgattgcgttgagggctttcacttggatcctgcaaacatgaacacttcaagagtaaaacactcaactttatttcttttctctttccatgcatataatcttgttgtttgaatgaaaactcgtgttctttcatcgatcgaccctttattttaattattataaagacatgtatatacatatatattattatggtttattatgtctgcttgcttgcttgtatctaatatatgatatataataaattgtataatatattttaggagatgtctacggtgcatacacaaaattgaaaatactaaaacttaagaaaaacgagaggagtgcactgttactctccaagaactaccctctattttaatataattaatagcaatatgttacgtttggtaataagttgtatatttttcttttcaccaattaattgtattgatttgcatcaacatatatacaaatacaatacaataatacagataagaaacgaaccctgtgtgttttggttattgcagggaaaggaagagttaaccgaaggaacaagagttgaaaaggtggagacatttgattaccaaacaccgccaggagaagaaggcaaagaacctactaagaaaggcgtacaggtgattcacctgactagaaaggaacccaatgctgcaagctgtgggggtggcgatggcatcttggctggggcagctgcagctgtttcaaagacccttgaatcagccaagggtatgatttccgggactggccaagataagacaacaaaatgactgcatcccactgaatgtatcaaccaagcttatatttcttatgcattgaaataaaatctaaatcttgattgaattgcaactcttaattatttcacttttcttgacgttagattggttataagactagtacgacagattagccaaaccactcaaccgactaactcaatccattttttataataaaaagttgtgttaagagtaggctaggctgataggccataattttatgggttggacatattttaattttatataacctaaactaatctatttcttaaaagatcttataaatttaagacaatttttatacataaaacatattttacatttataaaatatattttgttatcatatattatattgtgataaccttaagtttgaattaatcaaaacaatcattaattaaatatagtctatagttactttattatttctaccactaataaaaattaattgctattattaattctcacacaatactacttttttatatatatattacttttttgtgtatgcactaaattaaataatttcatcttttataatataatgaatccaactcaacttacctcttatattattgtaataagtagagttaagtcgagttaagttgtacaataaaaaaaaattaaatggataataacttatttataccgcaatcattaaattagcttattaaaacacctttaacctgcacccctaggacagatatggtacttgcgaacgctaattaaagaaaataaagtagtcacaatattgataaagtgtagcaatccttttcttatatatttatatacagtagtctttgcaacttggctataataaaagaagttctagaaaaaactacaaacttattttctaagagagggagagaggtattattcttgtggaggttcatgaaaactacaaactacaaaatgttcatggaagttcttctggaggtattattctgtgcttcataaccaccacttccaatataccatcaggtcgaaaactaggagaaaacaaacggggatcaacaggacctggcaggctaaacgaaatggtaaacggtccaggaggacagagttgctgaactttcatatggtacacagttggtgaatccttcaaaaggcttacatcatttatcaccccttcaatatggactcttccatcccgttgaatctcacattttatgttgcctgttaaaacattaaacttgggggtcacttctctatccaataccgcattgagatgaaacataaattagaatctcagaaacttcatttagcatacttttaatctaaaatattaatccaagtcaattaaaaatcatctgagaaagcaaggaatttaaagggagcacattcaatgatgaatacccgaatacttactttgatctttcctgataccaggaagtgcaactctgaaaaggtaagcaccttcactctcaccaacatcaacaagaccaactgaaggcccagcgctaccttgctttgcagttccagtgagaattacggacggcttcaactgaggattgtcagcaaacttttgctcatccatgctaccaaagatatgtttccttataattctggagatgactgacctgcatatatccaaataataagcaactagtgctaatatgcctgatgatgtatcaatacttctaagtcctgaggttgctattgcaaaactaacaattcaagaatacaattgtataatttcctatattagttttcaaagttgtgtgtatatataggtgtatcactattcccaattgtataatttcctataatagttttcctactagtgtataggtgtattacttttcaatgaaataactcgttcatttctatcttgagaacacttgtagaagataaagactcaactttttttaaatcatttccatccatgctttatataataggatcatcaataaaaatgcctaaagcttgcaggataccatatctgtttgttaaagctcaggaaagcttaccttaccaaaaggctgaaaataaatatgaaaaagaacagatggtgaattgtcaagctcaccatttgagaagctgaagagttgcttttatagagagaaagccaagaaggccgtaacagattacaaaggaattttaaagaaatagcaaagctgttaaagcagctggctaatacctcaacggattaactacttaactaacaaaattaataattactgttagttacatcattaacatccccctcaaaagacagaggaatacagagtgtcaacttggaaaacaaagaatgaaagtgagcaaatgaaagcgaggtttggtcagcaaatctaaaagtgtgatggaacatatcaaagttcaagagctttggacaaactctgatcacgaacaaaatgcaaatctatctcgatatgcttggtctgagcgtggaaaacaggatttgaagccagagagatagctcataaattatcacaccacaatattggacattgatgcagctgaacttcaagctcactgagaattgtaattatatcagttgttgccaaggctaaagaatttgtctcacattaagtaattgaacgggccacaactgattgctttttggagcaccaattgatcaagtttccaccaaacaagatacagtagcgagaggttgatctacggtcatcagtggagatggcatctacgatcatcagtggagatggcccagtcagcatccaagaagccttggaattgaagatgctttgctggttttaaggacaaaccttgatgccttttgccagctaagtagtgtggcactctcttacaggcattccaatgatcagtggtaggcgcttttaaaaattgacttagcttgttgatagagaaagctatgtcaggccttgttagttttaggtactgtaacactcctgtacaaagaagggtcagcaagtagcgtaccacctttaatggatagttgagagggatacataggtgtgaaaatttgttatgcagtaggcgttttggttttgtgtaacaaatcccttgtgtatttacattgagtaagatataaactagttgactttcgaaacacctcaaatcccaaaaagagaagttcactggtccaagaactttcaaggtaaataaatgtggagatcagtgattaatcgatgaactaaggatgcatctactcctgttattaaaatgttatccgcataaactaagagaagaagaaacttgccttgttttttagtataaaaaacagtgaagtgtctgactttgaattagttaaactccactgagtgatttgagcttctcaaactaggctcttggcgtcattttcaaaccatacaatgccatgttaagttggcatacactgtgaggatattccttgctttgaaaatcctttggttgatgcatatagacattctcgtgaacctcttcattaaggaaagcattattcacatcaacttgctgtatttcccagttaaatgggacagctggagtgaagatcactttaatagtacaaggcttaatgacagggttgtaggtcacaaaaaagtcaatgcttgcacttttgttgaaaaccccttgctactaattgagccttgtacctatgcacagaaccatcagctttatatttattatttaactcgatagacccgcttactgccaacaatagtcatattgagagtagcaggaacaagagtacaagtattgttaagatttctatactcatcattcatggcctgagtccgctgaggatcttgtaaagcctgcttaacagacattggccccaaggaaaaaccaatatcagtgataagaaaggctctaggtttagtgaatcttgctttagatctagtgatcagtggtgattaacagtgtgaagaacaacagatgagattggatcgtgagcaggattagcaggatgagcagttaatgatgtaggaacaccaggagagatattagcaatatcagaaggaaaaagtgaagtaacaggagctggaaatattttaggggataaagatgaactcaaagaaatgcattttgtgaaactatgactagaaactgtgaggttgaactggagctcgagttgattgggtaagtagaaggaatatcagtaggagaaaagcctgttgggagaggatttgactaacaggaatgtacaacaggaggactggaggcagtaatattatctatttcaaaaaagagagtatgaatactctaagtgcattagagcaattaaagatgcaaataagtgatgcaaatgcaaaatataattcattttataaaaagtctactccaatggtgtgtcaaattataatgcaaatttgtcacataacaaaaagtgatccaaatttaaatcacaatatagcatgatgcaaaatttacatcacaataaatgctatgtttttatatttactattatgttattttttaatattttattattgaatttgagttagtatgatacttttgatttttcaatataatgctatgctatgcttttatatttactgtttggatacttttgatttttcaatataagcatttaaatcagtaaatattttaggaactttagacttacatttcataggaaaagtctaaacaaacttaagtataattatctatgaaactagcataatacttgaagccttccatagatgtgtaaaatgaacccgtatacattggaatgaatgagctcaaatggagaactagattttgaaatagaactagggaaatgaaaatcgtgcaatttaccatattgacaatcattacaaagaggaatttcattgaatttaatctggggatttacattcaaaaaaaacttgatttagaattgtcttggcttggtcatgccaaagattaacaagagtagagttatctgtagtaaaagaactttgtgggtgaactggagttgaggcacaatttggatgtaagtgttggaaagaaatcatgcctactgattagttgattgagaggacttgaaattggaatttgtgacaatgagcttgtccagaccattactaagagaaccctcaagaagaacttgtctcattgtcttgtccataataaaacaagaaaaactcaagcacaacattgttaacttttgtaaactgagaaatacttaaaaagatttttagtaatattgggcacatgtaagacatcgttaagcactaaagactgaacttaattacaagtcagaataatgtttgaaccaatatgctccttttcaaaaaaaaaatttgaaccaatatgagctagaggaagggagaagccattacctacaatcaccttacccttgcctttatagtcagttcttgaagcaagattgtttgggtctacagttagatgatgagtggttccaatatcaagaaaccaagcatcttaactagcgtcattggtttgtgaagcacccagggcttgtggtggattctaaggaggagatggtgtgctgaaagtggcttctcgaccatgaaaattgatgtcaaaatgatgaaattgcttctgaacagtgcgtcctgtgcgtccacagagttgacaggtgggtgggtttagtacctcgtccaatttcatttgaattgccacgaccaagataatcacctttatgacctctgaaattgcctcttgaatcccttcaagtagaattgttgtatcaacctcagcctcctctagtagacatatttgcaagatttgcttgctaagaaaatcaagctaactgtaaagtaattgtaaattaacatttaatgcatttttcatttactatagtattactaagtgttcacattgtattatatttactctttgtatacactaaaataaatcaaaaaaaaaaaaaccattttctcttattttctccactgtatcagagcatgtaaagcttctcaaagatattatttttctcattcctccccttcttaaatttagggtttagagactatcttagaaaactaattaaaaggagttttatattttcaactctgactcagggagcttgtcccatctccgatcagcaaaacccaaaaatctggcatccatctgagctgcgcatgagccccacgcgccacctccatccgacgcgactctctacacgtgccgacgtgtgtaaacgcgtggcagtctccaacagcattattctgcgtcgtctctctcaagtttcttcatctctatctcttctccaactcaagcgacgtttttccaatgtcctctctctttattcgtctcctctaagattctatacttgttttgtcttgttgtctttctccatggcagaacaaaactcataagagtcgtctgtttagtcgcaagacaatacaatactcatgcacatcaggttattcaaaacccctctcatgcacgtcaagttattcaaacccctcaggaccctcgaattgtggattcaggtgcttctgaccatatgacatgttataaatcactattttcttttctaagtgctctcatgaaaaaactgttcgcatagcagatggttcgtgttcaagaattgatggaattagaactataaccacagcaagtcttgtcttaaattgtgccctttacgttccaaagcttgattgcaatttactttctgtaagcaaattgagtaaagatcttaattgtgaagttaagtttgctactaagttttgtgttttcatgatgtggaattacgaaagatgattgactatgttgagttcagtaagggcttgtatctgctaaaaatcgacaaccccatgtgcaaccatgaaaattattgctgtttctcccaagaacatactctttcctcagtaaatcagtccaataaaatcagtactatcatgttatggcattactgtctaggtcatccaaatcttgtatatcttaaacaatataaatcctcaatctcatatttgtcaattagagatcttaaacaatataaatcctcaatctctcaagtatgatatttgtcaattctctaagcattttcgtcactctttcattccaagacctcatcaaccctctcacccattctcactcattcannggatatatggggaccatccaaaatatcagttgggcacattagtttttattactagccgatgatcacagttggacattcctcatgaaagaaaaatataaaacaagtcatattttacaaaattttcacaaaaagatccaaactcaatttcaaacaaacattagtgttaaaaaccgacaatgctcgtgacttcttcaattctgtatttgaatcatatttgcaatccaatgggattgttcatcaaagttcttgtgtagacacaccacaacaaaatggtatggctgaacgcaaaaatcgtcatttactagaggtagcccgatctttactcttttcatcccatgttcgaaaaagattttagggtgaaacagttctcacagctacctatctcataaatagaatgccatcacgtgtattaaaattcaaaactctgctgcaaatctttctagaaggatatccctactcatatcttgtgtctcaaattctctttcttatctttgattgtgttgcatttgtccatcttcactcctcacatcatagtaaacttgatgctcgagccacaaaatgtatccttcttagctacttatctaataaaaaaagatacaagtgtcgttgtcctgtttcacaaaaagtgttcaactccattaatgtcactttctttgaggaacattcttattatcccaaatttgcagttcggaggaagaatcataatcaaaaactacaaaatttagactttgtttcactcattgatcttcatccttcttctcctaacaacacccttgctccaaaaactactcatccttttgtttcactcattgatcctcatcct

SEQ ID NO: 111657 - DNA, 1893 bp, Cannabis sativa
gatatgatctcattagcttccttctttgttcatgcttattagaagaggttagtgaatcaagtaatcaagtgaagatgcatgatgtcattcgtgacatggcattgtggattgctagtgattgtgggaaaggagagagtaaatttttggtgaaaacaaatgctctattggttgatcccccgaaaactgaaaaatggaatgagtttgaaaggatctctttgatagggaacaagatcaagtatgtttctataagtcaagcatgtcataatctctcaactttattccttcattttaatgatttgaggcgaacacaatcctttcacttcatgcctgtgttaacagttttggatctatcaatgaatagaaaattaagtcacttaccaatggaaatttcaactttggtttccttgcaatatctcaacctgaagggtacagaattagaagaattgccaaaagagttgagtaacttggtaaagttgaaatacttgaacttagaggggttatcttgtctagatataatcccaaaaggattaatatcaagtttttctcaattgcaagttttaaacatgtttggatgtggagtgtccgaaaacatagtgatgggtcaagttcaatgtggaggtaataaattacttgtacaagaattgcagcacttgaaacatgtttcagcattgggtgtagccattaaatgtgtcactgcctttaagaggtttttgacttctgaaatgcttctaaactccactcaaagcttgttcctccaccagttaagcttaagcaccttacaggttaacactctttcatccatggcgaatttatgccgactttctattcgacactgtaagagcttggaagctttgaagattgtcttggatggaaaaagtatagagcataaaagactgtttggaagccttcagaatgtgagtattcatcattgtccaaaactcaaggacttgagtggacttatttttgctagagaattgagtcatcttcttattttcagttgtgatgcacttgaagaaatcataagtgtggacagtgttggtgatgctggtccaggcactaaagagacatttgttaaacttgaggctatgacattgtctgatttaccaaaactaaagaatatctgccctaagcccctgccttttcattgcctcaagttacttgatgtgttaaaatgtgaaaagttgaagaaactgccaatcagttctaaagacacaagagcaactaatctgactattagaggacaaaatcaatggtttgttgatatagaatgggaggatgagaccactaaagataaatttgctcactgtttctctggtgattatctagatgacatggactatttggatcttgattcatggtgagttgtattgtagctacaacatcacttaataattattattatttaacttttatttatgggtgattttagttttctcctcttaacttgtcttcttttttttttttttcatttggttaggtatgattaatcttggttgtggaactgaaaggtgaaccaaggtatacacaggaaataaactacaaaatcagagttgaaccactggcaccaagcaattattataagatttactcttttccaacatgtatcttgttgttcattgtatcaattttaaggccttgctttttaataatttaattatctgtggcttaccttcatcaaagcttattaatctaagtttagttcatgtgcattgcaacatttacactcaaaatatcattctacgttttgacattatactttacgtgtactggcaagttgctcacaaagatgtgtcaagaagacaagaataagtaattgacatgtgtattctaatcagaaccgacctatccaattataatcgatcatcaaacattggatatccaattgtgatcgga

SEQ ID NO: 111658 - DNA, 6857 bp, Cannabis sativa
  modified_base (31)..(73): a, c, t, g, unknown or other
  modified_base (6802)..(6818): a, c, t, g, unknown or other
atgcaacataaaatattatttctgatctttnnnnnnnnnnnnnnnnnnnnnnnnnnnnnnnnnnnnnnnnnnnggcacaaaacccaacagtaatttccttgatgtgagcagaagacagtaggttaattttttaattggagggtaccagccctttgcatcaattagccttttgctgacataatacataggatgttgggcgccttcttcttctctaatcaggatgaaacttactgcaaattctatcgctaccaaataaattcccaactctttttcatctagaggttttgataggaaaggaggttgtgcgaattatttctttagttcttggaaagattgtttgtacttctcagtccattcaaacttcttatttccttggaggatattgaaaaaagggaacacatttgttagtagactttgacacgaatctattgagggcgactatctaaccagttaagctttaaacttccatgatttttataggtgatttcatgcccacaaggacttgtattttttttttttttttggattggcctctattcctcgggaatttacgatgaaatttaagaatttgcccgaacctcatcgaaatgaacacttgaggggattaagcttcatactgtattttctcaagattttgaaacattcatccaggtcctctatatgcccctagctcttgaggattttcttgaactggaaggctagtaaaggaaacttctagatggacgttctaaagtcggaatactccattagcaaacatctttgcaaacaactgaagatcatccaattagaagtggaaaacttagagggaaaagagaaagagaattattaatagttcggttgctctcaaacatggaatgaaatgcttaaacagagtatagacttatgtttaaaggtagtttaggaagtataagtcaaagagccctgactaaagaattacaaacaatgagtctctagtagaaattcatatacaagtgagggtatgggaggtatagcagtgatggataaagtaaggtctgttcagcatggtgccaattatatttattgtatccttaccccaaaactttactggttaatatattatgagtttgtataattaacctatcgttaaaggtcaacagtaagttaatacatgggctacaataaccatagtagagtttacacttccatattctaactgatctgatctttgaacattctattgaccaggcattggtaggtagctttaacattttttagttcgaatggcataaccttgtagcaatataggtcaacatctgttcagaagcttgtgtggtcctgatcaggtagatacatcttaatctgattatattctgagttagcatccataaagcttaagatctcaagcttggtcgtagcatccaccaactggtcaatcctggaaactggaagtaatccttcgggcatgccttgttcaaattggtgaattctatgcactctcaatttaccattaggttttgggaccaacaccaaatttagcacccaaattggataaaatgcttctatgatgaacttattagctcgaagcttttccacttcctctttaagagcttaggctcttttttgtcaagtagtcccctcttttgttatactggtaggaaattatgagtatcaatatttaggacgtggaaaattatagatggatagatcctagccatgtcattgtgcgaccaggaaaaaaattgagattttcccttaaaaatttgatcaaagtagattttatttctgtcagtaaacctcgacatatcttgattatcatggttggtttggttgggtctatctccatgtcttataattcttctactatccatatatttgcatcagggtccccaaagcaaggatccatctcatcatccccgccttggacggattcttatttgttttcaatttgttcatccttttaactttggtcaaacttgtcttccttctttttctttgtgagcgtgatgttgtagcattggcgggccaaaagctggtctccctttatacacccaacttcatttttggtggggaactaggtgataaatggaagttattaccttcaagtcatacattgttgttcatcctatcataatgtttaaggcggatggtacataaatcaccaaaaattgtgccatggcagtgctaccagtgagcacttttcccatagtgagagagagatggatgactcccagaggtgcaatactatggcctaaaaaatcataaattaactattcacatggaacgaggtctttgagctagaggcccatctttttgtatgttgttttgaagaggatgtttgatgaggccccgtcatcgatcacggatcgagccacagtcatgtttgctatttacatttctatgaccagtgggtcgttgtggggggagggggtaatggacgtgtatagatcgatgtcactaaatgacacaaatgtgtcatcatgacgtggttgcttgggaattcgttctttgacaattaacacttcctcttttttctcatattggagtgttcgagcttatctttcacgtgctttaccagtgtttccagtaatgtagggtcctctaactatcacattcagatgcccatcaactaggggtggcatcagacaattttgagcgttatccctttgttggggggtcactgaatctggtcattctttacgtaccgatttaggtgggaaatatttctttggatgagaaattcgatctctttcctcaggttgttgcactcgtcggtgtcatatcttggtggaaataacaaaatttagtggtgtccctcttatttttttatctttcttgataggagggggtctcctatatggtaccaccatctgagtagccatgaagactttttcccgagtattagtgaggatggtgaaggcaatgaattgaagagccctctcacaaggattaggatgattggtgttggtaacttttcccttcttcccatttccgaaattgttgctatttccattgtttggcctcttacctccattgccattgttattattattattcccttgtccctagtgattttgattattctaagtgggggtttcagttggtttgctcacatctggtttggtgttgtgcacattgtcaacccttcattcgacctcttcgagctttatgaaccaatctgcctggtctaaaaattctctgatggatcctatagtcaatcgctcaatgtctgatcagagtcttccttttggctctatgcctgctagcattgtggccagacgtccttcatcaatcaaggatttgactttggtggcctctgtcatgaagcactagatatagtcttttaatggttctctcggtacttgttttacttcgaccatgcctttaaggttagtaggtatttggcgagacaaggaaaattggctgtagaaattaaaagtgtgttccacgaattggatattttggttggaaacttgaaataccactattgggtggaatctatcagtgttgctagaaaattctacatctcgcatctccctttacctcctacaagtaggtttgaattttgaaataatttatgtgggataggggatcttccttcccaatgtaaatcatttaggtcgacattttaaatttggtagggatttccaaagtgttgatcttggggagaatggggaagccctactccggttgagttttaggtcagtgagttttgggttggtcatgcttcgtattagttgtgtgagtaaattcaattaggcttgcatccctagattctcataggttgtctgttaactgtcttgtgccaccggttgtccccctagaacttcatttggcatgaagtttccttggttgttcggttggttttcccatggaggggaaaagtttaaatctcgattctccctcattcagttcaagtctttcatgagataatcgtctggtcgtggtcccattctcttgaacacaaagtctatttgaggcattccgccaacattctacctatctgcttattctccggcgggaagttgcctgttattgttgttgttatcttgaccagcatgaaaattgttattttaactgccatgttggtgattgtttctaggatttgggtcatcacgcacccgagtcttttcctcgttgtcatatttatcagtgtattatcgttggctagagacttcaggatcattctttcttcattgaccttactgctattgttggccattgttttgacaatgatcatacacctggaccccttgatttccctaatgcaggatgatccgtccccgcgagcctctgacatgctgagtaggtaatgttcgggcaagacttgttcatatatgggcggcctttgttggccatttgaattagccctctgacatgtttggccaatcgtctattgattaaggggacattctttcgggccataagcagagcctttaccctattactgttttccctaggaggctgaacgttagtttgttaccctcagtctattgcggaaactgtttgatgagttcgatatcttatcttacccgacgattgatttcctcctattgagccctcatttcttgggtgttggaatccatccattcttgaaactcacgtcgttgttggtcgaaggcctgattcatggtggcgtgagtttcctcgtggtcgtgatggaggttgtttgtgtgattttggacctgccccaaagcttctcagagattttgacattgtgttctccaatggacggttggcagttctaacctcaatctctccaccatatggtttgctggtgtcccctaactcttgcttgtctggggtaaacccatggatatcaatggtgaacccaacaaagtttctaacccctgctcctaaattgagtcactgacccctgttcctactagagcattattgtgagggttgtccacattggtgttggcaggcaccttgatatttggatcagcgaccattgggtcacgtggttcagtggatgatgctcttttggtttgcaccattgtttcaaataaataatttgaaaatgatagaatactagtgtattatcttgagttcaactcttaatgaaagccctaaaatattgatcctatttttagtcaacaacaacaacgcagatttaatgttatgacaacgaaagtgtttgaatatgagattaagataagtaaataaatgacacaagaattttatagaggttcaaccccaattatatggtaataatctactcctctttcttagtatttctcattggaatatcgagaccacaagaaccagagtcaagtgggtttcttaatattctccaaaggattgcaaatgatagtttgtgcagcgtaatagctctctccgagtgtcaaaaatctctcataaatagtgaaatgaggtactatttttagggttacaagtgaataaataatttaattacaaaatattcattaaaggctgattactctgtcaatcccacgattctaggtacctataatgacatagtctttagggattatggagttaatatcgcatatctagaatgagtccactatttttctagtcggatggtctgaccaagatgtttcctttttgacgttctttaaaaggaatcaacttaatcctcattggtcggttcactctaactacttggacgcttggttgtcatcaatgatgaattgtcccagctgattcgacagttctaacatagtacgttacactttcctgtcttctagttaatccgtctagccttctaccttccaaatttgttgtgtgccgactagccttccatttaacgccacgtgtcatttcgtttcgttccatgtcacttgagtaatttttggaataatgtaatgtctattgatttttgaaatcaattttttgtttttaaattatgttattgtttaaaaaaaaaatgtgtgtatgtatatatatttgagaaaattagcttcattaagatctcttgagtaaacaggagaaatttcttgaaaaaaaagaatgttgagacaatacaattaatcaataaaaatcagtctgtaaagagatattaataccactgaagtagtcaggttaccaaacaaaagtaaaagagctagttttgttaagaagtgagtcacattattagcaatcttaagacaataaaggattgaatcacacccagttttatcattaggaatgtccaacgcaacatcacaattaattttaatgacaccaccacgaggcttctcccacttgtttgtgtttcataaccgacatactatcattagtagcttcattcacatacaaaccactagtcttatgataacgattagtttatccgaggctccaatcaacaataagcttatcatgaattattttattttcattagcaatgttgttatgtctataacaatggtgttatcatcttgacttttaattgatttgactttttgctaaggctaattagaatttttgtttcctgaactaaatcatgtctcctaaacttttttagccgttaaaaatctacctgaactattgagattgttagatttaaggatatttgtctaatttcattcaactttactaattttgtaattgtccatgtactaaatcatgctccctagactttgatagctactaaatcatgctgctcaaactttgatatgtattaaattaagtttcctgaactttcatcaatgttagactttccttactaaaattagaaaaaatatcttaaatccaacaatctcaatagttcaggagaaatttttaacgatcttaaaaattcatggagcaaaaattctaaatagcttttttataaattacttcctaatggttggtcgatcattttaaatcgtgcaaggtgtttctgttggaaattattttnnnnnnnnnnnnnnnnnactcacaagtatgttgattaacagatcggaagagcggtt

SEQ ID NO: 111659 - DNA, 3030 bp, Cannabis sativa
  modified_base (2978)..(2988): a, c, t, g, unknown or other
ttaaacaacatacttgtgaatagatctatgatcctggtaaaataaattccaacaactgcaactcgagatcttggatgtgaactgaaaatggagcgaatttggaagtataagtcttgtgagttgtggatttctcaaggtgactgtaactcagaatttttccatacatcaacaattgtcaggagaagaagaaatcatgtttgggcaatccttgatgaaagtggaaattggagaagaaacaagaatggaattggacaatattttgaggaacatttcaagaatctttttcaaagttcaaaacctgttcaggatgctgaatttgagagccttttcgaaaaacaggtgctagatcatgagaactatgagatcagtagaatccccacagcgcaggaaatcaaggaggcagtttggagtctttaccccctaaaggctctgggacctgacgggtaccctggtgttttctttcaaaaatactggagtacagttgaagctgatgtatgcaacatggtagtagattttgttgctttaggttcgtttgataagtagttaaaccatacctttatctgtgtgaaagccctgctagctttgatcaattccgaccgataagcttatgcaattttgggtacaaaatcattgcacgaattttgacggatagactaaagcttgttctggacagattaatatcctcttttcaatctgctttccttaagggaagatggatcgctgagtgtttggtgatggcgactgaagttccacactgtctgaataaaatcaaaggaaagtctggattcatggcggtgaagacggatatgcacaaagcatatgacagagtggaatgggggttccttagacgggttttggaagctaatggattcagtgcacatgtatgtactctcataatgcactgtgtgacttcggttatattttttgtgctgctcaatgggccccctttacaagccttttatcctgagcaagacctaaggcaaggcgaccctctctcgccatatttgttcatcctttgtagtgaggtactttcaaaactagtgtgcaaggcggaggctcggggtgagataacagggattaaaataggaagaaattctctccccatttcacatcttttttatgcggatgacaccatcttcttctgtaaagcaaacaacaaagaggctacaactttgctatcttgctttgacaaatatgaaggatggtcaggacagaaaataaacaaaggaaagagtggaattgttttctccccgaaggtcaccaatgagacaaaggaggatctgatgaacatcatgggaatgcacagtttaagtagacaagagaaatttttgggaaatccattctttagttcagcaaagaagcgtcaagacttctcctatgttagaacaaaaatcttaaacaaatttgaggaatggaagccaatgctactgtcccaggcaggtcgtttaactcttgttcacttagttttgcatagtataccctattatactatgtatactcacaagcttcctaaaacaatctgtaatgagttggacagtttggtggcatgattttggtggaatggatgcaaggaaaatggcacaagcaaccgctacatggccacaaaaagttggtttgagattttccaacccaaacgtaatcgtgggttaggcttacgacgattctgtgacatgaatatggctttattggccaaactagcttggctagttctcgattagagtaatagaccatggattcagatactgagagctagatactgcaacagattggatttctagaatgttgaacataagcctgaagattcggctatatggagtggaattcttgaagcgcgaagtatagctatggcaggtgctgggtatttggtaggtaagggagatattgacatctggactacaccttgggtgcctggctttactccaaccgaaatccaaaggagtttttcctacaacactacgcatgcgtttacgaaggtagcagatctttttgtacatggtacctgcagctagaacgttcaactaattaatagatgctttgaagtggaagtggcaaatgctattacggccatcatgcctcttgagggagatatagacatacttttctggaagatgggatcgaaaggaactttctcggtcaagggagcttactggttatctcaaaaggatagatttcttaaggagaaaccagtttggaaggccttgtggaaacttaaactacatccttgacacaccctccttatttggagaattctctcggcatgcttgcctctcaaaagccgcttgggcttcttaaaccaaggtgacaggttatgtgttttctatggtgaacagaacgaaacagagcttcatctcttttgtacctgcccttttgctcgagggatttggtttctaagctcgtgggggttgagaacggacaggcttgcggtcaattcctttgaagatttcctcttatggttttgtgtagcaaatgatgatcacttggtaagaacaatggcatgtgtgttggaagcaatctggttatgtagaaataattatgtcttctgcagtccagttccttctatcacagacaatataagaaatatatccaagcaagctatggaattgtccatggttgctgaagcaaacaacttttaggaaactcatgtaaccccttctccagcacaaacgcatcagcagactaattttgctgcctgtgcctcgtgctgtttccaagtcgatgcctcggttgtcgatggggtagaagggatcggagttgttttgaagaagcctggggtagctggttatgaatcctgtcagtcacattgctcagtctctaatattcttgaagttgaacttgtggcaatcttaactgctctagagcatgcttggagtaaacggcttgactctgttcttattaaatcggattcaaaaattgttgtggatgctttaaacttgggggagctgcccatggcgtggggtgttggaaatattttaccaggnnnnnnnnnnnctaccatgtatgtttcattaaaatcctaatatgaattctaaa

SEQ ID NO: 111660 - DNA, 2593 bp, Cannabis sativa
attggatatctaattggcggttgtaattggatcgatcaattatcattggattggatcgatttatggatacccctaaactgacgttaactcacactattaactttcaaaagatataaattaaacttagtcaacccttaaacaaactgcccatcattgatggcattccaatggaggaggagagaaagaagtgaacgagaaagtgattgtagcaatataggagagcaagtgcagccactatggaattcaatggccctacgattattttttttggatcagattgaatccatctaatattttaggtccaacatgtattggattagactagatccatccaatccaaaaaaaaaaagagtaaagttttaatgttaattttcatatatacatataaattttacatataacaatataaaaattaattgatcatctaaactaaatgaaaatactaattagttcaattggatgttagatgtattagatttttagctagacaccccatccaccatccgatctgatccaattgaatatttaagaataatatccaattcgatccgatcacaattgaatatccaatgtttggcgattagttataattggatctatcggttcttatcagattggatcgatttatgcacacccctgaatacactatgctctcatcatcttcactatcaatcatggtgactaggggtggcaatttgtgatcacggattgtgttcctgtcgtgtcaagacctatgtataacaggtacatacccgacccgaacacgacccatttaataatcgtgtcaaaatataaaacacaaacatgaccaatttataaatgggttgacacgaagcgacctgtgtaacccgttaataagcatattttgtttaaatatatcaaccaataacacgttcatgaagtattcaacacgtttataacccatttataacatgttaaagtactaaaataattttaaatagatcattaaagagtcaatttcgtgttagccgtgtcaacccgaacatgacatttattaaacgggttagacgagtcaacccgaacacgacccgaacccatttaaagaaaatccaaacttgctaactcttgggcaggtttcgagtcgtattatgtctgacctgttttatcaaacctaatggtgacatctctgctcgtacctcctttctctctgtttatgtatgtatgcttagtttaagctaactcgtacattttcttggtccgtatgatttagcttttcatattgcatatatatgatttatatatatggaatccatttgggctttctcacattttattattgtttattgatcttggtgatttctttttgcttgatgaagagcctaaaacaaagaaaaggggttggctgtttgtcagcttgctgagggcattacttgctagtacccattagagaagacaattaggtggctattagcttggagtttccaaatgttaaaaaagaaagaatagttgacaattcattattcgcccataattatgattttttaccctttaaaacacaatgtattgtcatcaagaattgatgtgcctatgtaatactgttcttttattttacaagctaaaagacctaataacttttatgtaaaccgaaaaatattgtaattgattcagatcattacattcacatatatagtatatttataataattttatgaagccaagagttaattatgtcatctatggtgctggtgcctcgacttttgaggggttgggaggacaatagtgatgcctcatgtcactacaaccggtgcaactgtagcttattgagagtccatctttggtgttaaattttctttgttataaattgcatactaaatttagtgatgtatattgttgtatcttttctcaatttgtaactgaatacgtttccattataaattttatatatgaacaatttagggtaaattattgtcacttaaatctacactactacaaaatgggtttttagttccctttttttaacccattttataaaaagggaagctaaagggtctaaaaatacccgcctattgaaaatttacctttagatgcggcttttttataaaaaccgtaggtataaaattgaattataccatttagagtctgtgtggaatgaaacgatggaggatttgtttatgtaaccctatgccgtcggttcgtatagaataaccgacggcatagggtacacgtgaaatttgacacatgtaccctatgtcgtcggttattctataagaaccgacgacatagggttatataatcaaaccctatgtcgtcttcttcattctccttacgcgaaccaaactagagagcacaactaccaccagagaagagaaaaccctcgccaaccaccacctccgccagcccatttctccaccatttgtcaaccatttgagctcatttttatattaaaatcttctattttcgatacttaatctcatacacccaaaaattttaattttttttccctatttaagtgtcatccgaacccatacaaaaatagtaattataactccagccaccattatttgttgagaaaacattgaatctcaacctcctttaaggtataaatatagtttctattcatttttataatgta

SEQ ID NO: 111661 - DNA, 1617 bp, Cannabis sativa
aattaaaaaactaaactcattgtagactgtctctgaactaggtaattttatctagttggtcactaaatttttttcatcaaatatataaattttggtgaattgtttcttaaattttattttttttagtaaattaatcccagctgtttgttaatttttagttattaatttcatatttttaacttttttttgtgtttgttttcaaatatttttttttaataatttttaaaagattagtacaatttttatatataatttacatatattttctcactgccagatggttcttttcgctgccatatgtctcttttcggtgccattgttgaacatgcaacttaatatgtatttctaatatgatatagtggctgaatgtagcttcaacaaaatgcttgaaagtttgaatatgatgagatgagccacgatgcatgaattataaagtccaaacaacaattaatataggaaggaaggatacgtgtggtactttgacgtaatataatttttgaaattttcataaattaacacatccggaatttgtcttaaatgaagaaagtggtacttgaatttaaatttacaaagagtaggtctttatatttacataaattaaaaaggaatgacaaaattattgagtctaaagacctctgtttaagttgtgtattttgattaaaataaacttattcaatgacaaaataaatataaagtccttataaaaatttatcaaacttaaatcagtatatatttatgtgttaatttttttatattttgcatttaatattttttggttttactctatttgctcttgtttttctatcgattattgttcttggtttgataattttatcattactaattgtttggattgtttaaagtttagttgtttttattttgcacatttaatcgtaatttttctaaaaatttattaaaaaatgtaaaactaaatatttatttatagtatataatttaaaatttaagtatttataagaaaatatttaaattttaataattttttatatgaatctatataatattattgaaaaaataaagcaccaattcgaccacagatttaaaaacgagctagtctatttaaaaggaaaaaaacaaaaaccggaccaacacgacaaaaatactggacctatgagtacgggccgtgtcgggcaaatagtggcacgaccaccagacccatgtttttatagagcaggacacatcccatattttgaaaagcacaaaaaaaatatatatataggccgaacacacatctataccactaaaacacccctttaaaggcctactatttaaaatttgagtgcataaatgtcattaactctaaagaaacacaaatgtcatttactctaagaaaagaatattcagctacaattaatatactgacgactgcaaacaaaattagatggatttcaccaccaaccctaaagattatatgagatttcaccgctaagaattctgaactatacacataataatttcttaagagataaaaaatcatagctaaagaattcaaaatgaaatattatgatcaatataggttggatggattaagaggataaaagcacgaatttgaaaagctaaggagtgacttagcgcccttcaaatactgatacggtagct

SEQ ID NO: 111662 - DNA, 20011 bp, Cannabis sativa
  modified_base (10920)..(10946): a, c, t, g, unknown or other
  modified_base (18730)..(18731): a, c, t, g, unknown or other
acaagcataattccattctaaaaagaataataaagaaggaaaacaactataaaaagtgactcaaaacgtaagctaaaaatagcctaacattacctcagcaagttaactttttaaagttattagaaacttggtatagcaagttacccgttttgtcaatgctcaaaataataattttttattggctccatcaatggcgtgggatccatttataactaatccatatatatatatgaaaaacggtcctagatccaaatccctttcataatttttttttaaaaaaataatttctaattaataaggtttattaatgtgtatagctgacttggaccccggactccagcccccaactctaaactcagcttttgattcggatcttggattcgaactcaattttgaatctataccctgtctaggatattggggcctaaagatggggtccggatccgagtttatgctggagtttgtggcccaaggttggagatcgaatccaagtccagggttttggttgggtcgaatttatagtaaagaattttacataaatttttaatacaagttaataccaaatatagtattgtattaaaaatagtaataaaatattgatacaatcctagacaatattatacaatataatataatataatataatataatttaatataatatatcaacctgaatgactattaagtttattaatcaagtatttataaattaataaataattgaataattttgactcacatgcatgcatacaaaaaaataaagtagggatttccaacgatgatccctaacaaaagcatgaaaaataattttatttgcaacatgatgcagtaaatctcgtataatgatctctactttccctaattatcatgatgaaaagaattttgtttttcttgagaaactcataaagtaaagatttggggtcaccataaattataggagaaatgaatttttgagtttagcactactataaaatagtactttagtgaattatttataatttttattaaaataaaataaaagatttaatattatattttattaataataatattacacttagaaattagttatttactttatttttatatgagaaatgctaaagagtattagtggtgtctgacaccttgttatatatatattaatattattatcggatcaactaagtatcaaattttataaatttaatataatatcgttaattaatcataagacgacgtgtttagaagtattaaacactactaatgtacaatatcaatgttgttttctatgtatatttttgcttagcttaacttagggagagtagataaagagagagaggcgctcacttccatataggacaaatttacaaaatctgtcatacttaatcaaactaataatcaattaattaaactgaactttccgtcagaaaaatgtcttttaattacaaaatccaaaacaaaaatcacgcctgcttaatttactatcttcatcccatctttgattcttcttctctctttgtctttgtcttggtcaagaaaatgcaagttcacacttcccaacgtgggtctcacacataataacaaaataataattttaccacttttacaatttgttttttttttaaaaaaaaaaaattaattagtttaattaggagattctaaactaataatcgaatagggtcagtgggtttcggccacgtggcacatttttcgatgaagatggttaataatatatgttagtggagtggtggtgttgggtcggcgtcaaggctgctagatggggaattggcagttgggagtgttctttcaagctgagctctttagtttgtttcattaggttcaactgtgattttccttggttgaactcctcaacttaataattcttattttatatatataaatataaaaatatgagaaatactaacggatattagtggcgtttagtattcttctatatgtcaatatcgttattagttaaattaagtatcaggtcctatgtagtttaataagaagtatcgctaattaatcgtaaaacgatacgtttaaaagatgtagccactactaatacttaataacaatgctttaaagatatagagagagagagggagaaagagaattaagggtcattaagctcagagttgttgttgtttgttgttgttcttattatatttattaaataataattatgtgctaaaatattaggacaatcaaacccaacacttttgttggaaattgttattatttgtcctttaatataaaatttgactcatatttcattatttgtagatgtactaaaaatttgtcctatctttcattcttttgtgattatttattatagtgaacattaaaaacataactaaaatatttgacatttttctttaattcattacatgtaagattagtaatgtatatataataacattacattcttgattggataaaattcttggttgaatacttcattgacatctttcaattaatgtggtaaatacttagtctaaattatatgatgttattagatatttatcaaaaattataatgtgtactagtatctaatactatcacgagatattatatttctattaatataattaagtattgagtttaatatattttaatttaataattattttaaaaagaataataaattattcatcaagcgctacctcataataatattaagcaccaatgacatttaatagcattgctctctatcattttttctttagggtgaagatgccctatgaaagaagaaaatcaacaaggttgcagggatcatcaccgatccaaactaaagcttcatcttaccccaaagaaaatttagctagattatgagttaaggtgtttgttgaatggctcatatgcttgaccatggcagtggaaaaatgagataaagtgactttgatatgagagattagctctctaaaaagagagtaatcttctttgcttgattggactacatcagtaattgccttacaatcagtttcgatctggtgcaacgagaaagcttcttcatgacaccagataaaggtcttcagtggggactttacttcaagagtggttgcaccacctcctccatcataggggaaggaaacaactacaatgacttcattgttgcatttgcaaaataccctcgccaatccggctttttggctgtgagttgatgttgttgcatctgtattagaccaagagggggagggttccaatgttcctctgctaatggcctttgcgctaagctactgggactgctacaatttttcatatcatagtactcctacaaaaaagctttggccaagttgagtagggcataatcctgagttggcagggttgatcgttgtgcccttgttcctattgtgcaaaatgaaccaagctacacaaagaaataactccacatctcacacatataaattagaattaatagcgaaaaaaattcatggaaaggtatatacaaataatgagagaaaaaggggtagaaaattgtacctttcaagattttcttcacacagttgtaaaacaacaagccactagtgatggtttcaacctccttaatgcaacacgtgcataagggtgatgagttagttattttgtgtttaaccatattttcataggttggtagagttcttgatgtagttggataggcaaagtgcttaatttttaaaggaaggttcatatgccaactaggaagagggagataatgaggcaagtatatcatggttagggctggtggaatagctcaagtggtaaccagacttgacaaaataggtttctgatctagtaagagtactccaaataagtgtatcttcagtgggggttaagggcaaacgaatagctaaaatctcttggaaaatttgaggtggaaagtgttgttgcagtcaggctatgtctcaagccatgttatcaactatgaaaaaagctacagaatttggagggggttggaggggggagacatatcaaaaagaaggtattcaataattgggcattagtgaaatattttgtccattgtcaatctttgagatgagacctttatgcagtagttattttctccaatgaatgcttctccacacctaggagaatgaccaatggagttgtttatgtatggggttctaggatgatatatgtctgctaagactctagccactagagggtttggatttttaagtatatgccacgcttatttagccaacatcgcttgattaaagtgggtgagggacctgaagcctaaacctccatcttgtttcgatttgcacaacttttttcaactttaccaatgggttttctgcctattctgagcatttgtaccccaccagaagttagccatagtggactcaatggagttgcaaattgcgacatggatcctgaagcaagccatcgtataggtgggaattgcttggatgaccgaattcaataagatctccttaccacctttgcaggagaatttatttttctaattgttgaagtggtttcaaacattatatttaatatattgagaaactttcttttttgattgtccaaaatattgaggcattctaagatatttctcaaagaaagatcttacaggaatatcaatatagtccaaaatgagagttttatccttaatgtttgtaaggagagaaatacaagaatgattttgcaaattaatttgttagcacatggatttttcatagagaatgaaaatatcttttatggcattgtaggagctgatggtggctagatagaataagtattgtcgtcaatgaagaaaagatgagaaagagatggtgcagttctagctactttgataccaaaaaggctgccattcaattttatcaaaagctttggccgtatctaatttcaagaccatctaaccctttttgccacgagttttgagcttaatggcatgagtgacttcctcagccaaaatgatattgtcaggtataagcctgccttgaaagaaggcactttggtttggactgatgatttttttttcaatacgggtttcatcctattggccaataccttagaaataattttataaaggatattactaaggctgattgggtgaaagtctttcaatatttttggctgcttgactttgggaataagggttatgagggttttattagcaacacttatgtctacattccattgaggaagtcaagagcgattgcgaccacatccatcttgaccttctgctaatttttttggtagaagttgatattgtgcccatcaatttttgtgtaaactattgtaaatagatagcctaaacttaaagatgggaagaaattaacaattaagtatgtgcgaatggcatgcttcaaggtgaacataaaatgcataagtctaggattaaaggctgcttagccaactacacattcaaaactcaaagaagataaagtcaggattaaagattgtatgatcggtcactagttcaaatgtaaaagttcttatggccatacaagaacaaaacaaaaatgtgtaaaacaaaagcatgaaaaacaataaaaccaaagccttttaagtgtttgcaggtgcagatgagtccaaagtagctaggtcttgggcagaaacctcatcagtcagaacagcaagaatcctctgagtagaatcagcagctcgagcagccccatcaatagcctgcgcaataaagtcctggctggcatgtgctaccacattgttgatgataacttctctctctatttcatgagttaaattaatcttataaatatatgtatataaagtcacattcatcaatatatatgtattgttatcatgttgcttgtacattttttttatttcatgaagagggaaaacaacataaataaaacttaatgacagcatgaaaaaaataacatattttatactaaaatttaacacacatgctgcatgttcttatcatactatccataattttaattcggcttttttctttcagatttttgaaaaatctaaaccagaaaaataaagccattaacattaacgatcttttccaatatgaaaaattgttgtgggaattttactcctcgacactaacattacataaagccatttcaattaccctttcttaaaatatatgaacacaagataatatacaactaataagaacattattatgggacacaaaataccttacacctctacgacatgatacgacatgatgtcttataattggttaacaattctatgtaatttttgttaaattaaaataaataagatccaaaattaaattatactaatggcaaaattacattacaccttataagaatgctaagcatcatagatgccctttagcatttctcaactaataattatcattttcctaccctttatgctttccaattacgatgagatattttgtagtacaagcattacttgaaagacaaacgaagcaagttttataacttataaaacatacaaaaaccagtcaactttattgcctaacttattaaatattggcacacaaagacaaccaaccacgaggcacaaaataatatatatggctactcagagctctcaacatatgttggtcggctgtcttctcaaccaaattatccagatcaaaatgacttcttttcatatgaaaccaacccatgaattccaccttccacttgggcagctcctgtccgtacctaaaaacaacaataaaatcatactcactgaattaaaaacaacttaatcctgatttatgaatggttatcaaaattcattagctatagaaatcaaatctaaattaacctgcttctataatgaattataataacagaacatgttagcagattatgctcatctctacagttaacagatttcgaaagtgtgcatacctctagccttaaagtatttgatcttaagaggtcatgagcagactgtagagaggaagcaccgagatcttggaagccttgctttactgcttgcattgtgtaaggtacgaacttcagaacagaacctttatcagcaaccttccccacaaccccttgagcaattttcagtttagctttatcacccaaatatctcgcatcgctgccttttgtcattgcttcaagggagcccattcctcgatatttttttacacggtaaccattctgggaaagcaaaatataatagttgattatcactgaacagtgtaaacagacagcttatacaaaggacatattcaacagaaatacaacagtcctggcaatgaatgtaggaatacttccacactctaacaagcacaatagattatgatgaatactagaggtacggattcatgcttatagagattattataatgtataatgataaaataataaggtaaaccatgtattagaggcatatctcatgtagaggagcatctatacatatcagtacatgtaatgatacacttcaataatctcactgtttcgtagttcaattcttactattaagaattcaataagaaattaaaattcaaacaaaatgcatataaatgtggcttataaagtttcttgttgcatgtttaccgacttcgtttacaaagtagtgaacatgaatttgctaaaaacatcagtaagcaattgaccattcaaacaaaatgaaaataaatgtggcttacaaagatttttgtggcatgtttacaaactccatttacaaattagtaaacatatcatgggagtaatttactaaagacacctaaacactgcaacctgtaacgcactcactttgtttttattactgcagtagaataagttttatcaataacaagtttcttatcaaagaaataataaagataaagccggtaacttgttgccaacttgtcacacactgatgtctccaacacacacagacgacaggcatgcatttatagcagtatttaaggagaaatagaaagctatggactaaaacctttagacacaagggggatggggtcgatgtgtaatcaaagaatatggaatatatatacaaaagtagtgaaaagcatttctactattggcacaactgtatgcgacattttttacaatacaacaggagtcatacctgatactcataagtcccaggagcctcggtgcttcctgctaaaaagcttcccatcatcacagtagatgccccaagagtcaaagccttgacaatatgtccagagtttgaaataccaccatcagcaaggacaggaacaccacattgtgaagctaaagaagcaaccttgtaaacagcagttgcctgtaaatttggggagaaaaccatgagcaatctaagtgataaatagattatagaagagcaaaaggcaacgggttacttgtaagtcaaatacatatgtaaagaataacaaagaaaatgggatatagtatgcagttgaccacgctaaaagacaaggtcttcaattgcttcaaactccaactttcgaaactccatcaccatttaccaattccatgtataatctcgggagtaaaatctcgtaaactaagcatgagccatttcataatttctgacattaaattgccatttcatatcccagtaaacaagtggtcgaaacagagtcaaatttcaattcagaacaaaaagcatccaaatttacctaacaaaagttctcgggaaacaaaaattaacatacaaccaagtaagtcctaaggactggaactcacagcatgagagcaagccatttcttattattataacaagagttttataacaagcatcacactgttgtataaaaggaacaatacctgtcctctgccaacggcacagacctcctgtgtagtacagatagacccagaccccataccaatcctcaacccatcaacaccagcttgaatcagattctgggcctggctaatggtcaccacattcccaccaatcacatccaaccccgggtacctcaatttgatatgctttatcaaatcaatttggtaaatggagttcccctgagagctatctatcaccacaacattgatccccgccttcaccaaatgctccaatctctccttatcctgctctctggtcccgatggccgcacctaccatccacttcccatcgctacccaacgtcccagaccccagcttcgggtaccctttgatcctatctacctcttctttcgtcgcaaaatcaataacctcatcgccattcacaatcgcaaccgcatctctcctcttctcatccaaacacgacgcaagtctatccaagtcaaaatctgacgacactgaatcggacgaattcgacatatagtcgtaaatcttcacttctttgtccggcagcttctcccaatcagacttggacacataccctacaagtttcgaccttccggcaccggactcagtgaccaagatatatggcttggagtcaaaatcatcttcggagttgattcgatcggaagccgacctgaaaacaggattcgatagaatcggaacgcgacgtgccttggcggccatcactagggaagcttgatcaacggagttcagattggagtggatgatgccgataccaccaagggcggccatagcaatggccatgtgtgactcggttacggtgtccattggggatgagacacatgggatattgagagggatgttacggctgagtcgggtcccgagttggacagaatcagtagggaagtcgatgtagtgagggagaaagatgacatcgtcgtaggtgtaggagtatccctggctgaagagcttgttggcagcgaacccatcttcgaggtcagccatggtggcgtagcggtgtagagagagagagagagagagagaggaagtaattagggtttagagaaagcttctttctttctgtatgggtttttgggataagataatcaaatcttggagggaaataatcaacacaacttctctgataagctgcggtcggctacaccgtacaccgtacaccgtacacactacatagtattgcacacaacactacatagtatagtattgatagtttgaaggtttttgccgcaaattattttatatattttgaaaattaaaattaaaaacttaataaaaatagtataattacttaaaaaatatgaataattataaattctacttaatctatagtttcgtacaatgattttgatttctcaaaaaaaaaatatatatatattcagcactgcactaaactttaactataaacgttaaaagacatcatgtgtgtatatatattttagagtaatttgcggcaaaaccctcctaactatcaatttacttgcaaaaacttattcctaaaaaaactttaaggttggatggttttttgcaagtaaattgatagttgggggattttaccgcaaattactcttaaagtttttatttttattttaattactcattttaatttttattttgtaaaatatggctacgtaggataattttttagtgacctatcattgccacgtgggcaaaattacttaacgagactggacagacggcaccttaaaaatgcaaagggaacagtactttagaaggttttcccactaaaatatgaagttgaatagctttttgtaagtaaattaatagttaggaaggttttgtcgcaaattactctatttaaattagagcaatttttttgtaaacttaatctcatttttttaaagcccactcacttactctaatacaccacctcttttaagcaacttataatcttccattattgtgatacataattaatacattatcgcacgtttttatcatcgtgtattacagtcattttagcacttttgttagggataaaaaaagcttacggagtaatcttgagtggagtatgtaggattactttagtagataataatggtcatgtaggattactttagtagataataaagtgttatttcaaaaaaaaaaaaaaacatgacaaagtgttagtactataattctagtttagatggtttttttttttttttaataaggaggtatttgtaggttcggccctaggcataggcgggctaggcccgcgcttaagggttactcatttaaggggcctaaataaaaaaaaattatcttttaaaatatatatattttttaannnnnnnnnnnnnnnnnnnnnnnnnnnatagtaagggtccaatttttttttttttacatatggcccattttatctcaggaccgaccttgggtatttgatgtcattaatttttgtttggcacctttttttctaatgcttaacatgtattacatagagcatgagtaatgactttttagagtcctagatcaaaattttaaagggaatttggtttagtatgcttaaatataaaatatgttattttaatataccaccaaattaaaaatagtacatatatatatacttttaatatttttttctcccaaaaatacctttacatttaaaaaaaaaaaaaaaacttctctctctcactcttcgcgttaacctcgacccagaacccctaccgtcgaacacacaaacccaaaacctcggtcgcaaggcctcgccgtcatcttctctcacggtctctctcattttttgccttttttttcttttagtttactagttttttgcgatatttagcgatgtatttgcaatgatagaataaatttgaggtcagggatgaagtttagtgatgatttgtgatatttagcgatgtttagcgatgatattcgtgatgttgtgaattggagacatttagagatgttttcacaatttcgcaatgtttcgcgacatcgtcaaaaaccaaaaaaaaaaatgcagaaaacaagagttgttgtgaattagagacatttagagatattttccgatttcgtgatgttttgcgacatcgtcaaaaacgagaaaaaatgtagaaaacaagcgatcttcgtgggtcgtgggttatcttgggtgcggtggtcgtgggttgtcttgggtacttctcgtgggttgtcgcgaatcgtcatggatcttctcggtcgtgggtcgtcttggtcgtaggttgtgggtagtcttggtcttggccgaaggaagatttggtcgtgggtcgtcttggtcggtcggagctcgtgaacagtcggggcttgaaaggtttggggttgggaataacagagaaagagggggggaagttagacggagagagtgggagaagagagtttttgaattgtaagggtaattttagattttagggtgtttggagaatatttggagtatttgtttaaaggtgatatattaaaagaatagtttaaatttttaagtatgttttaacaaattttccattttaaaatagaacattttatctaacgttacagtccttttacatgtcaactaattgatttttatcaaataaataaatacaagctactttcttttatatttacatatatctattttatataataaaatgtggttatataatagaatttttaatttaacggtattttttttattattttttatgttaatgaatattctttattagttttataatattattatatatatttaaaaataaaaactatgtgatcttttatacgaggaaattttaagttaaatttaaaatacttaaaatattgtagatatttttaactacaattttaattttattgctttaattttgaatttaaataaggcgacatcaacattaaccttgatctttcctgaaaaaggtgcactccaatgctcaaccaaacgacctctattaaacaacaaagacaaagaaaggccctttcttttttgagcgtctttgaactgatcaagtagcattcttgctgatgtaaccacatttgcagcagtccaacttttttgttgacaaacaaagtcatttctggcacgccaaatggcccagctgaccatagccgcctcctccaactcgccttctctttctcggctttgcagctctagcagacaattgctgaagtcatcatccatattaatgctgacatccacaattgtcctgttccagcaagcatgagcatgaacacacccaactaacgcatgaaaaatagtttcagctgtagtgagagacaaaggacatgttgggttaactggaacatgtcttttttccaattgacacaagttggtaacgagcctgaagccgccctccataagaagttgctgactttaaggggaacttttaaactccataaatccttccaaacgccagtagcttcggtaacaggccaagctactaatatggtaatgaattatattaaaaaacttgtattattttatgaatttgtgtatataatacgtaaatacattaaattataataaaataaagtaatgaataattgagactttaaataaaaaagataagaagtaaaattagtttaataaaattgtatattaattatgtataaaaataattatattatatatgtgtaatatatatgttcggtcagttttcggtttaatctgtcggtttgctatttacactaaaaccgatcgtgttaagacagttttaaccgaaaacagttttttcaattctcaattttttcggtattgattttttcagtattcgaataatcaatatactcaatttggtcgttttcttaaattttttgttcactcctaaataaaaaattgaaggcccaacttattcagttaaaggaaacagtgaactggaatccggtgctatacaaatatataatatctataatataataggaatccggtgcctatacaaatacataatatcaataatataatatataacttatagtattacgtgtgggtccctctaattgaatataataacaaaatcgtttctattcttatcttgaaattttttaatatattgaaggtagtggaaagtatgtaaacactaaattaatacaagataataaatagtgagtttagtaggaatttgacattatatatattattgaattattgtctcatcttgctattccaactaaagcacaacgaatttggcatacactttttgtccaagcaattgcacaagcaaatagatgtaggtcttataaaccaacaattttgatcgtaagtgtcccataattgattgaagatttcaaactctttaacaacatcatcccaataaaagctgcaagtgaatcgagtattgccaaagggtaaaatcatagttctaaagctaaacttatagcttttatagggaaggagtattttcaacccaagatcatcatccatagatttacaatgaacttcaataccttttttataactaatcaaattattgatatgaacactagtcattctacctccaagactcattgcatcacttgtaaaaaaaagtatttgattgataaataatagtatcaccaatatcatttttggatgtctttcttaataatgaaaactttaataaattgtgtagatagtagatactcatgttgctatctcatgacaaatatatatacataaatagttttgcattagattgttttatggttcttaattttgttgaagcagctttatcatcactcatttcttatcaacacctcaaatagaaataggtaccctttttagttttattgttatgtgtagatatgattaatgaactaactttttttatgcacaatgaattagttttttttccttatcgaagtacatatgccatgctatttttggcaatatacaattggggttgttacaagaaaatatgtatggacatatgaattggagaaaacttcaatcttgaaagggacagtatttttgtaaaaaaaatgacaaaagtgagtataccatgtagtttgtcatgtgtcttatcacccgattttgttatcaacgaaatattgtagcattaagtcattgatttctttcgccataattaccatacacgtccatataaaaaatatcagaattatagtgaattataactatcaaaataccaaaaaaaaaaaacataaggttgagccaatgtccctatccagaagtgtaccaaggaaacagatatttataatactgacataaatatatacaaatgtcaactggaataaaaaaaaaaaaaaacccacaatttatgaaactgaaaatgtcatacaaaaacttagtatattcctaacacattctttcaagaaaaacatggagcaatttagagtgggtgtttgagagattggcagacaatacatgaatagatataaaagttcaagagccaaaacaagatgaatacagtagttgcatgttaggtcaatatgtactggtttacattgtataaagaaggcatgccaatcaaacacacctactacatgaaagcaagttttactagttgaaactcatatagtcagatatgtgaatacaagctatgtatctaggtgtgaaattgtttctataaatgtcattgtaaactagaaagactcaagaaaaaacaaatgcaatgtatcttaattaagagaaaaaactttttgataagatactagtaatagccgaaacttacattgctttccctcctccaatgagaggtttgggaggggacagagatctaatttcaggtgcagaactaggaaagagtatgttcagcttgtgcatgagaatgtcagccttggaaggaatctcattcagaagaaactgttgcactattggttttttaaaccattccattactgagtctcccggcgccctcaaaacaactttactaacctcaaagggagaatccactgagctcaacatctgggcaataacaatctttaaagtaggtccagtgaccaatttaatgcgtcttgggatgacaccataatacaacatccgctttctgaacctgtggagagtatgcaccactgctataagagccgctcctactgataagttcctcacatcaagggaccaagcaatttgctgatcaaaaactattgctttggggaaaagcttattctcataggaaactttccaaacacaacgtgcccggtttatctgccccataagaacaaggtagttgagaagaacgttaacatagaatctcgcagccccctcttccatctcataatcaataccctgaaagaactccctcacaaaagataaaacaggttgttttctctgttctgggcctgtgaagagtccacacataaatgcgtgtgccttatgttttgtagcactaagaatggacatcaaatgcctctcattctgttcgtcctgacatcttacaagatgtgctagaatggaggtgtaaagtatgagatcaacttttgcagctgaattcacataagtttcaaggagaggcttggcttgttcatacaaaccactcttcatacatgactcgaacaactgcctgattataaagttattcgttcgaatcccagatgagcccatgaaacgcagccaccttaaagcatggtcaacagaactatccttaatatacaccattaaaacatcactagcactaacatcaacagaataacccattgttttcatctcaagtaaaattttagcagccacatcaaggagttttttactagccagtagagttaaaagagtagtataggtacttaaaccaggtttcaaaccggcattggtcatcgagttatacaacttcatggcagcatcaacttgtccagaagcagcgtgcatttccaagaggcaagagtatgtagatggcgtcggtagaaatccagccttctccatctcggtgaagagagacaatgctacatcaagctttccagattttgcgtgtgactcaacaaccagcgtatacaacccgaagttaggcctaaaccctgctttcttcatctcatcccatagttttaaggaagcatctaatttccctgccttcacatgtgactcaactaaagaaacatacattattacagatggcctcagcccatcacccctcatttccatgtacaccttcatagatgtatctaacctcccagcctttcccattgaatcaacaagtgatgcaaagacgtttaatcctggcctaaaactctttaacttcatttcttgaaagagcttaaatgccgcatcaaggcggccggatttcgccaagcttggtatcatcaactcataggtggaagcatccattgaacaatttgcagcttccataccctcataaatttcaaaggccttgtaaggcaaacccttattcaaaaacagagtgataagtgaattataagtctgagtatcgagtttgtaaccagaatcttgaatcttcttgaaacaacaaaatgagacttccaatttctcagctttagctaaatattgaatgactcgattacaagaactgaatgacagattcccattaccacttgaatcccttaccatttcatcaaacaacaactgaatctcttcaaacttattacttttgttcaaataatcgaatatcatagcaaaacactcatcgttcgaagtgtaccaagctttcctcttacaccattgaaacaagctcagagctgcatcactatctttaacaaccttcaaggcttgagtgacatgagtcatgtttggcacaaattgaagtttgtccaattgggtctccaattcagggccccatttccacctatttacaacctcaatgatcttggcaaccgctgaggcattcagaataggttttttcagcccacccaccatgacatgatcgtcgagtcctggctgcactgaacgtgtgcctttaccagaaaaaatgacctggcccgattcatctaaatactcaatatcctcagtccactcgttaggcttatccacagagcagtaattcctaaccaaataactagggttcctaacaaaacaaaacttcgagagggaagaagtaaatttcggagaaactagcttagagaaagctaagaacttaagcattcctccttgttcatttgtaaggacatggagtgtattatgatctctgtagttgtgcgaagagcaggaattaaaggggattttggtgagacttgtggttgtggaacagatttttcttctaagaatcattagggcacaaaataatcacggttttacctggtagtatgtcgatcctgataactgccccaaaatctgtgagacaaagttacggaaaagacgatcatttctcatttcaaaaataataataaaaaaagaataaataatgaaactgaagatgcttattactaatttttattttaaaacagaacaaaaaattagattgttgtatctaacacttattagacagagatcacatctctttgcatcattgtacactggttagaatagtagaatagtgtgtgtgtgtgtataaatataagcagaacagatcaaaataatgacaacaaattccaaaagaaaactttttaatcaaaacttatcaattctaaacataaccaaaactaaaacaaagagcagtattcataacaacctttaggtaatcccagattaattagtatgtgtatcaatgtcacaatgcaatgcaagtctttttttttctttgctggggattcaagtctttagcatatttgaaagttagatcaattgttacaaacatatcataataaattaattacaaaaatgaaagtaaaaacatctttgtaaactataaagatacacatgctttgctatacaactttacaaatataaatcagcaaatccaaatttttgggcctgccaattggtgattagcaacaaaacattggctggctagcttctgaatttcatgtttaatagagcaagaagggaagcaccaaacaatgagccataacgcaacaagcaaaacctctatatttaaattatgaaagatttatattggttgtaaaagtttcatatgtccaatttctcaaaagtgaaattagcttgtatcatctcaattcacaattgtaatatagaaaccagtgagcagtaattaagtttggaaaaaatgtcacaattagacaagcacaagtctttactgctggaatatgaggtgataaggatttgtagagtacaaaacatagcacaacacaacaaatggagccattgatagaattatataaatatatatatanntatatatataatatttatatatgtgtgtgtaagttgcacccccaaagattctcattttgtcaattgagcgaacaccttagctacattattttaccaaaagttgactacatcttacttcttatctaattgaatatactaagattaaccccccccaattaagttgacaacgttaaaattatcatgtatgtacatattaatggagtcatacatctttttccattttttacatctaaggccaaaaaagaatccaaaatttgaaaatccactactactaatactactgccatgaccagacgcaaagcaagaaccaataaagaagcaataaaactgagcttggtactgaccccaacctctacaaatcttcatataaatatatgtgtaatatatattatattgcttctaaaactgaacaattctatcaaaatccccaagggaaatactatccttatcttaatatcttagaagcagaagtcagaaactcatttcattggacaatgtctccaactataaccccttaattaggttcaactcagcaaatatttaatacttatatataaaattaaaatgattgtactaaagttctaacagaaaattccatctaaaaccaagaagaaaaaaaaaatcagtcagggagatggaagaaagtgatgccttacggaggggaaacagttgaagtggttgtttcctaaacacccattgagagagaaagagaaatgaagagaagaagaagaagaaaaaaaaaccttgattgagactgattatgttagatgctccgcggtttgagtgagacaaatagagggagagatataaaagatgaaattacacttacatacttctttttatttgataccttttcaaaatttgatatatttttctttctttaatcattttatcaaattattttttactatcttttattttctctaatccaaattttactttaactttcttacaaacttacacatacatcttcaaagaatacaaatctattatgtttgcattatgtcttagttatgtgagtgtgtaaggaaaatttagttataatacttataaaaagagttatatttgaattaaattttatttaaaattaaatttaattaatgtataaaaaaaaatatttttaacttctcccgatataaaaaggggagttctaaaaaactgtacattcgagcggcccgacccagtccgatctatttttatgttttttttttaggaataattacataaggtactattttttgtaaaatatttacatttttacgtttaaagaatattttttt

SEQ ID NO: 111663 - DNA, 3288 bp, Cannabis sativa
  modified_base (2084)..(2090): a, c, t, g, unknown or other
tacgtggcttggcacgtaacaatcacctagtatataaatatatatatattttgtaggataaatatctaattaaaagaaaaatatataattttttaatgtaatttttcttcttactcctgggtgccccaccctatataaggtaagttcgacactattaattatcatgttctatacgtaaagaattacatgaaaaaaataataatttaacataatttttcatatcaaaaatgaaaattaatttatttaaattcttttttccaaacttttgaattctttcactttatttattctttttcttttcctacaaaatcttaactttcaaacataagcaaagtacttttaattgaaaaaaaaaaatcgtcaaaggataataactattagtctattagaaagaaaattttatcacaaatttaaaatttgaaataacactcaatatcatcattaaagttggtggcaatatacatacaccacaattatatacaaaatttccaaatatatgtagatatatattaacacaacaagttttccaattaattaattgtatccgatcactactggaattttcttgttcttaccaattttttattttttttttttgaaaaattgttcttaccaatttatttagtgataatagagttgaattctttatagggcccgccaagaatgatgaaaaaaaaaaggtaaaaacataattattacaagacacccttctcggcaaccaaaaaaaaaacacataattattgtaaaccaattaaccatattttaacgtgtttattaattaaatcaatttggaactcaaaataaatgttgaaagttgttgcgtttgtagtttatcattaggaataatggtctgtaattataatagatagcaagaaatgagttcattctgtacctttagtggaagccagggcaatataaattgcaatctagtaggtgctgttaacaaaaaccttatcctacatattcctgagatagagaagatagagattaggagttcgaattttgggtggctctattgggagtcttaaatgtgaagacaatgtttggtctcttaccctaactacccttaacatccatcttagaggcatttatgcagacaatgttcagttggggctcatatgacgcatcccatgtaggtaggggatgggttgatagtttgcttttttattttcctagttttgttgttaggtatagtgttgctcttacattagctaagaaggtcttagggcttgacattgaaaatgaatagtgtaaaatgattttgttccagtacattcttctctaaatttattgtttctttctcaatggaggttttaaaatgaaaaaaaaaaatgtgtattttgtaattaaatttataagaaaattttacagtacacccttaaaaagagtgtactgatatacttctatttatttcggcatttgaaagaattttgtattagaaaatcaataacccaagacacaaatttgtatataatttagcacacaataatacatatgattgatcgattgcaattaccttaatttaatagtgtaatactattaactaagtctttctctctagatctctaaatatgtagcaatttattaataattgtgaagaacaatatatatttatagagctagggatgtgacttagctacataaccctagttggattggatttgctcatcaaagattttagctaactaaaaaaattcatacttctacttcaactagactttacacatacagatattaagcttattaactattgatcacaaacaatatgtgctaacacatcaaagacctatacaatcaacctatattttattaaaactaataaacactaatgtaagcctaagaaaaagtctaacattctcccatttgggccacattaataatacatatatatattagatatcaaataaattttgtttgaaaacgattcatggattgaacaacaggaaaacacttgtgaccactttaaaaaataatagttctttgatagtatctcaatccaatttaatctttgatattgaacaatgacaatcatattatttttaataaacaaaagacattcataatcacaaataccaaagtattannnnnnnatggtcaataagtctagtagtgtagtaagaaattatgtttagcatgtgatcagtttaaataacataatttccttatcagtcatcaacttcactgatatcgtgatgcttaataaataagccagtgaaattaaccatacactacttaataaataagtcagtatcactaaacatgcttaaaagattaagccaacaaaatattattgttattaagtaaataaacttaaaagataaaaatcacaacaagatacgaactacatactttcaattttatcattctcgagaatatagcacaacataattgaaaacataaacatccaataataagaaaaaattattggcctacaaaacaaaccaaatggttcataacatcaataataaaattacatataaatgtaatctcaattaataaagcaacaagccttcactaaatcaaaggaacaaaagattataaaatactcatatcaataacatgtttattaagcaacaggacacttattcttttggttagatgatatgctaacatcaacttggtcttgtaatattctatcacaatttttcctttcttgaccaagtcactaatagtgagaatattttatttttatatatttagaagcactactaatctttttattctttgaaaagaaaataataatattattatcacaatagatcgatagatgagtgaaaacagaatcaaccacttgtatctctaaaattaaatttttttaaccacaaagcttgcaaactcagtatatatagtagatgatgtgctcaaaatttatttaacactcttccaagaaatagttacaccagccaaagtgaaaatgtaacaccccaacctctaaggatgtcatgtgtgtgcttttataaattagtttataataataaactaatggtttaatcaaaatttgtgatttaataaataaacctaatatatatataatacagttacatccgtaagtattttgtttcagggatctcctgttataaaagtattttacaaaaggtgcattaccaaaatgtattaatcaaaatactttccagatacaacgcaaaaacattccctgacaactcggctcaacaagccaaataggttgtaatatcccgataagcctaatggtaaataattagagtttatatttatactatgggttaatcaggtaattagtgggattatgatcttactaatctatttcag

SEQ ID NO: 111664 - DNA, 4507 bp, Cannabis sativa
catattattctggtcgtcgtttcggtatggaatttattcctacattgttaccttgtttggtaactgattttgttggttaataataatatcacatcttccattcaaaaaaataaaaaaaagatataatgaaatttcttgaaatctgtgagagaagtaatactaactagttgttttcttatcttagaaagaaaattttattgtgctttcaaaattgttttaacctgttttgtaaataacttttgttaaacttaattaataaaatatgattcagtcacatgcacatctcaatttttatttttatttttatttttatttttattttgaacacatctcaatttttatttaatatcaaaatagctcttttctttttggaaaaataattatcaaaatagaggtctaactaactaaaaaatactatctttctcaagtggtaattttaggtgatgaccaatgagcaaaggttaagagcatacatgcaaataacacatatttcaaatttttattaataataataataatacatgtagaacatataatacttaaaattgagaatcaactagataaaaatatgaatgaaaattatagtatcacattcaactaaaataccaataattttttttatgtaaagtaagtacaaatatttaatttttataataattaagcccagagcaaatttttgaaaatcttccaataaagattgaataatgacaattctgttattcaatctaggataaaaaaatatcaccaaacgaccaaccataacaataacaatagtaacaaacaattgcactataaactataatactaataaaaatttaataatcctcaagatctgcacatggataaggatattcatgttactagcacaaacgtattttttgagtcaattgagattcttctaatgtcaataaaaaaaaaaaactaaaatctcctactataaataaacaaaatcatattaccataacagtaacaaggtagtgtagtaacattattattgaaaataaaattaaacataacactaagattaacaacaacgaagatctaattctgagtcaatgagcaactcaaatctccgaggcacacctctaaagccacaaaacctaatccaaagaccaccatgtggactcaacaaccaccccaccagcctatccctacaaccactgtgaaaattgaactacgaaccccagatcaacactaatccgagtctctcaaacaactccaaaatctcaaacctagaagtcaaagccagccaaaccaaaacccttggcagctgaccaaaaaaaaaaagtatgacagtcgtcagcgacacatgcagcaccaaaacctcgagtaaccccatagtcatataagaaagaagacagaaaagaaaagaacacttaagcagatgaaaagcaacaacctcaacaaaatcgaaaaaattgtaggaatcaacaagattcgactagagtcacactgtaaggtcgagaaacagctgacaagtcttaatcaggcataaaagccaaacgactgttaagaatttatggaaacttactaataataatagtaataattaacaaggggcatggagtgaaattcgtagcaaaattacatgtaaatcataggcaaaattatattaaattatgaaaagttaaaaaaaaagtttacgtggtgggactcaaaaagaaatttaaattagaggcaaaattatatgaaatttgaaagaaaaaaagaaattaaatgataccaaaaaaaaaaagaaaacaaaaaaaaaagcattcatttccattgaagatggtgagtgcctttccgcgtcaatcaggcactaccaaccaataattatattctctcttcttctacaccattactaccctcctctccgccatacccatttctgctccatctccaggtacgttctttgatcttatatacttgatctcctttctcttacattagatcccattcacagactcactttattttcctctcttttcttcaatttgatttgaattgaattgcatatgcagaaaaataaagagaagcaatgaattcgaattacggaaagaactttgatttcgatctggggttgggatcatcaagacccaaatcccttaacgacaagaagaacaacaacaatccttcgtattcttcttcttcttcgaattattcttcgtattcttctgcccaaccgaaaccagcatggcaacccaacaagccctcgtggacacaccagccatcgccggctcaggtgacccgacctggattgcctaacggacccacatccatggtgggcgatatacttggaaagagttggacttcgtccaccccttcgactggttcttcgtctgtggcaggtattgggattgtagataaaaaccctaatttgtttggggatttggttggttctgctttgggtcagggcaagagtagtaatagtaccaatgttcctttgaagaattcaacaccggtatctaacaagaacacattttcaatgggaaatgtggctgattcgcttccgaagactaatcctggtgcggtgaaaactggtttgaattggggagcttcagggaatattagtagcaataccaatgctaataataacaatcgaactcaaaatctcggcggtggaggctttggtgttggtattggtggtggtggtggtggtggtggaatgaactcaaaagacccatttggttctttgcttaactttgctccaaaaccatctgttgatctcaattcgaagaagaccaacaatgcgaaggttaataataataataatactaatgatgatatttttgggaatttccagaatgctactactaaaccagaatcaaatccaaataccaacaagaacacttttcagactggtttgaatatggatgattttgttaagcttccaactcagaattccacgcaatcacctgttagtgatcctcttgacatgttatttcccacgaccaaggttaatttaactgaaagcttcaatcaatcaacttcaaatggatccggacagcaaacatcggagatggatagttggggattcgaaccccatttcgaaggagatgatggtggtaccaccactgaacttgatggacttccgccgcctccttctggtgtaaactcgtccatggcgaagaataaaggaatggataactacaagcaaggacagtatgctgatgccatcaaatggctttcttgggctgtcattcttcttgaaaaagcaggtgacaacaatgctactttcgcggaggtcttatcgagcagagcttcatgttacaaagaagttggggagtataagaaagctgtggcagactgtacaaaggtaatttgattttgttctttgtagctcttaataattcttgtgtttctaatttctttattttgtgtgtgtatggtgcttttcctgtaatctgaatatgaaatgtattttcatgtgatcatacaaaacttatagattttccacttgattgatttgattctggtatttattaaggtggatcgaattacttatggattagcaggacactgactttgtcaaaacatgaaagtagctcatatatatcatatcatggctacttgtatgtagactcggtactccaatttataaacatgagtggctattttcatgttaactgactactatcttgaaattcgaatcttttattctgggacaggacaagattcattagatgacattatattttgacttccttgtaagaacgagtgagattataacatatatttgaattttatgtaggtgttggaacaagatggtgcaaatgtatctgttcttgtacagcgtgctctcttatatgaaagcatggaaaaatacagacttggggcagaagatctgagggctgttcttaagattgatcctagtaacagggttgcaagaagcactgttcaccgcttgaccaagttagcagactagagatttttcttcattattctttccaaacttcatttcattatgtttagtgttattactctctcgaatttataccattttccatgttactacccccaaaaaaaaatatggggaaaatataaatttcttggttgaatacctggacaattttttttcattcttttttatactctttggtcttatggatgtattttttttacttgtatgatgatgtactttagttatttctttgatgtgagtggtaattgtttgtgcttacactaaattgttagtttcttttttaccctctttttttgtccgtgtgattatcactgttgttatttgttgtccacctcataagaaagctcccaatttaatccatgacgaactatttatttaagagtaaatattattttggacctttttgcaaaagttactaattgaattttttgttttgttaaatgacaaatagatcttatattttttaaaatggtaaaaataggaccttgaatttaattattaataattttattttttaatataaccaattgtaaaacaatttatattatgaacatatatagaaaatgtaattaattttgtcatgattattattaagttttattt

SEQ ID NO: 111665 - DNA, 4301 bp, Cannabis sativa
ctctaattaatagttgccgaaaacctcaatcaacagtattttatattgtaataaaattatataaagtatgtaaaagtataaattttccataatgctgttagagcatctccaatgatttaatattggagaatgcttgttgggtggagaggttagagcatctccaaccatgctctctaaacacattccttagttaaaatagggagtgagacttgaaaaaatgagctttaaccatacaaaaatgactctgtgtaatagcaaaaaaataaggagctctctaaacatagggagcttctttattttttgctaaacttttttaatagtattttaatcaaaactattattactttttcattattttataaaattaaattatatttaacaaattcaaattataaaacattattaaaataataaaatataactaaaacagaaaacatgattggagcaatagcaataaaagtgactctctatcttaactttctagctattttagctaaaaaaatataaagagtatcattagagatgttcttagttggtaaaatatgaaagtgttataccaaaatagagaaatagatatcattctaagaatttgtattgatgtcttataatgacattgatgctatcttttttttttttaataaaaaattaagctaaataaaattatacactttataataaacaaataatatatttataatagcattcttgaagggtgctataaagtaagagcgccaaaaataatgtcgaatagagataaaataaaatattatatttttagataatatgatgagttttatcacctctaaaaatgttagatgctcttactcgttctattaaataataaagagtttttagcagttaaaccatctcaactttcgtttcacttgtacttaaccctcaagtttaaattttgacaataaaatcattcaaactactaaactgtaaacatatttaaggtgttattcggttaactgccactatgaactgcttacgtgtacactcttgtacacgtaacatgtttatattagtacacttaatattattatttcaaaattcatataaaaactaaattatattataatttttaaaatatttttttttatattctttaaatattaatactaggtgtactaatataaacgtgctacatgtacaagaccgtgcatataagcaatgtatattgacagttaactatgaaaaatagataatatcttaaatttgctaacaattttataatttgaaaggttttatcactaaaatttaaatttaaagagttaagtgtaagtgaaatgaaagttgagagttaaccccaaaaaactcaccaataaataataatattcatcatagatttaatctaatttccttaagctcatgaattaccatactgaagacactccttatttacagagagctataactcttaacaaaattttagttacacaagagaatatatacaagaaataagtgtaaaacgatagacagatatatatattaatcatgtagatgacccttttcttttattcttcatagttgtgttttgtgttatcttggtcctgaaagacgaactgcagagagatgagcatcactgttatactcggaaggagcagaggaagttccctcgtcacttgtagatttcaagaagccagagaagaatcgagtacccaatggagaagaagaagttgggggaggaagaactgggcttataccttcaagcatttggaccactttggtcatcgaaggtcttagattcatgtcatcctgtatacaccataaagcaacctgaatggcagtcgaaaccctcttgtcattctcgtcgttctccagtctccaatcaaggatttccctcagttttccttcctccatcatcttgaacgcgaaggaagggaaatgggatttctcagacgtctcagttggatcgtagtttttccttcctccgatgatttctagcagcagcattccgtagctgtaaacgtcgcttttctctgatatggcgtagtttgtgatccattccggggcgaggtagcctcttgttcctcttaatgtagtgaaaacatggctttgttcgcgagtcattagcttagccaaaccgaaatcagagaccttggcttgatagttatcgtctaggagaacattttcgggcttaatatcgcaatgaatgatcttagaatcacagtcttcatgaagataagctaacccttttgctgttccaactgcaatgttgaatcttatctcccaactcagcaaatgatcttgtttgtttctccggaaaatccatttctctaaagaaccattgcccatgaattcgtaagctagaagacgatgacttccttcagcacaaaagcctctcagcctgacaaggtggatatggtgaatgctgccaataatgctaacttcagctctgaactctttctttccttgacctataccttcaagctttttcacagccaaacgagtcccatcaggtagaatcccttgataaacagacccgaaaccgccttgcccgagtttcagtgagaagttattagtagctgtttggagatctttgtaggtgaaacgaacaggcataccagacaaagtttccaagaaattatcctcttctgaagactcttgaggagattgtgggaactttttcttcttgtaataacgataacccaaataaactaaaaggcaaataacaagtacagtggatatagcaatgatcacaacatatgggaagtgtttgccgttgctgctcccactttggctactgcttcccctactcgacaccttaatgtatgaaacaaagcttgaacctttgtctgaattttggaagttgcctaacttgtcaaacataaaacaatctcctgagctgttttggaagaacaaggcaacgcatgagcagttgttttggcatgaagttttgcagagatttaagtctcctttcaaggagggtgagacaaacccgagtgcgaaatagtagagcccagctccagcgttaatgagctgggtattggggcttttggaacgatcacatgaagagactgagtctaaccctgttgagcaattcggatttggaagggaggtaagaccagaagggcattgacacttgtcactgaaacattcataatatgaatcacaacgctgtggtgtgctgcaaacatcacttggtatttttgtctgtgttgaagaaccagacgactctctattctcaagattgaaaaaagagatgacaccatcgtctcccaaagcagcaatccaagttgcatttgagccagaattagatgagaagatgaattgccagagtaaaaccctgcttttgtcatagaatttccatgagtttccttcaatagatgccatactcactcctccaccatctttgttgattgttttgcggatgtcatttttcatagaccaataaggctgtggtgttttgaaaccaaccgagagaatcatatcccctgactttatttcaagaaaatagctcaagtttttcgagttaggctcgctcacaagtctcatcccttcaacaaattcctgtccccataaaagggtatcggttggatggtcaaaactctcccatattttactatcctcgtcctctccaaacagaaccaaattacctgaatccatcaactccatagcagaagctcctttgccgccagtatcaatggaccaaaccacacttgctcctttttgcaagaaaactctacccttttcatcgaacacaaacttatcggaattggcaactggggtgtctatattcgctgtccaaataactcgttggcttcccatgtggacgattactagcagaaattttgtgacatcttggttagtggtggtgaaaccgaaagcgaattgagacttgttggacaagagaaataacccatcattgtcaatccaattcatttgagatccttgaaaattaggattgattttaccaatacttcgaacactagccaagcaagtttctgataccaggtaaactaaaagccatgagaagattatgtaaaggaagaatttcccagttctcatgactgctccaagaacccaaatcctggttacgttttgggataataagagatcaaaaaacaaaccagatttcaacccttagaaaggatcataaaggaaaaagaagaataggatgtgtgtgtgaacaagagagaatgtttttacacgagttagtctaatgaaaaaatatgactttccccaaataaatctatctaattcaggactctgttttcagatagtacaaaattggaaacatggaaagaaagaccagtcgatatcacaacagttcggctatacttttttttttttttttt

SEQ ID NO: 111666 - DNA, 4648 bp, Cannabis sativa
tatttcagagaaagggaaagtgataatcgttgaatctgtgattgaaaataacaaagagcaaaataatggtatgaagaaagatgagttggagtttaaagatgtgggtttgtttcttgatatggtgatgatggctcataccaacaaaggcaaagagaggaccttggatcaatgggtgtacgttcttcaccaagcaggcttcactcgatacaacgttagatctattaagggtgctatctcttctcttattgaggcttttccaatataatatatgattcggttgttttaataaattattaatctcaatattgtggtcatgttaaatggcttttgtgtaatttcttattttggggataatggtcttcattatctaagttatttggtttaagctcttttgtttattttatatatttttatcaataaagtattctgctatttttatttattaacgactcgcactatgatttttaatttgaagcgttttttcttgtttgttatgttggtgtgcaagaacaataatagacacattattgttcatgttcttgctaggtgtgtcccatcttagctgtggttttgtttccttttgggaggtggatctccttgtgatcaccaggattttaaatcttctttaatgaatttgaggttttccagaaaaaaaaaaacaaataatagacacattattgatggttaagttaagatatgtctattttgtgacaattttttgaaaatgggtgatggatttcaaacggactaaatgtgcaatatcattattaggctaactctataaccaatacatgtctaatatatttaagttatcaatatcaagaatctaaataatccattaattttatataagctagtccctaattttatatgagcagggccggtcctaaggtatatggggcctaaggcaaaattaaattttggaacccctatatatagtttaactattatgaaaatgatagttttagtattatgtaatggtaaaatttttaaaaactcttgagagctccgaacttcaatcccttataactacacattaaatatttttaaacaaaactaaaaagtaaagattgagaattgatcccatgatctcttagttgaaagtaaaatcttttaccactacaccaaataattattgttatattttcttcttatttaataacataattatgatttttacctcctgaactttgacatgtaccaaatgatgtcccctgaaattttaaggtcgttaaaaatgcctcatgaactattgagattgttggatttaaggactcagacctcgacccgttctagaccctaacccaaacccaaaccaggacccccgacccaaacccaaattccaaacttgaagcgagtctcggacccggaccctgacccagacccaaacctgggcccagaccccaaaccccgacccgaatcctagactcggacctaaatctcgcacactagaccctggactcaaacttgaaacattgaacccgtccaagggcctcggtcctagccctaggttttgaatccaagtctagggtctggattggggtccagggttgaggtccgggtccggctccaggtctgggtctagatctggagtccaagttcgggtctggtgtctcgggtcggggtctgggtccgaagtttaggttcggggtctggggttcggtgtccaagtttgggtttgggtgcggctccaggtttgtgtttggatccgagttcgggtccgatgttcggatttggggtcgggtctaggttcgtgccgagatccaggctcggtcgggtacgatataaaataggatcaagtcatggcatggtgtaaaatattgatattttttagtaagaaaaaatctaaaaatagttttaaaaaacttgtgctaagcactattaaatttttaaaatgacaagatactattttctattctctcacttttataaacataattctaaaaactaaaaactaaaaattaaaaccaaagccaaacaacctaagtacttttagagctatttttaaattttaagtatttatttattaacaagaatctaacaaattaactatttataaactaattggtgaaaaaaataactatttttaagtacatataaacaaattttaagtatttattaacaacaataatccaacaaattagctaattttaagtatgtgtggtcataattagtggtttcacactttttctgtgaaagagttggtcttcataataagttcaaatcctccaataaaccaaatagtaaaaaaaaagataacttattaacttctatccttgaattaatagatatttatgatcccaatccaatcaattaacatatttttttgtttttttcttcaatttataataattaataatgcaataaagaccaaatgtaagagcgtagccggcagcttgctctgttgtcaactacagcaaatggcagctgtatgagttttttgttatgtttggcattttcccatatttttatatttctatcctaattaattaatttttcccacgaaaaaataatacaaaaagataataaatttaattgatcaaattaattcacccctgcatgtaatcattctcaactaaccaaccaatttcatataatcccatcttaaaaaagaacgggataataacatcatctacataaaattctagcaaaatgaataaaaataaaaataaaaaaaaaaaaaatatattgaagaaagaagaacaaaaaaaaaggtcatgccttcgtagattattataaacaaatttcaatctcgacgggaggccaagggagcgacctcggccaagggagtggtcaacggagtgggaatgggtgagttcctacaaataggacacgtaggatgctgacgtagccaagggtcaacgcaggtcaaatgaaagagatgaccgcaatcgggcaacaaccggagcaaatcagagtcgttataatcggccaagcatatagagcaactagaatccgacgtagtagacgactggtgatgatttcgaccgttggatcccttaatcgtgtggaccttagtctgattgtacataaccttaggaaagctctccaaaacagcgtcgtctaacccttgctcgacctgatgattatgattgtgattatgatcttgatcaaagtcgtcgctactactatttgtgataaccacgagggctgcggtcctgtttggggacctggataagcgagtccttcgggtgcagaagtaggataacagggttacgattatgattacactcaaaactccaactgagactcctattccgtatctgaacccgcctagatttggcgaaacgtcgtcgtctgggctcaacgggttgttgttcatgatggggtaatcttctgctatatgtgttagctactactctttattattttttattttttttttctccgtttttttatatatacttcttactatttttggggtttaaatgttatgaattgagagaagtgaggaaattaaagaggtaaatattttattacttattttaataatattaacaataacggtgtgatatataaaaaaaaaatgtaaattaaaataattattttatattttgtgaaattgtccgtgtgtccctcgtcgtatataactagttaattactaaattagttatgaatgactttttccgtactaatcataatttgaaaagtagtgaataattgttaacataatcataccattattgttataagtatttggctaatggcatttccttaacgtaatgtagctagctagccactagctactaattaactgctaaattgtaaattgaagatataataacttacctgtcaatgtcatctctaacgaaatggtgtatttttttaacaaacttgccttgtttggtttctttcatatttttatgcacccaacccaaggtcaactcaacatataaatagagtaataaaacccctatatattaataaataagttatagaaaaacgaaaaattctcaaatttatcatcaaaataataacttccataatacccgtcattgatttcactaatttcaaacgttttatatttattattatatggacacatgttatctttaagataaaaacaaaaagcatgaatcacattgcatgtaatgatattccttttccaagtttcatcttctatttcattttttcttttttctttttggtgttgaaatggcgttttagtatttttttttttttaatatttattttcgactgaaattctgcttcactgtatcctccttattatgtcagagttctatatagctagagaaagagataaaaccatgacaaattaaagtaaaatcatttctaatatttatgtttttgattgcaattatatcactccgccgaaaaaaacaaataacttatatatcatcaatataaataaaaataatagtgaaacgaatgcaatcaagtgcaatagaacaaagttgttttagtaagtcagacatttttattattatgtaatacaatatcagaataataagcgttttgcatacggtggatgagttgtttgtgtatgtagtttccgtttttcattttttccccctttaaatgttttttttattaaaaaataaatgataaatctcttttccttatgtgttttacagaaaaaaaaaaaaaaaaaaaaggaaacgatgttagataaattaacaattaaccc

SEQ ID NO: 111667 - DNA, 8415 bp, Cannabis sativa
  modified_base (1996)..(2000): a, c, t, g, unknown or other
tttttgtgaaataaggcaaaatatcggggcgttacaattaatttcttttaacctttactataatatgattattttactttcacactttttcttatatttttttaacattttttctctatcttagaaaaaaattaagagcacttctcttatatatttctctattacataattaataaaaatattattttttggatgttttgtagtatatttggagttaatttatgaattatttgtatattttatcaaggttgatgttttgttatttttttattgatttatagttgtctttatattattttatagttgttttattattattttactattgtttatatagttattttttttttgttattattatgtatattttgtacagttgttgtttagtttatatgcatttttatggtgtatatttttagttattccacaaaatattttattgtatatatgtatttattttattatttttaagtggttttgagaatattattttattcaacagttacttttagttattttttattcatgtgtattttttttatagtgtatatttttagtttgttcttgataatttttttagttttatatgtgttgttttgtagtttagatacatatatttgtttatttttttgacacattttattaaaatacaatgataagattttttattttttttaattgacacaatgtgcactagtagatattaacatattaattatatattatccactatattatatatcccatattttgaccaaattatataccccgtttttttgaccaaattatatacatcattttattatttttattattaatgtattatttaacttttaaaaaataaattatcattctaaccgctactaactcaaaaagagaaagagaaaaaaaatagaaagtatgaagttgtaacaacaaattctatgaaaaaataaataatgtagtattataaaaagataaatcaagctgtcaaaactaagtaaaaaaatcgtatacaaaaacatattaaagtgttgatattgttttggatattgcaattatgccattattttgttattttttattgctttgtaattacctttttgttgtttcataattgttcccatgttgtttgttaagttgatatagagctattttttttattttactaaaatacgatattttttataattttgaaattttaacatatatttttaaaaatttgatacaataaaaatatatagaaaaaagagtgtgacaatataaatttaaaaataacaaaaaataggtatttttataagatggttatattaaatcgtgtcttgtaaacttacgtctatataagtgtttagtaaaattgaacgaaatcttcaaatttaataatttagataaatttttaacagtttaaaaaatttgaaaaacataatttagtttagaaagacaaaaatttgtattaacattttttttcagttaattaatctataataactcatttgaatcttataagtttaaccagccatagtggttggagtatttatatatataaagaatttttccatatatagatgaatattaaataaaaaaaatcaatatatttgtagataaactcggatgtaatgtatccttactattttttttttttttgaaaattactattttatttattaatttatgtcaaacagtacatatacaaaagttaaaactgtcccaactactgacaagatattatataaatttattggacctataatttaatattgataatcatgtaaatattcaaattcctcccctaattatatacacaaccaatattatttgagagcaatacaaaggaaagtatatatatttatccaattaataataattatgtgcaccattcaagacttgatacagtatataataattattaaaccatgttattattattagagaaatgttaaagggcaccagtggtgcctaacaccttcttatgtatcaatatcgctattggtataactaagtatcgggtcccatatannnnnatataatagtttttagggagtattgctagccaatcgcaacgcgacatgtcgcaaaggtgctagacactactggtgcctactgcctaatagcaatgctcttattattattttcaagttagctagcttttaagtgtttctgtccatatattaattttttattttttcattcaataaatgtcaatgtcattttcaattatacatataaatatttatgatatatatatatttaaataaaactgtcgatttagatactagttcatatcaaagtagttaagaaaccattgtgtccactcatgttttttttttcattattctttttttatatatcattattgtctcttttcgatcggtatgtcgtattatattgtattgtattgtatagtattatattaaattgtattttttacaatattttttatgtaaaattgtatgtgatattaacttttatgggtacctaaatatataatattttagtataaattaaaatttaacatagtattacataaaaatataatatattgtccaattcaatataattcaatacaatacgatctaatacaacgtaccaaacgagccataactgtgcaaccaatcaaatgcaaccaaaataatacaagccaaaagccaaacaaaaactagcatcaccaacctccactcctatctattctataacaattttgtgagtacattttgcactacagttttcatctttcttttgtcattttaatttgtccaaaaattataattaatctccttctggggtaattgattaaatcaatctttacctaattaattagttatatatgttttgttaaattcatattgttatacctgatttttgagaaatgaaaaagtcaactctacgattttaaccaagacttacaaaggtaaaataagttaacatgtttgagggtcccatgacatctttaggagactcgttgaaacatcaactaaccatttagtgtacttaagtgcgtccaaattaggatttatgagtacgcgcgagtatttttaccctagagacctcaattcaacaagaaaactaataaggatttgacttatttaggtgtaaaaatgcttgaatttgaacataaagccaaaattgcacaaggatgccactcaacaatgtatgaccaatcactgccacatgaaagatgacaatgctctctctttttttgggagcactactataagaggatgacaatgctctctattcaaaatactgaagaaaacttgtcaaaatgtattcctcaacaccaaagagtacaatacaagtgaaaaaaactattattttatttgtcatatgtgacaaaatttgacagaatgatcaatttacaatattgtgaatagttcaaaaattacttttaacgagctgaaaaattcaatgagtataataatgtataggtcataattcaaggacaaaatcctaaatagaaaaaaaaaaaagtatactattctatatttataatacatgccttttaaaattttcaatataagcaaaaaaaaaaaattattataatatttatgtatatatatttaaaagataatatgattataatagactaatatttttgagccccatcatcatcttttaaaaatggttaagggccagtttagcacagttgtgctgtgagaaaaaacagttgtagctgtgctgtcagaaaaagcagctgtagttgtgctgtgagaaaaaactactgagtgtttggtaaatataattttaaaacagctatgagttgaaaaagtatataagtgtttggtaaactaaatgattaaatagctgttaaatatataattactaaaataggtataggtatgacatttgttatataatttatttaaataattttatacatattaatatatttataaaaatattatttattatattataaattataatattttttttcttataatatttaattcttttaaatatttatataataaaataataaattagacttttactactactactaataataataataagatgattgttgagtaattttaataaggatgagattggaagaatgtaagaagccctaaaattaattggtaaatgggaaattttaaaattagatgaggacaattaggtcaagtgaaaaattcattaaactaaaattgtagcttcccttaaaagctaaaatctcaaagttagggtggccaacttttcttaaaagctataaatttcacttaaatttttgaaaaaactattttttaaattttaccaaatacatattaactcataactttttccaaaagtgattttagctttttaaaaagctctccaaaacggggcctaaaaataattcatgcgtacaattttaatcaaaatatttttgttcaagatatttttttattaattttcaattaaaacacgaggatcaaaagaataatatttaaagtaaatgttctgaacttgtattaagtaaaaataaagggtcaaaaataatattatctaaaaaatacttataaaattaaatataataatttattaggtagatatcactcttaataatttaatattggaaaaaatagactaattaaatatcaaatattatcccacaaacttatttgtaaaattaattaatacactttgagaaaaagactaattaaatgtgcaaacatcacacttctattacttctaataaacttctaacaaaatatctattttttgtgggaccataaaagataacttattatgatttatataaataactttgaataatttgtacttattatgtgagttaaataataataataatttgtatgtatatagtacaattaatgtatcatttttattatacatggcggctagtgagtggtgacccttaggactattgacttaatttcctatcactatcgtgcatgtatattaataccaatttttattattattaattttttatgagcaatgtcatacttacaatggatgtgtaatattgttatgaaatacgctattatatattttaatttaataattattataaaatatattttttattatttttttaaagagaaattttcattcaattatcaaaggagtcaaattttataaatcaactaaaaattaagccgcacaaattttattaggaaatgactcaactgtcaaccaattatattgagaaaaataagctagctcaaagctcacgcaagagctactaaagggagatactccgcaaaagtatcaaaataccaacactactaagaacataaaatgcaaaacaccgacaaaactaaaaataactaaaaagtacaaataaccaaacagaaaataataacaaaacaatcccgtaaaccctagcattaagaaggagcagggccgaccctgggcataggcgggctaggcctgtgcctagggcccacctagtctaggagcccaaaaataactttccctcttaaaattacacaatttaaattgctgattttgaaaaatattatttttttctaaataagggcccaaaaataattttttctcttatgacccactaaatttcaggaccagtcctgagaaggagccactgaggcaacccaaaacatgctgacaaagagcatagaaacgatgccaacttctaataagaatagtctgcactctgaagttattatagaatattattaatcattcataacactttaattatctcatatcctgtaataatgtttaatttagagcatcattattaggtactggtagtgcctatttagaagtagtgatatataattagttagtaatattttctaaaaattattatcataagttatatgagactcgatacttaattgtgccgataacgatatgacaccgagaaatacactaagcactcttagtaccttttaatatttctctataatttattactactaatatttaataacaatgttattttttatatttatgtaaagtatatttaatatataactttatgtgcatgcatgcatgtgtgttttcatgttaatatacacaatattgatttattattagtaatgaatataattaatgagaatttggtcatgttgaacaagccaaaaactatatgggaaaccctaatggtcccgtgagacatttaatgccatttaacatttgcattggacctttcaacttctaacattaaatgttatttttgtttctattttatttttgtatcataaattccacgcgtctcataaatgtttacaggtttattttagttgaaatctttcttaattatgatgttgaccaataaatgatattattattattattattattattaataatcaaaaccctattcaatttcaaagtgcttctatcttctctactactactcctatgtacataagtcttaataatataattattgctttaggactttggtagttcgaggctataattaattgactacatcatcatcatcatcatctatatatatatatctatgctttttcattttctttgtatgtaagtaaaaccttaattaactaatgtataaattacaataaattattatttaataattacttacatagttgatctgtcccattcatctttgatagattaattaaattatattcttaataattattaaaagttggtttatatcattaatgcattaaatatgtataattaattaatgattaagcaaacccaaatcgttttcaatggttatataataatctgataattgttggaggttggttaagtatataaaataaaaagaagtataataaactcaactcctatacattaaggtgatatagtacttacataattaaggaccaatttggcataattttttttaaaaattaaaattactttttgaaaacaattgtgctataaatgtgtttaataaaactaaaattgatacaacttttttcagaaaaaaaaaaaaaagaaagatattttttgataaaattgagttttacactaaaataaatttttttatattaaaatatatctacttatttattatatattactaaaaataaaatatttgaaaggaactaatattatcataacataaataatattttaatttattttattttttttgaaaaatattttatatttataagatattttttagtttcatacttttttatgttaataaactacatgaatttagtgttgatttttcttttttacatgtgatagaataaagtatttttaaattattatttatcaaatcaatataaatatatattccgtaaaaaaatacaaaatagaaatttaaaaaataaattttttttgtataatataaaatttagtgattataataaataatattataccattattatctttataaataaaatcttgaaaaggatttggtaaactatatattcagatgtttgacatgcaaatagataaaagttgaacattagacccctgcgagtttattacaacctttaatttttctcgagtagaagtgggaggacattatcatagattttgtgattaagttacctagaaccacaggtttgtatggttcgatctaggtaatattggattgtttcactaagtcagcgtacttcctaccagtgaaaacaacttatacagtggatcaatatacaagattatatgtgaaggatatagatcatcttcatgaggctctgaaatccattgtattagatagaaatcctaaattcactttcaagtttttggagagtctttagaaaaccatgggtacaaagctgaaagttcagtaaaacttttcacccttagatagatggtcatttcgagagaaaaattcagatattggaggatatgttacgggcctatgtaatggattttgagggttcatggagtaaatatttatcgttgatagatttctcttacaaaatcacttgtcaaactacagtagcgatgacttcctatgagatgttgtatgacagagagtgtcattctccgattcactgggatgaaaccgggaaaagtaagtatttactgttgatagatttctcttacaaaaacacttgtaaaactacaatagggatgactttctattagatattgtatgacagagagtgtcgttctccgattcattggacgaggctcgcaagccaactgcacccaatgcagcaccaagtgcactcttgcacataatctcttcgcaatgtactcactattggccctccggccctactgcacacccaaaacttcatgcaaaaggtccctctgacccactgcatacgtgctcttctgagcttctttcatgtggttaatgatctatcaatcacctaaaataacgaatttgccttctggctcttgctcgtgtcggctctctaacactgtgccacaagcccatctcccaaaatcaactctgcatcttttgacgactcgctacatttttaacaacttgataacatgaagtcttactcgtaagacttgaagtcatcccaattcgttatctccctgtgacagtcagtagtc

SEQ ID NO: 111668 - DNA, 6636 bp, Cannabis sativa
tatttatgctgacgtggcaatcggtatttgtgcaaataattttcttaaaggtatttttataaataaaatcaattttaggtataatattgaaaagaccccttattattttatgtatgtataaattattataaactaattaaaaaacaaaactcaacaattgaccatattaaaaatgtagatagacaatattattgacattttttcttggcatgccgaaatgtattattaattattatcatttatcatttaaaatgaacttatattgttacaaagtattactgtatctaacactaacactttagatgaagtagcatctatttttttttttttaaataatgatatatgcacacataaatttaaaatatatttatgttgtaaataattttaatcaattcagttttttaaagatcagtctcacttgttaaaaataatttgtcacaaaaatgtgtatcaaatttatgtatagacatcattattttttatttttatttttactatttcagaataacgcgcttaaatacaagactgaaagctaaaaaaataaaggaaaattactgtgtataagttttttttaaaggaaattctccttttacggctttaattattattttttttatttttatactttattatttataattttacattaaatttatattttttaatttatttttacgataatatcttttttttcacattttttgtcgtccttttttcttcctcctccccgttactctccatcgtggaaattgaagcttgattttttccaaaatcaaaattgaacttgcagcacatatcacaactctaaaccacgatcaaaccatatcacaatcttagcccctttcttcctcctcctcagaattattccatcctccctctgtgattgtttagccaccacgtgaagcttccattgatttccacaaaatgaactgaagtagcaatcatatcgcaaccctaaattaccataaaaccatatcacaatctcaaccatgcccaaattgtaactaaatcgtgagatcacaacgtgaagcttccattgatcttcataatgaaactaaagtcgcaaccaatattaacttaaatcaccatcaaactatattggaatctcttcactatgtccagccgtaatttaaatcgcaaccctaattaccatcaaaccataactcaatctcagttaaacttaagctgcaacccaaattacaacccaaattgcaacatttcttcttctttcctctaatcactctttgattgatcaccgtaaatatgtaaaaaaaaatcttatataacattgattcacttaattagataccgttattggtgtcccataatatattaaatcaatccaagcataccaactcaactaactaattttcttaaatattattaactatgtagacaattttttttctttaagtactctcaaattaattgatgtcatatattttttttttgacgtgaattgatatgttatatttaaattaatttaatacactatgatatactattttttaaccgaaaatcttaattcgtatataacatacaagcccttcggacttacctaaattaataaaaatatatagacgagtacaaaaaatatatatttatttataaaactattatataattatatattacattaatcatataatctaacctaactaaaaatactccgatcatttccaaaagtttgtgtgggaattaaggacaagtactcagacgaggttgtggctgaaaaatcgaagaagtgatcggatatagtatttatggaaaaagaagacaagtgatgatcctcggtcttcactctcagcctttgatcttcttgttgatcaagaatattatgatgatgatgatgagaataggatgataatgaagtatctgatccaactccaactccattgatattattattctccatgtaacgctcagcatcggagtttataccagtaagttcttgaaccaaagctctaaactctgaagcacttgttttgaccttcataggactcgatatgtataccactttcactccttttttggtgttcttcttcatcatatctttctgggttttcattattaattaattaaactcactgatcgcaccacatgcatgcaaaccacctgtttgtggaaatgccttatctgctgtttatatttatatatataaaaaaatcttgataacagatatttcaaagaaggaaaataagtagaggaaaagggaaggtaattggaaactacaataatattatcatatgtatttatatgtaaatatagaagtttctagcttggtggggttatatattcttggatgacccgtaagtaaattagttagaaaatgattatttccgcatgagtactacctgtttgaatttgggatgaaagtagttaagatgcatgaggttttattttaaaattaattcgcaatagaaagagtagtttattcattttatatatgataatttagtgagattaactctaatacactctcctcacgtttggacctagaaagtgtaggtataacaaacgacctttaagagactacatgatcgaacgtgacatttgaaagaatcttacaaggctaaatatcaagaaataagatgtacacgtcgaaaaatttgtaaattttgaaacaagtctagatagcagaagtttgactcatatctttttggactggtggtattttggactcacaacggatcacaaatagctcttttaacgactcacctttttggactgataccatgttaaaatttgggaagaaagtggctaaggtgcatgagatttcatctcaaaatcaattgacaataggaaggaggagtagctcattcatcttatatatgacaatttatttttacacattagcaatatgaaactaactctaaaagtaatatttatgattagttaacgttattttataaaatttattacattaaattatatcgctattagtataattaaatattaatttttatataatttaatataatttcttataaaatattaataactaattataaaatatcatctaattagccaaataatcatgctgaattatgttagacatccctatacttaattggtgccttttagcattttaaagtatttaatcaaaagaaaaaaaaaagttgtgagaaagtggtttttggattttagtttgaggataagagtaggaataagaaagagatgtaaagaccaaaataaaaggactggaagctatcttaattaattataagccttacgtttgcgcagcctcctcctatgacccaaaaaattattattgatgtttctttttctagtcaacacttcacacgtggcctctttttatttgttattggagatacatggttcctttttggcgggttttaatgtacttattataacacaactactatcctcaattttctcttttcttttttgacaagaaaaatatttagtagaatctttatttagtatctattttaattaatttatttttttttaacgatcgtttaattacatgaagttgcttgtacatttttaaatttttttaaatatataattaataatattaaaaataaaatttaaatattttatacgtgtagtaagtatgtttgaattttattttcgacatataaactatttagaattttttaaaatttataagtggttcaaaataactatatatttgtaggtatctcctcctaggtacttctttgcagggacctccttacagtggaaggtcttcggaggtacctcctcacaggggaggcattcgtagggtacctcctcgcaaggggtactttagcctctcttttctaactcttgatgagtgacgaaggatttttttcacacaaattctcccgttaacaaatttatatagttttggaaatttttatagtacatcttcttaaaagagtgttctggaagaccttctatctatttcgacatctagatttttattttagtcaaatgttttttcatgatcgtgtatgttgtacctatttaagaacaatacatgtaaatttttaaataaatttgaatagtttacagtgctaaaaataaagttcaaatcaaacagttgcataccacgtgtataagaaaaaaaagttgcgcatgtaacaaaatattcgaatcttattttcagcattataaattatttaaaaattttaaaaaaatttcaggtgatcctatacaacatacaaaattataaaaaaaaaaaaaattagactaaaatttttttaaatgtcaaaacagataaaaaaatctatcgaaatatttatttaatgtttaccatataatttttttaaataataaataaagcattaattgatctaatattgtgatcaaaataaattagacacgaaaacaacatacataatatatacgtaatattacattaattttagctttatatattaaaaaaaatattttgtctaatattaatttatagtattattatatataatattattatttgtagtatataaataaaaaaaatgatgtaatcattatgtagaaggacacgtaatcatgtatacgactattattgtaattaaagtttcataataatttataactaatttattagtcaagagaaattactatgtaataattattaaaaacaaaatttattaggttcgtatttgccaaactttgacttagacatgaagctagctatagagctacacacaccaaagttctagatacaattttttttatttttttttattatttttttattttttttttcggagtagaaaattaatgatgggcgttttttctctccgtacactcaggtttttttgaatattctttcgtacagtagggtttccgtacatttgtgattaccctattcctgacccccctgtggtcttgggtctcctgtaaccctgtatcttctgtatactgttctttcacttcgtttttctgttctcgcgtcttggtgctttgaggttgtgactgtgagatggctgataaaggcaagtgtatcatgggggaggtgagccgttctgaggttgaggctccccgggaaaacaaaggaaaagaggtgatggaagacccacatcctgctggagccttggactctatgggggcgatgttggcatcggggttcaagaaaatgtccatttccctcgaggccaatgcggagcttggacaagatgtggtggaacgttcggtggtggttaaaatggtgtcgagaagacggatttttcttgggttgctccggtcggttcttgctagcaaatggaggctggccaggggatggaagttggaggaagtggaaccaaatattttcatcatgcgtttttcaaaaagacatgaggcggagatggcggtgctgaacgctccgtggtgtatttgtgatggttttatggtggtaaaggccatgccggctgatggtctatggaggtctgctgatttatccacaactccgatttgggtcagagtctatgacaatcccccccagattttggacgaggaaaaatgcgcttgctgttgctgggcgtataggaaagaatgctatcattgagaggatgtggaagaatgggtttcctgctcatgagtatattcgaatgagggttaacgtgcagttgaaggttcctctactggtggggctgttcttgccgatggaggaaggcgtgagcctttggtgctattttaaatatgagaacttgccgatagtgtgctataagtgcggtattattgggcatgaccagaagatgtgccgtagggagagaagaatgatcactaatgactttgatgtcacggtgccgatgtatggggcatggatgaggcttgggtctagagtgatggattgtttctcggactacgccccatatgaaagagaacgtatggaaagagaggttgctgatgctcaaaaccaggaggaggttcgtcgaaatgccttgaaccaacaggggtttgaaccggcccttcttgggatagaaattcacagggaggcgttgttggaagccaatggtgaaagctcggggggagttgagccacctatgattacggcggaggaagtggctccggataggggggcaatctcgtctaatgcaaaaaatagtacagtccctgtgaaggacgatggtagtggcctcactacgttgcatggcaatgatagtactggtggtactatgggagctgacgtgggggatggatcgaatgcacaggtggagccagctgttgcccagaagacaaaggagcctgaactcaatatgtaggctgaaggtgatgggcctaagaaggaattggaggataaagttggtcatttggccatgatttttaaaggggctttcgacccatcatttaaggaaggcccggttagggcaaggcctaggaacaagaagggcccaaagtatttaattaaatcttctgaaggcacgtgtggtgtaggaaagaagaggcggatttgtgaattacagtatgggggtctcaatttcaatggtatcgcaggggaggggtcctcgaactctggttgcaaaaaaatcaaggatgtgggagtgtctaatggggacggtaaattggataataaggttcatggcgatggttatttggataccaatgttttgtcgtcaatggccatcacgcaggctgagaatgaggaggggaggacggtgttggaaattattttatcagaatcttagatctactcacaag

SEQ ID NO: 111669 - DNA, 1221 bp, Cannabis sativa
  modified_base (992)..(999): a, c, t, g, unknown or other
ttctctagctttcttgtaatcttgatgaaatacttttatttgtattttgagtattttgattgtaatcctcctattctctcttataatgagaattttccaacaactgcaatatggattgatttgttcttgaaattggttttgattttgaggatattgtgcaatgggttttagattgggatctagggttacaaattgggtgttaattttaggggaaatgtgtgacgtggggttgcaatatagatttagatgggcaagaaaagatggagaagcgattcagatgaaatagaaggttacataagaaaaaatcgatggtatctcagatgaaaaagaagattaaaggaaaaaaaaaccaaaagaactattgttacgtaatatgaagaaacaatgatgatgatctacaatgtgaatcaaccgatagagaagaaagaaaactctatgaaaaagaaacgtaggtctctgagaatgatggatttgagagggaatatgagaatggaaagtttttttctttgataaatgggagaatgaaaactgactgagaaccatgtaaaaataaaaaataaaaataaaataatgtaaaagtaagtatatgaaaaaaaataaaaaacttaaattaaaaaaaaaaaaagtacaactaaatgtataaaaagtgatttcccaaaaatttatttattaaaagttaagtgggatcatgtgcctcacatgactccactcccctccaccccaccttttgcatgaggtgggacatttagtcccttattgcttaatggaaaattataaatttgttcgttcttaactcacggggtttagtcactaaactaaaatgatcgtccgacattgaaggcttggtcccgaactcccattttagtagaatgtccaaatatgttgtgtacttgttttccataattagtaatgaaatgttttatgtattaaaatacaataacggctttattgacatgatatataattttattagcatcctatatatttttatnnnnnnnngttgttattatatatatatatttctattgtaaggtgtacattttttgttatattgtgtataaattttattatatagtatatcattttattttagattatgcatatttagtttttattttattatatataaaggtgatataattctattaatatggtatatacaattttttaataatattatattattttatttttattgtaagtatatatattttgttgtat
